United States Patent Application Publication US 2018/0126003 A1 - sequence listing, part 88

SEQ ID NO: 159688 - DNA, 5891 bp, Artificial Sequence
  derived and/or modified sequence
acgttctgcgagcgctaaggggatggcgggagtgcatgatttggagcgggcggtgagaaaagcaagctcccgccgcctctccgttttggcaacccggctgacggtcgtttcggcttctggggccagccgtcggtctgggcgagggacatagatccggattcgcatcctgactggccaaccaacgctggccgaggtgaccactctcctcggcatccgcacctgccctccaaggcgtcagagaggccggacccttgggtgctagggctcgtgagcgccggggccaagtttccgagtgccgctctcagcagcgcaccaaccggaagtgatcgtgttgtggcggaaggaggagctttctgggagtagccggtgctgagagaaccgtggctggcaaagatgattcaggcgattctggttttcaacaaccatgggaagccacggctagtccgcttctaccagcgtttcccagaagaaattcaacagcagattgttcgagagactttccatctagtcctcaagcgggatgacaacatctgtaacttcttggagggtggaagtttgattggtggctctgactacaaactgatctaccggcactatgctaccctctactttgtattttgtgtggattcctcagagagtgaacttggaatcttggacctcatccaggtttttgtggaaactctggataagtgtttcgaaaatgtgtgtgaattggatttgatcttccatatggataaggtgcactacatcctccaggaggtggtgatgggtgggatggtgttggaaacaaacatgaatgaaatcgtggctcagattgaggctcaaaacaggctggagaaatccgagggtggcctttcagcagcccctgcgcgggctgtgtctgctgtgaaaaacatcaacctgccagagattcctcggaacatcaacattggcgatctcaacatcaaagttcccaacctgtcccagtttgtctgaggatcaagtattggcctgaaatagagtccttaagacaagcaaagacaagcaaggcaagcacgtctggaaacagaacccattttgagccttagaagagtcaagcctcaggacctggaaactttgtgtctggggaagactgtttggcatggaatagggaagggattcctattgacactgctcgggtgcacccagttctcacatgtgcagtcatgccgttctctgatgcatacggccactgcagatgtgaggggccctgccttcctcagtagggagtcaacatgcccaagtcatttgcacctttacctctcacatggatgctcccaagggttagggactgcattgagcaggcccacctgcttcccagaacctcctcactagggctgagcaccttctctgagtagagtcttcatccttagcaccacagacttctgaggtcctgtgccctttacttgctggtgaggtgtcataggtagaaaagggctggcccttcagatctgggggtgtggtgagtggcaagtaagggcagaattttaggagaaccagagtcacccgctggctctactgagattgttacacccagaatccttttgtgtttttttgtggttttttttttttgaggtggagtcttgctctgtcacccaggctggagtgctgtggtgcaatctcggctcactgcaacctctgcttcccgggttcaagcatttctcctgtctcagcctccccagtagctgggattacaggcacccaccaccatgcccagctaattgttgtatgtttagtagagacagggtttcaccatgttggccaggctgggctcgaactcctggacctcaagtgatctacccgccttggcctcccaaagtgctggcattacaggtgtgagccaccgtgcccggccaccagaatcctttggtatagccaagccttttggttaccgcctcatgaagaatatgcttcccgcattgtcctagtcccagttgtattctcacaggtgttatgtgcaggacacaatccaaatcataaacctggctcatgcccaacacatttctgctaatagggagagggacccaccacacacccacacatgccagaggtccctcctcacagaggagagggcctgtgtctgtagaaggttaaagctgacaacatgtgaaacatcccagaattatgactcttcccaagtttaaaatacattctcctcatgagagcagaaggtttgttgctgtgttgtgaatgatgagctgcctccatagggaacccactgccacctgggccagcttctggagcatgagaacctgagccagggtcacccttgtggggcctggacatgacgcacgctggctgcgactaggagcagggctgcctcttctccctccccaaggtctgcttgtgggcacgctctgttccctcaggtgccattctcccagggcttaggcgcccataaatgttctttctgtggtggagtagggcctcctgcttccatactgtcgcatgggctagatctcaggtgtggtgttgagccaccttaagatgagggctgcttcgcagtaaagtttccagcctgggcccctcttgggccttctggctggggaccctcagcctcctgatgctgttgcagggcaggtctgagagggtgcccagcagcacccggtgtcagggccaccttgttttccatttttgaacagcgctccctgtggtttgtgcccactgctcaatacagcctccgatcctcactcttgaaagctccatgataagcacagagatgggcagtgtgggtcagaaggtgggccgcttcctgtggaagagggaagtgtaggtgaatagatatcaaaacccctgatgtcattcttttgaggggttggattttcttttttctggcagacatttcagtacattcacatttctctcacatttgctgaatgtgagatcagaataaaggagatcggcgtttatttcgtaccttctgtaagttggcatgagcaagatcattcaactgtccttacaacaggcattcttatccccattttgcagatgacgaaagtagacccagctccagtaaccttcccttagattacacggggctgagatctgagactgttcacttgactccactgtccttttctttcctcgctgcttaagatggcttctcccaatgttatcatcttcttttttatagataaggaaactgagcctcagagagtctgacttctcacaaaccgtggtctaaataggcttgattttctaaggtggccagtgatcatgtcatagagtataagagccaaagagtcgtctgtgtccctccatttaactgatgttgaagccgaagcccaaggtggtaaatgttatgttgagggtcacaaatccagagccacatccctcttcttgagttcgtttgttacgtggtttaatgcattactgcaggacagcccttatgctagatttcctgggatagcctagattttgaatgttttgcctgccagaaaccaatggttttaaaaaatcattgagtggtcctacagattcaaagcgagcatccaaacatccctcacatggcctcttacaatgacataaaactgaagcccacttttttatttggaaaactcaatccctttggacaagccacaataatttttcattaactacttgaggttgcctgcaaattcagctagctttccagcctgctatcagcaaagccataaacatcttttttaaaaataggttaaggttggccaggtgcggtggctcacgcctgtaatcccagcactttgggaggccgaggcgggcagatcacgaggtcaggagatcgagaccatcctagctaacacagtgaaaacccatctctactaaaaatacaaaaaattggccagccgtggtagtggacacctgtagtcccagctactcaggaggctgcggcaggagaatggcatgaacccgggaggcagagcttgcagtgagccaagatcgcaccactacactccagcctgggcaacacagcaagactccgtctcaaaaaaaaaaaaaaaaaaaataggttaaggttgtatagaatactaggctttcctttttttgtgagatgggggtctcacactgtggctcaggctggagtgcagtggtgtgatcatggctcactgcagcctcgaagccccggggtcaagtgatcctctcacctcagcctcctaggtagctggaaccacaggcacgcaaccaccactcctggctagttttatttttttagtagaataaggtctcactatgttgcacaggctggtctctaactccttacctcaagccatcctcccgccttggcctcccaaacatgttgggattacaggtgtgagccactggacctggccaaatactgggttttcagtgctcactgccactaataaaaatctgaaattctttcattatgcaatttctaagtgcctggtgagggccaagctcagttctaggctctgaagattaagagagaaacaaggctctgtctgctcctgttgtctctgtgagcatctttgacagagtgctcagattgttgggatatagtgcatcggactggcagcctgaatttgtggagaccgcagtcagtaactttgtgatatatggaatatttagaggacagtaacccatttccctacgccctacctgatcacatcgtgccctgctgggccataccccaaacagcccaccttcctctaggcctggccatggccctgtgcctgccacattgaggattaagtcaggatatcttgagccctctcaaatccctgtttattcaggcctctgccacatatagagccagccttctgtccccaccacttccactaccatggagcccacttagtaaaacgctctctgggcccagcttcgccagaaaagacaccaggggagcaaggctcaaaccaggggcagctaaatctgatcttgtggaccagtctctagtaagggctttcagcgtggctgtctgtccattgctttccaaataggatgcagcaatgattggtacatgggtattaagatcggtagtaggggctagtccaagtttagcaatagccaaactggagagcctctgaagtatgagagtcccagagggatttgtcagctcctggcagacatcctgattttcaccttcctgagtctaccctaccccagagggtgccagtctcactgtggtgatggttagcccagtgtgtgctgcactcacacaccagcacggggtccgtgcttgcaggctggtggatgctgtcctctgggttaagactgtctcccttctcgggagcactggagggttctccatctgcgtgtttcagtggaagttggcagatacgaaaacaggcccctatagggaagcagttccatgaaaatgattaattctttccaaaagacttaaaattttttcctatttcaattttcctttcaaaaaaggaaatacattcatgtagttcaaaacttaagaaaacaaaagtctgttcagcaaaagactcccactccggttccccaaacgctgagccccaccccccatccctggtagcaagaagtgtttccaattttaaggttaagaaacaaagtccctggatttgtgttagggatgtcttcctgagagtgggttgtgttccgtttgaccctggcggttgacctcggcccactaggatcatgccgccctctccagggaggagggcctccccatcaccctgtacagtggcaccccagccctggcactgcccgcccttgctcagcgtacctttcccatggcactctgacgtactggatgtttggtttctgaagttactggctgtttaccctgccgggatgtaagcccctccagggcaggggcttgtctcgtgttcagtgctgcatcccagctgctgggcacggtacctggtccatggcgttcaataaataactgttggatgagtgaa

SEQ ID NO: 159689 - DNA, 1262 bp, Artificial Sequence
  derived and/or modified sequence
ggtgctgagagaaccgtggctggcaaagatgattcaggcgattctggttttcaacaaccatgggaagccacggctagtccgcttctaccagcgtttcccagaagaaattcaacagcagattgttcgagagactttccatctagtcctcaagcgggatgacaacatctgtaacttcttggagggtggaagtttgattggtggctctgactacaaactgatctaccggcactatgctaccctctactttgtattttgtgtggattcctcagagagtgaacttggaatcttggacctcatccagcttaaaaaaagagagaggaagaaaagccagtgcaacaccctacaaactggaacactagctctttgggaacaaggacctgacatcagaacaagaaggctataagttcccaaaccttaaaagtttttgtggaaactctggataagtgtttcgaaaatgtgtgtgaattggatttgatcttccatatggataaggtgcactacatcctccaggaggtggtgatgggtgggatggtgttggaaacaaacatgaatgaaatcgtggctcagattgaggctcaaaacaggctggagaaatccgagggtggcctttcagcagcccctgcgcgggctgtgtctgctgtgaaaaacatcaacctgccagagattcctcggaacatcaacattggcgatctcaacatcaaagttcccaacctgtcccagtttgtctgaggatcaagtattggcctgaaatagagtccttaagacaagcaaagacaagcaaggcaagcacgtctggaaacagaacccattttgagccttagaagagtcaagcctcaggacctggaaactttgtgtctggggaagactgtttggcatggaatagggaagggattcctattgacactgctcgggtgcacccagttctcacatgtgcagtcatgccgttctctgatgcatacggccactgcagatgtgaggggccctgccttcctcagtagggagtcaacatgcccaagtcatttgcacctttacctctcacatggatgctcccaagggttagggactgcattgagcaggcccacctgcttcccagaacctcctcactagggctgagcaccttctctgagtagagtcttcatccttagcaccacagacttctgaggtcctgtgccctttacttgctggtgaggtgtcataggtagaaaagggctggcccttcagatctgggggtgtggtgagtggcaagtaagggcagaatttta

SEQ ID NO: 159690 - DNA, 573 bp, Artificial Sequence
  derived and/or modified sequence
ggtgctgagagaaccgtggctggcaaagatgattcaggcgattctggttttcaacaaccatgggaagccacggctagtccgcttctaccagcgtttcccagaagaaattcaacagcagattgttcgagagactttccatctagtcctcaagcgggatgacaacatctgtaacttcttggagggtggaagtttgattggtggctctgactacaaactgatctaccggcactatgctaccctctactttgtattttgtgtggattcctcagagagtgaacttggaatcttggacctcatccagcttaaaaaaagagagaggaagaaaagccagtgcaacaccctacaaactggaacactagctctttgggaacaaggacctgacatcagaacaagaaggctataagttcccaaaccttaaaagtttttgtggaaactctggataagtgtttcgaaaatgtgtgtgaattggatttgatcttccatatggataagtgcaattcctgggtcataggtgaggcctctagaaggaagaaacaggcctctagaaggaagcacaaaagcaccagcagggct

SEQ ID NO: 159691 - DNA, 582 bp, Artificial Sequence
  derived and/or modified sequence
atgatccaggccatcctggtgttcaacaaccacggcaagccccggctggtgcgcttctaccagcgcttccctgaggagatccagcagcagatcgtgcgggagaccttccacctggtgctgaagagagatgacaacatctgcaacttcctggagggcggcagcctcatcggcggcagtgactacaagctgatctaccgccactacgccaccctgtactttgtgttctgtgtggacagcagcgagagcgagctgggcatcctggacctgatccaggtgtttgtggagaccctggacaagtgctttgaaaatgtgtgtgagctggacctgatcttccacatggacaaggtgcactacatcctgcaggaggtggtgatgggcggcatggtgctggagaccaacatgaatgaaattgtggcccagatcgaggcccagaaccggctggagaagtctgagggcggcctgtctgctgccccagcccgggctgtgtctgctgtgaagaacatcaacctgcctgagatccccaggaacatcaacattggagacctgaacatcaaggtgcccaacctgagccagtttgtgtag

SEQ ID NO: 159692 - DNA, 375 bp, Artificial Sequence
  derived and/or modified sequence
atgatccaggccatcctggtgttcaacaaccacggcaagccccggctggtgcgcttctaccagcgcttccctgaggagatccagcagcagatcgtgcgggagaccttccacctggtgctgaagagagatgacaacatctgcaacttcctggagggcggcagcctcatcggcggcagtgactacaagctgatctaccgccactacgccaccctgtactttgtgttctgtgtggacagcagcgagagcgagctgggcatcctggacctgatccagctgaagaagcgggagaggaagaagagccagtgcaacaccctgcagacaggcaccctggccctgtgggagcagggccctgacatccgcacccggcggctgtag

SEQ ID NO: 159693 - DNA, 582 bp, Artificial Sequence
  derived and/or modified sequence
atgatccaggccatcctggtgttcaacaaccacggcaagccccggctggtgcggttctaccagcgcttccctgaggaaatccagcagcagattgtcagagagactttccacctcgttttgaagagggacgacaacatatgtaactttctggagggaggctcgttgattggagggagtgactataaactcatataccgtcattatgccacattgtattttgtattttgtgtggactcttcagagagcgagctgggcatactcgacctcatccaggtctttgtggagacccttgacaagtgctttgaaaacgtgtgtgagctggacctcatattccacatggataaggtgcactacatcttacaggaggtagtcatggggggaatggtgctagagaccaacatgaacgaaatcgtggcacagattgaggcccagaaccgcttggaaaagagcgaaggtggactttctgccgcccctgcccgtgcagtgtctgctgtcaagaacatcaacctgcctgagattcccaggaacataaatattggagacctgaacatcaaggtgccgaacctgagtcagttcgtctag

SEQ ID NO: 159694 - DNA, 375 bp, Artificial Sequence
  derived and/or modified sequence
atgatccaggccatcctggtgttcaacaaccacggcaagccccggttagtgagattttaccagcgtttcccggaagagattcagcaacagatcgtgcgggagacctttcacctcgtgttgaagagagatgacaacatctgcaactttttagaaggcgggagcctgatcggaggcagtgattataagttgatataccgacactatgcaacgctgtacttcgtgttctgcgtcgatagtagcgaatccgagctgggtatcctggacctaattcagctgaagaagcgcgagcgcaaaaagagtcaatgtaatacgttacaaacaggaacactcgccctttgggagcaggggcctgacatccggactaggcggctgtag

SEQ ID NO: 159695 - DNA, 375 bp, Artificial Sequence
  derived and/or modified sequence
atgatccaggccatcctggtgttcaacaaccacggcaagccccggctggtcagattttaccagcgctttccagaagaaattcaacaacagattgtgcgtgagaccttccatcttgtgctcaagagagatgataatatttgcaacttcctggaaggaggctcgttgatcggtgggtccgactataaattgatttacaggcattacgctacactgtacttcgtgttttgcgtggacagcagcgaatcagagttggggattctcgatctcatccaactgaagaagcgggagaggaagaaatcgcagtgtaataccctgcagacggggaccctggccctatgggagcagggacccgatattcgcacaaggaggctgtag

SEQ ID NO: 159696 - DNA, 582 bp, Artificial Sequence
  derived and/or modified sequence
atgatacaggccatcttagtattcaataatcatggcaaaccacgcctcgtgcggttctaccaacggtttccagaagaaattcaacagcagatcgttagggaaacatttcatctagttttgaaacgggacgacaatatatgcaattttctggaaggcggatcacttatcgggggaagtgattataaattgatttaccgccactatgcaaccttatactttgttttttgcgtggattcttcagagtccgagctgggcattcttgatttgattcaggtgttcgtggaaactctggacaagtgctttgagaatgtgtgtgaattggatctgattttccacatggataaagttcattacattcttcaggaggtggttatgggcggtatggtgctggagactaatatgaatgagattgtggcgcagatcgaagcacagaacagactggaaaagtctgaaggaggactttctgctgcccctgctcgtgcagtttccgccgtgaaaaacatcaacctgccagagatacctagaaatatcaatattggagacctcaatatcaaagtaccaaacctcagccagttcgtatag

SEQ ID NO: 159697 - DNA, 375 bp, Artificial Sequence
  derived and/or modified sequence
atgattcaggcaatactggttttcaataatcacgggaaacccagacttgtgaggttttatcagagattccctgaggaaatacagcagcagattgtgagggagacttttcatctggtcctgaagcgcgatgacaacatatgtaacttcctggaaggagggagtttaatcggcggaagtgactataaactgatctaccggcactacgccactctctactttgtgttttgtgtcgatagctctgagtccgaactcggcattctcgatctgatccaactaaagaaacgggaacgaaagaagagtcagtgcaacactctgcagaccggaaccctggcgctctgggagcaaggcccagacatacggacgcgcaggctgtag

SEQ ID NO: 159698 - DNA, 375 bp, Artificial Sequence
  derived and/or modified sequence
atgatccaagccatcttagtgtttaacaaccacgggaagccacgccttgtgcggttctatcagcgatttcctgaggagattcagcagcagatcgtccgcgaaacgttccacctcgtactgaaacgcgacgataacatctgtaacttcctcgagggcggaagcctgattgggggtagcgactacaaactcatttatagacattacgccaccctgtacttcgttttctgcgttgactcttccgaaagcgaactgggcatccttgacctgatccaattgaagaagcgggagaggaaaaagagccaatgtaatactctgcagacagggaccctggctctgtgggagcaggggccagatatcaggacccgccgtctgtag

SEQ ID NO: 159699 - protein, 395 aa, Artificial Sequence
  derived and/or modified sequence
MFPRVSTFLPLRPLSRHPLSSGSPETSAAAIMLLTVRHGTVRYRSSALLARTKNNIQRYFGTNSVICSKKDKQSVRTEETSKETSESQDSEKENTKKDLLGIIKGMKVELSTVNVRTTKPPKRRPLKSLEATLGRLRRATEYAPKKRIEPLSPELVAAASAVADSLPFDKQTTKSELLSQLQQHEEESRAQRDAKRPKISFSNIISDMKVARSATARVRSRPELRIQFDEGYDNYPGQEKTDDLKKRKNIFTGKRLNIFDMMAVTKEAPETDTSPSLWDVEFAKQLATVNEQPLQNGFEELIQWTKEGKLWEFPINNEAGFDDDGSEFHEHIFLEKHLESFPKQGPIRHFMELVTCGLSKNPYLSVKQKVEHIEWFRNYFNEKKDILKESNIQFN

SEQ ID NO: 159700 - DNA, 1188 bp, Artificial Sequence
  derived and/or modified sequence
atgtttcctcgcgttagcacgttcctcccactgcgtcccctgagtcgccaccctctgagctcaggatcccccgagacctctgccgcggccatcatgctcctcacggtgcggcacggcactgtgcggtacagatccagcgcactgctcgccagaacaaagaataatatacagagatacttcggaacaaatagtgtgatatgcagtaagaaggataagcagtctgtacgcacagaggaaacaagcaaagagacaagtgaaagccaagattccgaaaaagagaatacgaagaaagacctgctcgggattatcaaggggatgaaggtggagctgtcaacggttaacgtgcgcacgactaagcctcccaagcgacgtcctttaaaatcactagaggctaccctggggcgattgcggcgggccaccgagtacgcacctaaaaaaaggatcgagccattgagtccggagctagtcgccgctgctagcgctgttgcagactccttaccttttgataagcaaacaactaagagtgagctgctgtcgcagttacagcagcacgaggaagagagcagagcccagcgggatgccaaacggcctaaaatcagtttttcgaacatcatcagcgacatgaaggtcgccaggtcggccacagctagagtgcgatctagacctgagcttaggattcagttcgacgaagggtacgataattatccaggccaagaaaaaaccgatgatctgaaaaagcggaagaacatctttacaggtaagagactcaacatctttgatatgatggcagtcacgaaggaggcccccgaaactgacacgtccccttctctttgggatgtagagtttgcgaagcagttggcaaccgtaaatgaacaaccccttcagaatgggtttgaggagctgatccaatggacgaaggagggaaagttatgggagtttccaattaataacgaagccggattcgatgacgacgggagcgaatttcacgaacacatcttcctggagaaacacctggaaagcttccccaagcagggtcctatcaggcactttatggaactagtgacttgcggcttgtccaaaaacccatacctgtctgtcaaacaaaaggttgaacacattgaatggttccgaaactactttaatgagaaaaaagacatcctgaaggaatccaatattcagtttaattag

SEQ ID NO: 159701 - DNA, 1188 bp, Artificial Sequence
  derived and/or modified sequence
atgttcccccgggtgtccaccttcctgcccctgcggcccctgagccgccaccccctgagcagcggcagccctgagaccagcgctgctgccatcatgctgctgactgtgcgccacggcaccgtgcgctaccgcagcagcgccctgctggcccggaccaagaacaacatccagcgctacttcggcaccaacagcgtcatctgcagcaagaaggacaagcagagcgtgaggacagaggagaccagcaaggagaccagcgagagccaggacagcgagaaggagaacaccaagaaggacctgctgggcatcatcaagggcatgaaggtggagctgagcacagtgaatgtgaggaccaccaagccacccaagagaagacccctgaagagcctggaggccaccctgggccgcctgcggcgggccacagaatatgcccccaagaagagaattgagcccctgagccctgagctggtggccgccgccagcgctgtggccgacagcctgccctttgacaagcagaccaccaagtctgagctgctgagccagctgcagcagcacgaggaggagagccgggcccagagagatgccaagaggcccaagatctccttcagcaacatcatcagtgacatgaaggtggcccggagcgccacagcccgggtgcgcagcaggcctgagctgcgcatccagtttgatgagggctatgacaactacccaggccaggagaagacagatgacctgaagaagaggaagaacatcttcaccgggaagaggctgaacatctttgacatgatggctgtgaccaaggaggcccctgagacagacaccagccccagcctgtgggatgtggagtttgccaagcagctggccaccgtgaatgagcagcccctgcagaatggatttgaggagctgatccagtggaccaaggagggcaagctgtgggagttccccatcaacaatgaagctggctttgatgatgatggcagcgagttccacgagcacatcttcctggagaagcacctggagagcttccccaagcagggccccatccgccacttcatggagctggtgacctgtggcctgagcaagaacccctacctgtctgtgaagcagaaggtggagcacatcgagtggttcaggaactacttcaatgagaagaaggacatcctgaaggagagcaacatccagttcaactag

SEQ ID NO: 159702 - DNA, 1293 bp, Artificial Sequence
  derived and/or modified sequence
tttcagttgtgttcttggttcatttcgtgtctcggcgatgtttcctagagtctcgacgttcctacctcttcgccccctttcccgccaccctttgtcctctggaagcccggagacatcagcggctgcgattatgctactcactgttcggcacggaacagtcaggtaccgcagttcagcgctgttggcccggacaaaaaataacatccaaagatattttggcactaacagtgtgatctgtagcaagaaagataagcagtctgttcgaactgaggagacttccaaggagacttcagagagccaagacagtgaaaaggaaaatacgaaaaaagacttgttaggcattattaagggcatgaaagttgaattaagcacagtaaatgtacgaacaacaaagccccccaaaagaagaccacttaaaagtttggaagctacacttggcaggcttcgaagagctacagaatatgctccaaagaagagaattgagcccctgagtcctgagttggtggcagctgcatctgctgtggcagattctctcccttttgataagcaaacaaccaagtcagagctgctgagccagctccagcagcatgaggaagagtcaagggcacagagagatgcaaagcgacctaaaattagtttcagtaacataatatcagatatgaaagttgccagatctgctacagctagagttcgttcaagaccagagcttcggattcagtttgatgaaggctatgacaattatcctggccaggagaagacggatgatcttaaaaaaaggaaaaatatattcacagggaaaagacttaatatttttgacatgatggcagttactaaagaagcacctgaaacagacacatcaccttcactttgggatgtggaatttgctaagcagttagccacagtaaatgaacaaccccttcagaatggatttgaagagctgatccagtggacaaaagaggggaaactatgggagttcccaattaacaatgaagcaggttttgatgatgatggttcagaatttcatgaacatatatttctggagaaacacctggagagctttccaaaacaaggaccaattcgccacttcatggagctggtgacttgtggcctttccaaaaacccatatcttagtgttaaacagaaggttgaacacatagagtggtttagaaattattttaatgaaaaaaaggatattctaaaagaaagtaacatacagttcaattaagaccatggaaatttttatttcaaacaattagagatggatattacaactaaataaaataattttactag

SEQ ID NO: 159703 - DNA, 1188 bp, Artificial Sequence
  derived and/or modified sequence
atgttcccccgggtgagcaccttcctgcccctgcggcccctgagccgacaccccctgtcaagtgggtccccagagactagcgcggcggccataatgctcttgacagtccggcacggtacggtccggtatcggtcttctgcactgttagcacgcactaaaaataatatacagagatacttcggaactaactctgttatctgcagcaaaaaagataagcagtcggtacggaccgaggaaacatcaaaagaaacctctgagagccaggatagtgagaaagagaataccaagaaggatttactcggaatcattaagggcatgaaagtggaactttccacggtgaatgtcaggaccaccaaaccgcccaaacgccgccctctaaaatccctggaagcaacattgggtcgcttgagacgggccaccgaatatgctcccaaaaaacggatcgagccactctcaccagagctcgtcgccgccgcttccgctgtagccgactcccttccgttcgataaacagaccacaaaatctgaactgctgtctcagctccagcagcatgaggaggaaagccgtgcgcagcgggatgcgaagcgtcccaagatatcgttttccaatataatcagtgacatgaaggttgcaaggtccgccacagcgagggtgcggtcacggcctgagcttaggatccagttcgacgaggggtatgacaattatcctggacaggaaaaaacggacgatctgaaaaaaagaaagaatatctttactggcaaacggcttaatattttcgatatgatggctgtcacaaaggaagcccctgagacagacactagcccgtctctgtgggatgttgagtttgccaagcagttggctaccgtgaatgaacagccacttcagaacggctttgaagagcttatccagtggaccaaggaaggaaagctctgggaattccctattaacaacgaggcaggatttgacgacgacggatccgagtttcatgaacatatttttctggaaaaacacctagagtccttcccgaagcaggggccaatccgccacttcatggaactagtcacatgtgggttgtccaaaaacccttatctttctgttaaacagaaggttgagcacatcgagtggttccgtaattacttcaatgaaaagaaagacatactgaaagagagtaatatacagtttaattag

SEQ ID NO: 159704 - DNA, 1188 bp, Artificial Sequence
  derived and/or modified sequence
atgtttccaagggtaagcaccttcctgccactgcgcccactcagccggcaccctttgtcttctggaagccccgaaacctccgccgctgctattatgcttcttaccgtaagacacggaacagttcggtacaggtcctctgcattgctggcacggacaaagaataatatccaaaggtatttcggcacgaacagcgtgatctgtagtaagaaagacaaacagagtgtgcggaccgaggagacatctaaagaaacatccgagtcccaggattccgagaaagaaaacaccaagaaggatcttcttggaatcataaagggaatgaaggtggaattgtctacagttaacgtccggactaccaagcctcccaaacgaagacctctgaaaagtctggaagccaccttaggtcgtttgagacgcgcaacagaatacgcaccgaagaagagaatcgagccactctcaccagagttggttgctgctgcctcagctgtcgccgacagtttgccatttgacaaacaaaccacaaaatctgaactgttgagtcagctccagcagcacgaggaggaaagcagagcccagagagatgcaaaacgccctaagatctccttttctaatatcatctccgacatgaaggtggctcgctctgcaactgccagggttcgctcaagacctgaactgcggatccagtttgacgaagggtacgacaactatccaggacaggaaaagaccgacgacttgaaaaaaaggaaaaacatcttcacaggaaagaggctcaacattttcgacatgatggcagtgactaaggaagctcctgaaaccgacaccagcccttctctctgggacgtggagttcgctaagcaactggcaacagtcaatgagcaaccactccagaacggcttcgaagaattgatccagtggacaaaagagggaaagctgtgggaatttcccatcaataatgaggccggtttcgatgacgacggaagcgagtttcacgagcatatcttcctggagaagcacctcgagtctttcccaaagcagggtccaatcagacacttcatggaactggtgacctgcggcctctctaagaatccctatctgtccgttaaacagaaggtcgagcacatcgagtggttccgtaattacttcaatgagaagaaagatatattgaaagaatccaacatccagttcaactag

SEQ ID NO: 159705 - DNA, 1188 bp, Artificial Sequence
  derived and/or modified sequence
atgttccccagagtgagcaccttcctgcccctgagacccctgagcagacaccccctgagcagcggcagccccgagaccagcgccgccgccatcatgctgctgaccgtgagacacggcaccgtgagatacagaagcagcgccctgctggccagaaccaagaacaacatccagagatacttcggcaccaacagcgtgatctgcagcaagaaggacaagcagagcgtgagaaccgaggagaccagcaaggagaccagcgagagccaggacagcgagaaggagaacaccaagaaggacctgctgggcatcatcaagggcatgaaggtggagctgagcaccgtgaacgtgagaaccaccaagccccccaagagaagacccctgaagagcctggaggccaccctgggcagactgagaagagccaccgagtacgcccccaagaagagaatcgagcccctgagccccgagctggtggccgccgccagcgccgtggccgacagcctgcccttcgacaagcagaccaccaagagcgagctgctgagccagctgcagcagcacgaggaggagagcagagcccagagagacgccaagagacccaagatcagcttcagcaacatcatcagcgacatgaaggtggccagaagcgccaccgccagagtgagaagcagacccgagctgagaatccagttcgacgagggctacgacaactaccccggccaggagaagaccgacgacctgaagaagagaaagaacatcttcaccggcaagagactgaacatcttcgacatgatggccgtgaccaaggaggcccccgagaccgacaccagccccagcctgtgggacgtggagttcgccaagcagctggccaccgtgaacgagcagcccctgcagaacggcttcgaggagctgatccagtggaccaaggagggcaagctgtgggagttccccatcaacaacgaggccggcttcgacgacgacggcagcgagttccacgagcacatcttcctggagaagcacctggagagcttccccaagcagggccccatcagacacttcatggagctggtgacctgcggcctgagcaagaacccctacctgagcgtgaagcagaaggtggagcacatcgagtggttcagaaactacttcaacgagaagaaggacatcctgaaggagagcaacatccagttcaactag

SEQ ID NO: 159706 - protein, 446 aa, Artificial Sequence
  derived and/or modified sequence
MEETIKDPPTSAVLLDHCHFSQVIFNSVEKFYIPGGDVTCHYTFTQHFIPRRKDWIGIFRVGWKTTREYYTFMWVTLPIDLNNKSAKQQEVQFKAYYLPKDDEYYQFCYVDEDGVVRGASIPFQFRPENEEDILVVTTQGEVEEIEQHNKELCKENQELKDSCISLQKQNSDMQAELQKKQEELETLQSINKKLELKVKEQKDYWETELLQLKEQNQKMSSENEKMGIRVDQLQAQLSTQEKEMEKLVQGDQDKTEQLEQLKKENDHLFLSLTEQRKDQKKLEQTVEQMKQNETTAMKKQQELMDENFDLSKRLSENEIICNALQRQKERLEGENDLLKRENSRLLSYMGLDFNSLPYQVPTSDEGGARQNPGLAYGNPYSGIQESSSPSPLSIKKCPICKADDICDHTLEQQQMQPLCFNCPICDKIFPATEKQIFEDHVFCHSL

SEQ ID NO: 159707 - DNA, 1341 bp, Artificial Sequence
  derived and/or modified sequence
atggaagagaccatcaaggatcctccaactagcgcagtgctcctcgatcattgccacttctcccaagtgatctttaactctgttgagaagttctatatcccggggggagatgtgacttgccattacacattcacccaacacttcattcccaggcgaaaggactggataggcattttcagggtaggctggaaaactaccagggagtactacacttttatgtgggttaccttgccaatcgatttgaataacaaatctgccaagcagcaagaggttcagttcaaggcctactacctacctaaagatgacgaatattatcagttctgctacgtagatgaagatggagtcgtgaggggcgcctctatccccttccagttcagacccgagaatgaggaggatatcctggtggttaccactcagggtgaggttgaggagatcgagcaacacaacaaggagctttgcaaggagaaccaggaactgaaggatagctgcatttccctgcagaaacagaacagtgacatgcaggcggaactgcagaagaagcaggaggaattggagaccctgcaaagcatcaacaaaaaactggagctgaaggtgaaggaacagaaagattactgggaaactgagctattgcagctaaaggagcagaatcaaaaaatgagtagcgagaatgagaaaatgggaataagagtcgatcagctgcaggcgcaacttagcacccaggagaaagagatggagaagctggtgcaaggagatcaagacaagacagagcagctggagcaactgaaaaaagaaaacgaccatctattcctgtccctaacggagcagcggaaagaccagaagaagctggaacaaacagttgagcagatgaaacagaacgaaaccacagcaatgaaaaaacaacaggagctcatggacgaaaatttcgacttgtccaaacgcctgtcagagaatgaaatcatttgcaatgcactccagcgacagaaggagaggctggagggagagaatgacttgctcaagagagagaacagtcggctgctgtcatatatgggcctggatttcaatagcttaccataccaagtgcctacatccgacgagggtggggccaggcagaatcctgggcttgcttatggcaatccctactcagggatccaggaatccagctcgccctccccactctccataaagaaatgccctatttgtaaggctgatgacatatgcgatcatacacttgagcagcagcaaatgcagccactatgttttaactgtcccatctgtgacaaaatatttccagccactgagaaacagatctttgaagaccacgtgttttgtcactcactgtag

SEQ ID NO: 159708 - DNA, 1341 bp, Artificial Sequence
  derived and/or modified sequence
atggaggagaccatcaaggacccccccaccagcgctgtgctgctggaccactgccacttcagccaggtgatcttcaacagcgtggagaagttctacatccctggaggagatgtgacctgccactacaccttcacccagcacttcatccccaggaggaaggactggattggcatcttccgggtgggctggaagaccacccgggagtactacaccttcatgtgggtgaccctgcccatcgacctgaacaacaagagcgccaagcagcaggaggtgcagttcaaggcctactacctgcccaaggatgatgagtactaccagttctgctacgtggatgaagatggagtggtgcggggggccagcatccccttccagttccggccagaaaatgaggaggacatcctggtggtgaccacccagggcgaggtggaggagattgagcagcacaacaaggagctgtgcaaggagaaccaggagctgaaggacagctgcatcagcctgcagaagcagaacagcgacatgcaggccgagctgcagaagaagcaggaggagctggagaccctgcagagcatcaacaagaagctggagctgaaggtgaaggagcagaaggactactgggagacagagctgctgcagctgaaggagcagaaccagaagatgagcagtgaaaatgagaagatgggcatccgggtggaccagctgcaggcccagctgagcacccaggagaaggagatggagaagctggtgcagggcgaccaggacaagacagagcagctggagcagctgaagaaggaaaatgaccacctgttcctgagcctgacagagcagaggaaggaccagaagaagctggagcagacagtggagcagatgaagcagaatgagaccacagccatgaagaagcagcaggagctgatggatgagaactttgacctgagcaagaggctgtctgaaaatgagatcatctgcaatgccctgcagaggcagaaggagcggctggagggggagaatgacctgctgaagcgggagaacagccggctgctgagctacatgggcctggacttcaacagcctgccctaccaggtgcccaccagtgatgagggcggggcccggcagaaccctggcctggcctacggcaacccctacagcggcatccaggagagcagcagccccagccccctgagcatcaagaagtgccccatctgcaaggcagatgacatctgtgaccacaccctggagcagcagcagatgcagcccctgtgcttcaactgccccatctgtgacaagatcttccctgccacagagaagcagatctttgaggaccacgtgttctgccacagcctgtag

SEQ ID NO: 159709 - DNA, 1341 bp, Artificial Sequence
  derived and/or modified sequence
atggaggagaccatcaaggacccccccaccagcgccgtgctgctggatcactgccacttttcacaggtgattttcaatagcgtggaaaagttctatattcctggcggcgacgtcacatgccattatacatttacacagcacttcatccccaggaggaaggactggattggcatctttcgagtgggctggaaaaccactcgcgagtattatacgttcatgtgggtcactcttcccattgacctcaataacaaatccgctaagcagcaagaagtgcagtttaaggcctactatctgcctaaggacgatgagtactaccagttctgctatgtggacgaagatggtgtagttcgcggtgcctctataccattccagtttcgccccgaaaatgaggaggacatcctggtggtcacaacacagggcgaggtagaggaaattgaacagcataataaagagctctgcaaagagaatcaggagctgaaggactcatgcatatcactgcagaaacaaaacagcgatatgcaggccgaacttcagaaaaaacaggaagagctcgagacactccagtcgatcaataagaaactcgagctgaaggtgaaggagcagaaggactactgggagactgagttgttgcagcttaaggaacagaatcagaaaatgagttcagagaacgaaaaaatgggaatcagagttgatcaattgcaagcacaactgtccacccaggagaaggaaatggagaaactcgtacagggcgaccaggataagacggagcaattggaacagcttaagaaagagaatgatcacctttttctctctcttaccgagcaacgcaaagaccagaagaaattggaacagaccgtggaacagatgaaacagaatgaaacaactgctatgaaaaagcagcaggaattaatggatgagaacttcgatctttcaaagcgtctgagcgagaacgaaatcatatgcaacgctttacagcggcagaaggaacgtttggagggggaaaacgatcttctgaagcgggagaattctagattactttcctacatgggtctggactttaacagtctgccgtatcaggttcctactagtgatgaaggcggcgccaggcagaaccctggtttggcttatggcaacccctactccggtatacaggagtcctctagtccatcccccctgtccattaagaaatgtcccatttgcaaggctgatgacatttgcgatcatactctggaacagcagcagatgcaaccgctgtgttttaattgcccgatctgcgacaagatttttcctgccacggagaagcagattttcgaggaccatgtgttttgtcactcactgtag

SEQ ID NO: 159710 - DNA, 1341 bp, Artificial Sequence
  derived and/or modified sequence
atggaggagacgataaaagaccctcctaccagtgcggtgctgcttgatcactgtcactttagtcaggttatcttcaactccgttgagaagttctatattcccggaggagacgttacctgccactatacatttacgcaacatttcattcctagacgaaaagactggatcggcatattcagggttggttggaagacgacgcgcgagtattacacgtttatgtgggtcacactccccattgacctaaataacaagtccgccaagcaacaggaggtccagtttaaggcatactacctgcccaaggacgacgagtattaccagttctgttatgtggatgaagatggggtcgtgaggggtgcttccattccttttcagtttcgaccagagaatgaggaggacattctcgtggtgactacacagggcgaggtcgaagagatcgaacagcacaataaagaactgtgcaaggagaatcaggagctgaaggatagttgcatcagcctgcaaaaacagaactccgatatgcaagctgagcttcagaaaaaacaggaggagctggagaccctgcaatccataaacaagaagctcgagctgaaagtgaaggagcagaaagactactgggagacagagctgcttcagctgaaggaacaaaatcagaagatgtctagcgaaaatgaaaaaatgggtatcagagtcgatcaacttcaagctcagctaagtacacaggagaaagaaatggagaagctggtgcagggcgaccaggataaaacagaacagttggagcaactgaaaaaggagaacgaccacctcttcctatccctgaccgagcagaggaaagaccaaaaaaaactcgaacagaccgttgaacagatgaagcagaacgaaaccaccgcaatgaaaaagcagcaggaacttatggacgagaactttgatctttccaagcggctgagcgaaaatgagatcatctgcaatgcactgcagcgccagaaggagaggctggaaggcgaaaatgacctgctaaaacgtgagaatagcagactcctgtcttacatgggattggatttcaactcactgccctaccaggtccccacgtctgatgaaggaggggctaggcagaaccccggactggcctacggcaatccatatagcgggattcaggaatcatcaagtccgagcccactgagcataaaaaagtgccccatctgcaaggcagacgatatatgcgatcatacattggaacagcagcagatgcaaccactctgcttcaattgtcccatttgcgacaagattttcccagcaaccgagaaacaaatatttgaagaccacgtcttctgccatagcttgtag

SEQ ID NO: 159711 - DNA, 3682 bp, Artificial Sequence
  derived and/or modified sequence
caggcgggacgggctctcccttgggtgcttagccccgcccccgtcccactctgccctgttgctgtcgcgccgctgctggttgctgtccctggacccctaccatggaggagaccatcaaagatccccccacatcagctgtcttgctggatcactgtcatttctctcaggtcatctttaacagtgtggagaagttctacatccctggaggggacgtcacatgtcattataccttcacccagcatttcatccctcgtcgaaaggattggattggcatctttagagtggggtggaagacaacccgtgagtattacaccttcatgtgggttactttgcccattgacctaaacaacaaatcagctaaacagcaggaagtccaattcaaagcttactacctgcccaaggatgatgagtattaccagttctgctatgtggatgaggatggtgtggtccggggagcaagtattcctttccaattccgtccagaaaatgaggaagacatcctggttgttaccactcagggagaggtggaagagattgagcagcacaacaaggagctttgcaaagaaaaccaggagctgaaggacagctgtatcagcctccagaagcagaactcagacatgcaggctgagctccaaaagaagcaggaggagctagaaaccctacagagcatcaataagaagttggaactgaaagtgaaagaacagaaggactattgggagacagagctgcttcaactgaaagaacaaaaccagaagatgtcctcagaaaatgagaagatgggaatcagagtggatcagcttcaggcccagctgtcaactcaagagaaagaaatggagaagcttgttcagggagatcaagataagacagagcagttagagcagctgaaaaaggaaaatgaccacctctttctcagtttaactgaacagaggaaggaccagaagaagctcgagcagacagtggagcaaatgaagcagaatgaaactactgcaatgaagaaacaacaggaattaatggatgaaaactttgacctgtcaaaaagactgagtgagaacgaaattatatgtaatgctctgcagagacagaaagagagattggaaggagaaaatgatcttttgaagagggagaacagcagattgctcagttacatgggtctggattttaattctttgccgtatcaagtacctacttcagatgaaggaggcgcaagacaaaatccaggacttgcctatggaaacccatattctggtatccaagaaagttcttcccccagcccgctctccatcaagaaatgccctatctgcaaagcagatgatatttgtgatcacaccttggagcaacagcagatgcagcccctttgtttcaattgtccaatttgtgacaagatcttcccagctacagagaagcagatctttgaagaccacgtgttctgccactctctctgagtatcccaacctcttggatgtatacagagattttatagaatagaacctatagcttctaccatgagttatatgagtcaagatcctgcctaacctgaaattattagggatttactcagccctgctgccgctaacagtggagttatgtcactgatctgaaggtcactgttaagggcttctgctgccatccttgtgggttgctacctttaagtcgcataactctagctgtatcatcctctcacctgtcattcttctgagggtctcagtacaagggccctgggatggagccaacctgggtattcacaacaggcctgacttgatactaagtgattagttttccaagttgtcccactgccattcaaagtcagcccttgagtgtatttgttctcagtcctaaccctggggccagagattggtccgaggttgagaattccttcctcctcatccttggtgttgctttctccaaatgattgttttagactagccaaaaatgccgtggcaaagagctcagaaatccaatttggataccaaaggtttctcatgttaatttctcagcccccaaagaagcatcttactcctgaaccttagacaggaagtattgtttcagtcacagaaagcttttctgggtacctctggttagcactttctactctctgatatttcctatgtacatagcttttattgttgtaaatcctttcttaatggttaaataggattgttagcaactatgggtttgcagttttctgagtaggtgagttttgaatatgggtaaatcagaataatgagacaacttgttaatctctttaatactaaaaataaattactcttctatttcagggacttaggtaatttaaaataaaccttcaatttatggtcttctgttttgaagctcatgggaaaattgtgatcaaaagggctatgggaagggcagaccccgccaatgatttctcttcacctgtcttaagattaaataaaaaagagtgtcctggcagttatcttgaggtggggaaggaggtgatgaaacattagtttgtgaaatccaaggccctggcttgctttctttctttttttttttttttttttgaaacagtctctctctgtcacccaggctggcgtgcaatggcgcagttgactcactacagcctctgcctcccaggttcaagcgattctcatgccttagcctcccaagtagctgggattacaggtgtgtgccgcaatgcccagctaatttttgtgtttttagtagagacagggtttcactatgttggccaggctggtctcgaactcctggcctcacgtgatctgtccacttcagccgtccaaagtgctgggattacaagcgtgagccactgtgctgggcccgaggccctgacttcttgctgtaactttccatgcattttttttaaaaggagcagtgtggattttcgcaccctttgtgaactaagttcaatgcgctctatccaaatttgcctaattgaactataagaaagtaataattccattttctatcccctcagggactgaacaaatggaaataactcccaggcagtatcaggtggtcactacagagacttccacaaaaacttttgaatgatgtgaaacacgatgtcatgaataagggttgagccaactatagctctgtgttcctactgggctttccctaatgtggttgggagttatgccctagactaactgtattgtcctagtcacagctccttgctttgatttcatccttgataaaatgaagatgaaacttacactacttctccaagccttttgctgtcttaagaataagacctgagattaacactaaccctagaatagaaatgtaatagggagatggtaataaaggagtttttctggcacataccctccctacagaatttctgttgctccccagatccagtgaagaattgcagtttcatttattttgtaccagtcagctcttaattaagtacatgaatggagaggaacagtggtgcacataatccaaatcagtgaataccattttctggtgaattacccacccctttgcccctgctaccccgagggttaccatgattgtcaacagcagcaggagcccttccacagggcttggtaaaaaaaccagttgaggtgttaatgaccctttttgctgggtgtaaaacaaagcatctttaaccactgttcattatccccagctgctcttaccaaggctttgaagggggaaattatgctctaggcagccactagtagtaaacaat

SEQ ID NO: 159712 - DNA, 1341 bp, Artificial Sequence
  derived and/or modified sequence
atggaggagaccatcaaggacccccccaccagcgccgtgctgctggaccactgccacttcagccaggtgatcttcaacagcgtggagaagttctacatccccggcggcgacgtgacctgccactacaccttcacccagcacttcatccccagaagaaaggactggatcggcatcttcagagtgggctggaagaccaccagagagtactacaccttcatgtgggtgaccctgcccatcgacctgaacaacaagagcgccaagcagcaggaggtgcagttcaaggcctactacctgcccaaggacgacgagtactaccagttctgctacgtggacgaggacggcgtggtgagaggcgccagcatccccttccagttcagacccgagaacgaggaggacatcctggtggtgaccacccagggcgaggtggaggagatcgagcagcacaacaaggagctgtgcaaggagaaccaggagctgaaggacagctgcatcagcctgcagaagcagaacagcgacatgcaggccgagctgcagaagaagcaggaggagctggagaccctgcagagcatcaacaagaagctggagctgaaggtgaaggagcagaaggactactgggagaccgagctgctgcagctgaaggagcagaaccagaagatgagcagcgagaacgagaagatgggcatcagagtggaccagctgcaggcccagctgagcacccaggagaaggagatggagaagctggtgcagggcgaccaggacaagaccgagcagctggagcagctgaagaaggagaacgaccacctgttcctgagcctgaccgagcagagaaaggaccagaagaagctggagcagaccgtggagcagatgaagcagaacgagaccaccgccatgaagaagcagcaggagctgatggacgagaacttcgacctgagcaagagactgagcgagaacgagatcatctgcaacgccctgcagagacagaaggagagactggagggcgagaacgacctgctgaagagagagaacagcagactgctgagctacatgggcctggacttcaacagcctgccctaccaggtgcccaccagcgacgagggcggcgccagacagaaccccggcctggcctacggcaacccctacagcggcatccaggagagcagcagccccagccccctgagcatcaagaagtgccccatctgcaaggccgacgacatctgcgaccacaccctggagcagcagcagatgcagcccctgtgcttcaactgccccatctgcgacaagatcttccccgccaccgagaagcagatcttcgaggaccacgtgttctgccacagcctgtag

SEQ ID NO: 159713 - protein, 436 aa, Artificial Sequence
  derived and/or modified sequence
MDGKPATRKGPDFCSLRYGLALIMHFSNFTMITQRVSLSIAIIAMVNTTQQQGLSNASTEGPVADAFNNSSISIKEFDTKASVYQWSPETQGIIFSSINYGIILTLIPSGYLAGIFGAKKMLGAGLLISSLLTLFTPLAADFGVILVIMVRTVQGMAQGMAWTGQFTIWAKWAPPLERSKLTTIAGSGSAFGSFIILCVGGLISQALSWPFIFYIFGSTGCVCCLLWFTVIYDDPMHHPCISVREKEHILSSLAQQPSSPGRAVPIKAMVTCLPLWAIFLGFFSHFWLCTIILTYLPTYISTLLHVNIRDSGVLSSLPFIAAASCTILGGQLADFLLSRNLLRLITVRKLFSSLDMQVSSWESQGDLGSSQESSLPLPLDSSSVRILSLVGGMSFSCLLQSTCLAWSFTSRLDKQNFKTGPKRGPLPASEDIKLQT

SEQ ID NO: 159714 - DNA, 1311 bp, Artificial Sequence
  derived and/or modified sequence
atggacggcaaacctgcaactcggaaaggccctgacttttgtagcttgcggtatgggctcgcactaataatgcacttctcgaatttcaccatgatcacccaaagagtctccttgtccatcgccattatcgccatggtgaacactacccagcagcagggcttaagcaacgctagcaccgaaggtccagtggccgatgcatttaacaacagcagcatttcaatcaaggagtttgacacgaaggccagcgtctaccagtggagccccgaaacacagggtatcattttcagctcaatcaactacgggattatcttgactctgatcccaagcggctatcttgcgggaatatttggcgccaaaaaaatgctcggggctggcttgctcattagttcccttctcacactcttcacaccacttgctgccgattttggggttatcctggttatcatggtgagaacagtgcaggggatggcacagggaatggcctggactgggcaattcacaatttgggctaagtgggctccacccctggagaggtctaaattaactaccatcgctggtagcggatccgcattcggcagctttatcattttatgcgttggcggtctgatttcccaggcactctcctggcccttcatcttttatatttttggtagcacagggtgcgtttgctgtctcctctggtttacagtgatatacgatgatccaatgcatcacccatgcatctctgtgagggagaaggaacacattctgtcaagtctggcccagcagccttcctcccccggtcgcgcagtgcctatcaaggcgatggtgacatgcctgccactgtgggccatttttctggggttcttcagtcatttctggctgtgcacaataatcctcacttacctgcctacctatattagcactcttttacacgtcaacattcgcgattccggcgtcctcagcagccttccattcattgccgccgctagttgtaccatcctgggtgggcagctcgctgattttttgttgagccggaaccttcttcggctcataacggtccgaaagctcttctcctccctggatatgcaggtttccagctgggaatcacagggcgatctcggaagcagccaggaatcttcgctgcccttacctctggacagctcctcagttagaattctcagcttggttggaggcatgagcttttcctgtctcctccagagcacatgcttggcttggtcctttacaagcaggctcgataagcagaattttaagaccggacccaaacgaggccccctgcctgcatcagaggacatcaaactgcaaacctag

SEQ ID NO: 159715 - DNA, 1311 bp, Artificial Sequence
  derived and/or modified sequence
atggatggcaagccagccaccaggaaaggaccagacttctgcagcctgcgctatggcctggccctgatcatgcacttcagcaacttcaccatgatcacccagagggtgtccctgagcatcgccatcatcgccatggtgaacaccacccagcagcagggcctgagcaatgccagcacagagggccctgtggctgatgccttcaacaacagcagcatcagcatcaaggagtttgacaccaaggcctctgtgtaccagtggagccctgagacccagggcatcatcttcagcagcatcaactacggcatcatcctgaccctcatccccagcggctacctggccggcatctttggagccaagaagatgctgggcgccggcctgctgatcagcagcctgctgaccctcttcacccccctggccgctgactttggagtcatcctggtgatcatggtgaggacagtgcagggcatggcccagggcatggcctggacaggccagttcaccatctgggccaagtgggccccacccctggagaggagcaagctgaccaccatcgccggcagcggcagcgccttcggcagcttcatcatcctgtgtgtgggcggcctcatcagccaggccctgtcctggcccttcatcttctacatcttcggcagcacaggctgtgtgtgctgcctgctgtggttcaccgtcatctatgatgaccccatgcaccacccctgcatctctgtgcgggagaaggagcacatcctgagcagcctggcccagcagcccagcagccctggccgggctgtgcccatcaaggccatggtgacctgcctgcccctgtgggccatcttcctgggcttcttcagccacttctggctgtgcaccatcatcctgacctacctgcccacctacatcagcaccctgctgcacgtgaacatccgggacagcggcgtgctgagcagcctgcccttcatcgccgccgccagctgcaccatcctgggcggccagctggccgacttcctgctgagcaggaacctgctgcggctcatcaccgtgaggaagctgttcagcagcctggacatgcaggtgtcctcctgggagagccagggcgacctgggcagcagccaggagagcagcctgcccctgcccctggacagcagctctgtgcgcatcctgagcctggtgggcggcatgtccttcagctgcctgctgcagagcacctgcctggcctggagcttcaccagccggctggacaagcagaacttcaagacaggccccaagaggggccccctgcctgccagcgaggacatcaagctgcagacctag

SEQ ID NO: 159716 - DNA, 1311 bp, Artificial Sequence
  derived and/or modified sequence
atggacggcaagcccgccacccggaagggccccgacttctgcagcttgcgctacgggctagccctaattatgcatttctcgaattttacaatgataacacagcgcgtaagtctgagcatcgcaataattgccatggtgaatacaacccaacagcagggtttatcaaatgccagtaccgaaggaccggtcgcggatgcatttaataattccagcataagcattaaggaattcgacacaaaggcctccgtgtatcagtggagccccgaaacccaaggcattatcttctctagcatcaattacggcattattctcactctgattccatccgggtatctcgccggcatcttcggtgcaaagaaaatgcttggcgccgggctgctgataagcagcttactgacgctctttacaccactggctgccgatttcggagttatcctggtgatcatggtgagaactgtacaaggcatggctcagggaatggcctggacaggacagtttactatctgggccaagtgggcgcctcccctcgagagatccaagcttacaacgattgcgggctcaggaagcgcttttgggtcattcattatactttgcgtagggggactcattagccaggcgctgtcctggcctttcatcttctatatcttcggcagcacagggtgcgtctgttgcctgttgtggttcactgtgatctatgacgaccccatgcatcatccatgcattagtgtgcgcgagaaggagcatatccttagttcactcgctcagcagccctcctctcccgggcgcgccgtccccattaaagcaatggtgacatgcctgcccctctgggccattttcctggggtttttcagccacttttggctctgcacaatcatcttgacttatctgcctacgtacatctcgactctcctgcatgttaatattcgcgatagcggtgtcctcagttccctcccttttattgccgctgcatcatgtacaatcctgggcggacagctcgcagactttctgctgagtagaaatctgctgaggctcatcaccgtcaggaaattattctctagcctagacatgcaagtatctagctgggaatcccaaggagacctgggatctagccaggaaagtagtctgccactgccgctggactcatctagtgtcagaattctgagcttagtcggtggtatgtccttctcttgcttacttcagtccacatgcctggcttggagctttactagtaggcttgataagcaaaacttcaagactggacccaaaagagggccactaccagcgagcgaggacataaaactgcaaacttag

SEQ ID NO: 159717 - DNA, 1311 bp, Artificial Sequence
  derived and/or modified sequence
atggatggtaagcccgctacgagaaagggaccagacttttgcagcctccgctatggactggccctcataatgcatttctccaactttacaatgatcacacaacgcgttagcctctctattgccataatcgccatggtaaacaccacacagcagcagggcctgtccaacgcgtctacagaggggcctgtggctgatgcctttaataacagctctattagtataaaagagtttgatacaaaggcctcagtgtaccagtggtcacccgaaactcagggcattatctttagttcgatcaattatggcattatcctgactctgataccttccggatacctggcaggaatctttggagcaaagaaaatgctcggagctggattgctgatttcttctctgcttactcttttcactcccttggcagcagacttcggggtgattttagtgattatggtgagaaccgtgcaaggcatggcgcaaggcatggcttggacaggacagtttaccatttgggccaagtgggctcccccactagaacgcagtaaactcacaacgatcgctgggtcaggatctgctttcggctccttcattatactatgcgtcggagggctgatttcacaggcactgtcctggccattcatcttctatattttcggatcaactggctgcgtttgttgccttttgtggttcaccgtgatttatgacgatccaatgcaccacccctgtatcagcgtgcgtgagaaagaacacattctgtcaagcctagctcagcaaccttcatcaccaggtagggccgtccccatcaaggcaatggttacttgcctgcccctctgggcaatctttcttggattctttagtcatttttggttgtgcactattatcctgacttatctccccacgtacatctctacactcctgcacgtcaacattcgtgactccggagtcctttcaagcttaccattcattgccgctgcgtcttgcacgatactcgggggacaactggccgacttcctcctttcccgaaaccttctcagacttatcaccgtgcgaaagctattctcctctctggacatgcaggtaagtagttgggagtcccaaggggatcttggatcttcccaagagtcaagcctcccgctgcctctggactctagctccgtgcgaatactttcccttgtcggcggaatgagctttagctgcttgctgcagtcaacatgtctggcatggtctttcacctcccgactcgacaaacagaattttaagaccggtcccaaacgaggtccgcttcccgcttcggaggacattaagttacagacgtag

SEQ ID NO: 159718 - DNA, 2270 bp, Artificial Sequence
  derived and/or modified sequence
ggacagaaaactccctccttttccaagttagccttatagtctagggcttaaaatactggtttaatggtgaaggtaagtgcttttcttctttttgggtagaaggattattactaacttaccaaaggtccattaaggggagggaacagttttaggagaagtcagagaaaagacattaacagcaacataaggatctccatctggtaatattgcctaattccaaaatgaagagactctctgaaaaagataactgattcaatgaagaccctagggcaaggcttgagaagccactggtaccaatggacactgtggacaatggtcatttctccaaggacgctataaaagactgtcgtagtaaaagagattcagggcacagggaaactccaccacaaagcgtggtaccatttcccacagaagctaaatggacgggaagcctgccaccaggaaaggtccagatttctgttcattacgctatgggctggctcttatcatgcacttctcaaacttcaccatgataacgcagcgtgtgagtctgagcattgcgatcatcgccatggtgaacaccactcagcagcaaggtctatctaatgcctccactgaggggcctgttgcagatgccttcaataactccagcatatccatcaaggaatttgatacaaaggcctctgtgtatcaatggagcccagaaactcagggtatcatctttagctccatcaactatgggataatactgactctgatcccaagtggatatttagcagggatatttggagcaaaaaaaatgcttggtgctggtttgctgatctcttcccttctcaccctctttacaccactggctgctgacttcggagtgattttggtcatcatggttcggacagtccagggcatggcccagggaatggcatggacaggtcagtttactatttgggcaaagtgggctcctccacttgaacgaagcaagctcaccaccattgcaggatcagggtcagcatttggatccttcatcatcctctgtgtggggggactaatctcacaggccttgagctggccttttatcttctacatctttggtagcactggctgtgtctgctgtctcctatggttcacagtgatttatgatgaccccatgcatcacccgtgcataagtgttagggaaaaggagcacatcctgtcctcactggctcaacagcccagttctcctggacgagctgtccccataaaggcgatggtcacatgcctaccactttgggccattttcctgggttttttcagccatttctggttgtgcaccatcatcctaacatacctaccaacgtatatcagtactctgctccatgttaacatcagagatagtggagttctgtcctccctgccttttattgctgctgcaagctgtacaattttaggaggtcagctggcagatttccttttgtccaggaatcttctcagattgatcactgtgcgaaagctcttttcatctcttgatatgcaagtttcctcatgggaatctcaaggggatttgggctcatcgcaggaatcatctcttccactgccactggattcctcatcagtcaggattttgagtctggttggaggaatgtctttttcctgtctgctgcagtcaacatgtttggcctggtcttttacctcacgtttggacaagcagaacttcaagactgggccaaagagaggacccttacccgcctctgaggacataaagttacaaacttaaatgtggtactgagcatgaactttttaaacattttttacttctctccatattcctgaccatagactcagcagttcttaactctggctgtgtgttagtcttccctggggagcctttataagacactgatacttgggacccactccagagattctgaatgaattggtctggggtggaacccagatactactaatttttagatactccttagaggtttctagcatgcgcccggggttgacaacagctggacaaacttgaaaagtcaattcatgtggcctttgaattttcctcattggaaagtactaaataaataaaaattcatgtgaaaatgatcactgataaatatcttcatggtggggcaggttattggatgcagagaagatctgctcggaattgtagccatatgttacagatctcagcaccgatcggaactgtaaagctataatccccagaattaaagtttttattattttttatacattgtaaaacatagacgtttatttatgtgattaaattctattaaaatttacatgctaaaataaaa

SEQ ID NO: 159719 - DNA, 1311 bp, Artificial Sequence
  derived and/or modified sequence
atggacggcaagcccgccaccagaaagggccccgacttctgcagcctgagatacggcctggccctgatcatgcacttcagcaacttcaccatgatcacccagagagtgagcctgagcatcgccatcatcgccatggtgaacaccacccagcagcagggcctgagcaacgccagcaccgagggccccgtggccgacgccttcaacaacagcagcatcagcatcaaggagttcgacaccaaggccagcgtgtaccagtggagccccgagacccagggcatcatcttcagcagcatcaactacggcatcatcctgaccctgatccccagcggctacctggccggcatcttcggcgccaagaagatgctgggcgccggcctgctgatcagcagcctgctgaccctgttcacccccctggccgccgacttcggcgtgatcctggtgatcatggtgagaaccgtgcagggcatggcccagggcatggcctggaccggccagttcaccatctgggccaagtgggccccccccctggagagaagcaagctgaccaccatcgccggcagcggcagcgccttcggcagcttcatcatcctgtgcgtgggcggcctgatcagccaggccctgagctggcccttcatcttctacatcttcggcagcaccggctgcgtgtgctgcctgctgtggttcaccgtgatctacgacgaccccatgcaccacccctgcatcagcgtgagagagaaggagcacatcctgagcagcctggcccagcagcccagcagccccggcagagccgtgcccatcaaggccatggtgacctgcctgcccctgtgggccatcttcctgggcttcttcagccacttctggctgtgcaccatcatcctgacctacctgcccacctacatcagcaccctgctgcacgtgaacatcagagacagcggcgtgctgagcagcctgcccttcatcgccgccgccagctgcaccatcctgggcggccagctggccgacttcctgctgagcagaaacctgctgagactgatcaccgtgagaaagctgttcagcagcctggacatgcaggtgagcagctgggagagccagggcgacctgggcagcagccaggagagcagcctgcccctgcccctggacagcagcagcgtgagaatcctgagcctggtgggcggcatgagcttcagctgcctgctgcagagcacctgcctggcctggagcttcaccagcagactggacaagcagaacttcaagaccggccccaagagaggccccctgcccgccagcgaggacatcaagctgcagacctag

SEQ ID NO: 159720 - protein, 137 aa, Artificial Sequence
  derived and/or modified sequence
MSSLIRRVISTAKAPGAIGPYSQAVLVDRTIYISGQIGMDPSSGQLVSGGVAEEAKQALKNMGEILKAAGCDFTNVVKTTVLLADINDFNTVNEIYKQYFKSNFPARAAYQVAALPKGSRIEIEAVAIQGPLTTASL

SEQ ID NO: 159721 - DNA, 414 bp, Artificial Sequence
  derived and/or modified sequence
atgagttctctcatccgtcgggtaatctccaccgcaaaggcccccggggccattgggccttatagccaggccgtactggtggaccgcacgatctatatttcggggcagatcggtatggatccatccagcgggcagctcgtctccggcggggtggctgaggaagcaaaacaggccctcaaaaatatgggcgaaatcctgaaggccgcgggatgcgactttaccaatgtggtgaaaacaactgtcctgttagccgatatcaatgacttcaacacagttaacgaaatctataaacaatattttaagagcaatttcccagctagagctgcttaccaagtggccgctctgcccaaaggctcaagaatcgaaatagaagctgtggcaatccagggacctctgactacagcttcactctag

SEQ ID NO: 159722 - DNA, 1057 bp, Artificial Sequence
  derived and/or modified sequence
agttcccagaatgccgcacgagcccgcccccagcgggagctgtggggcagaggcgctgctgtggttggtcagtccagtaagaagccagcagggctggtgctggggcttcttctcctgaaggggctgcaagagggaaggcttagccatgtcgtccttgatcagaagggtgatcagcaccgcgaaagccccaggggccattggaccctacagtcaagctgtattagtcgacaggaccatttacatttcaggacagataggcatggacccttcaagtggacagcttgtgtcaggaggggtagcagaagaagctaaacaagctcttaaaaacatgggtgaaattctgaaagctgcaggctgtgacttcactaacgtggtgaaaacaactgttcttctggctgacataaatgacttcaatactgtcaatgaaatctacaaacagtatttcaagagtaattttcctgctagagctgcttaccaagttgctgctttacccaaaggcagccgaattgaaattgaagcagtagctatccaaggaccactgacaacggcatcactataagtgggcccagtgctgtgtagtctggaattgttaacattttaatttttacaattgatgtaacatcttaattaaccttttaattttcacaattgatgacagtgtgagtttgatgaaaatatctgaagctattatggaaataccatgtaatagggagagttgaacatgaatattagagaaggaatccagttacttttttaaattacacctgtgtgcacctgtattactgaatataggaaagagatacccattacatagttactcagtaaacaaaagagaaataccaggtaggaaagaagagttactattcctgagaaataatcaagaacatatttaatttaaactaatgatgtgaactatttagttttgatgtccgttatgtgattctgcttttacttgagtaaaattaaagtgtttaaatttgagatcaaggagaagatagtggaacaaaatgttatatagataatatttttctaatggaaataaaataggcagatttcc

SEQ ID NO: 159723 - DNA, 414 bp, Artificial Sequence
  derived and/or modified sequence
atgagcagcctcatccggcgggtcatcagcacagccaaggcccctggggccatcggcccctacagccaggccgtgctggtggacaggaccatctacatcagcggccagatcggcatggaccccagcagcggccagctggtgtctgggggcgtggccgaggaggccaagcaggccctgaagaacatgggagagatcctgaaggctgctggctgtgacttcaccaacgtggtgaagaccaccgtgctgctggccgacatcaatgacttcaacacagtgaatgagatctacaagcagtacttcaagagcaacttccctgcccgggccgcctaccaggtggccgccctgcccaagggcagcagaattgaaattgaagctgtggccatccagggccccctgaccacagccagcctgtag

SEQ ID NO: 159724 - DNA, 414 bp, Artificial Sequence
  derived and/or modified sequence
atgagcagcctgatccggcgggtgatcagcaccgccaaggcccccggggcaataggtccctattcccaggcagttctagtggaccgcactatttacatcagcggccagattggcatggatccaagtagtgggcagcttgtctcgggaggtgttgccgaggaagccaaacaggctctgaagaatatgggcgaaatcctcaaagcagcgggatgtgatttcaccaacgtcgtgaaaactacagtgttgctagctgacattaatgatttcaacacagtgaatgaaatatataagcagtatttcaagtccaatttcccggcccgggctgcttatcaggtggccgccctccccaagggcagtcgaatcgagatcgaagccgtggctattcaaggacccctgacaacagccagcttgtag

SEQ ID NO: 159725 - DNA, 414 bp, Artificial Sequence
  derived and/or modified sequence
atgtcctcactcattaggagggtgatctcaactgcgaaggctcctggggcaataggtccatactcccaggctgtccttgtcgatcgaacaatttacatctccggccagatcgggatggatccctcgagcggccagcttgtgagtggcggagtcgcagaagaggctaagcaagcactgaaaaacatgggggaaattttgaaagccgctggatgtgactttactaatgtggtgaagacaacagtcctgctggcagacatcaacgattttaatacggttaatgaaatctacaaacagtatttcaagtcgaacttcccggctcgcgcagcttaccaggttgccgcattgccaaagggaagcaggattgagattgaggcggtagcgatccaggggcctctgaccacggcctctctttag

SEQ ID NO: 159726 - DNA, 414 bp, Artificial Sequence
  derived and/or modified sequence
atgagcagcctgatcagaagagtgatcagcaccgccaaggcccccggcgccatcggcccctacagccaggccgtgctggtggacagaaccatctacatcagcggccagatcggcatggaccccagcagcggccagctggtgagcggcggcgtggccgaggaggccaagcaggccctgaagaacatgggcgagatcctgaaggccgccggctgcgacttcaccaacgtggtgaagaccaccgtgctgctggccgacatcaacgacttcaacaccgtgaacgagatctacaagcagtacttcaagagcaacttccccgccagagccgcctaccaggtggccgccctgcccaagggcagcagaatcgagatcgaggccgtggccatccagggccccctgaccaccgccagcctgtag

SEQ ID NO: 159727 - protein, 163 aa, Artificial Sequence
  derived and/or modified sequence
MMLPLQGAQMLQMLEKSLRKSLPASLKVYGTVFHINHGNPFNLKAVVDKWPDFNTVVVCPQEQDMTDDLDHYTNTYQIYSKDPQNCQEFLGSPELINWKQHLQIQSSQPSLNEAIQNLAAIKSFKVKQTQRILYMAAETAKELTPFLLKSKILSPNGGKPKAM

SEQ ID NO: 159728 - DNA, 492 bp, Artificial Sequence
  derived and/or modified sequence
atgatgctaccactccaaggggcacagatgctgcaaatgttggagaaaagtctgaggaaatccctgcccgcaagccttaaagtttatggtacggtttttcacatcaatcatggcaatccttttaaccttaaagccgtggtggataaatggcccgacttcaataccgttgttgtgtgcccgcaagaacaggatatgaccgacgatctggaccattacactaacacatatcagatatattccaaagatccgcaaaattgccaggaatttctcgggtcaccagagttaatcaactggaaacagcatctgcaaattcagagcagccagccatcactcaacgaagctatccagaatctcgcagctataaagtccttcaaggttaagcagacacagcggattctatacatggccgcagaaacagccaaagagcttacgccattcttactgaagagtaagattctgtcccctaacggagggaagcccaaggctatgtag

SEQ ID NO: 159729 - DNA, 1150 bp, Artificial Sequence
  derived and/or modified sequence
agaaatttctggaggtggtgtatcaaaatttactctgcgagactctgctgaactggctgcatcagggagaaatttcatctcccagaagggtgttgctcatcgtttcttcccggaaacatctgcagagactagcttttcaggctaaggtatcctccatgatgttaccattgcaaggtgcccagatgctgcagatgctggagaaatccttgaggaagagcctcccagcatccttaaaggtttatggaactgtctttcacataaaccatggaaatccattcaatctgaaggctgtggtggacaagtggcctgattttaatacagtggttgtctgccctcaggagcaggatatgacagatgaccttgatcactataccaatacttaccaaatctactccaaagatccccaaaactgtcaggaattccttggatcaccagaactcatcaactggaaacagcatttacagattcaaagttcacagcctagcctgaatgaggctatacaaaatcttgcagccattaagtccttcaaagtcaaacaaacacaacgcattctctatatggcagctgaaacagccaaggaactgactcctttcctgctgaaatcaaagattttatctcccaatggtggcaaacccaaggccatgtgagtttgataaaatccagtctataccactcacacctctcaagtaacctcccaacttctctccctgcattcactctggctttcctacaatcaatgttgtacaaagaaatcagaattacatttttaaaaaatgtaactcagaacatgtttctctcctgcttaaaagactccaccatctcccttctcatctagaataaaccaggcctctggctaccacttggacctttattgcccttcctgctttcttcctccaacagctctgaccttcactctgttcctctttcatcacaagctcatctatattccaggacttcacatttgttatttcttctgtctactctgtctctcaagacaatagaggtcacagcaaatacaaacctttatactaatggattttgttttcttcttggaccctccatagcaaccaagagatgtttaaactctcatccatggatgttacccatgctcacttggtgaataaattctggcattttggtggtaatgaga

SEQ ID NO: 159730 - DNA, 492 bp, Artificial Sequence
  derived and/or modified sequence
atgatgctgcccctgcagggcgcccagatgctgcagatgctggagaagagcctgaggaagagcctgcctgccagcctgaaggtgtatggaacagtgttccacatcaaccacggcaaccccttcaacctgaaggctgtggtggacaagtggccagacttcaacacagtggtggtgtgcccccaggagcaggacatgacagatgacctggaccactacaccaacacctaccagatctacagcaaggacccccagaactgccaggagttcctgggcagccctgagctgatcaactggaagcagcacctgcagatccagagcagccagcccagcctgaatgaggccatccagaacctggccgccatcaagagcttcaaggtgaagcagacccagaggatcctgtacatggctgctgagacagccaaggagctgacccccttcctgctgaagagcaagatcctgagccccaacggcggcaagcccaaggccatgtag

SEQ ID NO: 159731 - DNA, 492 bp, Artificial Sequence
  derived and/or modified sequence
atgatgctgcccctgcagggcgcccagatgctgcagatgctggagaagagtcttcgaaagtcccttcctgcttccttgaaggtgtacggaaccgtcttccatatcaatcatggtaaccccttcaatttgaaagcagtggtggacaaatggccagacttcaacactgtggtcgtgtgcccacaggaacaagacatgaccgacgaccttgaccattatacaaacacctatcagatatactctaaagacccgcagaactgccaggagtttcttggctcccccgagcttattaattggaagcagcacttgcagatccagagttcacagccatccctgaatgaggcaattcaaaatttggcggccatcaaatctttcaaagtcaaacagacacagagaattttgtatatggctgctgagacagcaaaggaattaactccttttttgttgaaaagtaaaattctctccccgaacgggggtaaacctaaagcaatgtag

SEQ ID NO: 159732 - DNA, 492 bp, Artificial Sequence
  derived and/or modified sequence
atgatgttgccccttcagggagctcagatgctccaaatgctcgagaagagcctgcgtaaatctctcccagcgtcgctgaaggtgtacggcaccgtgttccatatcaatcacggcaaccccttcaatctcaaagccgttgtggacaagtggcccgacttcaatacggtggtggtgtgccctcaagagcaggatatgacagatgacctggaccactatactaacacttaccagatttacagcaaagatccgcaaaactgtcaagagtttctgggctcccccgagcttattaactggaagcagcatctgcagatacagagctctcagccaagcctcaacgaggccattcagaacctggcagcaatcaagtccttcaaggtcaagcagactcagcgcatcttatacatggcagccgagaccgctaaagagctgactccatttctgcttaagtccaaaatcttgagcccaaacgggggaaagcctaaagcaatgtag

SEQ ID NO: 159733 - DNA, 492 bp, Artificial Sequence
  derived and/or modified sequence
atgatgctgcccctgcagggcgcccagatgctgcagatgctggagaagagcctgagaaagagcctgcccgccagcctgaaggtgtacggcaccgtgttccacatcaaccacggcaaccccttcaacctgaaggccgtggtggacaagtggcccgacttcaacaccgtggtggtgtgcccccaggagcaggacatgaccgacgacctggaccactacaccaacacctaccagatctacagcaaggacccccagaactgccaggagttcctgggcagccccgagctgatcaactggaagcagcacctgcagatccagagcagccagcccagcctgaacgaggccatccagaacctggccgccatcaagagcttcaaggtgaagcagacccagagaatcctgtacatggccgccgagaccgccaaggagctgacccccttcctgctgaagagcaagatcctgagccccaacggcggcaagcccaaggccatgtag

SEQ ID NO: 159734 - protein, 288 aa, Artificial Sequence
  derived and/or modified sequence
MDAAVTDDFQQILPIEQLRSTHASNDYVERPPAPCKQALSSPSLIVQTHKSDWSLATMPTSLPRSLSQCHQLQPLPQHLSQSSIASSMSHSTTASDQRLLASITPSPSGQSIIRTQPGAGVHPKADGALKGEAEQSAGHPSEHLFICEECGRCKCVPCTAARPLPSCWLCNQRCLCSAESLLDYGTCLCCVKGLFYHCSTDDEDNCADEPCSCGPSSCFVRWAAMSLISLFLPCLCCYLPTRGCLHLCQQGYDSLRRPGCRCKRHTNTVCRKISSGSAPFPKAQEKSV

SEQ ID NO: 159735 - protein, 125 aa, Artificial Sequence
  derived and/or modified sequence
MDAAVTDDFQQILPIEQLRSTHASNDYVERPPAPCKQALSSPSLIVQTHKSDWSLATMPTSLPRSLSQCHQLQPLPQHLSQSSIASSMSHSTTASSTTAPLMMKTTVLMSPALVGLVLALSAGQP

SEQ ID NO: 159736 - DNA, 867 bp, Artificial Sequence
  derived and/or modified sequence
atggacgccgccgtgaccgacgacttccagcagatcctgcccatcgagcagctgagaagcacccacgccagcaacgactacgtggagagaccccccgccccctgcaagcaggccctgagcagccccagcctgatcgtgcagacccacaagagcgactggagcctggccaccatgcccaccagcctgcccagaagcctgagccagtgccaccagctgcagcccctgccccagcacctgagccagagcagcatcgccagcagcatgagccacagcaccaccgccagcgaccagagactgctggccagcatcacccccagccccagcggccagagcatcatcagaacccagcccggcgccggcgtgcaccccaaggccgacggcgccctgaagggcgaggccgagcagagcgccggccaccccagcgagcacctgttcatctgcgaggagtgcggcagatgcaagtgcgtgccctgcaccgccgccagacccctgcccagctgctggctgtgcaaccagagatgcctgtgcagcgccgagagcctgctggactacggcacctgcctgtgctgcgtgaagggcctgttctaccactgcagcaccgacgacgaggacaactgcgccgacgagccctgcagctgcggccccagcagctgcttcgtgagatgggccgccatgagcctgatcagcctgttcctgccctgcctgtgctgctacctgcccaccagaggctgcctgcacctgtgccagcagggctacgacagcctgagaagacccggctgcagatgcaagagacacaccaacaccgtgtgcagaaagatcagcagcggcagcgcccccttccccaaggcccaggagaagagcgtgtag

SEQ ID NO: 159737 - DNA, 378 bp, Artificial Sequence
  derived and/or modified sequence
atggacgccgccgtgaccgacgacttccagcagatcctgcccatcgagcagctgagaagcacccacgccagcaacgactacgtggagagaccccccgccccctgcaagcaggccctgagcagccccagcctgatcgtgcagacccacaagagcgactggagcctggccaccatgcccaccagcctgcccagaagcctgagccagtgccaccagctgcagcccctgccccagcacctgagccagagcagcatcgccagcagcatgagccacagcaccaccgccagcagcaccaccgcccccctgatgatgaagaccaccgtgctgatgagccccgccctggtgggcctggtgctggccctgagcgccggccagccctag

SEQ ID NO: 159738 - DNA, 867 bp, Artificial Sequence
  derived and/or modified sequence
atggatgctgcagtgaccgacgacttccagcagatcctcccaatcgagcagctgaggtctacccacgccagcaatgattatgtagagaggccgccagcaccgtgtaagcaggccttatcgtcccccagcttgattgtccagacccacaagagcgactggagtctcgctaccatgcctacttccctgccccggagtctgtcgcagtgccaccaactgcaacccctacctcagcatctgtcccagagttctatcgcaagcagcatgtcacacagcaccaccgctagcgaccagagactactcgcttcaatcacccctagtccaagcggtcagtctatcattcgcacccagccaggtgctggagtgcacccaaaagcggatggggcattaaagggagaggccgagcagtctgctggacacccctctgaacacctcttcatttgcgaggagtgcgggcggtgcaagtgcgtgccttgcaccgcggccagacctctgccatcgtgttggctgtgtaatcaaagatgcctgtgtagcgcagagagcctcctggattacggaacctgtttgtgttgcgtgaaggggcttttttaccactgtagcaccgacgacgaggataattgcgcggacgagccgtgttcctgtggcccaagtagctgtttcgtgaggtgggcagccatgtccctaatctccctgtttttaccatgtctgtgctgctacttaccaactagagggtgtctccatttgtgccagcagggttatgattcattgcggagacctggatgtagatgtaaacggcacaccaatacagtgtgcagaaaaatcagctccggctcagctccttttcccaaggcccaggaaaaaagtgtgtag

SEQ ID NO: 159739 - DNA, 378 bp, Artificial Sequence
  derived and/or modified sequence
atggacgccgcagtgacagatgatttccaacagatacttcctattgagcagctgcggagcacccacgcatcgaacgactatgtcgaacgaccacccgccccctgtaagcaggctctgtcttctccatctctgatcgtacagacccataaatctgattggtcactcgcaactatgcccacttcgctgccgaggtccctgagtcagtgtcaccaattgcagcccctaccacagcacctgtcccagtcaagcatcgcctcaagtatgagccattcaactacggcttcttctaccacagcccccctgatgatgaagaccacggtgctgatgtcccccgctctcgtgggattggttttggccctctctgccggacagccctag

SEQ ID NO: 159740 - DNA, 867 bp, Artificial Sequence
  derived and/or modified sequence
atggatgctgctgtgacagatgacttccagcagatcctgcccatcgagcagctgcggagcacccacgccagcaatgactatgtggagcggcccccagccccctgcaagcaggccctgagcagccccagcctgattgtgcagacccacaagagtgactggagcctggccaccatgcccaccagcctgcccaggagcctgagccagtgccaccagctgcagcccctgccccagcacctgagccagagcagcatcgccagctccatgagccacagcaccacagccagtgaccagaggctgctggccagcatcacccccagccccagcggccagagcatcatccgcacccagcctggagctggggtgcaccccaaggcagatggagccctgaagggggaggccgagcagagcgctggccaccccagcgagcacctgttcatctgtgaagaatgtggccgctgcaagtgtgtgccctgcacagctgcccggcccctgcccagctgctggctgtgcaaccagcgctgcctgtgcagcgctgagagcctgctggactatggcacctgcctgtgctgcgtgaagggcctcttctaccactgcagcacagatgatgaggacaactgtgctgatgagccctgcagctgtggccccagcagctgctttgtgcgctgggccgccatgagcctcatcagcctcttcctgccctgcctgtgctgctacctgcccacccggggctgcctgcacctgtgccagcagggctatgacagcctgcggcggcccggctgccgctgcaagaggcacaccaacacagtgtgcaggaagatcagcagcggcagcgcccccttccccaaggcccaggagaagtctgtgtag

SEQ ID NO: 159741 - DNA, 378 bp, Artificial Sequence
  derived and/or modified sequence
atggatgctgctgtgacagatgacttccagcagatcctgcccatcgagcagctgcggagcacccacgccagcaatgactatgtggagcggcccccagccccctgcaagcaggccctgagcagccccagcctgattgtgcagacccacaagagtgactggagcctggccaccatgcccaccagcctgcccaggagcctgagccagtgccaccagctgcagcccctgccccagcacctgagccagagcagcatcgccagctccatgagccacagcaccacagccagcagcaccacagcccccctgatgatgaagaccaccgtgctgatgagccctgccctggtgggcctggtgctggccctgtctgctggccagccctag

SEQ ID NO: 159742 - DNA, 867 bp, Artificial Sequence
  derived and/or modified sequence
atggacgccgccgtgaccgacgacttccagcagatcctgcccatcgaacagctgcgctccactcacgcttctaacgactacgtggagaggcccccagcaccatgtaagcaggctctctccagtccctccttaattgttcagacacacaaaagtgactggtctctggcaaccatgcccacctctctgccgcgcagtctcagccaatgtcatcagctgcaaccgctcccccagcatctgagtcaaagcagtatagccagtagcatgtcgcacagcactacggccagtgatcagaggttgctcgcatccatcactccctctccttcggggcagtctatcatccgtactcaaccaggcgccggcgttcatccaaaggcagatggggccctcaagggcgaggctgagcagtctgccggacacccctctgagcatctgttcatttgcgaggagtgtgggcggtgcaagtgtgtgccttgcactgccgctcggccacttccctcatgttggctatgtaaccagaggtgcctgtgttcagcagaaagcctgctggattacgggacatgtttatgttgtgtcaaaggcctgttctaccactgtagtaccgacgacgaggacaactgcgctgatgagccttgtagttgcggaccctccagctgtttcgtccggtgggctgccatgtcgttgatcagcctatttctgccatgcctgtgttgctatttgccgacccgcggctgtcttcatctgtgtcagcaaggctatgatagcctccggcggcccggctgccgttgcaaaaggcatactaacaccgtgtgccgcaagattagctctggaagtgctccctttcccaaagcgcaggagaaatccgtgtag

SEQ ID NO: 159743 - DNA, 378 bp, Artificial Sequence
  derived and/or modified sequence
atggacgccgccgtgaccgacgacttccagcagatcctgcccatcgagcagctgcgaagtacacatgcatctaacgattacgtggagagacccccagctccctgtaagcaggctctgagctcgcctagtctcattgtgcagacccataagagtgattggtcgcttgcaactatgcccacaagcctgcctcggtccctctcccaatgccaccagcttcagcccctgcctcagcacctcagccagagctcgattgctagcagcatgagtcacagtaccacagctagctctaccacagccccgctgatgatgaaaactacggtcctcatgtcccccgccctcgttggcttagtgctggccctgagcgctggccagccttag

SEQ ID NO: 159744 - DNA, 867 bp, Artificial Sequence
  derived and/or modified sequence
atggacgcggctgttacagatgatttccaacaaattctgccgatcgagcaactgcgttcgactcacgccagcaatgactatgtggagagaccccctgccccatgcaagcaggccctgtcctccccatcattgatagttcagacacacaaatctgactggtctctggcaaccatgcccacatccctgcccagatcgctttcacagtgccaccagctacagcctctgccccagcatctttcccagagttctatcgcatccagtatgtcacactcgactactgctagcgatcagagacttctcgcctccataaccccgtccccctctggacagagcatcattagaacgcaaccaggggcaggtgtccatcccaaagcagacggtgccctgaagggagaagcagaacaatcagcaggccacccttctgaacacctcttcatatgtgaagaatgtggtcggtgtaagtgcgttccctgtactgcggctagacccttaccttcttgttggctctgcaaccaaaggtgtctctgctcggctgaatccctactggattatggaacgtgcttgtgctgtgtcaaagggcttttttatcactgttctaccgacgatgaagataattgcgccgatgagccctgctcatgtgggccatcaagctgcttcgttcggtgggctgctatgagtctgatttctctttttcttccttgcctctgctgctatttgcctaccaggggctgtctgcacctgtgtcagcaggggtacgattctttgaggcgcccaggctgccgatgcaaacgacacactaatacagtgtgccgcaagatctcttctggaagcgccccttttcccaaagcccaggaaaagtccgtgtag

SEQ ID NO: 159745 - DNA, 378 bp, Artificial Sequence
  derived and/or modified sequence
atggacgctgcagtgactgacgatttccagcagatccttcccatcgagcaactccggtcaacccacgcaagtaacgattacgttgaaagaccaccggctccatgtaagcaagctttgagctcccctagtctgattgtgcagacccacaagtccgactggtctctcgccacaatgccaaccagtttgcctaggagcttaagccagtgtcatcaactccaacccctaccacagcacttaagccagagcagcattgctagtagcatgagccatagcacgaccgcctcaagcactacagccccactgatgatgaagacaacagtgctgatgtcccctgcattggtgggattggttcttgcgttgtccgctggtcagccttag

SEQ ID NO: 159746 - DNA, 9019 bp, Artificial Sequence
  derived and/or modified sequence
tttgggaaatacgtccatcaagatttagatctgcctgtaaaatctatacaaagtatatgccactacaggtttgactcgccccctcccccgtttttttgttttgttttgttttgttttgttttgttttgtgttttctctgctgtgtcaaagaacaagacagaactatctctgtttctggctccactgcctgccagtgaaggagttttcattcagactttccgaagagaggtggagaaacctaaagactgaggagaagagatcctttgagccagatggggcattagttcttctgcttttctcagcatggataaaccatttcctcaaggattttctcatgtgccctgaaatccatgtaactacaagggctcctctttatcaccataagtgccaccctgacttaaaaccactcagagctaaaaaatcaaggcaaaatggatgctgcggtgacagatgattttcaacaaattctgcctattgaacagctgcgctctactcatgctagcaatgactacgtggaacggcctccagccccctgtaaacaggccctctccagcccttcccttattgtgcaaacccacaagtctgattggtctctggctaccatgcctacttctctcccccgcagtctcagccagtgccatcaactgcagcccttgcctcagcatctgagccaatctagcattgccagctcaatgtcccatagcaccactgcctctgatcaaaggctcttggccagcattacaccctcaccttcaggccaatccatcatccgaacccaacctggagcaggggtccacccaaaggctgatggtgctctgaagggagaagctgagcaatctgcagggcaccctagtgagcacctcttcatctgtgaggaatgtgggcgctgcaagtgcgtcccctgcacagcagctcgccctctcccctcctgctggctgtgcaaccagcgctgcctttgctctgctgagagcctcctcgattatggcacttgtctctgctgtgtcaagggcctcttctaccactgctccactgatgatgaagacaactgtgctgatgagccctgctcttgtgggcctagttcttgctttgtccgctgggcagccatgagcctcatctccctcttcctaccctgcctgtgctgctacctgcctacccgtggatgcctccatctgtgccaacagggctatgatagcctccggcgaccaggctgccgctgcaagaggcacaccaacactgtgtgcagaaagatctcttctggtagtgcacccttccccaaggcccaggaaaagtctgtatgaccttccaacaaggtggatccagagcttttctccttcgagtccccaacagcaaagcataggcctcatctttggagagggggaggagtgataaactagccaaagttagggcctctcttttgttcctgcagtgtcaggggaatgaccaagtacatcctggtgcaggatgccttgttctttctcacagtatctatcccactcctcttcagtctttacaccctgccagctcagcctttatggttgtcatggcaaattcaggtgatatatgggtatgaggtttgaacactgaggactgacagggccagcaacgtggaggtttaggggctccccaatgtaatacctctcgatgcaggctctgatcgtcactctgttttctgctgtgcctttggaagctttcttctaagatggttttcacaggtacatgtggaacagcgttcaaccttccagggaatacgaccccttctccctgttactgcccttctcttctttattcctctctcctctttcattattctgttctgtattcctttccccttcattctcaccctgtctgcttttactttttctctttcttcctccctttctccttctcccctccttctttttcagactgatcctttctctgcctgtatttctatctcatttgatctatatttgtctctctctacctgtccctttttctctaacatgtccaaaagtgctgtttttccatagatgtttccttagatgccaaactttgctatgctatactatttactaatttttattaagggaaatggattactgtaatgaactgatcactagcaatagtgtgtatcccgatgtgtgtgtgtgctcacaaccactctcacctgttcgtgagcgcatgaggcgaagttatcttatatttccaggtttaactagttggagtttttctccctttctcaataatcaacttatagtgctgacagattccactagcatgctgagtaggatagtaaatcaggatgctcataactttgtatgtctgacccaagtgccaaaggcagacgtgctttatagctaaatgaacaaagcaaaggatacagaggtatgttctctcttagaagctaacttccctgagactgcatggctcaggcgttaataatggacataaaaagtcataaaacgttagagctggaaggaatcttaactattaatctagttcaatgcccttattttacagatgggaaaactgaggcctggaggtaggaagggacttgcccccaaggccgcacactgagttaacagcagaattgagactggaatataggccttctgactcctagttcagtattcttacccctgtaccacattgagtcatgggactttttcctagggctctattaacagtgacagaaagccattcccattcaattacttttcaggaaccatgcctagttagtgtggtggtctttctccagtgcatggtgggtagctaattaactatcaggtgttgaggctgcccccagtggacatcacctttggctctgtcaccttgtagaagctcaagtgtggaaaagaaaagcttaaagaagccctaaccaagctgtatcttcgccattgcatctactctttgctgcacacactgtgcttgctcctggctttgtctgcaatggcagctgcctgagaacctaaatttcagcaacagtgaaaaactgagatgaaagatgtataatgtagagaactgacttctctcttaaaaagtacagagagcctgtgctgtgaacccccttcaatgggaaaaagctgcagtggtgatggcaggctcctaaagactgctgctaaaagacacaagaattatacagtttccctctataagtgaatccaaaattcactgacgaattcagagattgagggcacttgcttgaaatcaaggtgctccaacttagtttaagacctccagactctaactttatagatcatctcttctagagtgtgcatggatgtgtgttgcagggtggagaagtggggagaagtgtatagtagtacacggggggaagaggggacctccatgtccctttgttggatacatattacagaaatatgtgccactcactttttgttggttctgaatcttcctgaagtgtactgacatttgggctgcacagagccccacaccttcacttacacctcctcttctagaattgctttgctctatttttgtatatataaatatgttatgatgattattaataatgttaatgatattgctgcaaatggtgccatatataaggttaggcttcttggaacatttataaacccaaaccaatacctgtaacctcttatgttgctttcagatccttcaattttaagtaactttttaatcttacaagtctgcttgattgtactttacacttatctaccctgaaaagctctgcccagttctctgggtcaagctggatggtgatgagtagcaacacacacttctctgcttctgcctgaaatgtgcttagagctcagttatctaaggattctctgacactagtgcattgttcctggagctaaattattctatggatgtttgcttattagtttcaggccccaaaataacacgagcccctccaccttgatagctccttgatatcccaatcttgcagtcctaactcaggcaaattgtgcactgccagaggggccctgggttctgccatatacccagaggagcctttctcagtgtgtttctaaatggccttacacttggtagaagaaattgaagggttactcaaatacagttgcaatctgcaatctgctgttgagtcagggctttcacttgtgtccaagttggcctgatatggactgcatctgctttacgtatagatgggtcctgttgggatatgcgcatggacgtgtgagtgagtgtgcgtatgtatcccttctgtgattatatatattcacacatctctatatattttaatgtattgcacatgtatatttaaaatatatacgaaagaactctaaatcctgcagggaggctctgttttcattatttttctactttgtgtcatgtcctgtataaacaggaatatttagagggtgtttcctgcttagcatttttttgcagttaaatcatctgttagcccctaactctactgccttccacatattggttccttgatacatttcatatgatatcagccaagagttttcctgtggttccagcccatcttccctaatcacaatagcaataataaatatagtgaatacttacatagtgcttactatatgctaagcactatttttagcatgttatttatattagctcattcattcctcacaattctacaacataggtatcattccaacctctattttacagatgagaaaactgaagcacagagaagttaagtgacttgccaaaaggtaacaattgtaaatggtagagctaagatttgaacccagggtgtctgactcccaggtccatgctccagagtcagatatagaaggctggagcacagtgtaaaccattctggagtaacaagcctcaaatggtgaataattctttccctaactctggtccacctgcaacctaggagttaaaataagtatcttgctatgttaagagtaaagcaatagttacaggcatcatatattagctgtcttgctcccaaaatggtgacattacaaacttttccactattccctttgaaaacatgcttgcagccagttaccatttcttagcttatgatgtagagctattaagggagtattttcacttgtgccaaagagggtaagcgtttattagccttatctttattggccagggaaaactaattcaatttttttttgaacaaagtataactgagactatttttggagcttaagatttgttagagctgttaacattcaaccttattgattatattgagagcgctcttctgattcaaatgtaagcaaaccactgatgaccactggtccgtataacacattttaccaacagctccttcacactgaatcctttaacttggccaaaggacccttaaagaacatctagtccaatgtcaacattttatagctggagaaagggatgcacagagagggaaaataacctgtccaaagtcacacagttctgaaaattgagtggaattatgactttataccagagttcctaatttccaggtatcttagcctcagtttcttaaaaaatagagtttgaagcaaaagctatgtgcgatccagggtagtatgagtaaggaaagggttaatgagggagggaagaaagaagaacaaataaaaagcatgtcactgagttggccacggtctgttccttggcaagctaatttcgcaattttttgtgacagaccatataaaactactacatctccatacagcccacgtggtggaggaaaggaggtgaattcatctgctagctctcatctcattagtcaaattcttccccatgtgatatttacccttctacatttttgggtagtgcgtgatgggcacttaaatatgtaccttggcatttcatgcttcagcaataatgggaaggattgtggctccactataaacagtaaggcaagtatatgaatatagggagattaaatttaaagtgctacactagggtggtgcttttaccttatgtctttaatcacattccttcgaagtaagttagagataacctaccacctttaaagtaaataaagctttattgtggctcttagaactgtactatgtttgccttcctgagcctatttattctctagcttgctttaaagggcttcttttttatatggaaattaattccctgttcaattaaaggagtaacaaactctcaaaatatctttcttcttaatataaaaaggaatttcacattattgaactcctcaaaaagcatgtgtaagtcaaaatatgtatgtgaaggcacatatgttcttttaggttccatgagcataatagcaggaaaactggttaagtcaataaatgctggggaaaaaatggctaaacaaggtattctgtaacatgaaaataaagcaatgagttggttggctggctttttaaaaaatatttcagccactaattatgacacagacacattataagaattatgctaccttttattcacatatacaatagttccctgtgtcctatagatcattgtcacataaagcaaaagcattagtgccccatttggacctttggccgaaggtttgataagattttgtaggactgaaattcttggtccctttatcctagtttaggcccatatccttattttcactctcaaagataagatcatgacactaccagtgttgctgctgttaaaggccaggatggacaagataaggaaaggcattttgggaatgacactgactaatgttaggaatcttgctgtcattacaatccaagttatatatgtttgctcccatatgtatttgttggccaatctcctgaaaaagaagaaggtaattctaacccacacattgtcattcccaaactaacctggcaatccttttgaccataccaggtaatagtcatccctctgatggtaaaagacagagatgtcaaggctctggaagctcccaggtccttgaagaactaactaaactgctgaacacagaagtggtaatgtaggcaagccacaggtatgttctcttgtaacaagatggggttgaccatatgtgaaccctgaagagtcattttgaacctgtgtcctaaggcctagagtactttaatcctcatcttcaaagtcttaccactctgataacaaaaagaaacactacaaagaaactgcaaggaaagggacagtcattttttttaatatctaccaattatttagttattcatatatgcatttctttatatagaaaagtatttatatgaagtttccaaaagactctgatattcagctttatagtcttggatagaaaatcatgtgtccttggatggggattcgcacaccaaggcttaacagaattagtttggggaatactcatttttactctagagattagttggcttaaacaactttactcgtgaatttttttcttaatggaggtgaagacctcccaaagaggagaaggccccaggcctttcttaatatataaaccatattgaaagaaagaaagaaaaaagtaatgggaagtaatagtaaatgtggatccagaaagaaaaacaaaggttaagaaaatgatgtatgtgaaagaaaaaaagctctataatcagtgtgtttctctcacctaaaacaccatttactaactacttggttcagttgtaccctttaactctattttgtccttgacttatatcaacactcttcttttccaaactcctatagctctccatctggaatgattctatggggtggggggtcgggggaggagaaagggagacagcagaagaaagaaagagagagaaagatagagagagagagagagatgggtggagacttggcctctctcctagaggttcaaagttagaatatgccactaacactatctgcctttcaaactcccttctaggacatgctccatagtacttagatcttatatcaaatgacaaggtttctctccttcagagagaaataccagactggatttgtggtttccctggattggttttttctgagtcaaagtggtgttgtagaaatcacagtaccctgagaccaattaagtcagaatctttggaggtgttgaggaatggatttttaaagttcccagatgattataatatgcaaacagatttgagaaaattgaatcactttattccataaatgcagatagtgaggctaagagagggaaagtgacttactcataaccacaccgtgagttagtgaccaagtcaggataagaatccaggtctgctgactcctaggccagaattcttgtctttatactacactgcttctatctctaccctattccccctctgagcctttgcttttctcatctgtaaaatgacgataataaagcctagagagtgtatgagaatcattaaagcagaagcatttttcttaatgtacaaggttctatacaaatgcaagggaattaatgtataacatatatgtggggctaagtctctaaaacaacataataaaagttgtttttattttagtcaatcttttaggtattgtgtctacctgatagcatgtaacaagattgaacacttgtgtaggtcgtatgtgcctttaatctgaggttggcctcagtgacaatcaaaattagcagttgaggaaaaaggtcatacatttttctcttgcccttgctggaatagggatcaagaggaatataaaagcagtgggatatctggatttcttatactcagtcaaccacaacatggccttagtactgaactagcccagggtttcaatggaactcgtagatctcattcccaaggctggtcctggttgaagggagaaggtcaaaaaaggacgtgtcttctgaaaggcattacccatggaaagccaagggggagggttgcccactaggaggagcttcttttgtagaagccagaatggaggaaaggggctttctgacttggagcatctgaggaaatagattatttgaggatctagtactcccagaataatctgtaaccacaagaaacacatttcttgaactccagcgccccagaacaggatatccatatccaatcccatcgtatccatcctggatgttatgaatttccagagagggccacttctacccccctaggagtcatacatctggctacttatttgttaaaaataaaattctgtaccatttataaaa

SEQ ID NO: 159747 - DNA, 3302 bp, Artificial Sequence
  derived and/or modified sequence
tttgggaaatacgtccatcaagatttagatctgcctgtaaaatctatacaaagtatatgccactacaggtttgactcgccccctcccccgtttttttgttttgttttgttttgttttgttttgttttgtgttttctctgctgtgtcaaagaacaagacagaactatctctgtttctggctccactgcctgccagtgaaggagttttcattcagactttccgaagagaggtggagaaacctaaagactgaggagaagagatcctttgagccagatggggcattagttcttctgcttttctcagcatggataaaccatttcctcaaggattttctcatgtgccctgaaatccatgtaactacaagggctcctctttatcaccataagtgccaccctgacttaaaaccactcagagctaaaaaatcaaggcaaaatggatgctgcggtgacagatgattttcaacaaattctgcctattgaacagctgcgctctactcatgctagcaatgactacgtggaacggcctccagccccctgtaaacaggccctctccagcccttcccttattgtgcaaacccacaagtctgattggtctctggctaccatgcctacttctctcccccgcagtctcagccagtgccatcaactgcagcccttgcctcagcatctgagccaatctagcattgccagctcaatgtcccatagcaccactgcctcttctaccactgctccactgatgatgaagacaactgtgctgatgagccctgctcttgtgggcctagttcttgctttgtccgctgggcagccatgagcctcatctccctcttcctaccctgcctgtgctgctacctgcctacccgtggatgcctccatctgtgccaacagggctatgatagcctccggcgaccaggctgccgctgcaagaggcacaccaacactgtgtgcagaaagatctcttctggtagtgcacccttccccaaggcccaggaaaagtctgtatgaccttccaacaaggtggatccagagcttttctccttcgagtccccaacagcaaagcataggcctcatctttggagagggggaggagtgataaactagccaaagttagggcctctcttttgttcctgcagtgtcaggggaatgaccaagtacatcctggtgcaggatgccttgttctttctcacagtatctatcccactcctcttcagtctttacaccctgccagctcagcctttatggttgtcatggcaaattcaggtgatatatgggtatgaggtttgaacactgaggactgacagggccagcaacgtggaggtttaggggctccccaatgtaatacctctcgatgcaggctctgatcgtcactctgttttctgctgtgcctttggaagctttcttctaagatggttttcacaggtacatgtggaacagcgttcaaccttccagggaatacgaccccttctccctgttactgcccttctcttctttattcctctctcctctttcattattctgttctgtattcctttccccttcattctcaccctgtctgcttttactttttctctttcttcctccctttctccttctcccctccttctttttcagactgatcctttctctgcctgtatttctatctcatttgatctatatttgtctctctctacctgtccctttttctctaacatgtccaaaagtgctgtttttccatagatgtttccttagatgccaaactttgctatgctatactatttactaatttttattaagggaaatggattactgtaatgaactgatcactagcaatagtgtgtatcccgatgtgtgtgtgtgctcacaaccactctcacctgttcgtgagcgcatgaggcgaagttatcttatatttccaggtttaactagttggagtttttctccctttctcaataatcaacttatagtgctgacagattccactagcatgctgagtaggatagtaaatcaggatgctcataactttgtatgtctgacccaagtgccaaaggcagacgtgctttatagctaaatgaacaaagcaaaggatacagaggtatgttctctcttagaagctaacttccctgagactgcatggctcaggcgttaataatggacataaaaagtcataaaacgttagagctggaaggaatcttaactattaatctagttcaatgcccttattttacagatgggaaaactgaggcctggaggtaggaagggacttgcccccaaggccgcacactgagttaacagcagaattgagactggaatataggccttctgactcctagttcagtattcttacccctgtaccacattgagtcatgggactttttcctagggctctattaacagtgacagaaagccattcccattcaattacttttcaggaaccatgcctagttagtgtggtggtctttctccagtgcatggtgggtagctaattaactatcaggtgttgaggctgcccccagtggacatcacctttggctctgtcaccttgtagaagctcaagtgtggaaaagaaaagcttaaagaagccctaaccaagctgtatcttcgccattgcatctactctttgctgcacacactgtgcttgctcctggctttgtctgcaatggcagctgcctgagaacctaaatttcagcaacagtgaaaaactgagatgaaagatgtataatgtagagaactgacttctctcttaaaaagtacagagagcctgtgctgtgaacccccttcaatgggaaaaagctgcagtggtgatggcaggctcctaaagactgctgctaaaagacacaagaattatacagtttccctctataagtgaatccaaaattcactgacgaattcagagattgagggcacttgcttgaaatcaaggtgctccaacttagtttaagacctccagactctaactttatagatcatctcttctagagtgtgcatggatgtgtgttgcagggtggagaagtggggagaagtgtatagtagtacacggggggaagaggggacctccatgtccctttgttggatacatattacagaaatatgtgccactcactttttgttggttctgaatcttcctgaagtgtactgacatttgggctgcacagagccccacaccttcacttacacctcctcttctagaattgctttgctctatttttgtatatataaatatgttatgatgattattaataatgttaatgatattgctgcaaatggtgccatatataaggttaggcttcttggaacatttataaacccaaaccaatacctgtaacctctt

SEQ ID NO: 159748 - protein, 315 aa, Artificial Sequence
  derived and/or modified sequence
MEARAQSGNGSQPLLQTPRDGGRQRGEPDPRDALTQQVHVLSLDQIRAIRNTNEYTEGPTVVPRPGLKPAPRPSTQHKHERLHGLPEHRQPPRLQHSQVHSSARAPLSRSISTVSSGSRSSTRTSTSSSSSEQRLLGSSFSSGPVADGIIRVQPKSELKPGELKPLSKEDLGLHAYRCEDCGKCKCKECTYPRPLPSDWICDKQCLCSAQNVIDYGTCVCCVKGLFYHCSNDDEDNCADNPCSCSQSHCCTRWSAMGVMSLFLPCLWCYLPAKGCLKLCQGCYDRVNRPGCRCKNSNTVCCKVPTVPPRNFEKPT

SEQ ID NO: 159749 - protein, 353 aa, Artificial Sequence
  derived and/or modified sequence
MEARAQSGNGSQPLLQTPRDGGRQRGEPDPRDALTQQVHVLSLDQIRAIRNTNEYTEGPTVVPRPGLKPAPRPSTQHKHERLHGLPEHRQPPRLQHSQVHSSARAPLSRSISTVSSGSRSSTRTSTSSSSSEQRLLGSSFSSGPVADGIIRVQPKSELKPGELKPLSKEDLGLHAYRCEDCGKCKCKECTYPRPLPSDWICDKQCLCSAQNVIDYGTCVCCVKGLFYHCSNDDEDNCADNPCSCSQSHCCTRWSAMGVMSLFLPCLWCYLPAKGCLKLCQGCYDRVNRPGCRCKNSNTVCCKVPTVPPRTLKNQHSIINQEYYSNEDFFFLFLIHICNQLNSYNLGTVNRKVG

SEQ ID NO: 159750 - DNA, 666 bp, Artificial Sequence
  derived and/or modified sequence
atggccgccgccggccccctgtgcaccgagagagtgagcgtgctgagccagcccaacagcggcgtggaggaccccacccccgccggcggcagaggccagggcagaagaagaggcagagaggagctggagagcatcggcgccggccccggcgccagcgtgagaatcctgcccgccctgagacccggcctgggcggcgtgtggggcgccggcgccgccagcctggtgttccaggccggccccggcagcagctggctgggctggcccgacctggacctggccctgtacagaggctgggcctgcagaagcgagggcaccgccaacgtggccttccccggcaccgccagccccggcttcagcagagccagacagaccagagacctgagaaagcccgccctgaagacccccagccacaccgccagccagctggccgccgaggccggcaaccccagcggcggctgccccagcatgagatgccagagaagagtgggcgccctggtgcccacctggaagggcggctggagagacggctggagcggcagcggcggcagagccaaggagagaatcctggccttcagcttccccgccggcggcggcatcagaggcgagagagtgcaggccgccagcaacaccagaatctgggaggagcccggcagcacccccaactag

SEQ ID NO: 159751 - DNA, 948 bp, Artificial Sequence
  derived and/or modified sequence
atggaggccagagcccagagcggcaacggcagccagcccctgctgcagacccccagagacggcggcagacagagaggcgagcccgaccccagagacgccctgacccagcaggtgcacgtgctgagcctggaccagatcagagccatcagaaacaccaacgagtacaccgagggccccaccgtggtgcccagacccggcctgaagcccgcccccagacccagcacccagcacaagcacgagagactgcacggcctgcccgagcacagacagccccccagactgcagcacagccaggtgcacagcagcgccagagcccccctgagcagaagcatcagcaccgtgagcagcggcagcagaagcagcaccagaaccagcaccagcagcagcagcagcgagcagagactgctgggcagcagcttcagcagcggccccgtggccgacggcatcatcagagtgcagcccaagagcgagctgaagcccggcgagctgaagcccctgagcaaggaggacctgggcctgcacgcctacagatgcgaggactgcggcaagtgcaagtgcaaggagtgcacctaccccagacccctgcccagcgactggatctgcgacaagcagtgcctgtgcagcgcccagaacgtgatcgactacggcacctgcgtgtgctgcgtgaagggcctgttctaccactgcagcaacgacgacgaggacaactgcgccgacaacccctgcagctgcagccagagccactgctgcaccagatggagcgccatgggcgtgatgagcctgttcctgccctgcctgtggtgctacctgcccgccaagggctgcctgaagctgtgccagggctgctacgacagagtgaacagacccggctgcagatgcaagaacagcaacaccgtgtgctgcaaggtgcccaccgtgccccccagaaacttcgagaagcccacctag

SEQ ID NO: 159752 - DNA, 1062 bp, Artificial Sequence
  derived and/or modified sequence
atggaggccagagcccagagcggcaacggcagccagcccctgctgcagacccccagagacggcggcagacagagaggcgagcccgaccccagagacgccctgacccagcaggtgcacgtgctgagcctggaccagatcagagccatcagaaacaccaacgagtacaccgagggccccaccgtggtgcccagacccggcctgaagcccgcccccagacccagcacccagcacaagcacgagagactgcacggcctgcccgagcacagacagccccccagactgcagcacagccaggtgcacagcagcgccagagcccccctgagcagaagcatcagcaccgtgagcagcggcagcagaagcagcaccagaaccagcaccagcagcagcagcagcgagcagagactgctgggcagcagcttcagcagcggccccgtggccgacggcatcatcagagtgcagcccaagagcgagctgaagcccggcgagctgaagcccctgagcaaggaggacctgggcctgcacgcctacagatgcgaggactgcggcaagtgcaagtgcaaggagtgcacctaccccagacccctgcccagcgactggatctgcgacaagcagtgcctgtgcagcgcccagaacgtgatcgactacggcacctgcgtgtgctgcgtgaagggcctgttctaccactgcagcaacgacgacgaggacaactgcgccgacaacccctgcagctgcagccagagccactgctgcaccagatggagcgccatgggcgtgatgagcctgttcctgccctgcctgtggtgctacctgcccgccaagggctgcctgaagctgtgccagggctgctacgacagagtgaacagacccggctgcagatgcaagaacagcaacaccgtgtgctgcaaggtgcccaccgtgccccccagaaccctgaagaaccagcacagcatcatcaaccaggagtactacagcaacgaggacttcttcttcctgttcctgatccacatctgcaaccagctgaacagctacaacctgggcaccgtgaacagaaaggtgggctag

SEQ ID NO: 159753 - DNA, 948 bp, Artificial Sequence
  derived and/or modified sequence
atggaagcacgcgctcaatctggcaacgggtctcagcctcttctgcagactcccagagacggcggccgtcagaggggagagccggatcctagagatgccctgacccagcaggtgcatgttttatcactggatcagatcagggcgatccgcaacaccaacgagtacaccgaggggccaactgtggtgccacggccgggcctgaaaccagcaccgaggccgagcacccagcacaagcatgagagactgcacggactgccagaacataggcaacctcctagattacaacactcacaagtgcacagttctgcgagggcccctcttagtcgctccatttccaccgtgagctctggctcacggagtagtacccgcacaagcacgtcaagctcgagtagtgagcagagacttctgggctccagctttagctccggacctgtagccgatggcattattcgagtccaaccgaagtccgaattaaaacccggcgaactcaagcctctcagtaaagaggacttagggctgcacgcttaccgatgcgaggattgtgggaagtgcaagtgtaaggaatgtacttatccccgccccctcccatcagattggatttgcgacaaacaatgtttgtgcagtgcgcaaaacgtcatcgactacggcacctgcgtgtgctgcgtgaaggggctgttctaccactgtagtaacgatgacgaggacaactgcgctgacaacccatgctcttgcagtcagagccactgctgcactaggtggagcgcaatgggtgttatgtcactcttcctgccctgcttatggtgctaccttccagcaaagggctgcctgaaactgtgtcaaggctgctacgaccgagtcaacagacccggctgccgctgcaagaattcgaataccgtttgctgcaaggttcctacagtcccgcccaggaacttcgagaagcccacatag

SEQ ID NO: 159754 - DNA, 948 bp, Artificial Sequence
  derived and/or modified sequence
atggaggccagagcccagtcaggaaacggatctcaacctttgttgcagaccccccgagacggcgggcgacagcgaggggaacctgatcccagggacgcacttacccagcaagttcacgtgcttagcctggatcagatcagagccattcgtaatactaacgaatacacagagggaccaacagtcgtccctaggccaggactaaaaccagctcctcgccctagcacacaacacaaacatgaacggctacacggcctgccagaacaccgacagccgccaagactgcagcacagccaggttcacagctctgcccgcgctcctctatctagaagcatttctacggtgtcctccggcagccgatcgtctacgcgaacatcaacaagcagcagtagcagtgaacaacgcctgctgggtagcagtttctcatctggtccagtggcagacggcatcattagggtgcaaccaaaatccgaacttaagcccggggagctaaagcccctgtccaaagaagatctcggcctgcacgcctacagatgcgaggattgtggaaaatgtaaatgtaaggaatgtacatatccaagaccactaccatcggattggatctgcgataaacagtgtctttgctccgctcaaaatgtgatcgattacggcacctgcgtttgttgtgtaaagggcttattctatcattgttcgaacgacgatgaagacaactgtgcggacaacccttgctcgtgtagccaatcacactgctgcactaggtggtcagcaatgggggtgatgtcgctgttcctcccttgtctgtggtgctatcttccagcaaaaggctgtctgaaattgtgccagggctgctatgaccgggtgaacaggccaggttgcaggtgtaaaaactctaacaccgtctgttgcaaggtacccacggtgccaccgaggaacttcgagaaacctacgtag

SEQ ID NO: 159755 - DNA, 948 bp, Artificial Sequence
  derived and/or modified sequence
atggaggcgagggctcaatctggtaacggctcgcagcccctgttgcaaactccgagggatggaggccgtcagagaggcgagcccgacccccgtgatgctttgacacagcaggtgcatgtgctatctctggatcagatacgagctatccggaatacgaatgaatacacagaaggacctaccgtggtcccaagacccggcctaaaacccgcgcctcggccaagtactcaacataagcacgaacgattgcatggattacccgaacaccgtcagcccccaagactccagcactcccaggtgcattccagtgcccgcgctccactgtcacgctcaatcagcacagtctcctccggatcaaggagcagcacccggacctccaccagttctagttctagtgagcagagactgctcggttcaagcttttcctcaggtccggtggcagacggcatcattagagtgcagcccaaatccgagctcaaacccggcgaactcaagcccctctccaaggaggatctgggcctccatgcttaccgatgtgaagactgcgggaagtgcaagtgtaaggagtgcacctacccccgacccctgccctccgattggatttgtgacaagcaatgcctgtgctctgctcaaaatgtgatagactacggtacctgcgtctgctgcgtcaaaggactcttctaccactgttctaacgacgacgaggacaactgcgccgataacccctgtagttgctcgcagagtcactgttgtaccaggtggtccgctatgggcgtaatgagcctgttcctcccttgtctctggtgctaccttcctgcaaagggctgtttgaagctgtgtcagggatgttacgatagagttaacaggccagggtgccgatgtaaaaactctaacacagtctgctgtaaggtccccacagttcctccgaggaatttcgagaagccgacatag

SEQ ID NO: 159756 - DNA, 1062 bp, Artificial Sequence
  derived and/or modified sequence
atggaagccagggctcagtctgggaatgggagccaaccactgttgcagacccctcgtgacggcggaagacagagaggagagcccgatccacgcgatgctttaactcagcaggtccatgtgctgtcgctggaccaaattagagctattcgcaacactaatgaatatacggagggcccaaccgttgtccctcgcccaggcttgaaacccgcaccccgcccatctacccagcataagcacgaacggttgcacggattgcctgagcacaggcagccacctcggcttcagcactctcaggtgcacagtagcgccagggctcccctgagcagatctatcagtacggtatcttccggaagtagatctagtacccggactagcacttcatcgtcctctagcgaacagaggctgctaggctcatccttctctagcggcccagtcgccgacggcataatccgcgtccagcccaaatcggaactcaagcctggcgaactcaagcctctttccaaagaagatttgggcctgcatgcctaccgctgcgaggactgtgggaagtgcaaatgcaaggagtgtacatatccaaggccccttccgagcgattggatctgcgacaaacagtgcctctgttccgctcaaaacgttattgattatggaacttgtgtgtgttgtgtcaagggcctgttttatcattgctcaaatgatgatgaggataattgtgcagacaatccttgcagttgtagccagtcgcattgctgtacccgctggagtgctatgggggtcatgtccttgttcctgccatgcctttggtgttacctgcccgcgaaaggttgcttgaaattgtgccagggatgttatgatagggtgaatcgtcctgggtgccgttgcaagaattcgaacaccgtttgctgcaaggtcccaactgtaccgccgaggaccttaaagaaccagcacagtataatcaaccaggaatactatagcaatgaggactttttcttccttttcctgatccatatttgcaaccagctaaacagctataacctgggaactgttaacagaaaagtggggtag

SEQ ID NO: 159757 - DNA, 948 bp, Artificial Sequence
  derived and/or modified sequence
atggaggcccgggcccagagcggaaatggcagccagcccctgctgcagaccccaagagatggcggccggcagagaggagagccagaccccagagatgccctgacccagcaggtgcacgtgctgagcctggaccagatccgggccatccggaacaccaatgagtacacagagggccccaccgtggtgcccaggcctggcctgaagccagccccccggcccagcacccagcacaagcatgagcggctgcacggcctgcctgagcaccggcagcccccccggctgcagcacagccaggtgcacagcagcgcccgggcccccctgagccgcagcatcagcacagtgagcagcggcagccgcagcagcaccaggaccagcaccagcagcagcagcagcgagcagaggctgctgggcagcagcttcagcagcggccctgtggctgatggcatcatccgggtgcagcccaagtctgagctgaagccaggagagctgaagcccctgagcaaagaagacctgggcctgcacgcctaccgctgtgaggactgtgggaagtgcaagtgcaaggagtgcacctacccccggcccctgcccagcgactggatctgtgacaagcagtgcctgtgcagcgcccagaatgtgattgattatggcacctgtgtgtgctgcgtgaagggcctcttctaccactgcagcaatgatgatgaggacaactgtgccgacaacccctgcagctgcagccagagccactgctgcacccgctggagcgccatgggcgtgatgagcctcttcctgccctgcctgtggtgctacctgcctgccaagggctgcctgaagctgtgccagggctgctatgacagagtgaacagacctggctgccgctgcaagaacagcaacacagtgtgctgcaaggtgcccaccgtgcccccaagaaactttgagaagcccacctag

SEQ ID NO: 159758 - DNA, 1062 bp, Artificial Sequence
  derived and/or modified sequence
atggaggcccgggcccagagcggaaatggcagccagcccctgctgcagaccccaagagatggcggccggcagagaggagagccagaccccagagatgccctgacccagcaggtgcacgtgctgagcctggaccagatccgggccatccggaacaccaatgagtacacagagggccccaccgtggtgcccaggcctggcctgaagccagccccccggcccagcacccagcacaagcatgagcggctgcacggcctgcctgagcaccggcagcccccccggctgcagcacagccaggtgcacagcagcgcccgggcccccctgagccgcagcatcagcacagtgagcagcggcagccgcagcagcaccaggaccagcaccagcagcagcagcagcgagcagaggctgctgggcagcagcttcagcagcggccctgtggctgatggcatcatccgggtgcagcccaagtctgagctgaagccaggagagctgaagcccctgagcaaagaagacctgggcctgcacgcctaccgctgtgaggactgtgggaagtgcaagtgcaaggagtgcacctacccccggcccctgcccagcgactggatctgtgacaagcagtgcctgtgcagcgcccagaatgtgattgattatggcacctgtgtgtgctgcgtgaagggcctcttctaccactgcagcaatgatgatgaggacaactgtgccgacaacccctgcagctgcagccagagccactgctgcacccgctggagcgccatgggcgtgatgagcctcttcctgccctgcctgtggtgctacctgcctgccaagggctgcctgaagctgtgccagggctgctatgacagagtgaacagacctggctgccgctgcaagaacagcaacacagtgtgctgcaaggtgcccaccgtgccccccaggaccctgaagaaccagcacagcatcatcaaccaggagtactacagcaatgaagacttcttcttcctgttcctgatccacatctgcaaccagctgaacagctacaacctgggcaccgtgaacaggaaggtgggctag

SEQ ID NO: 159759 - DNA, 948 bp, Artificial Sequence
  derived and/or modified sequence
atggaggcccgggcccagagcggcaacggcagccagcccctgctgcagacccccagagacggcggacgccagaggggtgagcctgaccctcgggacgcactgacacagcaggtgcacgtgttgtcactggaccagatacgcgctatacgaaatactaacgaatatacagagggacctaccgttgttccccggccggggctgaagcctgccccccgtccaagtacacagcataagcacgaaagactgcatggcctgcctgaacatcggcagccacctcgactccagcacagtcaggtacacagttcagccagggctccccttagtcggtccatctccacagtgagctcaggtagtcggagttccacacggacctcgacgagctcgtccagctctgagcaaaggctgctcgggagcagtttctcctctgggcctgtggccgacggcatcattagggttcaacccaagagcgagctgaaacccggagagttgaagccgctgtcgaaagaggatcttggcctccacgcatatcgatgtgaggactgtggaaagtgcaaatgtaaggagtgtacttatccccgccctcttccttctgactggatttgtgataagcagtgtctgtgtagcgctcagaatgtcatcgactatggaacatgtgtttgttgcgtgaagggtctattttaccattgttctaacgatgatgaggataattgtgctgataacccctgttcctgttctcaatctcattgctgtacacgctggtccgccatgggcgtgatgtccctttttctcccttgcctgtggtgttaccttcctgccaaagggtgcctgaaactatgccagggctgttacgaccgcgtcaatcgccccggctgccgatgtaagaactcaaacactgtctgttgcaaagtaccaaccgttccaccccggaacttcgagaaaccgacatag

SEQ ID NO: 159760 - DNA, 948 bp, Artificial Sequence
  derived and/or modified sequence
atggaggcccgggcccagagcggcaacggcagccagcccctgctgcaaacccctagggatggcggacgccaaaggggagagccagatcctcgtgacgctctaactcagcaggtgcacgtgttgagcttagaccaaattcgagcaataaggaatacgaacgagtatacagagggacctacagtggttcccaggcccggactcaaaccagctccgaggccatcaacccaacacaagcatgaacgtctgcatggccttcctgagcaccgccagcctcctagacttcagcacagccaggtgcattcaagtgcccgcgctcccctgagtcggtccatcagcacggtctcctctgggtctcgaagcagtaccaggacctccacatcttcaagcagttcggaacaaaggttacttggaagttcctttagttccggcccggtagccgacggcattatccgggtccagcccaaatcggaacttaagccgggcgaattgaagcctctgagtaaggaggatctggggctgcatgcataccgctgcgaggactgcggaaagtgtaagtgtaaggagtgtacctaccctcgacctctgcctagcgactggatctgcgataagcagtgcttatgtagcgcccagaacgtgatcgactatggcacctgtgtttgttgtgttaagggcctgttttaccactgctccaacgacgacgaggacaactgtgcagacaacccttgttcttgcagccagtcccactgttgtactcgttggtctgcgatgggcgtcatgagcttgtttcttccctgtctctggtgctacttaccagccaaagggtgcctgaaactttgccagggatgttacgatcgtgttaacagaccaggatgcagatgtaagaatagcaatacagtgtgctgtaaagttcccactgttccacctagaaattttgagaagcccacatag

SEQ ID NO: 159761 - DNA, 948 bp, Artificial Sequence
  derived and/or modified sequence
atggaggcccgggcccagagcggcaacggcagccagcccctgctgcagacaccacgtgacggcgggagacagagaggagagcccgatccacgggatgccctgacgcagcaggtccacgtgctttccctcgaccagatcagagccatcaggaacaccaacgaatacactgaggggcctacagtggtgccccggcccggcttaaagccggcacctaggccaagcacccagcataagcatgagcgcttgcacggcctcccagaacacaggcagccgccccgtctccagcattcccaggtgcactcatcagctcgtgccccactttctagaagtatttcaactgtctcaagcgggagcagatccagcacaaggacctcaactagctcatcctcctcggaacagcgacttctaggcagctcattctctagcggtcctgtcgcagatggcatcattcgcgtgcagcctaagtccgaactcaaacccggtgagttgaagcctctctctaaggaagacctgggtctgcacgcctatcgatgcgaagactgtggcaaatgtaagtgtaaagagtgtacttatcctcgacccctgccttcagactggatttgcgacaaacagtgcctctgcagtgcacagaacgtgatcgactacggaacctgtgtatgctgcgtcaaaggcctcttttaccactgcagtaatgatgatgaggacaattgtgccgacaacccctgttcctgtagccagagccattgctgcacgagatggtccgcaatgggcgtcatgagtctttttctcccgtgtctctggtgctacctccctgcaaagggttgcttaaaactatgccaaggatgttatgacagggtcaaccgacctggatgcagatgtaagaactctaacactgtttgctgtaaggttccaactgttcctcccaggaacttcgagaaaccgacatag

SEQ ID NO: 159762 - DNA, 1062 bp, Artificial Sequence
  derived and/or modified sequence
atggaggcccgggcccagagcggcaacggcagccagcccctgctgcaaactccaagagatggcggccgtcagcgaggtgaacccgatccacgcgatgccctcacccaacaggtccacgtgctgtctcttgatcaaattagggcgataaggaatacaaacgagtacactgaggggccaactgtggtgcctaggcccggacttaaaccagcccccaggccatcaacacagcacaagcacgaaaggttacatggcttacccgagcaccggcagccgcccaggcttcagcacagccaggttcactcaagtgctcgcgctcctttgtcccgatccatttctacagtgagcagcggatctaggtcctccacccggacttccacttcctcttccagtagcgagcagcgtcttttaggcagcagttttagctccggccccgttgccgatggcattattagagttcagccaaaatccgagctcaagcccggagaactgaaaccgttgagtaaggaggatctcggcctccatgcctacaggtgtgaggattgtggcaagtgtaaatgtaaggaatgcacttatcctcggcctttaccctcagattggatttgtgataaacaatgtctgtgctctgcacagaacgtaatcgactatggaacatgtgtctgctgcgtcaagggactgttttatcattgcagcaatgacgacgaggacaattgtgccgacaacccatgctcgtgcagccagtcacattgttgcacccggtggtcagctatgggcgtgatgagtctgttccttccatgcttgtggtgttaccttccggcgaaaggctgcctgaagctgtgtcagggctgttacgaccgggtcaaccgcccgggctgtcgatgcaagaactcaaataccgtgtgttgtaaagtgccaacagttccaccccgtactctgaaaaaccaacacagtattatcaaccaggagtattattctaacgaggactttttctttctattcctgatccacatttgtaatcagctgaattcgtacaatctaggtacagttaaccgtaaggtaggctag

SEQ ID NO: 159763 - DNA, 948 bp, Artificial Sequence
  derived and/or modified sequence
atggaagcccgtgcccagagtggtaacggtagtcaaccactgctccaaaccccacgagacggcggacgacaaaggggtgaaccagaccctcgggatgccctgacccaacaggtccacgttctgtctttggaccagattagggcaatccggaacaccaacgagtacaccgagggtcccaccgttgtgccaaggcccggacttaaaccagcccctaggcctagtacccagcataaacacgagagactgcatggcctgcctgagcacagacagcccccacgcctgcaacattcccaggtacattcctctgcgagggccccactaagtaggagcattagtactgtcagcagcggaagccgctctagtactaggaccagcacttcctcttcttcttccgaacaaagactcttgggctcctcttttagtagtggaccagtggccgacggaatcatccgcgtgcaaccaaagagtgagttgaaacctggtgagctaaagcctctttcaaaagaggacctcggcctgcatgcttatagatgcgaagattgcggcaagtgtaaatgcaaggagtgcacctatcctagaccacttccgtcagattggatctgcgataagcagtgcctctgttccgcccagaacgtaatcgattatggaacctgcgtgtgttgtgtgaagggcttattttatcactgctctaacgatgatgaggataactgcgcggataacccctgctcctgttcccagtctcactgctgtacgaggtggtccgcaatgggcgtcatgagtttgttccttccttgtctctggtgctacttgcctgcaaaaggctgtctgaagttgtgtcaaggttgttacgatagagtcaatcggcctggatgccgctgcaaaaattccaatacagtgtgttgtaaggttcccaccgtgcccccaaggaactttgagaaaccaacatag

SEQ ID NO: 159764 - DNA, 948 bp, Artificial Sequence
  derived and/or modified sequence
atggaggccagagctcaatcgggaaatggttcacagcctttgctgcagacccccagagatggcggaaggcagaggggggagccagacccgagagacgccctgacacagcaggttcatgtcctgtcactggatcagatcagagcaattagaaacactaatgagtacaccgagggaccgaccgtggtccctcgtcctgggctgaagccggctcctcgcccatctacacagcataagcacgagcgcctgcacggcttacctgagcatcgccaaccacccaggttgcagcattcgcaggtccactccagtgctagggccccactcagtcgatccatttctacagtgagctccggcagtaggagttccaccagaacctccacgagctcaagctctagtgaacaaaggcttctcgggagtagtttttcctctgggcctgtcgctgacggaatcatcagagtgcagcccaaaagtgaattaaagccgggtgaacttaagccattatcaaaggaagacctcggactgcatgcttaccggtgtgaggattgcggaaaatgcaagtgtaaggagtgcacctatcccagaccactgccctccgattggatctgcgataaacagtgtctatgctccgcccagaatgtgattgattacggtacttgtgtgtgttgcgtcaaggggctgttttatcactgcagtaacgacgacgaagataactgtgctgacaatccatgctcctgttcccagtcacattgttgtacgcgctggtcagcaatgggagtaatgagccttttcctgccctgtttatggtgttacctcccggcaaaaggatgtctaaagctgtgccaagggtgttacgaccgggtcaatcgaccaggctgcaggtgtaagaattcaaacactgtgtgctgcaaggtccccactgtgcctcctcgaaacttcgaaaagcccacttag

SEQ ID NO: 159765 - DNA, 948 bp, Artificial Sequence
  derived and/or modified sequence
atggaagccagggcacagtccggtaatggttcacaacctctcctgcagacaccaagggacgggggtcggcaaagaggcgaacccgacccccgagacgcattaacacagcaggttcacgtgttaagtctcgatcagattcgcgctatcaggaacacaaacgagtacaccgagggccctaccgtggtgccacggcctgggctcaaacccgctcccagaccctccacgcagcataaacacgaacgcctccatggcctgcctgagcaccgccagcccccaaggctccagcacagtcaggtccattcatctgcgcgagcgccactctctagaagcatatcaactgtgtcgtccggaagtagaagtagcacccggaccagcacatccagcagcagctccgaacagaggctgctgggcagcagcttttcatccggcccagtggccgacggcatcatcagggtgcagcctaaaagcgaactgaagccgggtgagctgaagccactgtctaaagaggacctgggcctgcacgcgtaccgctgcgaagattgcggaaagtgcaaatgtaaggagtgtacttacccaaggcctcttccaagtgactggatatgcgataagcaatgcctgtgtagtgcccagaatgtgatcgactacggtacctgcgtctgctgcgtgaagggactattttaccattgttcgaatgatgatgaagacaactgcgctgataatccatgcagctgctctcagtcccactgctgtacacgctggtcggcaatgggagtgatgtcactgttcctgccatgcctatggtgctacctcccggctaaaggctgcctaaaactgtgccagggatgttacgatcgggtcaacagacccggatgccgctgcaagaacagcaacacagtatgttgcaaagtgccaaccgtgcctccacgaaactttgaaaagccaacgtag

SEQ ID NO: 159766 - DNA, 1062 bp, Artificial Sequence
  derived and/or modified sequence
atggaagcaagagcccagtcaggcaatgggtcccagcctctgctgcaaaccccaagggacggagggcgtcagagaggggagcctgatccccgagacgctctcacacagcaggtccacgttttgagtctcgaccagataagggccataagaaacactaacgaatataccgaaggcccaacagtcgttccaaggcccggtctgaaacccgcaccccgtccgagcacccaacacaaacacgagcgcctccacggcctgcccgaacacaggcagccacctcggctgcagcactcccaggtacacagtagtgctagagcccctctgtctagatcaataagtaccgtgagctcaggaagtcgctcttctactcgaacaagtacatcttctagcagttctgagcagagactgctggggtcttcgttcagtagtggtcccgtggctgacggaatcattcgcgtgcaacccaaatcagagctgaaacctggagaattaaaacccctgagcaaagaggacctaggcctgcacgcatatcgatgcgaggactgcggtaagtgcaagtgtaaggaatgtacctatccccgacccctgccttccgactggatctgtgacaagcagtgtctatgttcggcgcaaaacgtgattgactacggcacttgcgtctgttgcgtgaagggcctgttctatcactgcagtaatgatgacgaagacaattgcgccgacaacccttgtagttgttctcagtctcactgttgtacgcgatggtccgctatgggagtgatgtccctgtttctgccgtgtctgtggtgctacctccctgccaaggggtgtcttaaattatgccaagggtgttacgaccgagtgaatcgcccaggctgtaggtgtaagaactccaacacagtgtgttgcaaggtgcccactgtccctcccagaactttaaagaaccaacatagcattatcaatcaggagtattatagcaacgaagattttttcttcctttttctgatacatatctgcaaccagctgaatagctataaccttggcactgtcaatcgtaaggttggctag

SEQ ID NO: 159767 - DNA, 2708 bp, Artificial Sequence
  derived and/or modified sequence
ggggggactgggaaagagaagaggggcggaggtagggagtccagctttgaagaaggaggccagggatcggatcggcagaaatcacttaaaaaataaaaacaaaaaagcccccttttatttcaaagatgctactttgactgcaagcaaatctgcaccgaaagtttacagctccgggagctgggtcctgcgcgcccggagtgagcagtgggaccctggaaaatgccctttttttaaaaagccatttttctttcactttaagaaatatgatatcttttttttttctctcgacccaaaaggagataggcgtgtgcagattacaggcaatgcccccttcggtcagtgcagcgtggagtcgccgtgtgtgcgtgggttggacttgtgcgtcctggctgcgtgtctcaggcagggctttcgtgctcgcagtgtcggggtgggaaacctgtgccggatgtccgaggggctttgcagaaagcctggcagtgggcggcgtgacctctgcctgggggcggagtggctccttggggctggaaggcagttctcttgagttgggggagatcttagctggggagagggaggcgggggaagtgtgctcctgcatttcgtgacacgtacccttcggaggcgcccgcggcccccgcctgtctgagtctggggatcgtaagcaggggggcagcctggcccatggacagcgtcagtccgcctggagaaactcccctggggatcggctgtgtcccacctgctggggacggtgttggggcacagagaggcgataaactaagtgaaagcaaagagcagcgttgtcttctgccattcttttggaggtgaggagatccggtttccagcactgccttgctccgaattgggagacgtttgtcacctgccttgttcgctgtggcctctattctaaagagcggagatcggataaaggagttcagatgtgttctaagcctgctggagtgaccacacttccaagacctgatggaggccagagctcagagtggcaacgggtcgcagcccttgctgcagacgccccgtgacggtggcagacagcgtggggagcccgaccccagagacgccctcacccagcaggtacatgtcttgtctctggatcagatcagagccatccgaaacaccaatgagtacacagaggggcctactgtcgtcccaagacctgggctcaagcctgctcctcgcccctccactcagcacaaacacgagagactccacggtctgcctgagcaccgccagcctcctaggctccagcactcgcaggtccattcttctgcacgagcccctctgtccagatccataagcacggtcagctcagggtcgcggagcagtacgaggacaagtaccagcagcagctcctctgaacagagactgctaggatcatccttctcctccgggcctgttgctgatggcataatccgggtgcaacccaaatctgagctcaagccaggtgagcttaagccactgagcaaggaagatttgggcctgcacgcctacaggtgtgaggactgtggcaagtgcaaatgtaaggagtgcacctacccaaggcctctgccatcagactggatctgcgacaagcagtgcctttgctcggcccagaacgtgattgactatgggacttgtgtatgctgtgtgaaaggtctcttctatcactgttctaatgatgatgaggacaactgtgctgacaacccatgttcttgcagccagtctcactgttgtacacgatggtcagccatgggtgtcatgtccctctttttgccttgtttatggtgttaccttccagccaagggttgccttaaattgtgccaggggtgttatgaccgggttaacaggcctggttgccgctgtaaaaactcaaacacagtttgctgcaaagttcccactgtcccccctaggaactttgaaaaaccaacatagcatcattaatcaggaatattacagtaatgaggattttttctttctttttttaatacacatatgcaaccaactaaacagttataatcttggcactgttaatagaaaggtgggatagtctttgctgtttgcggtgaaatgctttttgtccatgtgccgttttaactgatatgcttgttagaactcagctaatggagctcaaagtatgagatacagaacttggtgacccatgtattgcataagctaaagcaacacagacactcctaggcaaagtttttgtttgtgaatagtacttgcaaaacttgtaaattagcagatgacttttttccattgttttctccagagagaatgtgctatatttttgtatatacaataatatttgcaactgtgaaaaacaagttgtgccatactacatggcacagacacaaaatattatactaatatgttgtacattcggaagaatgtgaatcaatcagtatgtttttagattgtattttgccttacagaaagcctttattgtaagactctgatttccctttggacttcatgtatattgtacagttacagtaaaattcaacctttattttctaattttttcaacatattgtttagtgtaaagaatatttatttgaagttttattattttataaaaaagaatatttattttaagaggcatcttacaaattttgccccttttatgaggatgtgatagttgctgcaaatgaggggttacagatgcatatgtccaatataaaatagaaaatatattaacgtttgaaattaaa

SEQ ID NO: 159768 - DNA, 2111 bp, Artificial Sequence
  derived and/or modified sequence
gtaaggccgttttcttttcccattcgctcatctgccaggaaaagggacttgccgttggcgcttcggcctcttgttcattgagaaaaaagaggaaatactccgcgtgcgcttgtagaaggggagtcgtctccagctccgaaccccggagtgttcatcagcggggaatctggctccgaattctctttttttctcccgccgattgctcggaagttggtctaaagcagaggttggaaagaaaggaaaaaagtttgcatcgagactggatttatttgcacatcgcagaaagaagagaatccaagggagaggggttggtgcaaagccgcgatcacggagttcagatgtgttctaagcctgctggagtgaccacacttccaagacctgatggaggccagagctcagagtggcaacgggtcgcagcccttgctgcagacgccccgtgacggtggcagacagcgtggggagcccgaccccagagacgccctcacccagcaggtacatgtcttgtctctggatcagatcagagccatccgaaacaccaatgagtacacagaggggcctactgtcgtcccaagacctgggctcaagcctgctcctcgcccctccactcagcacaaacacgagagactccacggtctgcctgagcaccgccagcctcctaggctccagcactcgcaggtccattcttctgcacgagcccctctgtccagatccataagcacggtcagctcagggtcgcggagcagtacgaggacaagtaccagcagcagctcctctgaacagagactgctaggatcatccttctcctccgggcctgttgctgatggcataatccgggtgcaacccaaatctgagctcaagccaggtgagcttaagccactgagcaaggaagatttgggcctgcacgcctacaggtgtgaggactgtggcaagtgcaaatgtaaggagtgcacctacccaaggcctctgccatcagactggatctgcgacaagcagtgcctttgctcggcccagaacgtgattgactatgggacttgtgtatgctgtgtgaaaggtctcttctatcactgttctaatgatgatgaggacaactgtgctgacaacccatgttcttgcagccagtctcactgttgtacacgatggtcagccatgggtgtcatgtccctctttttgccttgtttatggtgttaccttccagccaagggttgccttaaattgtgccaggggtgttatgaccgggttaacaggcctggttgccgctgtaaaaactcaaacacagtttgctgcaaagttcccactgtcccccctaggaactttgaaaaaccaacatagcatcattaatcaggaatattacagtaatgaggattttttctttctttttttaatacacatatgcaaccaactaaacagttataatcttggcactgttaatagaaaggtgggatagtctttgctgtttgcggtgaaatgctttttgtccatgtgccgttttaactgatatgcttgttagaactcagctaatggagctcaaagtatgagatacagaacttggtgacccatgtattgcataagctaaagcaacacagacactcctaggcaaagtttttgtttgtgaatagtacttgcaaaacttgtaaattagcagatgacttttttccattgttttctccagagagaatgtgctatatttttgtatatacaataatatttgcaactgtgaaaaacaagttgtgccatactacatggcacagacacaaaatattatactaatatgttgtacattcggaagaatgtgaatcaatcagtatgtttttagattgtattttgccttacagaaagcctttattgtaagactctgatttccctttggacttcatgtatattgtacagttacagtaaaattcaacctttattttctaattttttcaacatattgtttagtgtaaagaatatttatttgaagttttattattttataaaaaagaatatttattttaagaggcatcttacaaattttgccccttttatgaggatgtgatagttgctgcaaatgaggggttacagatgcatatgtccaatataaaatagaaaatatattaacgtttgaaattaaa

SEQ ID NO: 159769 - DNA, 1250 bp, Artificial Sequence
  derived and/or modified sequence
agggtgagaaaaaggcagggtgccgggtggagggagtgcccgcctctgctccgtgtggacagtctagcccggagcgggtgggagcgtcgccctgcctggcgccgggtctctgcggttcggaagtgcagctctctctcttccgttcttcgtggtcagcctgggtcacacttattttatttttggaagctcgggctgacccagcgcaggaagaaagtcatcaagcggtcgcgatcattttccattacctgaaagagttcagatgtgttctaagcctgctggagtgaccacacttccaagacctgatggaggccagagctcagagtggcaacgggtcgcagcccttgctgcagacgccccgtgacggtggcagacagcgtggggagcccgaccccagagacgccctcacccagcaggtacatgtcttgtctctggatcagatcagagccatccgaaacaccaatgagtacacagaggggcctactgtcgtcccaagacctgggctcaagcctgctcctcgcccctccactcagcacaaacacgagagactccacggtctgcctgagcaccgccagcctcctaggctccagcactcgcaggtccattcttctgcacgagcccctctgtccagatccataagcacggtcagctcagggtcgcggagcagtacgaggacaagtaccagcagcagctcctctgaacagagactgctaggatcatccttctcctccgggcctgttgctgatggcataatccgggtgcaacccaaatctgagctcaagccaggtgagcttaagccactgagcaaggaagatttgggcctgcacgcctacaggtgtgaggactgtggcaagtgcaaatgtaaggagtgcacctacccaaggcctctgccatcagactggatctgcgacaagcagtgcctttgctcggcccagaacgtgattgactatgggacttgtgtatgctgtgtgaaaggtctcttctatcactgttctaatgatgatgaggacaactgtgctgacaacccatgttcttgcagccagtctcactgttgtacacgatggtcagccatgggtgtcatgtccctctttttgccttgtttatggtgttaccttccagccaagggttgccttaaattgtgccaggggtgttatgaccgggttaacaggcctggttgccgctgtaaaaactcaaacacagtttgctgcaaagttcccactgtcccccctaggaactttgaaaaaccaacatag

SEQ ID NO: 159770 - DNA, 1689 bp, Artificial Sequence
  derived and/or modified sequence
tgaggagatccggtttccagcactgccttgctccgaattgggagacgtttgtcacctgccttgttcgctgtggcctctattctaaagagcggagatcggataaaggagttcagatgtgttctaagcctgctggagtgaccacacttccaagacctgatggaggccagagctcagagtggcaacgggtcgcagcccttgctgcagacgccccgtgacggtggcagacagcgtggggagcccgaccccagagacgccctcacccagcaggtacatgtcttgtctctggatcagatcagagccatccgaaacaccaatgagtacacagaggggcctactgtcgtcccaagacctgggctcaagcctgctcctcgcccctccactcagcacaaacacgagagactccacggtctgcctgagcaccgccagcctcctaggctccagcactcgcaggtccattcttctgcacgagcccctctgtccagatccataagcacggtcagctcagggtcgcggagcagtacgaggacaagtaccagcagcagctcctctgaacagagactgctaggatcatccttctcctccgggcctgttgctgatggcataatccgggtgcaacccaaatctgagctcaagccaggtgagcttaagccactgagcaaggaagatttgggcctgcacgcctacaggtgtgaggactgtggcaagtgcaaatgtaaggagtgcacctacccaaggcctctgccatcagactggatctgcgacaagcagtgcctttgctcggcccagaacgtgattgactatgggacttgtgtatgctgtgtgaaaggtctcttctatcactgttctaatgatgatgaggacaactgtgctgacaacccatgttcttgcagccagtctcactgttgtacacgatggtcagccatgggtgtcatgtccctctttttgccttgtttatggtgttaccttccagccaagggttgccttaaattgtgccaggggtgttatgaccgggttaacaggcctggttgccgctgtaaaaactcaaacacagtttgctgcaaagttcccactgtcccccctaggactttgaaaaaccaacatagcatcattaatcaggaatattacagtaatgaggattttttctttctttttttaatacacatatgcaaccaactaaacagttataatcttggcactgttaatagaaaggtgggatagtctttgctgtttgcggtgaaatgctttttgtccatgtgccgttttaactgatatgcttgttagaactcagctaatggagctcaaagtatgagatacagaacttggtgacccatgtattgcataagctaaagcaacacagacactcctaggcaaagtttttgtttgtgaatagtacttgcaaaacttgtaaattagcagatgacttttttccattgttttctccagagagaatgtgctatatttttgtatatacaataatatttgcaactgtgaaaaacaagttgtgccatactacatggcacagacacaaaatattatactaatatgttgtacattcggaagaatgtgaatcaatcagtatgtttttagattgtattttgccttacagaaagcctttattgtaagactctgatttccctttggacttcatgtatattgtacagttacagtaaaattcaacctttattttct

SEQ ID NO: 159771 - protein, 525 aa, Artificial Sequence [sequence omitted]

SEQ ID NO: 159772 - DNA, 1578 bp, Artificial Sequence
  derived and/or modified sequence
atgcctctctttaccgctaacccctttgaacaagatgttgagaaggctactaacgaatacaacacaactgaagattggagcctgatcatggacatctgtgataaggtgggctccacaccgaacggcgcaaaagattgcctaaaggcaattatgaagcgagtcaaccataaggtgccccatgtcgccctgcaagccctaaccctgctcggcgcttgtgttgctaattgcggaaaaatttttcacctggaggtgtgttccagagatttcgctacggaagttagagctgtgattaaaaacaaagctcatcctaaggtgtgcgaaaaactaaaatcactcatggtggagtggtctgaagaattccaaaaagacccccagttcagcctcattagtgccacaattaagagtatgaaggaggaaggcatcacgttcccgccagccggctctcagaccgtttctgccgcagccaagaacggaaccagctctaacaaaaacaaggaagatgaggatattgcaaaagctatcgagctttccctccaggaacaaaaacagcagcacacggagacaaagagtctgtacccctcttccgagatccagttgaacaacaaggttgcaaggaaggtcagagccctatatgactttgaggctgttgaggacaacgagctcacattcaaacatggcgagatcattattgtgctggatgactccgacgctaattggtggaaaggggagaaccatcggggcattggtctttttccaagcaatttcgtgacgactaacctgaatattgagacagaggcagccgctgttgacaagctgaacgtaatagacgacgacgtggaggaaattaaaaagtcggagcccgagccagtgtatatagatgaggataagatggatcgcgcactgcaagtgttacagtccattgatcctacagattccaagccagacagccaggatttgctagaccttgaggacatttgtcaacagatgggacccatgattgatgagaagctggaggaaatcgataggaaacactcagagcttagcgaactgaacgtgaaggttcttgaagccctggagctgtataataagttagtcaatgaggctcccgtgtattccgtctactctaagcttcatccccccgcacactatccaccggccagcagtggcgttccaatgcagacctacccagttcaatctcatggggggaattatatgggtcagagcatccaccaggtgacagtggctcagtcatactcactgggacccgaccaaattggaccattgagaagcctgccacccaacgtgaatagttctgtgacagcgcaacccgctcaaacctcctatctgtccactggacaagacacagtttctaaccccacatacatgaatcagaactcgaacttgcagtcagctactggcaccaccgcctatacacaacagatgggcatgtccgtggatatgtcctcttaccagaatactactagtaacctgccacagctagcggggtttccagttacagttccagctcatcctgtagcacaacaacatacgaattatcaccagcaacccctgctttag

SEQ ID NO: 159773 - DNA, 1578 bp, Artificial Sequence
  derived and/or modified sequence
atgcccctcttcaccgccaacccctttgagcaggatgtggagaaggccaccaatgagtacaacaccacagaggactggagcctcatcatggacatctgtgacaaggtgggcagcaccccaaatggagccaaggactgcctgaaggccatcatgaagagggtgaaccacaaggtgccccacgtggccctgcaggccctgaccctgctgggcgcctgtgtggccaactgtgggaagatcttccacctggaggtgtgcagccgggactttgccacagaggtgcgggctgtgatcaagaacaaggcccaccccaaggtgtgtgagaagctgaagagcctgatggtggagtggagcgaggagttccagaaggacccccagttcagcctcatcagcgccaccatcaagtccatgaaggaggagggcatcaccttccccccagctggcagccagacagtgtctgctgctgccaagaatggcaccagcagcaacaagaacaaggaggatgaggacatcgccaaggccatcgagctgagcctgcaggagcagaagcagcagcacacagagaccaagagcctgtaccccagcagcgagatccagctgaacaacaaggtggccaggaaggtgcgggccctgtatgactttgaagctgtggaggacaatgagctgaccttcaagcatggagagatcatcatcgtgctggatgacagtgatgccaactggtggaagggggagaaccaccggggcatcggcctcttccccagcaactttgtgaccaccaacctgaacatcgagacagaggccgctgctgtggacaagctgaatgtgattgatgatgatgtggaggagatcaagaagtctgagcctgagcctgtgtacattgatgaggacaagatggaccgggccctgcaggtgctgcagagcattgaccccacagacagcaagccagacagccaggacctgctggacctggaggacatctgccagcagatgggccccatgattgatgagaagctggaggagattgacaggaagcacagcgagctgtctgagctgaatgtgaaggtgctggaggccctggagctgtacaacaagctggtgaatgaggcccctgtgtacagcgtgtacagcaagctgcaccccccagcccactaccccccagccagcagcggcgtgcccatgcagacctaccctgtgcagagccacggcggcaactacatgggccagagcatccaccaggtgacagtggcccagagctacagcctgggccctgaccagatcggccccctgcggagcctgccccccaacgtgaacagctctgtgacagcccagcctgcccagaccagctacctgagcacaggccaggacacagtgagcaaccccacctacatgaaccagaacagcaacctgcagagcgccaccggcaccacagcctacacccagcagatgggcatgtctgtggacatgagcagctaccagaacaccaccagcaacctgccccagctggccggcttccctgtgacagtgcctgcccaccctgtggcccagcagcacaccaactaccaccagcagcccctgctgtag

SEQ ID NO: 159774 - DNA, 1578 bp, Artificial Sequence
  derived and/or modified sequence
atgcccctgttcaccgccaaccccttcgagcaggacgtggagaaggcaacgaatgagtacaacacaaccgaagattggtctctgatcatggacatctgcgataaagtcggttctaccccaaacggggccaaggattgtcttaaagcgatcatgaaacgggtcaatcacaaagtgccccacgtcgcactccaagctctcaccctgctgggggcctgtgtagccaactgtgggaaaattttccacttagaagtctgcagtagagattttgctactgaagtccgtgccgtgattaaaaataaagcccatccaaaggtctgtgaaaagctcaaaagcctgatggttgagtggtctgaggaattccagaaagacccccagttttccctaatcagcgcaacaataaaatcgatgaaagaggaggggatcacatttcctcccgcaggatcccaaacagtgtccgcagccgccaaaaacggtacatcctctaataaaaacaaggaagacgaagatattgctaaagctatcgagctgagcctgcaggaacagaagcagcagcacactgagactaagagcctgtacccttcaagtgaaattcaactgaacaacaaggttgcgagaaaagttagagctttatacgactttgaggcagtcgaagataacgaactgacttttaagcacggggagatcattattgtgttggacgactcagacgcaaattggtggaagggggaaaatcaccggggaatcggtcttttcccaagtaacttcgtcaccactaatctcaatatcgagactgaggccgcagccgttgacaaactgaacgtgattgacgatgacgttgaggaaattaaaaagagcgagccagagccagtctacattgacgaggataagatggacagggctctgcaggtgttacaatcaatcgaccccactgatagcaaacctgatagccaggatcttcttgacctggaggatatctgtcagcagatgggacctatgatagacgagaaactcgaggaaatagataggaagcacagcgagctgagcgagcttaatgttaaggtgttggaagccctggagttgtacaacaaactggtaaatgaagctcccgtgtactcagtttatagtaagcttcacccccccgcccattatccccccgccagtagtggagtgcctatgcaaacgtaccctgtacagtcccatgggggaaattatatgggccagtccatccatcaggttactgttgctcagtcatatagcctcggtcctgatcagattggacctctgagaagcctgcctccaaatgtcaattcctccgtgacagcccagccggcccagacctcttatctttccaccgggcaggatacagtgtctaacccgacatatatgaatcagaatagcaaccttcaatctgctaccggaaccactgcctacacccagcagatgggtatgtccgtggatatgtcttcataccagaacactacttcaaatctcccacagctggctggcttcccggttacggttccagcacacccagtcgcacagcagcatacaaactatcaccagcaaccgctgctgtag

SEQ ID NO: 159775 - DNA, 1578 bp, Artificial Sequence
  derived and/or modified sequence
atgcctttgtttaccgccaacccatttgaacaagacgttgaaaaggcaacgaacgaatacaataccacagaggattggagcctcatcatggacatttgcgacaaggtgggctctactcccaacggtgcaaaggactgcttaaaagcaatcatgaagcgcgtaaatcacaaggtcccacatgttgccctgcaggccctgacattgttgggggcatgcgtcgccaactgtggcaagattttccacctggaggtctgttctagggacttcgcgacagaagtaagagctgttattaaaaataaagcccacccaaaagtctgcgagaaacttaaatctctcatggtggaatggtccgaagaatttcagaaagaccctcagttttctttaatcagcgccacaatcaagagcatgaaggaggaaggcatcactttcccccctgccggatctcagacagtgagcgccgctgctaaaaatggcacctccagtaacaaaaacaaggaagacgaagatatcgccaaggctatcgagctgtctctgcaagaacagaagcaacagcacactgagacaaagtccctgtaccccagtagtgaaattcagctgaacaacaaagtcgccagaaaagtgcgggcattgtatgacttcgaagcggtagaggacaatgaattgacctttaagcacggggagatcatcatcgttctggatgactcagatgccaactggtggaagggagaaaaccaccggggaatcgggctgtttcctagtaatttcgtcaccacaaatcttaatattgaaactgaagcagcagctgtcgataaactgaacgtgatagatgatgacgtggaagagattaaaaagtctgagcccgagccggtgtacatcgatgaagataagatggatagagcccttcaagttctgcaaagtatagacccaacagattccaagccggatagtcaggatcttttagatttagaggacatctgtcagcagatgggtccaatgattgatgagaagctggaagaaattgaccggaagcatagcgagctgtctgaattaaatgtcaaggtattagaggcgttggagctgtacaacaagctcgttaatgaagctcctgtgtattccgtctactcaaagttgcaccccccagctcactatccgccagcttcatcaggcgttcccatgcagacatatccagtgcagtctcacggaggtaactacatgggtcagagcattcaccaggtcacagtggcgcagtcatactccttagggcctgatcagatcggcccactgcgctccctcccccctaatgtgaattcaagcgtcacggctcagcccgctcaaacgtcatatttatcaactggccaggatacagtgagtaaccctacttatatgaatcagaattctaacttacagagtgccacagggacaacagcctacacacagcaaatgggcatgagcgtggacatgtccagttaccaaaacacgacgtccaatctgcctcagctagcaggattccccgtgacggtgccagcccatcctgtagcacaacagcacacaaactaccatcaacagcctctgttgtag

SEQ ID NO: 159776 - DNA, 5701 bp, Artificial Sequence
  derived and/or modified sequence
gaaggtccccggcttcgtggctagccggggtcctagcgctggaaaggtggccgtagcggccgcctgacccctacaaaagtctgggacaggggcagcgacaaaggccttgggaggacgcccatggtcggagggatctcgccccgggagaaaagttgggacaggagcgcgggatcgaagggtggactccgagccggcctgtcaggcaagagccgggcaggtgcggtggcggaagtgcagggacggaggccgaagcggagcggtctagggagccgcggccgcgggtcacccggcgggtagcagttgctgagtgtcagctagacagcagcgactagggctcgggcgccggcgagatgcctttgttcaccgccaaccccttcgagcaagacgtggaaaaagccacgaatgagtacaacactacagaagattggagtcttattatggacatatgtgacaaagttggaagtactcctaatggagcgaaagattgcctaaaagccataatgaaaagggtaaatcataaggttccacatgttgctctgcaagcactaactcttcttggggcttgtgtggcaaactgtggaaagatatttcatttagaagtatgttcccgtgattttgcaacagaagtacgtgctgtgattaaaaataaggcacatcctaaagtatgtgaaaaactgaaatctttaatggtggagtggtcagaagaatttcagaaggaccctcagtttagtctgatatctgcaactattaaatctatgaaagaagaaggaattacttttcctccagcaggttctcagactgtctcagctgctgccaagaatggtacgtcatcgaacaaaaacaaagaggatgaagacatagctaaagctattgaattatcgctgcaagaacagaaacagcaacacacagaaacaaaatccttatatccatcttcagaaattcagttaaataataaggttgcacggaaagtgagagctttatatgattttgaagctgttgaggacaatgaactcacctttaaacatggtgaaataattattgttttggatgacagtgatgccaattggtggaaaggagaaaatcacagaggaataggacttttcccatccaattttgtaacaactaatttaaacatagagactgaggcagcggctgtggacaaattgaatgtaattgatgatgatgtggaggaaattaagaaatcagagcctgagcctgtttatatagatgaggataagatggatagagccctgcaggtacttcagagtatagatccaacagattcaaaaccagactcccaagaccttttggatttagaagatatctgccaacagatgggtccaatgatagatgaaaaacttgaagaaattgataggaagcattcagaattgtctgaattgaatgttaaagtcctggaagctctggaactatataacaaattggtgaatgaagcaccagtgtactcagtctattcaaagctccaccctccagcacattacccacctgcatcatctggggttccaatgcagacatatccagttcaatcacatggtggaaactatatgggtcagagcattcaccaagtaactgttgcccaaagctatagcctaggacccgatcaaattggtccactgagatctctgcctccaaatgtgaattcctcagtgacagcacagcctgctcaaacttcatatttaagcactggacaagacactgtttccaatcctacttatatgaaccagaactctaacctacagtcagctactggtacaactgcttacacacagcaaatggggatgtctgtggatatgtcatcttatcagaacactacttccaatttgcctcaactggcaggctttccggtgacagttccagctcatccagttgcacagcagcacacaaattaccatcagcagcctctcctttagaaacaaatcaagcattttcttgaaagccttcataagtgtattattcagtccttgtgataccaacctgaaaatattaaaacttttttccctctcaactcaaaaggaccatgaataaataaagcacaaaaacctctcttattctacaaggccataaaaggttttttttttttttttttttcagtccagtttgtttgaagtcaatcttttcatcagaggcagcttaaagatgctttcagttagttttgtcttactttcagatttctctacataaatctagatactcattaagtagccttatgacaaacagtatgagatacttatgacaaactcgctctgtcacccaggctggagtgcagtagcatgatcgacagagtgagtttgtcaaaagtatctcatacttataaacagtatgagataggaggattaaaatattattttaaagaaaccactgtttccccctaaaatgtcataagagcactgaagaacttgaaatatttttttcagagtttctcacacactttaaaagtctaacttttttgtgtgtaagcatttagcttgccagcatatttctttttggctccttaaattgcggttgtgtttgcagtattgtcacttttgctctcactgttatgttgaataataattagcatataattgtctacagaagcaagagcaatctggaaggaacaaaaatgttttctgtgattaacagtgaagaccttgtaaatgcagatgtgtgataaagcatttagtcagtcccccaaacagtcatgccaactgtgaaggaatgtcccacaaaacatttccattccctgaggaaaaacattttctttcctacatgtatctctggtatttagaattgtcactaataaccttttcaagtgattttggctattctctaatgaagatatggtccatttgtttttcttcctgcaatgtggtgtgcagagatgctgcatatcctttttatgggattgcgtgtgaatttgaaccatgagacattcctaataatttgttgtgagatataccaagcatggatgataagtgtgtttttagtggtgtgttgtttttttaaagaggtgattcaagtaccgttgctaagctgtcaacataccaagctgttgaaaaaattgaccatttctttcagaagtaattctcagcctgtggaataatagcaggtgaagacttcatagaaggcgacagattgatagggaggctattgaagcagtttttctgaagcctgcattttgagttagtttatagtgctaatagattctatataactgtgagagtttggtagtaaaccagtagggattgttttctctcctaaaaatttgcacactacttcattgtctaccaactttttacatattggaaaatagaaattgcaaatacatacatgtatggaaacatattcagattgggaaaaacaatggacattagtttttaaaaagttacgtggaagcaagatttctatatttgtttttttaaaggaagcagtcattctttctactaaatccatttcaagctagttctctgaaaattttgccatttatctacagaaatttgattataaatatgttcctttttcaaagaaactttattctagaacaaaatagtctatatggtacttgatctacatttaagtggaaaaattagcagtatttgaaagctcagtttatgtcattgtcttaacttcagatacaaataactgaacagaaagttttaacctttaatatctcatgttctgttttttattcagtattttcctttatgttaattcaattatatacttctgaatggcaccttactttttggaaacaaatcttctgttatttacaaaataataatttttaaaaaacatttaaaaaaaatccaaagctgctctcgataatagtcaacatttgcatatatatggaatttcttactttttttctcccaaactctatttaataaacttattttaatgtttgtgtatttcatgtataattgtgatctcaattataaaagtttaattcagcatgtctttgagccaatataattactgcacacccactaaattgggatcagccattataaataatgtagttttagaataataaaacatgacacatatatatatatataaatatatagtatatattggcacatcggtgaaagtttatatgtgcagaagtttttttctttctcaagttaaaaattattttttgccatatgtaattttgtgttgcaggctgtcgagagataaaaatgattttaaatctgtgtactgatgattctttcggtgttaagaaacacagggttgtgtacttccctttttatgggcttatggattctatttatattaagacctgtttataattgttttctgccaaagggaattgtctaacttcagatttctacattgggttcatacttactgttttatatcagaaataaaaaaatagcttctgctttttcatatgaaatcttggtacatcagaaagaattcctgaaaatttataatagaatgaattttattaatgcagaaaaataccccagggtgttaaaatatatgaagtgtgggatatattcttatagtttgtaaaatgtagtcaaccaatactgtcttctaatttggtaatttatttataaaattacttaaacattaggtaattatatttgttaggatttgaaattatttgtagttaaattgtcatgctgtttgaaataattgatacttgtctacgtaatacattttactgtatgttttgaagatggttataatttcactttcaaaatttaaaaaatcaattttaaatgttttaaaaacatatagcttagggattttttttaaaaaggttttcttagtaaaaacataaatttaaaagcccctgagttctaggagagggcttattgaattgctataagaaagctggagttactttgataagtaataaattataaatagcactgatctataatgctttatttctatcggaaggtactttttcttctttcatcatcagttttagccagttagtaaatgggaatactcagttttagggatttgatttttgtttggtttaattttctttcaaaaattaaaagtatatttctaaaagttttccccagaggccagatacagtggctcatgcctataatcccagcactttgggagcctgagataggagtattgcttgaggctaggagtttgagaccaacctggcaacatggcaagaccctatctctacaaaaattttaaaacttagccaggtgtggtagtgcacctgtagtcccagctagtcagtaggctgaggtgggagtattgcttgaggctgcagtgaggtgtgatcacgccactgcactccggcctgacagaatgagatcctgtctcaaaaagaaaattccccagaagaagaattctaattttatcaagctgaattaaagtttgagagtcttttttttaaaatcttactgtgtcaaaagaggcattatgttgcttgtgtgatatagtgaatagtgtccctccaaatttcatgtacacctggaatgtcacaatgtgacttaacagtagccacccctcacccccgcccttatctgtggtggatacatttgcaagatccccagtggatgcctgaaaccgcagatagtactgaaccttatatatactgtttgttttcctatgcatacatatccctatgataaagtttatgaatttggcacttaacagcagaactaataagatgaaagagttgtaacaatatactctaataaaagttatttaaaatgta

SEQ ID NO: 159777 - DNA, 1578 bp, Artificial Sequence
  derived and/or modified sequence
atgcccctgttcaccgccaaccccttcgagcaggacgtggagaaggccaccaacgagtacaacaccaccgaggactggagcctgatcatggacatctgcgacaaggtgggcagcacccccaacggcgccaaggactgcctgaaggccatcatgaagagagtgaaccacaaggtgccccacgtggccctgcaggccctgaccctgctgggcgcctgcgtggccaactgcggcaagatcttccacctggaggtgtgcagcagagacttcgccaccgaggtgagagccgtgatcaagaacaaggcccaccccaaggtgtgcgagaagctgaagagcctgatggtggagtggagcgaggagttccagaaggacccccagttcagcctgatcagcgccaccatcaagagcatgaaggaggagggcatcaccttcccccccgccggcagccagaccgtgagcgccgccgccaagaacggcaccagcagcaacaagaacaaggaggacgaggacatcgccaaggccatcgagctgagcctgcaggagcagaagcagcagcacaccgagaccaagagcctgtaccccagcagcgagatccagctgaacaacaaggtggccagaaaggtgagagccctgtacgacttcgaggccgtggaggacaacgagctgaccttcaagcacggcgagatcatcatcgtgctggacgacagcgacgccaactggtggaagggcgagaaccacagaggcatcggcctgttccccagcaacttcgtgaccaccaacctgaacatcgagaccgaggccgccgccgtggacaagctgaacgtgatcgacgacgacgtggaggagatcaagaagagcgagcccgagcccgtgtacatcgacgaggacaagatggacagagccctgcaggtgctgcagagcatcgaccccaccgacagcaagcccgacagccaggacctgctggacctggaggacatctgccagcagatgggccccatgatcgacgagaagctggaggagatcgacagaaagcacagcgagctgagcgagctgaacgtgaaggtgctggaggccctggagctgtacaacaagctggtgaacgaggcccccgtgtacagcgtgtacagcaagctgcacccccccgcccactacccccccgccagcagcggcgtgcccatgcagacctaccccgtgcagagccacggcggcaactacatgggccagagcatccaccaggtgaccgtggcccagagctacagcctgggccccgaccagatcggccccctgagaagcctgccccccaacgtgaacagcagcgtgaccgcccagcccgcccagaccagctacctgagcaccggccaggacaccgtgagcaaccccacctacatgaaccagaacagcaacctgcagagcgccaccggcaccaccgcctacacccagcagatgggcatgagcgtggacatgagcagctaccagaacaccaccagcaacctgccccagctggccggcttccccgtgaccgtgcccgcccaccccgtggcccagcagcacaccaactaccaccagcagcccctgctgtag

SEQ ID NO: 159778 - protein, 1325 aa, Artificial Sequence
  derived and/or modified sequence
MLPVYQEVKPNPLQDANLCSRVFFWWLNPLFKIGHKRRLEEDDMYSVLPEDRSQHLGEELQGFWDKEVLRAENDAQKPSLTRAIIKCYWKSYLVLGIFTLIEESAKVIQPIFLGKIINYFENYDPMDSVALNTAYAYATVLTFCTLILAILHHLYFYHVQCAGMRLRVAMCHMIYRKALRLSNMAMGKTTTGQIVNLLSNDVNKFDQVTVFLHFLWAGPLQAIAVTALLWMEIGISCLAGMAVLIILLPLQSCFGKLFSSLRSKTATFTDARIRTMNEVITGIRIIKMYAWEKSFSNLITNLRKKEISKILRSSCLRGMNLASFFSASKIIVFVTFTTYVLLGSVITASRVFVAVTLYGAVRLTVTLFFPSAIERVSEAIVSIRRIQTFLLLDEISQRNRQLPSDGKKMVHVQDFTAFWDKASETPTLQGLSFTVRPGELLAVVGPVGAGKSSLLSAVLGELAPSHGLVSVHGRIAYVSQQPWVFSGTLRSNILFGKKYEKERYEKVIKACALKKDLQLLEDGDLTVIGDRGTTLSGGQKARVNLARAVYQDADIYLLDDPLSAVDAEVSRHLFELCICQILHEKITILVTHQLQYLKAASQILILKDGKMVQKGTYTEFLKSGIDFGSLLKKDNEESEQPPVPGTPTLRNRTFSESSVWSQQSSRPSLKDGALESQDTENVPVTLSEENRSEGKVGFQAYKNYFRAGAHWIVFIFLILLNTAAQVAYVLQDWWLSYWANKQSMLNVTVNGGGNVTEKLDLNWYLGIYSGLTVATVLFGIARSLLVFYVLVNSSQTLHNKMFESILKAPVLFFDRNPIGRILNRFSKDIGHLDDLLPLTFLDFIQTLLQVVGVVSVAVAVIPWIAIPLVPLGIIFIFLRRYFLETSRDVKRLESTTRSPVFSHLSSSLQGLWTIRAYKAEERCQELFDAHQDLHSEAWFLFLTTSRWFAVRLDAICAMFVIIVAFGSLILAKTLDAGQVGLALSYALTLMGMFQWCVRQSAEVENMMISVERVIEYTDLEKEAPWEYQKRPPPAWPHEGVIIFDNVNFMYSPGGPLVLKHLTALIKSQEKVGIVGRTGAGKSSLISALFRLSEPEGKIWIDKILTTEIGLHDLRKKMSIIPQEPVLFTGTMRKNLDPFNEHTDEELWNALQEVQLKETIEDLPGKMDTELAESGSNFSVGQRQLVCLARAILRKNQILIIDEATANVDPRTDELIQKKIREKFAHCTVLTIAHRLNTIIDSDKIMVLDSGRLKEYDEPYVLLQNKESLFYKMVQQLGKAEAAALTETAKQVYFKRNYPHIGHTDHMVTNTSNGQPSTLTIFETAL

SEQ ID NO: 159779 - DNA, 3978 bp, Artificial Sequence
  derived and/or modified sequence
atgttacccgtataccaggaagtcaagccgaatcccctgcaggacgctaacctttgcagcagggtgttcttttggtggcttaacccgctcttcaaaatcgggcacaagagaagacttgaagaggatgacatgtatagcgtgctgccggaggacaggagtcagcatcttggcgaggaactgcagggattctgggataaagaagtgctcagggcagaaaatgatgcccagaagccttcactcacccgggctataataaagtgttactggaaatcttaccttgtactcggaatttttaccctgattgaggagagcgcgaaagtgatccagcccatttttttgggtaagatcataaactactttgaaaactacgacccaatggattcagtagccttaaacacggcatatgcctatgctactgtgctcacattctgcacgctcatattggcaatcctgcatcatttgtacttctaccacgtccaatgcgctgggatgaggcttcgagtggcaatgtgtcacatgatttacaggaaggcactacgtctgtcaaatatggctatgggtaagactaccacaggacaaatagtaaatcttttatcaaatgacgtcaacaagttcgaccaggtgacagtcttcctgcactttctatgggccgggcccctccaggctatcgcagtaaccgccctattatggatggaaataggaatctcctgtttggctggcatggctgttctgattattttgttaccactccaatcttgcttcggaaaactgttctccagcctccggtcaaagaccgccacattcactgatgcccggattcgaaccatgaatgaggtgatcactggaatacgcattattaagatgtacgcctgggagaagtcattttcaaatcttattaccaatctccgcaagaaagagattagcaagatactccgaagttcgtgcttgcgtgggatgaatttagcctctttcttttcagcttccaaaataatcgtgttcgtgacgtttacaacgtacgtcctgttagggtccgtaatcaccgcatcacgtgtgttcgtggccgtaactctgtacggagccgttagacttacagtgactcttttttttccctctgcgatcgagagggtatctgaagctattgtcagtattaggcgcatccagacattcctccttctcgacgagatttcccagcgcaatagacagctacccagcgacggcaaaaaaatggtgcacgtacaggacttcaccgctttctgggacaaggccagcgagacccccacccttcagggactctcatttacggtcaggcccggtgaactgttggctgtggtgggccccgtgggagccggtaagtcaagccttttgtccgctgtgcttggcgaactggcccccagccacggtctggtgagcgtgcacggacgcatagcttatgtgtcacaacagccctgggtcttttctgggacactccggtcgaatattcttttcgggaaaaagtacgaaaaggagcgatacgagaaagtaattaaggcctgcgcactgaagaaggacctgcagcttctcgaggacggcgaccttactgttatcggggacagaggaactaccctctcaggcgggcagaaggcaagggtgaacctggccagagcagtttatcaagacgccgacatctaccttcttgacgacccattgtccgccgtggatgccgaagtatctaggcatctttttgagttatgtatttgtcagatccttcatgagaagattaccattctggtgactcatcaactccagtaccttaaagccgcgtctcaaattctgattctgaaggacggtaaaatggtgcaaaaagggacatacacagagtttttgaaatcaggaatagactttggtagtctgctgaaaaaggacaatgaagaatccgaacaaccacctgtacccgggacaccaaccctcaggaatcgcaccttcagtgagtcgagtgtgtggtctcagcagagcagccgccctagcctgaaggatggggccctggagtcccaggataccgagaacgtccccgtcactctatcagaggaaaacagaagcgaaggaaaggtggggttccaggcctataaaaactactttagagccggcgcccattggatcgtgttcatcttcctcattctgctcaacaccgccgcacaggtggcttacgtgctgcaggactggtggttgtcatattgggcaaataagcagtcaatgcttaatgtcacggtgaacggcggagggaatgtcaccgagaagctggacctcaattggtatctaggcatctattctgggttaacagtcgcgaccgtgctgttcggaattgcccgttcactcctcgtcttttacgtacttgttaactcctcgcaaaccctccataataaaatgttcgagtcgatcctgaaggcccctgtgctattttttgaccggaatcccattggccgcatactgaacagattttccaaagatatcgggcatctggatgatctgcttcctcttacttttctcgatttcattcaaactcttctgcaggtggtcggcgtagtctccgtcgccgtggcagtgattccttggattgccattcccctcgtgccactcgggattatcttcattttcctaaggcggtattttctggagacctctcgagacgtcaagcggcttgaatctacaactcgctcgcccgtgttcagccatttaagtagctctctacagggactgtggaccattagagcctacaaagctgaggagcgctgccaggagttattcgacgcccatcaggacctccattccgaggcttggtttctgtttctcacaacatccaggtggttcgccgttcgtctagatgcaatctgcgccatgttcgtgattattgtggcctttggatccctgattcttgccaagaccctggacgccgggcaggtcggcctggctctgtcctacgcgttgacactgatgggcatgtttcagtggtgcgtgcgacagagtgccgaggttgaaaatatgatgatcagcgttgaacgggtgatcgagtatactgatctcgagaaagaagcaccctgggagtatcagaaacgaccccccccagcctggcctcacgagggcgtgattatcttcgataatgtaaacttcatgtattcgccggggggcccgcttgtactgaagcatctgaccgcccttataaaatctcaggagaaagtcggaatagtaggaagaacaggagccgggaagagcagcttgatctctgcgctttttcgtctctccgagccggagggtaaaatatggattgacaaaatccttacaaccgaaatcggactacatgacctgcggaagaaaatgtctattattcctcaggagccagtcctgttcacaggcacaatgcgcaaaaacctagacccattcaacgagcatactgacgaagagctttggaatgcgttgcaggaagtccagctcaaagagaccatcgaagatctgccggggaaaatggacacagagctcgccgagtccgggtcgaattttagcgtcggtcagagacagctggtgtgcttagcacgtgcaattcttagaaagaaccagatactcattatcgacgaagctaccgctaatgtcgacccgcggacagacgaactgattcagaaaaaaattagggagaagtttgcccattgcaccgtgcttactattgcacacaggctgaacaccatcatcgatagcgataaaattatggtgctcgatagcgggagattgaaagaatatgatgagccatacgtcttattacagaacaaagaatctctgttctataagatggtgcaacagctcggaaaagccgaagctgccgctttgacagagactgcaaaacaggtgtacttcaagagaaattaccctcacattggtcacacggatcatatggttaccaatacaagcaacgggcaaccatctacattaacaatttttgaaactgccttgtag

SEQ ID NO: 159780 - DNA, 75 bp, Artificial Sequence
  derived and/or modified sequence
atgctacctgtctaccaggaagtcaagcccaatccactgcaggatgcgaatctttgctcgagagtatttttctag

SEQ ID NO: 159781 - DNA, 3978 bp, Artificial Sequence
  derived and/or modified sequence
atgctgcctgtgtaccaggaggtgaagcccaaccccctgcaggatgccaacctgtgcagcagggtcttcttctggtggctgaaccccctcttcaagattggccacaagaggcggctggaggaggatgacatgtacagcgtgctgcctgaggacaggagccagcacctgggggaggagctgcagggcttctgggacaaggaggtgctgcgggcagaaaatgatgcccagaagcccagcctgacccgggccatcatcaagtgctactggaagagctacctggtgctgggcatcttcaccctgattgaggagagcgccaaggtgatccagcccatcttcctgggcaagatcatcaactactttgaaaattatgaccccatggacagcgtggccctgaacacagcctatgcctatgccaccgtgctgaccttctgcaccctcatcctggccatcctgcaccacctgtacttctaccacgtgcagtgtgccggcatgaggctgcgggtggccatgtgccacatgatctacaggaaggccctgcggctgagcaacatggccatgggcaagaccaccaccggccagatcgtgaacctgctgagcaatgatgtgaacaagtttgaccaggtgacagtgttcctgcacttcctgtgggccggccccctgcaggccatcgctgtgacagccctgctgtggatggagatcggcatcagctgcctggccggcatggctgtgctgatcatcctgctgcccctgcagagctgcttcggcaagctgttcagcagcctgcggagcaagacagccaccttcacagatgcccgcatccgcaccatgaatgaagtcatcaccggcatccgcatcatcaagatgtatgcctgggagaagagcttcagcaacctgatcaccaacctgaggaagaaggagatcagcaagatcctgcggagcagctgcctgcggggcatgaacctggccagcttcttcagcgccagcaagatcatcgtgtttgtgaccttcaccacctacgtgctgctgggcagcgtcatcacagccagccgggtgtttgtggccgtgaccctgtatggagctgtgcggctgactgtgaccctcttcttccccagcgccatcgagcgggtgtctgaggccatcgtgtccatccgccgcatccagaccttcctgctgctggatgagatcagccagaggaaccggcagctgcccagtgatggcaagaagatggtgcacgtgcaggacttcaccgccttctgggacaaggccagcgagacccccaccctgcagggcctgtccttcaccgtgcggcctggagagctgctggccgtggtgggccctgtgggcgccggcaagagcagcctgctgtctgctgtgctgggggagctggcccccagccacggcctggtgtctgtgcacggcagaattgcctacgtgtcccagcagccctgggtgttcagcggcaccctgcggagcaacatcctgtttgggaagaagtatgagaaggagagatatgagaaggtgatcaaggcctgtgccctgaagaaggacctgcagctgctggaggatggagacctgaccgtcatcggggaccggggcaccaccctgagcggcggccagaaggcccgggtgaacctggcccgggctgtgtaccaggatgctgacatctacctgctggatgaccccctgtctgctgtggatgctgaggtgagccgccacctgtttgagctgtgcatctgccagatcctgcacgagaagatcaccatcctggtgacccaccagctgcagtacctgaaggccgccagccagatcctgatcctgaaggatggcaagatggtgcagaagggcacctacacagagttcctgaagtctggaattgactttggcagcctgctgaagaaggacaatgaggagagcgagcagccccctgtgcccggcacccccaccctgaggaacagaaccttcagcgagagctctgtgtggagccagcagagcagccggcccagcctgaaggatggagccctggagagccaggacacagaaaatgtgcctgtgaccctgtctgaagaaaatagaagtgagggcaaggtgggcttccaggcctacaagaactacttccgggccggggcccactggatcgtgttcatcttcctgatcctgctgaacacagctgcccaggtggcctacgtgctgcaggactggtggctgagctactgggccaacaagcagagcatgctgaatgtgacagtgaatggaggcggcaatgtgacagagaagctggacctgaactggtacctgggcatctacagcggcctgactgtggccaccgtgctgtttggcatcgcccggagcctgctggtgttctacgtgctggtgaacagcagccagaccctgcacaacaagatgtttgagagcatcctgaaggcccctgtgctcttctttgacaggaaccccatcggccgcatcctgaaccgcttcagcaaggacatcggccacctggatgacctgctgcccctgaccttcctggacttcatccagaccctgctgcaggtggtgggcgtggtgtctgtggccgtggccgtcatcccctggatcgccatccccctggtgcccctgggcatcatcttcatcttcctgcggcgctacttcctggagaccagcagagatgtgaagaggctggagagcaccaccaggagccctgtgttcagccacctgagcagcagcctgcagggcctgtggaccatccgggcctacaaggccgaggagcgctgccaggagctgtttgatgcccaccaggacctgcacagcgaggcctggttcctgttcctgaccaccagccgctggtttgctgtgcggctggatgccatctgtgccatgtttgtgatcatcgtggccttcggcagcctcatcctggccaagaccctggatgctggccaggtgggcctggccctgtcctatgccctgaccctgatgggcatgttccagtggtgtgtgcggcagagcgctgaggtggagaacatgatgatctctgtggagagggtcatcgagtacacagacctggagaaggaggccccctgggagtaccagaagaggcctcctccagcctggccccatgaaggagtcatcatctttgacaacgtgaacttcatgtacagccctgggggccccctggtgctgaagcacctgacagccctgatcaagagccaggagaaggtgggcatcgtgggccgcactggagctgggaagagcagcctcatcagcgccctcttccggctgtctgagcctgagggcaagatctggattgacaagatcctgaccacagagatcggcctgcatgacctgaggaagaagatgagcatcatcccccaggagcctgtgctcttcaccggcaccatgaggaagaacctggaccccttcaatgagcacacagatgaggagctgtggaatgccctgcaggaggtgcagctgaaggagaccatcgaggacctgcccgggaagatggacacagagctggccgagagcggcagcaacttctctgtgggccagaggcagctggtgtgcctggcccgggccatcctgaggaagaaccagatcctgatcattgatgaggccacagccaacgtggaccccaggacagatgagctgatccagaagaagatccgggagaagtttgcccactgcaccgtgctgaccatcgcccaccggctgaacaccatcatcgacagcgacaagatcatggtgctggacagcggccgcctgaaggagtatgatgagccctacgtgctgctgcagaacaaggagagcctcttctacaagatggtgcagcagctgggcaaggccgaggccgccgccctgacagaaacagccaagcaggtgtacttcaagaggaactacccccacatcggccacacagaccacatggtgaccaacaccagcaatggccagcccagcaccctgaccatctttgaaacagccctgtag

SEQ ID NO: 159782 - DNA, 75 bp, Artificial Sequence
  derived and/or modified sequence
atgctgcctgtgtaccaggaggtgaagcccaaccccctgcaggatgccaacctgtgcagcagggtcttcttctag

SEQ ID NO: 159783 - DNA, 3978 bp, Artificial Sequence
  derived and/or modified sequence
atgctgcccgtgtaccaggaggtgaagcccaaccccctgcaggacgccaatctgtgttctcgggtcttcttttggtggttgaaccctctgtttaaaatcggacacaagagaagattagaggaagatgacatgtatagtgtgcttcctgaagataggagccagcatttgggagaggaactacagggcttctgggataaggaggtgctccgtgctgagaatgacgcacagaagcccagcttaactagggccatcatcaagtgctactggaagtcttacctcgtcctgggcatctttaccctgattgaagagtccgcaaaagttatccaacccatcttcctaggaaagattattaattactttgagaactacgatcccatggattcagtggctctgaacacagcatacgcctacgccacagtgctgactttttgcaccttaatcctagccatcttacaccacctgtatttctatcatgtgcaatgcgcaggcatgaggttgagagtcgctatgtgccacatgatatataggaaagccctcagattgtccaacatggctatggggaaaactacaacggggcaaatcgtgaacctattgagtaacgatgtgaataaatttgatcaggtgaccgtgtttctccattttctatgggcaggccctctgcaggcgattgccgtcacagccctcttgtggatggagatcggcattagttgcctagcggggatggcggtcctcattatcttgcttcctttgcagtcctgctttggaaagctgttctcctcactgagatcgaaaaccgcgaccttcactgacgcacgcattcggacgatgaatgaggtcatcaccgggatcaggatcatcaagatgtatgcctgggaaaaaagctttagtaacctgatcacaaacctaaggaaaaaggagatttcgaagattctgagatcttcatgtctgagaggtatgaatctggcatctttcttttctgccagtaaaatcatagttttcgtgacatttaccacgtacgtccttttaggctccgtgatcaccgcatcccgggtgttcgtggccgtgactttgtatggcgccgtgagattgacagtgactttgttcttcccatctgcaatcgagcgcgtttccgaggcaattgtcagcatccgcaggatccagacattcctcctactagacgagatctcacagaggaatagacagcttcctagcgatggcaaaaagatggtgcatgtgcaggacttcaccgctttctgggacaaagctagtgagactcccactctgcagggcttatctttcacagtacggcccggagaactccttgccgtcgttggcccggttggagcgggcaagagttccctgctgtctgccgttctgggcgagctagctccttcccacggcctggttagcgtgcatggcaggattgcttacgttagccagcagccctgggtgttttccgggaccctgagatcaaacattctcttcgggaagaagtacgagaaagaaaggtacgaaaaggttatcaaagcttgcgcgcttaagaaagatctgcagttgcttgaagatggagatctgacagtcataggcgaccggggaaccaccctcagcggggggcagaaggctagagtgaacctggcacgcgcagtttatcaggatgcagacatttacctcttggacgatcccctgtcagccgtggatgctgaggtatcacggcacctgtttgagctgtgtatctgtcagattctacacgaaaaaataacaattttagtgactcaccagctgcagtatttgaaagcggccagtcagattctaatcctgaaagacggcaaaatggttcaaaagggcacttatacggagtttcttaaatctggtatcgactttggttcccttcttaaaaaggacaacgaggagtctgaacagcctcctgtccccggaactccgacacttagaaacaggactttttctgagtccagcgtgtggagccagcagagcagtcggccttctctgaaggatggggcattagagagtcaagacaccgaaaatgtccccgtaaccttatctgaggagaatcggagtgagggcaaggtgggcttccaagcctacaaaaattactttagggcaggggcccattggattgtgttcatctttttaattttgttaaatactgccgcccaggtggcttacgtgctccaggactggtggctgtcatattgggcaaacaagcagagcatgcttaatgtcacagtcaacggaggggggaatgtgactgaaaagctggatctcaactggtacctcgggatatatagcggccttactgtagcgactgtgctgttcgggattgcgcgttctctgctggtcttctatgtcctggttaacagctctcaaacacttcacaataaaatgtttgaaagcatactgaaggccccagtgttattcttcgatcggaacccaatcggcaggatcctcaatcgttttagcaaagacataggccaccttgatgacctactgcctcttactttcctggatttcatccaaacactcctgcaggtggtaggggttgtctcagtggccgtggccgtcatcccatggatcgccatcccactggtacccctgggcattatctttattttcctccgccgctatttcctggagacaagcagagatgtgaaacgactggagagcacgacccgctcacccgtgttttctcatctgtcgtcctcactgcagggcctttggaccatcagggcatacaaggccgaggagagatgtcaggagctcttcgacgcacaccaagacctccactccgaagcatggttcttgttcctcaccacatcgcgctggtttgccgttcgattagatgccatctgcgccatgttcgttatcatcgtggcatttggcagcctaatactggccaaaaccctagacgcgggtcaggttgggttggccctctcctatgctctgacactgatgggcatgttccagtggtgtgtgcggcagtccgctgaagtggaaaatatgatgatctcagtcgaacgagtgattgaatatactgacctcgaaaaagaagccccatgggaatatcagaaaagaccacccccggcctggccacacgaaggggtgatcatcttcgataatgtcaatttcatgtatagccctggagggccattggtgttgaagcatctaaccgccttgatcaaatcacaggaaaaggtgggtatcgtgggccgaactggtgccggtaagagctccctgatcagcgccttgttccgtctgagcgaacctgagggcaaaatctggatcgataagatactgaccacagaaattggactgcacgatctgcgtaaaaagatgtcgattatcccccaggagcctgtcctctttacagggaccatgagaaagaatcttgaccctttcaatgaacacacagacgaggaactctggaacgcccttcaagaagtgcagcttaaggagactattgaagatctgcctggaaagatggatactgagctcgccgagagcggctctaatttttctgtcggccagcgacagctggtttgtttagctagagccatattgcgcaagaaccagatcctgattatcgacgaagccacagctaatgtggatccacggaccgatgagctgatccagaagaaaatccgggagaagttcgctcactgcaccgtgttgaccattgcacaccgcctgaacactatcatcgatagcgataaaattatggttctggatagtggtagacttaaggagtacgacgagccttatgttttactgcagaacaaagaatcgttgttctataaaatggtgcagcagctgggcaaagcagaggcagctgccctcactgagaccgccaagcaagtgtattttaagcgcaattacccgcacattggccacaccgatcatatggtgacaaacacctcgaacggacaaccaagcaccctgactatttttgagacagccttatag

SEQ ID NO: 159784 - DNA, 75 bp, Artificial Sequence
  derived and/or modified sequence
atgctgcccgtgtaccaggaggtgaagcccaaccccctgcaggacgctaacttatgtagccgagtgttcttctag

SEQ ID NO: 159785 - DNA, 3978 bp, Artificial Sequence
  derived and/or modified sequence
atgcttcccgtgtatcaggaagtcaagccaaaccccttacaggacgccaatctgtgtagcagggtcttcttttggtggcttaatcctctgtttaaaataggtcacaagagaagactcgaggaggatgatatgtactcggtcctcccggaggatcgtagtcaacatctcggggaggaactccaggggttttgggataaggaggtgctgagagctgagaatgacgcgcagaagccttccctgacccgagcaattatcaaatgctactggaagagctacctcgtgctgggcatcttcaccctgattgaggaatctgctaaggtgatccaacctatcttcctgggaaaaatcattaactattttgagaattacgacccaatggactctgtggccttgaacactgcgtacgcctatgctaccgtcctgactttctgtactttgattctagccattctccaccacctctacttttaccacgtgcagtgtgctggcatgcgacttcgggtggcaatgtgccacatgatctaccgcaaagctctacgcctgtcaaacatggctatggggaagacaactactgggcagatagtgaacctgctgagcaatgacgttaacaaatttgaccaggttacagtgttcctccatttcctatgggcaggcccacttcaggcaattgcagtgacagcattgctctggatggagattggtatctcttgcctggctggaatggcagtgctaatcatcttgcttcccctacagtcatgttttggcaagctcttctcatctctgaggtcaaagactgctacttttaccgacgcacgaatacgcaccatgaacgaggtcattacgggcatccgcatcattaaaatgtatgcatgggaaaagtccttctctaacttaatcaccaacctccggaaaaaagagatcagcaaaatcctgagatcctcctgtcttcgcggtatgaaccttgcatcctttttcagcgcaagcaagataattgtgttcgtcacttttacaacttacgtactcctaggttcagtgatcacagcgtccagagtgttcgtcgctgtgaccctgtatggggcagtgcgcctgacagtaaccttattcttccctagtgccattgagcgagtttccgaggctatcgtgtcaatacggcgaatacagacattccttctgctagacgagatcagtcagcgcaatcgccaactaccgagtgatggtaagaaaatggtgcacgtgcaggatttcactgcgttttgggataaagcttccgagacaccaactttgcaaggactgagctttacggtcagaccaggagaactactagccgtggtcggacctgtaggggctggaaagtccagtctactgagcgccgtgctcggcgagctggccccaagtcacgggttggtatcagttcatggccgaattgcttacgtcagccagcagccttgggttttttccgggacattgcgttcaaatattctttttggcaaaaaatacgagaaagagaggtacgagaaagtaataaaagcatgtgccctgaagaaggacctgcaactgctggaagacggagacttgacggtgatcggcgaccgcggtactacgctctcaggcggacagaaagcacgggttaacctggctcgtgctgtttaccaggacgctgacatctatctgttggatgaccccttgtccgctgtcgatgcggaggtgtccagacacctgttcgagttgtgcatctgccagatattgcacgaaaaaattacgatcctggtaacacaccagttgcaatacttaaaggcagcttcgcagatcctaatcctaaaagacggaaagatggtgcagaagggaacatacactgagttccttaaaagtgggatcgatttcggctctcttctgaaaaaagataacgaggagtctgagcagccgccagtgcccggtacgcccaccctgcgcaatcggacattcagcgagagtagtgtgtggtcccagcagtcttctagacccagcctcaaagatggcgctctcgaatcgcaggacaccgaaaacgttccggtgacactgtccgaagaaaataggtccgagggcaaggttggatttcaggcttacaagaattattttagagcaggagctcactggattgttttcatattcctgatcttgctaaacactgcggctcaggtggcctatgtgcttcaggactggtggctatcctactgggccaacaagcagtctatgttgaatgtgaccgtgaacggaggcggaaacgtaaccgagaagctggatctgaattggtacctggggatatattccggacttactgtagcaacagtgctcttcggtatcgcacgcagcttgctggtgttttatgtgctagtgaattcctcccaaactctccataacaagatgttcgagtccatcctgaaagctcctgtcttgtttttcgaccgtaaccctatcggcaggatcctgaaccgtttttccaaagacattggccacttggatgacctgttacccctgacatttctagacttcatccagaccctgcttcaagtggtgggggttgtgtcagtcgctgtagccgttatcccttggatagccatacccctggtgcctcttgggattatttttattttcctgagaaggtacttcctcgaaacttcgcgcgacgtgaaacgtttggagtctactacccggagtccggtcttcagtcacctgagcagtagcctccagggcctgtggaccattagagcatacaaggccgaggaacgatgtcaggaactcttcgatgcccaccaggaccttcactctgaggcgtggttcctcttcctgaccacttctcgatggtttgctgtgaggttggatgccatttgcgcaatgttcgtgatcattgtcgcattcggctccctgattctggcaaagaccctcgatgcaggccaagtcggactcgctttgagctacgccctcacccttatgggtatgtttcagtggtgtgtgaggcagagcgcagaggtagaaaatatgatgatttctgtggagagggtcattgagtacaccgatctggaaaaggaggctccttgggagtaccagaaacgcccacccccagcgtggccccatgagggggtgattatctttgacaatgtcaattttatgtattcgccaggtgggcctctggtgcttaagcatctcacagctttgattaagagtcaggagaaagtcggtattgtggggcgaaccggcgcaggtaagtccagtcttatttccgccctgttcaggctgtcagagccggaggggaaaatctggattgataagattctgacaaccgagataggtctgcacgatttgcggaaaaaaatgagcattattccccaagagcctgtgctcttcactggcactatgaggaagaatctggaccctttcaacgagcatacagacgaagagctgtggaatgcgctccaagaggtgcagcttaaggaaactatagaggatctgccaggtaaaatggataccgagttagcagagagcgggtctaacttcagcgtgggacagagacagctggtttgcctggccagggccatcctccgtaaaaatcagatcctgatcattgacgaggccacagcgaatgtagatccacgcaccgacgagttgatacagaaaaagattcgagagaaattcgcccattgcactgtgctgacaatcgcccaccggctgaatacaatcatcgattcagataaaatcatggtcctggattctgggagactgaaagagtatgatgaaccatacgtgcttttgcagaataaagaaagcctcttctataaaatggtccaacagctaggcaaagccgaggctgcagccttaaccgagaccgcaaagcaggtgtacttcaagcgcaattatccccacataggccacaccgatcacatggttaccaatacatccaatgggcaaccctcaactctcacaatttttgagacagctctatag

SEQ ID NO: 159786 - DNA, 75 bp, Artificial Sequence
  derived and/or modified sequence
atgcttccagtctatcaggaagtaaaaccaaatcccctgcaagatgctaacttgtgttcgagagtattcttctag

SEQ ID NO: 159787 - DNA, 5837 bp, Artificial Sequence
  derived and/or modified sequence
ggacaggcgtggcggccggagccccagcatccctgcttgaggtccaggagcggagcccgcggccaccgccgcctgatcagcgcgaccccggcccgcgcccgccccgcccggcaagatgctgcccgtgtaccaggaggtgaagcccaacccgctgcaggacgcgaacctctgctcacgcgtgttcttctggtggctcaatcccttgtttaaaattggccataaacggagattagaggaagatgatatgtattcagtgctgccagaagaccgctcacagcaccttggagaggagttgcaagggttctgggataaagaagttttaagagctgagaatgacgcacagaagccttctttaacaagagcaatcataaagtgttactggaaatcttatttagttttgggaatttttacgttaattgaggaaagtgccaaagtaatccagcccatatttttgggaaaaattattaattattttgaaaattatgatcccatggattctgtggctttgaacacagcgtacgcctatgccacggtgctgactttttgcacgctcattttggctatactgcatcacttatatttttatcacgttcagtgtgctgggatgaggttacgagtagccatgtgccatatgatttatcggaaggcacttcgtcttagtaacatggccatggggaagacaaccacaggccagatagtcaatctgctgtccaatgatgtgaacaagtttgatcaggtgacagtgttcttacacttcctgtgggcaggaccactgcaggcgattgcagtgactgccctactctggatggagataggaatatcgtgccttgctgggatggcagttctaatcattctcctgcccttgcaaagctgttttgggaagttgttctcatcactgaggagtaaaactgcaactttcacggatgccaggatcaggaccatgaatgaagttataactggtataaggataataaaaatgtacgcctgggaaaagtcattttcaaatcttattaccaatttgagaaagaaggagatttccaagattctgagaagttcctgcctcagagggatgaatttggcttcatttttcagtgcaagcaaaatcatcgtgtttgtgaccttcaccacctacgtgctcctcggcagtgtgatcacagccagccgcgtgttcgtggcagtgacgctgtatggggctgtgcggctgacggttaccctcttcttcccctcagccattgagagggtgtcagaggcaatcgtcagcatccgaagaatccagacctttttgctacttgatgagatatcacagcgcaaccgtcagctgccgtcagatggtaaaaagatggtgcatgtgcaggattttactgctttttgggataaggcatcagagaccccaactctacaaggcctttcctttactgtcagacctggcgaattgttagctgtggtcggccccgtgggagcagggaagtcatcactgttaagtgccgtgctcggggaattggccccaagtcacgggctggtcagcgtgcatggaagaattgcctatgtgtctcagcagccctgggtgttctcgggaactctgaggagtaatattttatttgggaagaaatacgaaaaggaacgatatgaaaaagtcataaaggcttgtgctctgaaaaaggatttacagctgttggaggatggtgatctgactgtgataggagatcggggaaccacgctgagtggagggcagaaagcacgggtaaaccttgcaagagcagtgtatcaagatgctgacatctatctcctggacgatcctctcagtgcagtagatgcggaagttagcagacacttgttcgaactgtgtatttgtcaaattttgcatgagaagatcacaattttagtgactcatcagttgcagtacctcaaagctgcaagtcagattctgatattgaaagatggtaaaatggtgcagaaggggacttacactgagttcctaaaatctggtatagattttggctcccttttaaagaaggataatgaggaaagtgaacaacctccagttccaggaactcccacactaaggaatcgtaccttctcagagtcttcggtttggtctcaacaatcttctagaccctccttgaaagatggtgctctggagagccaagatacagagaatgtcccagttacactatcagaggagaaccgttctgaaggaaaagttggttttcaggcctataagaattacttcagagctggtgctcactggattgtcttcattttccttattctcctaaacactgcagctcaggttgcctatgtgcttcaagattggtggctttcatactgggcaaacaaacaaagtatgctaaatgtcactgtaaatggaggaggaaatgtaaccgagaagctagatcttaactggtacttaggaatttattcaggtttaactgtagctaccgttctttttggcatagcaagatctctattggtattctacgtccttgttaactcttcacaaactttgcacaacaaaatgtttgagtcaattctgaaagctccggtattattctttgatagaaatccaataggaagaattttaaatcgtttctccaaagacattggacacttggatgatttgctgccgctgacgtttttagatttcatccagacattgctacaagtggttggtgtggtctctgtggctgtggccgtgattccttggatcgcaatacccttggttccccttggaatcattttcatttttcttcggcgatattttttggaaacgtcaagagatgtgaagcgcctggaatctacaactcggagtccagtgttttcccacttatcatcttctctccaggggctctggaccatccgggcatacaaagcagaagagaggtgtcaggaactgtttgatgcacaccaggatttacattcagaggcttggttcttgtttttgacaacgtcccgctggtttgccgtccgtctggatgccatctgtgccatgtttgtcatcatcgttgcctttgggtccctgattctggcaaaaactctggatgccgggcaggttggtttggcactgtcctatgccctcacgctcatggggatgtttcagtggtgtgttcgacaaagtgctgaagttgagaatatgatgatctcagtagaaagggtcattgaatacacagaccttgaaaaagaagcaccttgggaatatcagaaacgcccaccaccagcctggccccatgaaggagtgataatctttgacaatgtgaacttcatgtacagtccaggtgggcctctggtactgaagcatctgacagcactcattaaatcacaagaaaaggttggcattgtgggaagaaccggagctggaaaaagttccctcatctcagccctttttagattgtcagaacccgaaggtaaaatttggattgataagatcttgacaactgaaattggacttcacgatttaaggaagaagatgtcaatcatacctcaggaacctgttttgttcactggaacaatgaggaaaaacctggatccctttaatgagcacacggatgaggaactgtggaatgccttacaagaggtacaacttaaagaaaccattgaagatcttcctggtaaaatggatactgaattagcagaatcaggatccaattttagtgttggacaaagacaactggtgtgccttgccagggcaattctcaggaaaaatcagatattgattattgatgaagcgacggcaaatgtggatccaagaactgatgagttaatacaaaaaaaaatccgggagaaatttgcccactgcaccgtgctaaccattgcacacagattgaacaccattattgacagcgacaagataatggttttagattcaggaagactgaaagaatatgatgagccgtatgttttgctgcaaaataaagagagcctattttacaagatggtgcaacaactgggcaaggcagaagccgctgccctcactgaaacagcaaaacaggtatacttcaaaagaaattatccacatattggtcacactgaccacatggttacaaacacttccaatggacagccctcgaccttaactattttcgagacagcactgtgaatccaaccaaaatgtcaagtccgttccgaaggcattttccactagtttttggactatgtaaaccacattgtacttttttttactttggcaacaaatatttatacatacaagatgctagttcatttgaatatttctcccaacttatccaaggatctccagctctaacaaaatggtttatttttatttaaatgtcaatagttgttttttaaaatccaaatcagaggtgcaggccaccagttaaatgccgtctatcaggttttgtgccttaagagactacagagtcaaagctcatttttaaaggagtaggacaaagttgtcacaggtttttgttgttgtttttattgcccccaaaattacatgttaatttccatttatatcagggattctatttacttgaagactgtgaagttgccattttgtctcattgttttctttgacataactaggatccattatttcccctgaaggcttcttgttagaaaatagtacagttacaaccaataggaacaacaaaaagaaaaagtttgtgacattgtagtagggagtgtgtaccccttactccccatcaaaaaaaaaaatggatacatggttaaaggatagaagggcaatattttatcatatgttctaaaagagaaggaagagaaaatactactttctcaaaatggaagcccttaaaggtgctttgatactgaaggacacaaatgtgaccgtccatcctcctttagagttgcatgacttggacacggtaactgttgcagttttagactcagcattgtgacacttcccaagaaggccaaacctctaaccgacattcctgaaatacgtggcattattcttttttggatttctcatttatggaaggctaaccctctgttgactgtaagccttttggtttgggctgtattgaaatcctttctaaattgcatgaataggctctgctaacgtgatgagacaaactgaaaattattgcaagcattgactataattatgcagtacgttctcaggatgcatccaggggttcattttcatgagcctgtccaggttagtttactcctgaccactaatagcattgtcatttgggctttctgttgaatgaatcaacaaaccacaatacttcctgggaccttttgtactttatttgaactatgagtctttaatttttcctgatgatggtggctgtaatatgttgagttcagtttactaaaggttttactattatggtttgaagtggagtctcatgacctctcagaataaggtgtcacctccctgaaattgcatatatgtatatagacatgcacacgtgtgcatttgtttgtatacatatatttgtccttcgtatagcaagttttttgctcatcagcagagagcaacagatgttttattgagtgaagccttaaaaagcacacaccacacacagctaactgccaaaatacattgaccgtagtagctgttcaactcctagtacttagaaatacacgtatggttaatgttcagtccaacaaaccacacacagtaaatgtttattaatagtcatggttcgtattttaggtgactgaaattgcatcagtgatcataatgaggtttgttaaaacgatagctatattcaaaatgtctatatgtttatttggacttttgaggttaaagacagtcatataaacgtcctgtttctgttttaatgttatcatagaattttttaatgaaactaaattcaattgaaataaatgatagttttcatctccattca

SEQ ID NO: 159788 - DNA, 2256 bp, Artificial Sequence
  derived and/or modified sequence
gcgcccgccccgcccggcaagatgctgcccgtgtaccaggaggtgaagcccaacccgctgcaggacgcgaacctctgctcacgcgtgttcttctgatggagtctcgctgtgtcacccaggctggagtgcagtggcgcagtctcagctcactgcagcctccacctcctgtgttcaagcagtcctcctgcctcagccaccagactagcaggtctcccccgcctctttcttggaaggacacttgccattggatttaggacccacttggataatccaggatgatgtcttcactccaacatcctcagtttaattccatgtgcaaatacccttttcccaaataacattcaattctttaccaggaaaggtggctcaatcccttgtttaaaattggccataaacggagattagaggaagatgatatgtattcagtgctgccagaagaccgctcacagcaccttggagaggagttgcaagggttctgggataaagaagttttaagagctgagaatgacgcacagaagccttctttaacaagagcaatcataaagtgttactggaaatcttatttagttttgggaatttttacgttaattgaggaaagtgccaaagtaatccagcccatatttttgggaaaaattattaattattttgaaaattatgatcccatggattctgtggctttgaacacagcgtacgcctatgccacggtgctgactttttgcacgctcattttggctatactgcatcacttatatttttatcacgttcagtgtgctgggatgaggttacgagtagccatgtgccatatgatttatcggaaggcacttcgtcttagtaacatggccatggggaagacaaccacaggccagatagtcaatctgctgtccaatgatgtgaacaagtttgatcaggtgacagtgttcttacacttcctgtgggcaggaccactgcaggcgattgcagtgactgccctactctggatggagataggaatatcgtgccttgctgggatggcagttctaatcattctcctgcccttgcaaagctgttttgggaagttgttctcatcactgaggagtaaaactgcaactttcacggatgccaggatcaggaccatgaatgaagttataactggtataaggataataaaaatgtacgcctgggaaaagtcattttcaaatcttattaccaatttgagaaagaaggagatttccaagattctgagaagttcctgcctcagagggatgaatttggcttcatttttcagtgcaagcaaaatcatcgtgtttgtgaccttcaccacctacgtgctcctcggcagtgtgatcacagccagccgcgtgttcgtggcagtgacgctgtatggggctgtgcggctgacggttaccctcttcttcccctcagccattgagagggtgtcagaggcaatcgtcagcatccgaagaatccagacctttttgctacttgatgagatatcacagcgcaaccgtcagctgccgtcagatggtaaaaagatggtgcatgtgcaggattttactgctttttgggataaggcatcagagaccccaactctacaaggcctttcctttactgtcagacctggcgaattgttagctgtggtcggccccgtgggagcagggaagtcatcactgttaagtgccgtgctcggggaattggccccaagtcacgggctggtcagcgtgcatggaagaattgcctatgtgtctcagcagccctgggtgttctcgggaactctgaggagtaatattttatttgggaagaaatacgaaaaggaacgatatgaaaaagtcataaaggcttgtgctctgaaaaaggatttacagctgttggaggatggtgatctgactgtgataggagatcggggaaccacgctgagtggagggcagaaagcacgggtaaaccttgcaagagcagtgtatcaagatgctgacatctatctcctggacgatcctctcagtgcagtagatgcggaagttagcagacacttgttcgaactgtgtatttgtcaaattttgcatgagaagatcacaattttagtgactcatcagttgcagtacctcaaagctgcaagtcagattctgatattgaaagatggtaaaatggtgcagaaggggacttacactgagttcctaaaatctggtatagattttggctcccttttaaagaaggataatgaggaaagtgaacaacctccagttccaggaactcccacactaaggaatcgtaccttctcagagt

SEQ ID NO: 159789 - DNA, 3978 bp, Artificial Sequence
  derived and/or modified sequence
atgctgcccgtgtaccaggaggtgaagcccaaccccctgcaggacgccaacctgtgcagcagagtgttcttctggtggctgaaccccctgttcaagatcggccacaagagaagactggaggaggacgacatgtacagcgtgctgcccgaggacagaagccagcacctgggcgaggagctgcagggcttctgggacaaggaggtgctgagagccgagaacgacgcccagaagcccagcctgaccagagccatcatcaagtgctactggaagagctacctggtgctgggcatcttcaccctgatcgaggagagcgccaaggtgatccagcccatcttcctgggcaagatcatcaactacttcgagaactacgaccccatggacagcgtggccctgaacaccgcctacgcctacgccaccgtgctgaccttctgcaccctgatcctggccatcctgcaccacctgtacttctaccacgtgcagtgcgccggcatgagactgagagtggccatgtgccacatgatctacagaaaggccctgagactgagcaacatggccatgggcaagaccaccaccggccagatcgtgaacctgctgagcaacgacgtgaacaagttcgaccaggtgaccgtgttcctgcacttcctgtgggccggccccctgcaggccatcgccgtgaccgccctgctgtggatggagatcggcatcagctgcctggccggcatggccgtgctgatcatcctgctgcccctgcagagctgcttcggcaagctgttcagcagcctgagaagcaagaccgccaccttcaccgacgccagaatcagaaccatgaacgaggtgatcaccggcatcagaatcatcaagatgtacgcctgggagaagagcttcagcaacctgatcaccaacctgagaaagaaggagatcagcaagatcctgagaagcagctgcctgagaggcatgaacctggccagcttcttcagcgccagcaagatcatcgtgttcgtgaccttcaccacctacgtgctgctgggcagcgtgatcaccgccagcagagtgttcgtggccgtgaccctgtacggcgccgtgagactgaccgtgaccctgttcttccccagcgccatcgagagagtgagcgaggccatcgtgagcatcagaagaatccagaccttcctgctgctggacgagatcagccagagaaacagacagctgcccagcgacggcaagaagatggtgcacgtgcaggacttcaccgccttctgggacaaggccagcgagacccccaccctgcagggcctgagcttcaccgtgagacccggcgagctgctggccgtggtgggccccgtgggcgccggcaagagcagcctgctgagcgccgtgctgggcgagctggcccccagccacggcctggtgagcgtgcacggcagaatcgcctacgtgagccagcagccctgggtgttcagcggcaccctgagaagcaacatcctgttcggcaagaagtacgagaaggagagatacgagaaggtgatcaaggcctgcgccctgaagaaggacctgcagctgctggaggacggcgacctgaccgtgatcggcgacagaggcaccaccctgagcggcggccagaaggccagagtgaacctggccagagccgtgtaccaggacgccgacatctacctgctggacgaccccctgagcgccgtggacgccgaggtgagcagacacctgttcgagctgtgcatctgccagatcctgcacgagaagatcaccatcctggtgacccaccagctgcagtacctgaaggccgccagccagatcctgatcctgaaggacggcaagatggtgcagaagggcacctacaccgagttcctgaagagcggcatcgacttcggcagcctgctgaagaaggacaacgaggagagcgagcagccccccgtgcccggcacccccaccctgagaaacagaaccttcagcgagagcagcgtgtggagccagcagagcagcagacccagcctgaaggacggcgccctggagagccaggacaccgagaacgtgcccgtgaccctgagcgaggagaacagaagcgagggcaaggtgggcttccaggcctacaagaactacttcagagccggcgcccactggatcgtgttcatcttcctgatcctgctgaacaccgccgcccaggtggcctacgtgctgcaggactggtggctgagctactgggccaacaagcagagcatgctgaacgtgaccgtgaacggcggcggcaacgtgaccgagaagctggacctgaactggtacctgggcatctacagcggcctgaccgtggccaccgtgctgttcggcatcgccagaagcctgctggtgttctacgtgctggtgaacagcagccagaccctgcacaacaagatgttcgagagcatcctgaaggcccccgtgctgttcttcgacagaaaccccatcggcagaatcctgaacagattcagcaaggacatcggccacctggacgacctgctgcccctgaccttcctggacttcatccagaccctgctgcaggtggtgggcgtggtgagcgtggccgtggccgtgatcccctggatcgccatccccctggtgcccctgggcatcatcttcatcttcctgagaagatacttcctggagaccagcagagacgtgaagagactggagagcaccaccagaagccccgtgttcagccacctgagcagcagcctgcagggcctgtggaccatcagagcctacaaggccgaggagagatgccaggagctgttcgacgcccaccaggacctgcacagcgaggcctggttcctgttcctgaccaccagcagatggttcgccgtgagactggacgccatctgcgccatgttcgtgatcatcgtggccttcggcagcctgatcctggccaagaccctggacgccggccaggtgggcctggccctgagctacgccctgaccctgatgggcatgttccagtggtgcgtgagacagagcgccgaggtggagaacatgatgatcagcgtggagagagtgatcgagtacaccgacctggagaaggaggccccctgggagtaccagaagagacccccccccgcctggccccacgagggcgtgatcatcttcgacaacgtgaacttcatgtacagccccggcggccccctggtgctgaagcacctgaccgccctgatcaagagccaggagaaggtgggcatcgtgggcagaaccggcgccggcaagagcagcctgatcagcgccctgttcagactgagcgagcccgagggcaagatctggatcgacaagatcctgaccaccgagatcggcctgcacgacctgagaaagaagatgagcatcatcccccaggagcccgtgctgttcaccggcaccatgagaaagaacctggaccccttcaacgagcacaccgacgaggagctgtggaacgccctgcaggaggtgcagctgaaggagaccatcgaggacctgcccggcaagatggacaccgagctggccgagagcggcagcaacttcagcgtgggccagagacagctggtgtgcctggccagagccatcctgagaaagaaccagatcctgatcatcgacgaggccaccgccaacgtggaccccagaaccgacgagctgatccagaagaagatcagagagaagttcgcccactgcaccgtgctgaccatcgcccacagactgaacaccatcatcgacagcgacaagatcatggtgctggacagcggcagactgaaggagtacgacgagccctacgtgctgctgcagaacaaggagagcctgttctacaagatggtgcagcagctgggcaaggccgaggccgccgccctgaccgagaccgccaagcaggtgtacttcaagagaaactacccccacatcggccacaccgaccacatggtgaccaacaccagcaacggccagcccagcaccctgaccatcttcgagaccgccctgtag

SEQ ID NO: 159790 - DNA, 75 bp, Artificial Sequence
  derived and/or modified sequence
atgctgcccgtgtaccaggaggtgaagcccaaccccctgcaggacgccaacctgtgcagcagagtgttcttctag

SEQ ID NO: 159791 - protein, 598 aa, Artificial Sequence
  derived and/or modified sequence
MRAQEDLEGRTQHETTRDPSTPLPTEPKFDMLYKIEDVPPWYLCILLGFQHYLTCFSGTIAVPFLLAEALCVGHDQHMVSQLIGTIFTCVGITTLIQTTVGIRLPLFQASAFAFLVPAKAILALERWKCPPEEEIYGNWSLPLNTSHIWHPRIREVQGAIMVSSVVEVVIGLLGLPGALLNYIGPLTVTPTVSLIGLSVFQAAGDRAGSHWGISACSILLIILFSQYLRNLTFLLPVYRWGKGLTLLRIQIFKMFPIMLAIMTVWLLCYVLTLTDVLPTDPKAYGFQARTDARGDIMAIAPWIRIPYPCQWGLPTVTAAAVLGMFSATLAGIIESIGDYYACARLAGAPPPPVHAINRGIFTEGICCIIAGLLGTGNGSTSSSPNIGVLGITKVGSRRVVQYGAAIMLVLGTIGKFTALFSSLPDPILGGMFCTLFGMITAVGLSNLQFVDMNSSRNLFVLGFSMFFGLTLPNYLESNPGAINTGILEVDQILIVLLTTEMFVGGCLAFILDNTVPGSPEERGLIQWKAGAHANSDMSSSLKSYDFPIGMGIVKRITFLKYIPICPVFKGFSSSSKDQIAIPEDTPENTETASVCTKV

SEQ ID NO: 159792 - protein, 1863 aa, Artificial Sequence
  derived and/or modified sequence
MIEDKGPRVADYFVVAGLTDVSKPLEEEIHFNDACHKVAKPKEPITDVSVIIKSLGEEVPQDYICIDVTPTGLSADLNNGSLVGPQIYLCYRRGRDKPPLTDLGVLYDWKERLKQGCEIIQSTPYGRPANISGSTSSQRIYITYRRASENMTQNTLAVTDICIIIPSKGESPPHTFCKVDKNLNNSMWGSAVYLCYKKSVAKTNTVSYKAGLICRYPQEDYESFSLPESVPLFCLPMGATIECWPSNSKYPLPVFSTFVLTGASAEKVYGAAIQFYEPYSEENLTEKQRLLLGLTSADGKSDSSKTIHTNKCICLLSHWPFFDAFRKFLTFLYRYSISGPHVLPIEKHISHFMHKVPFPSPQRPRILVQLSPHDNLILSQPVSSPLPLSGGKFSTLLQNLGPENAVTLLVFAVTEHKILIHSLRPSVLTSVTEALVSMIFPFHWPCPYVPLCPLALADVLSAPCPFIVGIDSRYFDLYDPPPDVSCVDVDTNTISQIGDKKNVAWKILPKKPCKNLMNTLNNLHQQLAKLQQRPRDDGLMDLAINDYDFNSGKRLHMIDLEIQEAFLFFMASILKGYRSYLRPITQAPSETATDAASLFALQAFLRSRDRSHQKFYNMMTKTQMFIRFIEECSFVSDKDASLAFFDDCVDKVDMDKSGEVRLIELDESFKSEHTVFVTPPEIPHLPNGEEPPLQYSYNGFPVLRNNLFERPEGFLQAKKNKLPSKSSSPNSPLPMFRRTKQEIKSAHKIAKRYSSIPQMWSRCLLRHCYGLWFICLPAYVKVCHSKVRALKTAYDVLKKMQSKKMDPPDEVCYRILMQLCGQYDQPVLAVRVLFEMQKAGIDPNAITYGYYNKAVLESTWPSRSRSGYFLWTKVRNVVLGVTQFKRALKKHAHLSQTTLSGGQSDLGYNSLSKDEVRRGDTSTEDIQEEKDKKGSDCSSLSESESTKGSADCLPKLSYQNSSSIVRLTGTSNNSAGKISGESMESTPELLLISSLEDTNETRNIQSRCFRKRHKSDNETNLQQQVVWGNRNRNLSGGVLMGFMLNRINQEATPGDIVEKLGADAKILSNVISKSTRPNTLDIGKPPLRSKRDSLEKESSDDDTPFDGSNYLADKVDSPVIFDLEDLDSETDVSKAGCVATQNPKRIQRMNSSFSVKPFEKTDVATGFDPLSLLVAETEQQQKEEEEEDEDDSKSISTPSARRDLAEEIVMYMNNMSSPLTSRTPSIDLQRACDDKLNKKSPPLVKACRRSSLPPNSPKPVRLTKSKSYTKSEEKPRDRLWSSPAFSPTCPFREESQDTLTHSSPSFNLDTLLVPKLDVLRNSMFTAGKGVAEKASKWYSRFTMYTTSSKDQSSDRTSLSSVGAQDSESTSLTDEDVCHELEGPISSQETSATSGTKRIDLSRISLESSASLEGSLSKFALPGKSEVTSSFNASNTNIFQNYAMEVLISSCSRCRTCDCLVHDEEIMAGWTADDSNLNTTCPFCGNIFLPFLNIEIRDLRRPGRYFLKSSPSTENMHFPSSISSQTRQSCISTSASGLDTSALSVQGNFDLNSKSKLQENFCTRSIQIPANRSKTAMSKCPIFPMARSISTSGPLDKEDTGRQKLISTGSLPATLQGATDSLGLEWHLPSPDPVTVPYLSPLVVWKELESLLENEGDHAITVADFVDHHPIVFWNLVWYFRRLDLPSNLPGLILSSEHCNKYSKIPRHCMSEDSKYVLIQMLWDNMKLHQDPGQPLYILWNAHTQKYPMVHLLQKSDNSFNQELLKSMVKSIKMNDVYGPMSQILETLNKCPHFKRQRSLYREILFLSLVALGRENIDIDAFDKEYKMAYDRLTPSQVKSTHNCDRPPSTGVMECRKTFGEPYL

SEQ ID NO: 159793 - DNA, 5592 bp, Artificial Sequence
  derived and/or modified sequence
atgatcgaggacaagggccctcgagtcgcagactattttgtagtggctggccttacagatgtcagtaagcctctggaagaggaaatacactttaacgatgcctgccacaaggtggccaagcctaaagagcctataacagatgtgagcgtgattataaaatccctgggcgaagaagttcctcaggactacatctgtatcgacgtaacacccacaggacttagcgcagaccttaacaatggtagtttggtcggccctcagatctacctgtgctacaggaggggccgcgacaaaccacctttaactgacctaggagtgctctatgactggaaggagcgactgaaacaggggtgcgaaatcatccagagcaccccctatggacggcctgcaaatatcagcggctcgaccagctctcagcgcatttacatcacctatcgaagagcttcagagaacatgactcagaacacgttagcagtgacggacatctgtataatcattccatccaaaggagagagccctccacatactttctgcaaggtggataagaatctcaataattccatgtggggatctgctgtgtacctgtgttataagaaatctgtcgccaaaacaaataccgtaagttataaggctgggctgatctgtcgctacccacaagaagactacgagtcattcagcctaccggagagcgtgccactgttctgcctgcccatgggcgccacgatcgaatgctggcccagcaattctaagtatcctttgcccgtgttctccaccttcgtcctcactggggctagcgcggagaaggtctatggggccgccattcagttttacgaaccctacagtgaggaaaaccttacagagaagcagcgcctcttgctggggcttacttcagccgacggaaaaagcgattccagcaaaaccatccacaccaacaaatgcatctgcctgctgagccactggccctttttcgacgctttcagaaaatttttgacgtttttgtatcgttacagtattagcgggccccacgtgctgcccatagaaaagcacatctcccactttatgcacaaggtccctttcccgtcaccccagcggcctcgcatcctggtgcagttgtcaccacacgacaacctcatcctgagtcagccagtttcttcaccgctccctctttctggcggaaaattcagtacattgctccagaacctgggacccgaaaatgcagtgactctcctggtgtttgccgtaacagaacataaaattctgatccatagcttgcggccgtcggtgctcactagcgtcactgaggcactggttagcatgatttttccctttcactggccctgcccctacgtgcccctgtgtcccttagctttagctgacgtgctaagtgccccctgtcccttcatcgtcgggatcgatagtcggtactttgatctgtacgatccacctccagacgtgtcttgtgtggatgtcgataccaatacaatcagccaaataggtgacaagaaaaacgtggcctggaaaatcctccctaagaagccgtgtaaaaatttaatgaataccctgaacaatctacatcagcagctcgccaaactgcagcagaggccacgcgacgacggcctcatggatcttgcaattaatgactacgatttcaattcagggaaacggctgcacatgattgatctggagatccaggaagccttcttgttctttatggccagtattctaaagggttataggagctatcttcggccaattacacaggctccgtccgagacagcaactgatgcggcctcacttttcgcgttgcaagcattcctaaggtcacgagacaggtcccatcagaagttctacaatatgatgaccaagacccagatgttcattaggttcatagaggaatgttcattcgtgtcagacaaggacgctagcttggcattcttcgacgattgtgttgacaaggtcgacatggataaatccggcgaggtacgtctgattgagctggatgagagctttaagtccgaacacacagtcttcgtaactccgcccgagataccccacctccctaacggagaagaacctccactccagtatagttacaacggcttcccagtgttaagaaataacctgtttgagagaccagaagggttcctgcaggccaagaaaaataagctgccgagtaagtcaagtagcccgaatagccctctgcccatgtttaggagaacaaaacaggagattaaatcagcccataaaatcgccaaacgctacagtagtattcctcagatgtggtctcggtgcctgctccggcactgctacgggctgtggtttatctgtttgcctgcttatgtcaaggtctgtcattcaaaagtcagagccttgaaaacggcatacgacgttctgaagaaaatgcagtcaaagaaaatggatccaccggacgaggtatgttaccgcatattaatgcagctctgcgggcaatatgatcagccagtgctcgctgtgcgtgtcttgttcgagatgcagaaggctggcatcgaccccaacgcgatcacttatggctactacaacaaagcagtcttggagtcaacttggcccagtagaagtaggtcaggatactttctctggaccaaggtccgcaacgtggttcttggtgtgactcagtttaaaagggcactgaaaaagcatgctcacctttcccagacaaccctctccggtgggcagtctgacctaggatataactccctctctaaagacgaggtgaggcggggcgatacttccacagaagacatccaggaagagaaagacaagaagggctctgattgcagcagcttgagtgagtccgaatccacaaagggttctgcggactgcctgccaaaacttagctaccaaaacagttcctccatcgttcgcttgacaggaacatccaacaatagcgctgggaagatctcaggcgagagtatggaaagcactccagaactcttactgattagttctctcgaagatactaacgagacacgcaacatacaaagcagatgcttccggaaacggcacaaatccgacaatgaaacgaacctgcagcagcaagttgtctggggaaacaggaatcgcaatctctccggtggggtcctcatgggctttatgctcaacagaatcaaccaggaagctactcctggcgacatagtggagaaactcggtgccgacgctaaaatcctgtcaaacgtgatcagcaagagcacccgccctaacaccctggatatcggtaagccccccctccgtagtaagcgggattccctggagaaggaatcctcagatgatgatactccttttgacggaagcaattaccttgcagataaagtggattcccctgtcatcttcgacttggaggacctcgactccgagacagatgtgagtaaagcagggtgtgtcgcaactcaaaaccctaagaggattcagcggatgaactctagcttttctgtgaagccattcgaaaaaaccgatgttgccacaggatttgacccactgtctttgctcgttgccgaaactgagcagcagcagaaggaagaggaggaagaagatgaggatgactccaagagcatcagtactccgtccgcaagaagagacctagcggaggagatcgtgatgtacatgaataacatgtcctcccccctgaccagcagaactccctcaattgatctccagcgcgcctgcgacgacaaactgaataagaagtcaccccccctggtcaaagcctgcaggagatcttcacttccgcctaacagtccgaaacccgtgcgactgaccaagagtaaatcttatacaaaatccgaagaaaagcccagagaccgattatggagtagtcctgcattctctcctacttgtccctttcgggaggaatcccaggacaccttgactcacagctccccctcttttaatctggacacacttcttgttcctaagcttgacgtgttgcgcaactcgatgtttaccgccggaaagggtgtggctgagaaggccagcaagtggtatagtagattcaccatgtacaccacatcctccaaggatcaaagttctgataggacatccttgtccagcgtaggtgcccaggactccgagtccacttcccttactgatgaagatgtctgccatgaactcgagggaccgattagttctcaagagacctccgcgactagtggtaccaagcggatcgatctctccagaatttccttggaatcttccgcctctctggagggtagtcttagcaagttcgcacttccaggtaaatcagaggtcaccagctctttcaacgctagcaataccaatattttccagaactacgcaatggaagtgctgataagcagttgcagcaggtgtcgaacctgcgactgcctggtacacgacgaggagatcatggcggggtggacagccgacgatagcaacctcaatacaacctgtcccttttgtggcaatatttttctgccatttttaaatatcgagatccgcgatctgcgccgtcccggcagatatttcctgaaaagctcccccagtaccgaaaatatgcattttccctcaagcatttctagccagacacggcagtcctgcatctccacctcggccagcggcttggacacctccgctctgagcgtccagggtaattttgatctgaattcaaaaagcaaattacaggagaatttttgtactcgcagtatccagataccggccaacagatcaaaaacggcaatgtctaagtgccctatctttccaatggctagatccatttctacctccggtcctttggacaaggaggatacaggaagacaaaagcttatttcaaccggttctctcccagcaacgcttcagggagcaacagactccctgggactggaatggcatctgcctagtcccgacccagtgactgtgccctatctgtcccccctggtagtctggaaagagcttgaatctctcttggaaaacgaaggagatcacgctatcactgtagcagactttgtcgaccaccatcctatcgtcttttggaatctcgtctggtattttaggcgcttggacttacctagcaatctcccaggtttaattctgtcctccgagcactgtaacaagtactctaagatcccgcgtcactgtatgtcagaagactcgaagtacgtcctgattcagatgctctgggataacatgaaactccaccaggacccaggccagcccctgtacatcctgtggaatgcacacacccaaaaatatccaatggttcacctgcttcaaaagtccgacaattctttcaaccaagaactcttgaagtctatggtgaaaagtattaagatgaatgacgtgtacggtccgatgagtcaaatactcgagacactgaataaatgccctcattttaagaggcagcgaagcctgtatcgcgaaattctatttctgtcactcgtggctctaggtcgggagaacattgacattgacgcctttgataaggagtataaaatggcctatgaccgactcacgcccagccaggttaaatcgacacataattgcgatagacctcctagtaccggggtgatggaatgtcgtaagaccttcggcgagccctacctgtag

SEQ ID NO: 159794 - DNA, 5592 bp, Artificial Sequence
  derived and/or modified sequence
atgattgaagataaaggcccccgggtggccgactactttgtggtggccggcctgacagatgtgtccaagcccctggaggaggagatccacttcaatgatgcctgccacaaggtggccaagcccaaggagcccatcacagatgtgtctgtcatcatcaagagcctgggggaggaggtgccccaggactacatctgcattgatgtgacccccaccggcctgtctgctgacctgaacaacggcagcctggtgggcccccagatctacctgtgctaccgccggggccgggacaagccacccctgacagacctgggcgtgctgtatgactggaaggagcggctgaagcagggctgtgagatcatccagagcaccccctacggccggcctgccaacatcagcggcagcaccagcagccagaggatctacatcacctacagaagagccagcgagaacatgacccagaacaccctggccgtgacagacatctgcatcatcatccccagcaagggggagagccccccccacaccttctgcaaggtggacaagaacctgaacaacagcatgtggggcagcgctgtgtacctgtgctacaagaagtctgtggccaagaccaacacagtgtcctacaaggccggcctcatctgccgctacccccaggaggactatgagagcttcagcctgcctgagagcgtgcccctcttctgcctgcccatgggcgccaccatcgagtgctggcccagcaacagcaagtaccccctgcctgtgttcagcacctttgtgctgactggagccagcgctgagaaggtgtatggagctgccatccagttctatgagccctacagcgaggagaacctgacagagaagcagaggctgctgctgggcctgaccagcgcagatggcaagagtgacagcagcaagaccatccacaccaacaagtgcatctgcctgctgagccactggcccttctttgatgccttcaggaagttcctgaccttcctgtaccgctacagcatcagcggcccccacgtgctgcccatcgagaagcacatcagccacttcatgcacaaggtgcccttccccagcccccagaggccccgcatcctggtgcagctgagcccccatgacaacctgatcctgagccagcctgtgagcagccccctgcccctgagcggcggcaagttcagcaccctgctgcagaacctgggcccagaaaatgctgtgaccctgctggtgtttgctgtgacagagcacaagatcctgatccacagcctgcggcccagcgtgctgacctctgtgacagaggccctggtgtccatgatcttccccttccactggccctgcccctacgtgcccctgtgccccctggccctggctgatgtgctgagcgccccctgccccttcatcgtgggcatcgacagccgctactttgacctgtatgaccccccaccagatgtgtcctgtgtggatgtggacaccaacaccatcagccagattggagacaagaagaatgtggcctggaagatcctgcccaagaagccctgcaagaacctgatgaacaccctgaacaacctgcaccagcagctggccaagctgcagcagaggcccagagatgatggcctgatggacctggccatcaatgactatgacttcaacagcggcaagaggctgcacatgattgacctggagatccaggaggccttcctgttcttcatggccagcatcctgaagggctaccgcagctacctgcggcccatcacccaggcccccagcgagacagccacagatgctgccagcctgtttgccctgcaggccttcctgcggagccgggacaggagccaccagaagttctacaacatgatgaccaagacccagatgttcatccgcttcattgaagaatgttcctttgtgtctgacaaggatgccagcctggccttctttgatgactgtgtggacaaggtggacatggacaagtctggagaggtgcggctgattgagctggatgagagcttcaagtctgagcacacagtgtttgtgaccccacctgagatcccccacctgcccaatggagaggagccccccctgcagtacagctacaacggcttccctgtgctgaggaacaacctgtttgagaggcctgagggcttcctgcaggccaagaagaacaagctgcccagcaagagcagcagccccaacagccccctgcccatgttccggaggaccaagcaggagatcaagagcgcccacaagatcgccaagcgctacagcagcatcccccagatgtggagccgctgcctgctgcggcactgctacggcctgtggttcatctgcctgcctgcctacgtgaaggtgtgccacagcaaggtgcgggccctgaagacagcctatgatgtgctgaagaagatgcagagcaagaagatggaccccccagatgaggtgtgctaccgcatcctgatgcagctgtgtggccagtatgaccagcctgtgctggccgtgcgggtgctgtttgagatgcagaaggccggcatcgaccccaatgccatcacctacggctactacaacaaggctgtgctggagagcacctggcccagccgcagccgcagcggctacttcctgtggaccaaggtgagaaatgtggtgctgggcgtgacccagttcaagagggccctgaagaagcacgcccacctgagccagaccaccctgagcggcggccagagcgacctgggctacaacagcctgagcaaggatgaggtgagaagaggagacaccagcacagaggacatccaggaggagaaggacaagaagggcagtgactgcagcagcctgtctgagagcgagagcaccaagggcagcgctgactgcctgcccaagctgagctaccagaacagcagcagcatcgtgcggctgaccggcaccagcaacaacagcgctgggaagatctctggagagagcatggagagcaccccagagctgctgctgatcagcagcctggaggacaccaatgagaccaggaacatccagagccgctgcttcaggaagaggcacaagagtgacaatgagaccaacctgcagcagcaggtggtgtggggcaacagaaacagaaacctgtctggaggagtgctgatgggcttcatgctgaaccgcatcaaccaggaggccacccctggggacatcgtggagaagctgggcgcagatgccaagatcctgagcaatgtcatcagcaagagcacccggcccaacaccctggacatcggcaagccacccctgcggagcaagagggacagcctggagaaggagagcagtgatgatgacaccccatttgatggcagcaactacctggccgacaaggtggacagccctgtgatctttgacctggaggacctggacagcgagacagatgtgtccaaggccggctgtgtggccacccagaaccccaagaggatccagaggatgaacagcagcttctctgtgaagccctttgagaagacagatgtggccactggatttgaccccctgagcctgctggtggccgagacagagcagcagcagaaggaggaggaggaggaggatgaagatgacagcaagagcatcagcaccccatctgcccggcgggacctggccgaggagatcgtgatgtacatgaacaacatgagcagccccctgaccagcaggacccccagcattgacctgcagagggcctgtgatgacaagctgaacaagaagagcccccccctggtgaaggcctgccgccgcagcagcctgccccccaacagccccaagcctgtgcggctgaccaagagcaagagctacaccaagtctgaggagaagccccgggaccggctgtggagcagccctgccttcagccccacctgccccttccgggaggagagccaggacaccctgacccacagcagccccagcttcaacctggacaccctgctggtgcccaagctggatgtgctgaggaacagcatgttcaccgctgggaagggcgtggccgagaaggccagcaagtggtacagccgcttcaccatgtacaccaccagcagcaaggaccagagcagtgacaggaccagcctgagctctgtgggcgcccaggacagcgagagcaccagcctgacagatgaagatgtgtgccacgagctggagggccccatcagcagccaggagaccagcgccaccagcggcaccaagagaattgacctgagccgcatcagcctggagagcagcgccagcctggagggcagcctgagcaagtttgccctgcccgggaagtctgaggtgaccagcagcttcaatgccagcaacaccaacatcttccagaactatgccatggaggtgctgatcagcagctgcagccgctgcaggacctgtgactgcctggtgcatgatgaggagatcatggccggctggacagcagatgacagcaacctgaacaccacctgccccttctgtggcaacatcttcctgcccttcctgaacatcgagatccgggacctgcggcggcccggccgctacttcctgaagagcagccccagcacagagaacatgcacttccccagcagcatcagcagccagacccggcagagctgcatcagcaccagcgccagcggcctggacaccagcgccctgtctgtgcagggcaactttgacctgaacagcaagagcaagctgcaggagaacttctgcaccaggagcatccagatcccagccaacagaagcaagacagccatgagcaagtgccccatcttccccatggcccggagcatcagcaccagcggccccctggacaaggaggacaccggccggcagaagctgatcagcacaggcagcctgcctgccaccctgcagggcgccacagacagcctgggcctggagtggcacctgcccagcccagaccctgtgacagtgccctacctgagccccctggtggtgtggaaggagctggagagcctgctggagaatgaaggagaccacgccatcaccgtggccgactttgtggaccaccaccccatcgtgttctggaacctggtgtggtacttccggcggctggacctgcccagcaacctgcccggcctcatcctgagcagcgagcactgcaacaagtacagcaagatccccaggcactgcatgtctgaggacagcaaatatgtgctgatccagatgctgtgggacaacatgaagctgcaccaggaccccggccagcccctgtacatcctgtggaatgcccacacccagaagtaccccatggtgcacctgctgcagaagagtgacaacagcttcaaccaggagctgctgaagtccatggtgaagagcatcaagatgaatgatgtgtatggccccatgagccagatcctggagaccctgaacaagtgcccccacttcaagaggcagaggagcctgtaccgggagatcctcttcctgagcctggtggccctgggccgggagaacatcgacattgatgcctttgacaaggagtacaagatggcctatgaccggctgacccccagccaggtgaagagcacccacaactgtgaccggccccccagcactggagtgatggagtgcaggaagaccttcggggagccctacctgtag

SEQ ID NO: 159795 - DNA, 5592 bp, Artificial Sequence
  derived and/or modified sequence
atgatcgaggacaagggcccccgggtggccgactacttcgtggtggcaggactgactgatgtttctaagccattggaagaggagatccactttaatgacgcctgccacaaagtggccaaaccaaaggaacccatcaccgatgtgtcagtgatcattaagagcctgggcgaggaagtgccgcaggactatatctgcatcgatgtgacaccgaccggcctttccgccgatctcaacaatggtagtctggtaggtccccagatttatctgtgctaccgtagagggagggacaaacctcccttgaccgacttgggcgtactgtatgactggaaagaacgactgaaacagggatgtgagataattcaaagcacaccttatggtagaccggctaatattagtggtagtaccagctcccagagaatctatatcacataccggcgggcctcagagaatatgactcagaatacccttgccgtcaccgatatctgtattataatcccatcaaaaggtgagtcccccccccatactttctgcaaggttgataaaaatctgaacaactcgatgtggggatcagccgtttatctctgctataagaaaagcgtcgctaaaacaaatacagtgtcttacaaagctgggctgatctgcaggtacccgcaggaagattatgaatctttctctctccccgagtcggtgccattgttctgtctgcctatgggcgctaccattgagtgctggccgagcaactccaaataccctctgcctgtgttcagtactttcgtcttgactggcgcgagcgccgaaaaggtttacggagctgccatacagttctacgagccttattccgaggagaacctgacagaaaaacagcgtttactcttgggacttaccagcgccgacggaaaaagtgactcatctaaaactatccacactaacaaatgtatatgtcttttgtctcactggccatttttcgatgctttcagaaagttcttaactttcctctatcgttacagtatctctggtcctcacgtgctgcccatcgagaagcatatcagtcacttcatgcataaggttccgtttcccagtccccagaggcccaggattctagtgcagctgtcccctcatgacaatctgattctctcccagccggttagttctcccctcccgctcagcggaggaaagttctctacactgttgcagaatttgggtcctgagaacgcagtaaccctgttggtttttgccgtgacagagcacaaaattctcatccactctttacgtcccagcgtgctgactagcgtgacagaggcacttgtctccatgatcttcccttttcactggccctgcccttatgtgcccctgtgccccctggccctcgccgatgtgctgagtgccccctgcccatttattgtcggaatagattctcgctactttgacctgtatgatcctccacccgacgtgtcatgcgtggatgttgacaccaacaccattagtcagatcggcgataaaaaaaacgtggcatggaaaatactcccgaagaagccgtgcaaaaacttaatgaatactctcaataatctgcaccagcagctagcaaaactccagcagagaccaagagacgatgggctcatggacctagctattaatgattacgatttcaactcaggcaagcgactccacatgatcgacctcgaaattcaggaagctttcttgttttttatggctagcatcctgaaggggtacaggagctacctccgccccataacacaggccccctccgaaacagcgaccgacgctgcttcactgttcgccctccaggctttcctccgcagccgggaccggtctcaccaaaagttctacaatatgatgaccaagacgcaaatgttcattcggtttattgaggagtgctcttttgtctcagacaaagatgcttccctcgcatttttcgacgactgcgttgacaaggtggacatggataaaagcggtgaggttaggctgattgaactcgatgagtcctttaagtccgaacataccgtttttgtgaccccacctgagattccgcaccttccaaacggggaagaaccacctctgcaatattcatacaatggattccccgtgcttcgcaataacctttttgagaggccagaagggtttctgcaagccaagaagaacaagcttccctctaaatccagctccccaaacagtccgttaccaatgttcagacgaacaaagcaggaaatcaagtccgcccataagatcgccaagcgttattcctccattccccagatgtggtctagatgcttacttagacattgctatggactgtggttcatatgcctacctgcttacgtgaaggtgtgccattcaaaagtcagagctttaaagaccgcttacgacgtccttaagaaaatgcaaagtaagaaaatggatcccccagacgaggtgtgttaccgaattctgatgcaactatgcgggcagtacgatcagccagtgcttgccgtgagggtcttgtttgagatgcagaaagcgggaatcgatcccaatgccattacctatggttactacaataaggctgtgctcgagagtacatggccttcccgcagcaggtccggctacttcctgtggacgaaggttcgcaatgtggtcttgggagtgactcagttcaaaagagccctgaaaaagcacgcccacctttcccaaacgaccttgtccggagggcagtccgaccttggttataattctttgagcaaagacgaggtgcgcagaggcgatacatctaccgaggacattcaggaagaaaaggacaagaaaggtagtgactgtagctcgctctcagaatccgagtctacaaaggggagtgcggactgtctgccaaaactgagttaccagaactcttctagcattgttaggctgacgggcacgagtaacaatagcgcgggcaagatctctggagagtcaatggagtccacacctgaactgttactgatcagtagcctcgaagatacaaacgagacccggaatattcagagccgctgttttcgcaagaggcataagtcagacaacgagactaacctccagcagcaagtagtttggggaaaccgcaacagaaacctgagcggcggggtccttatgggatttatgctgaatagaatcaaccaggaggcgactccaggagatatcgtggagaaactgggggcggatgctaaaatcttaagcaacgtgatctcaaagtcgacacgtccgaataccctggacattggtaaacctcccctacgctctaagagagacagtctggagaaggagtcctccgacgacgacacgccgtttgatggcagcaactatctcgccgacaaggtggatagcccggtgattttcgacctcgaggatctcgatagcgaaaccgacgttagcaaagcaggctgtgttgcaacccagaacccaaagaggattcagcggatgaactccagtttttcagtcaagcctttcgagaaaaccgatgttgccaccggcttcgacccactcagtctattagtcgctgagactgagcaacagcaaaaggaggaggaagaggaggatgaagacgactctaagagcatctccacccccagcgccaggcgcgatctcgccgaagagatagtgatgtacatgaataacatgagctctcccctaactagccgcactccttcgattgacctccaaagagcttgcgatgataaactcaacaagaaaagtcctccactggtcaaggcatgtagaagatcaagccttccccccaattctccaaaacccgtccgtcttaccaagtccaaaagctacaccaaaagtgaggagaagcctcgggacagactgtggagttcaccagctttttctcctacctgccctttccgagaggaatcccaggatacacttacccactcatctcccagttttaatctggataccttattagtcccgaagttagatgtattgcggaatagcatgtttacagccggcaaaggcgtggcagagaaggcctctaaatggtacagcagatttacaatgtacaccacatccagcaaagaccaatcatcggacagaacctccctctcgtcagtcggggctcaagatagtgagagcacctccttgaccgacgaggacgtttgtcacgagctcgagggaccaatctcttcacaggagacaagcgcaacaagtggcactaaaaggattgatctatctcgtatttccctggaaagtagtgcctcgttggagggctcactgtctaaatttgccttaccagggaagtctgaagtcacgtcgtcgttcaacgcctctaataccaacattttccagaactacgcaatggaggtgttgatttccagctgttcccgctgccgcacatgtgattgcttagtccacgacgaggagataatggctggttggacggccgacgatagtaacctgaatactacttgccccttctgcgggaatatcttcttgcccttcctgaacattgaaatacgcgacttaaggcgccccggaagatactttctgaagagttctccttctacagagaatatgcactttccgagcagcatctcatcgcaaacgagacagtcgtgtatctctactagtgcatctggactggacactagcgcattatccgtgcaaggcaactttgatcttaacagtaagtctaagctgcaagaaaatttctgtactcgaagcatccaaatccctgcaaatcggagcaagactgcaatgtcgaaatgcccgatctttccgatggccaggtctatctcgacaagtggcccattggacaaggaagataccggacggcagaaactgattagcactgggtctctgcccgccaccttacagggagctaccgattctctgggcctggaatggcacctaccatcccctgatccggtaaccgtgccgtacctcagcccacttgtcgtttggaaggagctcgagagcctgttggaaaacgaaggcgatcatgccatcactgtcgccgactttgtggatcaccatccaatcgttttctggaaccttgtctggtatttccggaggctggatcttccttctaatctccctggcttgatactgtcctccgaacattgcaacaaatattcaaagattcccagacactgcatgagcgaggattctaagtatgtactcatccaaatgctctgggacaatatgaaactgcaccaggatcccggccagccactttacatactgtggaacgcccacactcagaagtaccctatggtgcatttgctgcagaaatcagataattcttttaatcaggagctgctgaagagcatggttaaatccattaaaatgaatgatgtatacggccccatgtcacagattctggagacactgaataaatgtccacactttaagagacaaaggtcattgtatcgcgagatcctgtttctgagcctggtcgccctggggcgggagaacatagacatcgatgcctttgacaaagaatataaaatggcctacgatcgcctaacaccgagccaggtcaagtcgacacataactgcgatcggccgcccagcacaggtgtcatggagtgcagaaagacgtttggagaaccttatctgtag

SEQ ID NO: 159796 - DNA, 5591 bp, Artificial Sequence
  derived and/or modified sequence
atgatcgaagacaaggggccaagggtcgccgactattttgtggtcgccggtcttaccgatgtgtccaagccactcgaggaggaaattcactttaatgatgcctgccacaaggtcgccaagccaaaagagccaatcacagacgtgagcgtgataatcaaatcgctgggggaggaggtgcctcaagattatatatgtatcgatgtcacacccaccggtttgagtgctgacctgaataatggcagcttagtgggccctcagatctacctgtgctaccgccgtggcagggataagcccccactgacagacttgggcgtgctgtacgattggaaggaaaggctgaaacagggctgtgagatcattcagagcactccatacggaagacctgcaaacatttctgggtccacctcctctcaacggatttacatcacatatcggagagcatccgagaatatgacacagaataccctcgcagtaacggacatatgtattataatcccatccaagggagagtccccgccacatactttttgcaaagtggacaaaaatctgaataattctatgtggggatctgctgtctacctctgttataaaaagagcgtggcaaagactaataccgtatcctataaggctggactgatatgtcgctatccccaggaagattacgaatccttctccctccccgagtccgtgccactgttctgtctccctatgggggcaaccattgaatgttggcccagcaactccaaatatcccctgccagtcttttcaaccttcgtgcttaccggggcatccgccgagaaggtctatggggcagctattcagttctatgagccatactccgaggagaatctgacagaaaaacaaagattattactgggattgacatctgccgacggcaagagcgacagtagcaagacgatccacacgaataagtgtatttgcctattgagccactggccgtttttcgatgccttccgcaaatttttgacattcctgtaccgctacagcatttcgggtccccacgtgctgcctatcgaaaaacatattagccacttcatgcacaaagtgcctttccccagcccacagcggccacgaatcctggtgcagctgtcaccccacgacaatttaatcttgtcgcagcctgtgagttcgcctctccccctttccggcggaaagttctccacattacttcaaaacttaggcccagaaaatgctgtcactctgctggtgttcgcggtgaccgagcataaaatcctgattcatagtctgaggcccagtgtgctaacatctgtcaccgaggcactggtatcaatgatcttcccatttcattggccctgcccctacgtgcccctgtgtcctcttgcattagcagatgtgttatccgccccttgcccctttatcgttggcattgattcaaggtattttgacctgtacgacccgcctcccgacgtgagttgtgtcgatgtcgacactaacacaatctcacagattggagataagaaaaatgtggcctggaagattttgccaaaaaaaccatgtaaaaatctcatgaatacactgaataacttacatcagcagttagcaaaattacagcagagaccaagagacgatggactgatggacctggctatcaacgactatgattttaacagcggaaaacgactgcacatgattgacttagagatccaggaggcttttctctttttcatggcgtcaatccttaagggctatcggtcctatctgagacccatcacacaagccccaagcgaaaccgccacagacgccgctagcctatttgcccttcaggctttcctcagaagtcgggatcgctctcatcagaagttctataacatgatgacaaagacccagatgtttattcgcttcattgaagagtgcagttttgtctccgataaagacgctagcctggcctttttcgacgattgcgtcgataaggttgatatggataagtcgggtgaagtgagactcatagagctcgatgagtctttcaagagtgaacacactgtgtttgtcacacccccagaaatccctcatctcccaaacggtgaagaacctccattgcagtattcctataatggcttccccgtcctgcgcaataatctttttgagcggccagaaggctttctgcaggcgaaaaagaacaagctaccgtctaagagttctagcccgaattctccactgcctatgtttcggaggacaaaacaggagataaagtctgcccataagatcgccaaaaggtatagttcgatcccacagatgtggagtcgctgcctgctgaggcattgctatggcctgtggttcatatgcctcccagcctacgtgaaggtctgccattccaaggtcagagcccttaagacggcttatgacgtgctgaagaaaatgcagagcaagaagatggatcctcccgatgaagtgtgctacaggattctgatgcagctgtgcggccaatacgatcagcctgtactggccgttcgggttctgtttgagatgcagaaggcagggattgaccccaatgccatcacatatggctactacaacaaggccgtgttggaatcgacatggccttccaggtcccggagcggctatttcctatggactaaggtcaggaatgtcgtgctgggcgtcacgcagttcaagagggcattgaagaaacacgcgcacctgtcgcagacaacactctctggtggccagagcgacctgggatataattccctgtcgaaggatgaggtccggaggggggacacaagcactgaggatatccaggaagaaaaggacaagaaaggctctgactgcagctctctctccgagagcgagagcacaaaagggtccgctgactgcctccccaaactgtcatatcagaatagctctagcattgttagactgacaggaacaagcaacaatagcgcagggaagattagtggggagtctatggaaagcaccccagaactcctactgatctcatctctggaggacacaaacgagaccagaaatatccagtcccggtgctttagaaagcgtcacaaaagcgataatgagactaatcttcaacagcaggttgtgtgggggaaccggaatcgaaacctctcaggcggagtcttaatggggtttatgcttaaccgaatcaatcaggaagcgacccccggagatatagtagagaagttgggggctgacgccaagatcctgtccaacgtgatctctaaatctacccgtcccaataccctggacatcggaaaacctcctctgagatcgaaacgtgattctttggaaaaggagtcttccgatgatgacactccattcgacggctctaactatttagcagataaagtggacagtccagtcatctttgatttggaagatctggacagcgaaacggacgtttcgaaggctggatgcgtcgccacccagaaccccaagcgaatccaaaggatgaactcctcctttagcgttaagccgttcgagaagaccgatgtggccacagggtttgaccccttatcattgctcgtggcggaaacagaacagcagcagaaagaggaggaagaagaggacgaagacgacagcaaaagtatctccacacctagcgcgagaagagatctcgccgaagaaattgtcatgtatatgaataatatgtcctcacccctgacaagtcggacaccaagtatagatctccaacgtgcgtgcgacgataagcttaacaaaaagagtcctcccttagtaaaggcatgtcgacggagctcattgcctcctaactccccaaaacccgttcgattgactaaatcaaaatcatacacgaagagcgaagagaaaccgagagacaggctttggtcctcaccagccttcagcccgacatgtccatttcgggaagaaagccaagatacgctgacccattcatctccaagcttcaacctcgatacacttctggtgcctaagctggatgtgttacggaacagcatgttcacggccggaaaaggcgtcgccgaaaaggcctcaaaatggtactctcgctttacaatgtacacaacttctagcaaggaccagagctccgatcgtactagcctgtcttccgttggcgctcaagatagtgaaagcacttcactgaccgacgaagacgtctgtcacgaactcgaaggacccattagtagccaggaaacttctgccacatctggcactaagcggatcgacctcagccgcatctcgctggagagttctgcgtccttggaaggatcactgtcaaaattcgcactgcctggtaaaagtgaggttacaagtagctttaatgcttcgaacacaaatattttccagaattatgcgatggaagtcctcatctcttcatgcagccgatgtaggacctgtgactgcctggtgcatgatgaggagatcatggccggttggacagctgacgactcgaaccttaataccacatgtcctttctgtggtaatatttttcttccttttctcaatattgaaatcagggacctgcgcagaccaggccgttactttctgaaaagcagtccgtccaccgaaaacatgcactttccatcttccatttcttctcagactagacagagttgcattagcactagcgcctcgggactcgatacaagcgctcttagcgtgcagggtaactttgacctgaattcaaaatctaagctgcaggagaacttttgcacccgctcaatccagattccagcgaacaggagcaaaaccgctatgtcgaagtgtcccattttcccaatggcgaggtctatatccactagtggtcctctggataaagaggacaccggtcggcagaaactcatctctacggggagcctccctgcaactctgcagggggcaaccgatagcctgggactggagtggcatttaccatctcctgaccccgtgacagtgccatacctgtcccccctcgtggtctggaaggaattggagtccctcttggagaatgagggggaccatgctatcacagttgcagattttgtagaccaccatccgatagtcttctggaacctcgtctggtacttccgaagactagatctccccagtaatctacctggcctgattctgtccagcgaacactgcaacaaatacagcaagatacctaggcactgtatgtctgaagattctaaatacgtcctgattcaaatgttatgggataatatgaagctgcatcaggaccctggtcaacctttgtatatactttggaacgcacacacacagaagtacccaatggtgcacctgctgcaaaaatccgataacagctttaaccaagagctgttgaaatctatggttaagagcatcaaaatgaatgacgtgtatgggcctatgtctcaaatcctagaaactttaaataagtgccctcacttcaaaagacagaggtcactgtacagagaaatccttttcctgagtctggtggccttggggagggagaatattgacatcgacgccttcgacaaagagtacaagatggcatatgacaggcttacgccaagtcaggtgaaaagcacccacaattgcgacagaccaccatctaccggcgtgatggaatgtcgcaagacattcggcgagccttatctata

SEQ ID NO: 159797 - DNA, 7200 bp, Artificial Sequence
  derived and/or modified sequence
attgccaagatggcgccggtcgcggtggccgcggaggctagagtcggagaaagaggcggaggcagtggcggccgcgaggggagggggagtcccgtctgactgagacggcaggcctgggcgggcgggcgggggtgccgcgaagggcggagcgccgggctggggatgagctaagcgggctcagagcgccgcggcattcagcccctcgtgttccgctaccgcgcgtgcgggattccggcgccgctctccgagctcgatccgctgctcgcacgggagccagctgggtgttatttctcaaactctgaggctgcggagttcacacattgaaatctgtcatctttttcagagagaaactttcgatgtaaccttctgtaatggaagatgattgaagacaaggggcctcgtgttgctgactactttgttgtagcaggattaactgatgtttcaaagcctctagaagaagaaattcacttcaatgatgcttgtcataaagtagctaaaccaaaagaacctattacagatgtttcagttattatcaaatctcttggggaggaagtcccacaggattatatctgtattgatgttaccccaactggattgtcagctgatcttaataatggaagtcttgtggggccacagatttacctttgctatagaagaggaagagataagcctccacttacagatctgggggttttatatgactggaaagaaagattgaaacagggttgtgaaattattcagagtactccctatgggcgccccgcaaatattagtgggagtacctcatcacaaagaatttatatcacttaccgaagagcctctgaaaacatgactcagaatacgttggctgtcactgacatatgtattattatacccagtaaaggagaaagcccaccacacacgttctgcaaagtcgacaagaatctcaataacagtatgtggggatcagcagtatacttgtgttataaaaaatcggtggcaaagacgaacactgtatcttacaaagctggcctaatttgtagatatcctcaagaagattatgagtcattctcactaccggaatctgttcctctattttgtttaccaatgggtgcaaccattgaatgttggccatcaaatagcaaataccctctgcctgtattttctacttttgttttaactggagcctcagctgaaaaggtttatggtgctgctattcagttttatgaaccatactctgaggagaatctcacagaaaagcagagacttcttttgggtttaacatcagcagatgggaagtctgatagttccaaaacaattcatactaacaaatgcatctgtcttctttctcactggcctttttttgatgcattcaggaagtttctgacttttctgtatcgttattccatctctgggcctcatgtccttccaattgagaagcatatttctcattttatgcataaagttccttttccatctcctcagagaccacggattttagttcagttatcaccacatgataatctgattctcagtcagcctgtgtcttcacctcttccactaagtggtggcaagttttcaacactactgcagaatttaggccctgaaaatgctgtgacactactggtgtttgcagtaacagaacataaaattcttatccattccctacggccatccgtgcttactagtgtgacagaagcattagtgtctatgattttccctttccactggccatgcccgtatgttcctctctgcccactggctttagcagatgtcttgagtgcaccatgtccattcatagtagggattgattcaagatactttgatctctatgatcctccaccagatgtcagttgtgttgatgtagataccaacactatttctcaaattggtgacaagaaaaatgtagcctggaagatacttccaaagaagccatgtaaaaatctgatgaacacactgaataatttgcatcagcaattggcaaaattgcagcagagaccgagagatgatggactcatggatttagcaataaatgactatgattttaattctggaaagaggttgcacatgatagatttggaaatccaagaggcatttttgtttttcatggcctctattttaaaaggttacagatcatacttaaggccaataacacaagccccatctgagacagccacagatgcagcctctctctttgccctacaagctttcttaagaagccgggaccggtcacatcaaaaattctataacatgatgaccaaaacacaaatgtttattcgcttcattgaagaatgttcttttgttagtgacaaagatgcaagcctggcattttttgatgattgtgtagataaagtggatatggacaagagcggtgaagtacgacttatagaactggatgaatctttcaaaagtgaacacactgtttttgtaacaccacctgagatcccccacctacccaatggtgaagaaccccctttacagtacagctataatggatttccagttcttaggaacaatttatttgaaagacctgaaggatttctacaagcaaagaagaacaaattgccttcaaaatcaagtagtcctaatagccctttgcccatgttcagaagaacaaaacaggaaattaaatcagcccataaaattgcaaagaggtactcttccatccctcagatgtggtctaggtgtctactgcgccactgttatggactgtggtttatttgtctcccagcttatgtgaaagtctgtcattcaaaagtcagggctctgaaaacagcatatgatgtgcttaaaaaaatgcagtcaaagaagatggatccacctgatgaggtatgctaccgcattcttatgcaactctgtggacaatatgatcagccagtgcttgcagttcgagtgctttttgaaatgcagaaagctggtattgaccccaatgccattacttatggttattataataaggctgttttggaaagtacctggccttcaagaagtcgtagtggctattttctttggacaaaagtaagaaatgttgttttaggagtaacacagttcaaaagagctttaaagaagcatgcacacttatcacaaacaactctctcaggtggccagtctgatcttggatataattcattatctaaagatgaagttagaagaggggatacatctactgaagacattcaagaagaaaaagataaaaaagggagtgattgtagttccttgtcagagagtgagagtacaaaaggaagtgctgattgccttcctaagctcagttatcaaaattcttccagtatcgttcgcctcactggtacaagtaacaacagtgctggtaaaatatcaggagaaagcatggaaagcacacctgagctgctcttaatatcatctcttgaagatacaaatgaaacacgaaacattcaaagtagatgcttcaggaaaagacataaaagtgacaatgaaactaatttgcagcagcaagtggtctggggaaatagaaaccgtaatcttagtggaggggtactgatgggatttatgctcaatagaattaaccaggaagcaacccctggagatatagttgaaaaattgggagctgatgcaaaaattctttcaaatgttatctcaaaaagcacgagaccaaatactcttgatattgggaagccacctttaagatcaaaaagagacagtctagaaaaggaatctagtgatgatgatacaccttttgatggttctaactatttggcagataaagtggattctcctgttatttttgacttagaagacttagacagtgaaacagatgtatcaaaagcaggatgtgttgctacacaaaatcccaagaggattcaacgtatgaacagcagcttttcagtaaaaccttttgaaaaaactgatgtcgcaacaggatttgatcccctctctcttttggttgctgagactgaacagcagcaaaaagaagaagaggaggaggatgaagatgatagcaaaagcatttcaacaccatctgctaggcgtgatttagctgaagaaattgtgatgtatatgaataacatgagcagtcctttgacaagtcgtacaccaagcattgatttacaacgggcatgtgatgataaattaaataagaaaagtccaccattggtcaaggcatgcagaagatctagtctgcctcctaattctcctaagccagtgagacttaccaaatctaaaagttacacaaaaagtgaggagaaaccaagggatagactttggtcttctccagccttctcacctacttgcccatttagggaagaatctcaggatacattaacccactcatcaccttcatttaacttagatacactactagtacctaaactagatgttctaagaaacagtatgttcactgctggaaaaggagttgcagagaaagcaagcaaatggtattcaagattcaccatgtacaccacatcatctaaggatcaaagttctgatcgtaccagtctttcttcagtgggagcccaggattctgaatctacctctttaacagatgaagatgtctgccatgagttggaaggacctatctcctctcaagagaccagtgctacttcagggactaagagaattgatctcagccgaataagcctggaaagttctgcatccttggaaggatctctgtcgaagtttgccttacctgggaaatcagaagtgacatcttccttcaacgcgagtaatacaaatatcttccagaactatgcaatggaggttctcatctcaagttgctctcggtgtagaacttgtgattgtcttgtccatgatgaggaaatcatggctggctggacagcagatgattcaaatctcaatactacatgcccattctgtggcaatatcttcttaccctttctgaatatagaaataagagatttaagacgacctggaagatactttctaaagtcaagcccatcaacagaaaatatgcactttccatcctccatttcaagtcagacgaggcagtcttgcatttcaacatcagcctctggtcttgacacatctgctctctctgttcaagggaattttgatctaaatagcaaatctaaactgcaggaaaatttttgcacccgaagtattcagatccctgctaatagatcaaaaacagctatgtctaaatgtccaatatttccaatggccaggagtattagtacttctggccccttggataaggaagatactggaagacagaagctcatttctacaggcagcctgccagctactttacaaggagctacagattctttaggtttagaatggcaccttccaagtcccgatcctgtcactgttccgtatcttagtcctttagtggtatggaaagaacttgaaagcttattggaaaatgaaggtgatcatgcaataacagtagcagactttgtggaccatcatccaattgttttttggaacctggtatggtatttcagacgtcttgacttgcccagtaacttacctggattgattctttcttctgagcactgtaacaagtattcaaagattccccgccactgtatgtctgaagatagcaaatatgttttaatacaaatgttatgggacaatatgaagttacatcaggatccgggacagcccttgtacattctctggaatgcacacacccaaaaatatccaatggtccatttattgcaaaaaagtgataactcatttaaccaggaactgttgaaaagtatggtaaaaagcattaaaatgaatgatgtctatggaccaatgagtcagattttagagacactgaataagtgtccacattttaaaagacagaggagtttatacagagaaatactatttctctcacttgtggcactgggaagagaaaacattgatatagatgcttttgataaagagtacaagatggcatacgatcgtctcacacctagtcaagtcaagagtacacacaactgtgatagaccaccaagtacaggggtgatggaatgtcgaaaaacctttggagaaccttatctttaagatgtatttgtatgtgtaaacattcaatgtatattgtatagtcagtgtataaaataacacttttagactctaaatattttttcttcaatttttgaaaatacaatttgtaaatggttcaaaagactcagacagcttatgtacagaatgtttgaagaagagaatagtgacaagtggggagaaagccactttgtttctcatttcttttttcttcttctttaactcccctgtaataggaaataaagtatttttgtgatgaggaaatccctaaacaaaattagttgccataaaatatgacaactgctttatggtttcttttggaagagacagattgaaaaatcatgaatggaatctaaacagaaatgtcagatgaacgtatttcctgttttcatagactattcaaatgttttgaccatgaagttgtattatacatattttaaattgtttatagtaagttgatatttttttaatttttaaatttaatatagcaaacttaaaatgaatttaaacttaagcaagcaagcgtgtattttccttgtctgctgctatttgaagtaattagtacagctgcagatctctctgtgtatatctatctatatatatattttttattacttgggagaatgaattttaaaatgtcagtgctagtgtcaagtgttgtcctaggattgcatgttagtacccctaagcctgagtgtggggagtgagttatgcaagggtagcgtgcactgcccagactgactcatggagccttgtgcaaggagagccagagaggttcactataccatgactccaaaattgtctctattgctaatagatacgtatagtatacagggaaaacagcttataaatccaaatatcaatttaaattttaatattctacatgaaaacttacattgggaaatatgcagacaagtgattatattccaaattttacccttattttaatatctaaaatattgggtatgatgcaaattatactatagaatatttatctgaaatatgacttactggggtattctgttaatactatatataaatattcagaatttttttcaaaagtagaaaaattcccctctaaaagtacagccagatagattttcatccatattgaggaacttagctttttcaacaagcttcagaatctgaagtctgtagaatctaaaatacagaaatatccagaaatcagacaataaattgaaagtttagacatcatgagtattaaatagcttt

SEQ ID NO: 159798 - DNA, 5592 bp, Artificial Sequence
  derived and/or modified sequence
atgatcgaggacaagggccccagagtggccgactacttcgtggtggccggcctgaccgacgtgagcaagcccctggaggaggagatccacttcaacgacgcctgccacaaggtggccaagcccaaggagcccatcaccgacgtgagcgtgatcatcaagagcctgggcgaggaggtgccccaggactacatctgcatcgacgtgacccccaccggcctgagcgccgacctgaacaacggcagcctggtgggcccccagatctacctgtgctacagaagaggcagagacaagccccccctgaccgacctgggcgtgctgtacgactggaaggagagactgaagcagggctgcgagatcatccagagcaccccctacggcagacccgccaacatcagcggcagcaccagcagccagagaatctacatcacctacagaagagccagcgagaacatgacccagaacaccctggccgtgaccgacatctgcatcatcatccccagcaagggcgagagccccccccacaccttctgcaaggtggacaagaacctgaacaacagcatgtggggcagcgccgtgtacctgtgctacaagaagagcgtggccaagaccaacaccgtgagctacaaggccggcctgatctgcagatacccccaggaggactacgagagcttcagcctgcccgagagcgtgcccctgttctgcctgcccatgggcgccaccatcgagtgctggcccagcaacagcaagtaccccctgcccgtgttcagcaccttcgtgctgaccggcgccagcgccgagaaggtgtacggcgccgccatccagttctacgagccctacagcgaggagaacctgaccgagaagcagagactgctgctgggcctgaccagcgccgacggcaagagcgacagcagcaagaccatccacaccaacaagtgcatctgcctgctgagccactggcccttcttcgacgccttcagaaagttcctgaccttcctgtacagatacagcatcagcggcccccacgtgctgcccatcgagaagcacatcagccacttcatgcacaaggtgcccttccccagcccccagagacccagaatcctggtgcagctgagcccccacgacaacctgatcctgagccagcccgtgagcagccccctgcccctgagcggcggcaagttcagcaccctgctgcagaacctgggccccgagaacgccgtgaccctgctggtgttcgccgtgaccgagcacaagatcctgatccacagcctgagacccagcgtgctgaccagcgtgaccgaggccctggtgagcatgatcttccccttccactggccctgcccctacgtgcccctgtgccccctggccctggccgacgtgctgagcgccccctgccccttcatcgtgggcatcgacagcagatacttcgacctgtacgaccccccccccgacgtgagctgcgtggacgtggacaccaacaccatcagccagatcggcgacaagaagaacgtggcctggaagatcctgcccaagaagccctgcaagaacctgatgaacaccctgaacaacctgcaccagcagctggccaagctgcagcagagacccagagacgacggcctgatggacctggccatcaacgactacgacttcaacagcggcaagagactgcacatgatcgacctggagatccaggaggccttcctgttcttcatggccagcatcctgaagggctacagaagctacctgagacccatcacccaggcccccagcgagaccgccaccgacgccgccagcctgttcgccctgcaggccttcctgagaagcagagacagaagccaccagaagttctacaacatgatgaccaagacccagatgttcatcagattcatcgaggagtgcagcttcgtgagcgacaaggacgccagcctggccttcttcgacgactgcgtggacaaggtggacatggacaagagcggcgaggtgagactgatcgagctggacgagagcttcaagagcgagcacaccgtgttcgtgaccccccccgagatcccccacctgcccaacggcgaggagccccccctgcagtacagctacaacggcttccccgtgctgagaaacaacctgttcgagagacccgagggcttcctgcaggccaagaagaacaagctgcccagcaagagcagcagccccaacagccccctgcccatgttcagaagaaccaagcaggagatcaagagcgcccacaagatcgccaagagatacagcagcatcccccagatgtggagcagatgcctgctgagacactgctacggcctgtggttcatctgcctgcccgcctacgtgaaggtgtgccacagcaaggtgagagccctgaagaccgcctacgacgtgctgaagaagatgcagagcaagaagatggacccccccgacgaggtgtgctacagaatcctgatgcagctgtgcggccagtacgaccagcccgtgctggccgtgagagtgctgttcgagatgcagaaggccggcatcgaccccaacgccatcacctacggctactacaacaaggccgtgctggagagcacctggcccagcagaagcagaagcggctacttcctgtggaccaaggtgagaaacgtggtgctgggcgtgacccagttcaagagagccctgaagaagcacgcccacctgagccagaccaccctgagcggcggccagagcgacctgggctacaacagcctgagcaaggacgaggtgagaagaggcgacaccagcaccgaggacatccaggaggagaaggacaagaagggcagcgactgcagcagcctgagcgagagcgagagcaccaagggcagcgccgactgcctgcccaagctgagctaccagaacagcagcagcatcgtgagactgaccggcaccagcaacaacagcgccggcaagatcagcggcgagagcatggagagcacccccgagctgctgctgatcagcagcctggaggacaccaacgagaccagaaacatccagagcagatgcttcagaaagagacacaagagcgacaacgagaccaacctgcagcagcaggtggtgtggggcaacagaaacagaaacctgagcggcggcgtgctgatgggcttcatgctgaacagaatcaaccaggaggccacccccggcgacatcgtggagaagctgggcgccgacgccaagatcctgagcaacgtgatcagcaagagcaccagacccaacaccctggacatcggcaagccccccctgagaagcaagagagacagcctggagaaggagagcagcgacgacgacacccccttcgacggcagcaactacctggccgacaaggtggacagccccgtgatcttcgacctggaggacctggacagcgagaccgacgtgagcaaggccggctgcgtggccacccagaaccccaagagaatccagagaatgaacagcagcttcagcgtgaagcccttcgagaagaccgacgtggccaccggcttcgaccccctgagcctgctggtggccgagaccgagcagcagcagaaggaggaggaggaggaggacgaggacgacagcaagagcatcagcacccccagcgccagaagagacctggccgaggagatcgtgatgtacatgaacaacatgagcagccccctgaccagcagaacccccagcatcgacctgcagagagcctgcgacgacaagctgaacaagaagagcccccccctggtgaaggcctgcagaagaagcagcctgccccccaacagccccaagcccgtgagactgaccaagagcaagagctacaccaagagcgaggagaagcccagagacagactgtggagcagccccgccttcagccccacctgccccttcagagaggagagccaggacaccctgacccacagcagccccagcttcaacctggacaccctgctggtgcccaagctggacgtgctgagaaacagcatgttcaccgccggcaagggcgtggccgagaaggccagcaagtggtacagcagattcaccatgtacaccaccagcagcaaggaccagagcagcgacagaaccagcctgagcagcgtgggcgcccaggacagcgagagcaccagcctgaccgacgaggacgtgtgccacgagctggagggccccatcagcagccaggagaccagcgccaccagcggcaccaagagaatcgacctgagcagaatcagcctggagagcagcgccagcctggagggcagcctgagcaagttcgccctgcccggcaagagcgaggtgaccagcagcttcaacgccagcaacaccaacatcttccagaactacgccatggaggtgctgatcagcagctgcagcagatgcagaacctgcgactgcctggtgcacgacgaggagatcatggccggctggaccgccgacgacagcaacctgaacaccacctgccccttctgcggcaacatcttcctgcccttcctgaacatcgagatcagagacctgagaagacccggcagatacttcctgaagagcagccccagcaccgagaacatgcacttccccagcagcatcagcagccagaccagacagagctgcatcagcaccagcgccagcggcctggacaccagcgccctgagcgtgcagggcaacttcgacctgaacagcaagagcaagctgcaggagaacttctgcaccagaagcatccagatccccgccaacagaagcaagaccgccatgagcaagtgccccatcttccccatggccagaagcatcagcaccagcggccccctggacaaggaggacaccggcagacagaagctgatcagcaccggcagcctgcccgccaccctgcagggcgccaccgacagcctgggcctggagtggcacctgcccagccccgaccccgtgaccgtgccctacctgagccccctggtggtgtggaaggagctggagagcctgctggagaacgagggcgaccacgccatcaccgtggccgacttcgtggaccaccaccccatcgtgttctggaacctggtgtggtacttcagaagactggacctgcccagcaacctgcccggcctgatcctgagcagcgagcactgcaacaagtacagcaagatccccagacactgcatgagcgaggacagcaagtacgtgctgatccagatgctgtgggacaacatgaagctgcaccaggaccccggccagcccctgtacatcctgtggaacgcccacacccagaagtaccccatggtgcacctgctgcagaagagcgacaacagcttcaaccaggagctgctgaagagcatggtgaagagcatcaagatgaacgacgtgtacggccccatgagccagatcctggagaccctgaacaagtgcccccacttcaagagacagagaagcctgtacagagagatcctgttcctgagcctggtggccctgggcagagagaacatcgacatcgacgccttcgacaaggagtacaagatggcctacgacagactgacccccagccaggtgaagagcacccacaactgcgacagaccccccagcaccggcgtgatggagtgcagaaagaccttcggcgagccctacctgtag

SEQ ID NO: 159799 - protein, 241 aa, Artificial Sequence
  derived and/or modified sequence
MGTASRSNIARHLQTNLILFCVGAVGACTLSVTQPWYLEVDYTHEAVTIKCTFSATGCPSEQPTCLWFRYGAHQPENLCLDGCKSEADKFTVREALKENQVSLTVNRVTSNDSAIYICGIAFPSVPEARAKQTGGGTTLVVREIKLLSKELRSFLTALVSLLSVYVTGVCVAFILLSKSKSNPLRNKEIKEDSQKKKSARRIFQEIAQELYHKRHVETNQQSEKDNNTYENRRVLSNYERP

SEQ ID NO: 159800 - DNA, 726 bp, Artificial Sequence
  derived and/or modified sequence
atgggaaccgcatctcgctctaatatcgctcgccacctgcagactaatctcatacttttctgtgttggagccgtgggagcgtgtactttatcggtgacacagccgtggtatctggaggttgattatacacacgaagctgtgactatcaagtgtacattcagtgccacgggttgcccaagtgaacagccaacgtgtctctggtttagatatggagcccaccagcctgagaatctctgtctcgatggctgcaaaagcgaagccgacaaattcaccgtgcgggaagccctaaaggaaaatcaggtgtcactgactgtcaatcgagtgacctctaacgacagcgcaatctacatctgtggtatagcgttcccgtccgtcccagaagcccgggcaaaacagaccggcggtggaaccacgttggtagtcagagagattaaactcctgtccaaagaactaagatcttttcttaccgccctagtgtcattgctctccgtgtatgttactggggtctgtgtggcatttatactgcttagcaagtccaagtcaaatcctcttcgtaataaagaaatcaaggaagatagccagaaaaagaagtctgcacgacgaatctttcaagaaatcgcccaggagctgtatcacaaacgacacgtggagaccaaccagcagagcgagaaggacaataacacctatgaaaaccgtcgcgttctatctaactacgagcgcccctag

SEQ ID NO: 159801 - DNA, 1034 bp, Artificial Sequence
  derived and/or modified sequence
gaaaaaagaaagccaactttcctttcaaatacacaccccaacccgccccggcatacacagaaatggggactgcgagcagaagcaacatcgctcgccatctgcaaaccaatctcattctattttgtgtcggtgctgtgggcgcctgtactctctctgtcacacaaccgtggtacctagaagtggactacactcatgaggccgtcaccataaagtgtaccttctccgcaaccggatgcccttctgagcaaccaacatgcctgtggtttcgctacggtgctcaccagcctgagaacctgtgcttggacgggtgcaaaagtgaggcagacaagttcacagtgagggaggccctcaaagaaaaccaagtttccctcactgtaaacagagtgacttcaaatgacagtgcaatttacatctgtggaatagcattccccagtgtgccggaagcgagagctaaacagacaggaggagggaccacactggtggtaagagaaattaagctgctcagcaaggaactgcggagcttcctgacagctcttgtatcactgctctctgtctatgtgaccggtgtgtgcgtggccttcatactcctctccaaatcaaaatccaaccctctaagaaacaaagaaataaaagaagactcacaaaagaagaagagtgctcggcgtatttttcaggaaattgctcaagaactataccataagagacatgtggaaacaaatcagcaatctgagaaagataacaacacttatgaaaacagaagagtactttccaactatgaaaggccatagaaacgttttaattttcaatgaagtcactgaaaatccaactccaggagctatggcagtgttaatgaacatatatcatcaggtcttaaaaaaaaataaaggtaaactgaaaagacaactggctacaaagaaggatgtcagaatgtaaggaaactataactaatagtcattaccaaaatactaaaacccaacaaaatgcaactgaaaaataccttccaaatttgccaagaaaaaaaattctattttaaa

SEQ ID NO: 159802 - DNA, 726 bp, Artificial Sequence
  derived and/or modified sequence
atgggcacagccagccgcagcaacatcgcccggcacctgcagaccaacctgatcctcttctgtgtgggcgctgtgggcgcctgcaccctgtctgtgacccagccctggtacctggaggtggactacacccatgaggccgtgaccatcaagtgcaccttcagcgccaccggctgccccagcgagcagcccacctgcctgtggttccgctacggggcccaccagcctgagaacctgtgcctggatggctgcaagtctgaggccgacaagttcaccgtgcgggaggccctgaaggagaaccaggtgtccctgactgtgaacagagtgaccagcaatgattctgccatctacatctgtggcatcgccttccccagcgtgcctgaggcccgggccaagcagacaggaggcggcaccaccctggtggtgcgggagatcaagctgctgagcaaggagctgcgctccttcctgacagccctggtgtccctgctgtctgtgtatgtgactggagtgtgtgtggccttcatcctgctgagcaagagcaagagcaaccccctgaggaacaaggagatcaaggaggacagccagaagaagaagagcgcccggcgcatcttccaggagatcgcccaggagctgtaccacaagagacatgtggagaccaaccagcagagcgagaaggacaacaacacctatgagaacagaagagtgctgagcaactatgaaagaccctag

SEQ ID NO: 159803 - DNA, 726 bp, Artificial Sequence
  derived and/or modified sequence
atgggcaccgccagccggagcaacatcgcccggcacctgcagaccaacctcatattgttctgcgtaggagccgtgggtgcctgtactctatccgtgacccagccttggtatctggaggtcgattacacccacgaggctgtgacaataaaatgtacatttagcgccacaggatgccccagtgagcagccgacttgtctgtggtttaggtacggggcgcatcagcctgagaatttgtgcctggacggatgcaaatctgaagcagataagtttactgtcagggaggccttgaaagaaaaccaggtgagcctgacagtgaacagggtgacgtcaaatgattcagccatctacatttgcggaatcgctttcccttccgtcccggaggcccgagccaagcagacaggaggcgggactactctggtggtgcgggagattaagttactctccaaagagttaaggagcttcttaacagcgctcgtctcgctgctgtccgtgtacgtgacaggcgtttgtgtagcattcattctgctgagcaagtcaaagagcaatcctctccggaataaggaaatcaaagaggactctcagaagaaaaagtcagccaggcgtatctttcaggagatcgcacaagagctgtaccataaacgccatgtggaaacaaaccagcagtctgaaaaggacaacaatacatatgaaaatcgtagagtgctatccaattatgagagaccgtag

SEQ ID NO: 159804 - DNA, 726 bp, Artificial Sequence
  derived and/or modified sequence
atgggaacagcctcacggtcaaatatagcacgccatttgcaaaccaacctgatcctgttctgcgtgggcgctgtgggggcttgtacgctaagtgtcactcaaccttggtatctagaggtcgattacacccatgaagccgttaccatcaagtgtactttctctgctacagggtgccctagcgagcaaccgacctgcctgtggtttcgctacggcgctcatcagcccgagaatctgtgtttggatggctgcaaatccgaggcagacaagttcacggtgcgtgaggccttaaaggaaaatcaagtgagcctgaccgtaaacagagtgacttctaacgattctgccatctacatctgtggcattgctttccccagcgtgcctgaagctcgagctaaacagacgggcggtggcaccacactcgtggttagggaaattaaactcctgtccaaagaattgagatcctttctgactgcactggtttcactgctgtcggtatatgtaacaggggtttgtgtcgcttttatccttctgagtaagtctaaatcaaatcctttacgtaacaaagaaataaaggaggattcccagaaaaagaagtccgcccgaaggatcttccaagagatcgcacaggagctctatcataaaaggcacgtcgagacaaaccaacagagtgagaaagacaacaacacgtatgagaaccgccgtgtacttagcaactacgaaagaccctag

SEQ ID NO: 159805 - DNA, 726 bp, Artificial Sequence
  derived and/or modified sequence
atgggcaccgccagcagaagcaacatcgccagacacctgcagaccaacctgatcctgttctgcgtgggcgccgtgggcgcctgcaccctgagcgtgacccagccctggtacctggaggtggactacacccacgaggccgtgaccatcaagtgcaccttcagcgccaccggctgccccagcgagcagcccacctgcctgtggttcagatacggcgcccaccagcccgagaacctgtgcctggacggctgcaagagcgaggccgacaagttcaccgtgagagaggccctgaaggagaaccaggtgagcctgaccgtgaacagagtgaccagcaacgacagcgccatctacatctgcggcatcgccttccccagcgtgcccgaggccagagccaagcagaccggcggcggcaccaccctggtggtgagagagatcaagctgctgagcaaggagctgagaagcttcctgaccgccctggtgagcctgctgagcgtgtacgtgaccggcgtgtgcgtggccttcatcctgctgagcaagagcaagagcaaccccctgagaaacaaggagatcaaggaggacagccagaagaagaagagcgccagaagaatcttccaggagatcgcccaggagctgtaccacaagagacacgtggagaccaaccagcagagcgagaaggacaacaacacctacgagaacagaagagtgctgagcaactacgagagaccctag

SEQ ID NO: 159806 - protein, 126 aa, Artificial Sequence
  derived and/or modified sequence
MSYKPIAPAPSSTPGSSTPGPGTPVPTGSVPSPSGSVPGAGAPFRPLFNDFGPPSMGYVQAMKPPGAQGSQSTYTDLLSVIEEMGKEIRPTYAGSKSAMERLKRGIIHARALVRECLAETERNART

SEQ ID NO: 159807 - DNA, 381 bp, Artificial Sequence
  derived and/or modified sequence
atgagctacaagcccatcgcccccgcccccagcagcacccccggcagcagcacccccggccccggcacccccgtgcccaccggcagcgtgcccagccccagcggcagcgtgcccggcgccggcgcccccttcagacccctgttcaacgacttcggcccccccagcatgggctacgtgcaggccatgaagccccccggcgcccagggcagccagagcacctacaccgacctgctgagcgtgatcgaggagatgggcaaggagatcagacccacctacgccggcagcaagagcgccatggagagactgaagagaggcatcatccacgccagagccctggtgagagagtgcctggccgagaccgagagaaacgccagaacctag

SEQ ID NO: 159808 - DNA, 1378 bp, Artificial Sequence
  derived and/or modified sequence
gcgcgcaaggcaccggtggcagcggcgacggcagctgcgacagcaacccctgctgggccgaaactgggcagagcggagcagacgtctgaagcagcgcgagtgaggcgcgagggtagcgcccgcgcccgggaagacccctcggcgcgaaccggcagcccagccccgggtcccggttcccaaggccccgcctctagggcctggggactaatcggattgagagcgcgccggcccgggccgcgaactcgccaattgcggagggcggtggccaccgcccaatccggagcagacaggtgcgaggtccggaaggcggaggccaatcggcggcggttgcgacctgctggggcaggtctcggccaataaggaggctcgagtgacatcttcgcgcaccaatcgggagtgagggagcattcgtgcccgctcgcccttccggccagacctctatttaccaggggcgtgcagcccgcttgccaatcagagcgcggctgagcggccccgcagccaacccccgaggagcggccggctggcgtccgccgcgcccaggagttggggatgtcctacaaacccatcgcccctgctcccagcagcacccctggctccagcacccctgggccgggcaccccggtccctacaggaagcgtcccgtcgccgtcgggctcagtgccaggagccggcgctcctttcagaccgctgtttaacgactttggaccgccttccatgggctacgtgcaggcgatgaagccacccggcgcccagggctcccagagcacctacacggacctgctgtcagtcatagaggagatgggcaaagagatccggcctacctatgctggcagcaagagcgccatggagcgcctgaagagaggtatcatccatgcccgggccctagtcagagagtgcctggcagagacagagcggaacgcccgcacgtaacaggaagcgcctcggcctcagcgtctggacctatccggccactgcagagcacccgcttctccctggccttcatcccgagttgcactaaccatcctgggcttcctgtcctgtgtcccttggtgggtcccctccaggaaccaaggagtggccctccaggtggcagcactaaggacacccccccacaacaagagttagcagcgaggtccccatgagtcccacccatgacctgccgacagtgttgcccaccggaacttttgtggcccctaccgctcagcccttcccagcacttctcccactttgtcccgagcctccttctcccccagcaggggcacaggcctggcacctccctgccttgtgtcctgagccatagtgactcttttatctgtgtgtcttttgctaaatatgccctttttatattaataaaagatgatttggagttgtgctctca

SEQ ID NO: 159809 - DNA, 381 bp, Artificial Sequence
  derived and/or modified sequence
atgtcttataagcccatcgcaccggctccctcctcaacaccaggaagctctacaccagggccaggcactccagtacccaccgggtcggtaccgtccccctccggaagcgtccctggtgcaggagccccctttagacctctgttcaacgacttcggcccccccagcatggggtacgtacaggcaatgaaaccaccaggagctcagggttcacaatccacctatactgacctgctcagtgtcatagaggaaatgggtaaagaaatccgaccgacctacgccggcagtaagtcggctatggagaggctgaaacgcggcattatacacgcgagggcacttgtgagggagtgcctggcagaaacagagcgtaacgctcggacgtag

SEQ ID NO: 159810 - DNA, 381 bp, Artificial Sequence
  derived and/or modified sequence
atgagctacaagcccatcgccccagcccccagcagcaccccaggcagcagcaccccaggccctggcacccctgtgcccactggatctgtgcccagccccagcggctctgtgcctggggccggggcccccttccggcccctcttcaatgactttggacctccttccatgggctacgtgcaggccatgaagcccccaggggcccagggcagccagagcacctacacagacctgctgtctgtgattgaggagatgggcaaggagatccggcccacctacgccggcagcaagagcgccatggagcggctgaagaggggcatcatccacgcccgggccctggtgagagaatgtctggccgagacagaaagaaatgcccggacctag

SEQ ID NO: 159811 - DNA, 381 bp, Artificial Sequence
  derived and/or modified sequence
atgagctacaagcccatcgcccccgcccccagcagcacccccggcagcagcactccagggccaggtacccccgtacccactggatctgtcccttctccttctggatccgtgcctggtgctggcgctccctttcgccctctattcaacgattttggccccccttccatggggtacgtccaagctatgaagcccccaggagcacaggggtcacagtccacgtacacagatctcctttccgtgatcgaagaaatggggaaagagattcgcccgacttacgctggttccaagtcggctatggaacggctgaaaaggggcatcatccacgctcgagcgctggtcagggaatgccttgccgagaccgaacggaatgccagaacgtag

SEQ ID NO: 159812 - DNA, 381 bp, Artificial Sequence
  derived and/or modified sequence
atgtcttataagcccattgcccctgcacccagctcaactcctggctcctccacaccagggccaggcacacccgtacccactgggtctgtcccgtctccctccgggtcggtgcctggggcaggagctcccttcagacctctcttcaacgacttcgggccaccatctatgggctatgtccaagcaatgaagcctccaggagcccaggggagccagtccacatacacggatttgttatccgtgatcgaggagatggggaaggagatacgccctacttacgccggatcaaaatcagccatggaacggctgaagaggggaataattcacgcaagggccctagtgagagaatgcttagcagaaacagaacggaatgcgcgtacatag

SEQ ID NO: 159813 - protein, 1966 aa, Artificial Sequence
  derived and/or modified sequence
MKAADTVILWARSKNDQLRISFPPGLCWGDRMPDKDDIRLLPSALGVKKRKRGPKKQKENKPGKPRKRKKRDSEEEFGSERDEYREKSESGGSEYGTGPGRKRRRKHREKKEKKTKRRKKGEGDGGQKQVEQKSSATLLLTWGLEDVEHVFSEEDYHTLTNYKAFSQFMRPLIAKKNPKIPMSKMMTILGAKWREFSANNPFKGSAAAVAAAAAAAAAAVAEQVSAAVSSATPIAPSGPPALPPPPAADIQPPPIRRAKTKEGKGPGHKRRSKSPRVPDGRKKLRGKKMAPLKIKLGLLGGKRKKGGSYVFQSDEGPEPEAEESDLDSGSVHSASGRPDGPVRTKKLKRGRPGRKKKKVLGCPAVAGEEEVDGYETDHQDYCEVCQQGGEIILCDTCPRAYHLVCLDPELDRAPEGKWSCPHCEKEGVQWEAKEEEEEYEEEGEEEGEKEEEDDHMEYCRVCKDGGELLCCDACISSYHIHCLNPPLPDIPNGEWLCPRCTCPVLKGRVQKILHWRWGEPPVAVPAPQQADGNPDVPPPRPLQGRSEREFFVKWVGLSYWHCSWAKELQLEIFHLVMYRNYQRKNDMDEPPPLDYGSGEDDGKSDKRKVKDPHYAEMEEKYYRFGIKPEWMTVHRIINHSVDKKGNYHYLVKWRDLPYDQSTWEEDEMNIPEYEEHKQSYWRHRELIMGEDPAQPRKYKKKKKELQGDGPPSSPTNDPTVKYETQPRFITATGGTLHMYQLEGLNWLRFSWAQGTDTILADEMGLGKTIQTIVFLYSLYKEGHTKGPFLVSAPLSTIINWEREFQMWAPKFYVVTYTGDKDSRAIIRENEFSFEDNAIKGGKKAFKMKREAQVKFHVLLTSYELITIDQAALGSIRWACLVVDEAHRLKNNQSKFFRVLNGYKIDHKLLLTGTPLQNNLEELFHLLNFLTPERFNNLEGFLEEFADISKEDQIKKLHDLLGPHMLRRLKADVFKNMPAKTELIVRVELSPMQKKYYKYILTRNFEALNSRGGGNQVSLLNIMMDLKKCCNHPYLFPVAAMESPKLPSGAYEGGALIKSSGKLMLLQKMLRKLKEQGHRVLIFSQMTKMLDLLEDFLDYEGYKYERIDGGITGALRQEAIDRFNAPGAQQFCFLLSTRAGGLGINLATADTVIIFDSDWNPHNDIQAFSRAHRIGQANKVMIYRFVTRASVEERITQVAKRKMMLTHLVVRPGLGSKAGSMSKQELDDILKFGTEELFKDENEGENKEEDSSVIHYDNEAIARLLDRNQDATEDTDVQNMNEYLSSFKVAQYVVREEDKIEEIEREIIKQEENVDPDYWEKLLRHHYEQQQEDLARNLGKGKRVRKQVNYNDAAQEDQDNQSEYSVGSEEEDEDFDERPEGRRQSKRQLRNEKDKPLPPLLARVGGNIEVLGFNTRQRKAFLNAVMRWGMPPQDAFTTQWLVRDLRGKTEKEFKAYVSLFMRHLCEPGADGSETFADGVPREGLSRQQVLTRIGVMSLVKKKVQEFEHINGRWSMPELMPDPSADSKRSSRASSPTKTSPTTPEASATNSPCTSKPATPAPSEKGEGIRTPLEKEEAENQEEKPEKNSRIGEKMETEADAPSPAPSLGERLEPRKIPLEDEVPGVPGEMEPEPGYRGDREKSEDVKGDRELRPGPRDEPRSNGRREEKTEKPRFMFNIADGGFTELHTLWQNEERAAISSGKLNEIWHRRHDYWLLAGIVLHGYARWQDIQNDAQFAIINEPFKTEANKGNFLEMKNKFLARRFKLLEQALVIEEQLRRAAYLNLSQEPAHPAMALHARFAEAECLAESHQHLSKESLAGNKPANAVLHKVLNQLEELLSDMKADVTRLPATLSRIPPIAARLQMSERSILSRLASKGTEPHPTPAYPPGPYATPPGYGAAFSAAPVGALAAAGANYSQMPAGSFITAATNGPPVLVKKEKEMVGALVSDGLDRKEPRAGEVICIDD

SEQ ID NO: 159814 - DNA, 6331 bp, Artificial Sequence
  derived and/or modified sequence
atctttgtttgggtctcccatactgcgtatagatgaatgggtcaggatatctggaacaaaatatggaggtgaagggtgagatcgggaaacaaagggtatggccccctagttcccaaagggagcagggagatgggaatagaattgaaggtaggttttaggctacttgggaggaggaatatttaggtaattgtggagactttctcctgtgtgatgaaggcggcagacactgtgatcctgtgggcaagaagtaaaaatgaccagctgaggatttcttttcctccaggactgtgttggggtgacaggatgcctgataaggatgacattcggctgctgccgtcagcattgggtgtgaagaagagaaaacgaggacccaagaagcagaaggagaacaagccaggaaaaccccgaaaacgcaagaagcgtgacagtgaggaggaatttggttctgagcgagatgagtaccgggagaagtcagagagtgggggcagtgaatatggaaccggaccgggtcggaaacgaagaaggaagcaccgagaaaaaaaggagaagaagacaaagcggcggaaaaagggggagggagatggggggcaaaagcaagtggaacagaagtcatcagcaactctgcttctgacctggggcctggaggatgtggagcatgtgttctctgaggaggattaccacacgctcaccaactacaaagccttcagccagttcatgaggcccctaattgctaagaagaatcctaagatcccaatgtctaagatgatgaccatccttggggccaaatggagagagttcagtgccaacaaccccttcaaggggtcagcagctgctgtggcggcggcagcggcagcagcagcagcagctgtagctgagcaggtgtcagctgctgtctcgtcggccacccccatagcaccctccggaccccccgcccttccaccaccccctgctgctgatatccagcccccacccatccgaagagccaaaaccaaagagggcaaaggtccaggccataagaggcggagtaagagcccccgagtgcctgatggacgcaagaagcttcggggaaagaaaatggcaccactcaaaataaaactagggcttctgggtggcaagaggaagaaaggaggctcgtatgtttttcagagcgacgaaggtcctgaaccagaggctgaggaatcagacctggacagtggcagtgtccacagtgcctcaggccggcctgatggccctgtccgcaccaagaaactaaagagaggccggccaggaaggaagaagaagaaggtcctgggctgtcctgcagtggccggggaggaggaggttgatggctacgagacggatcaccaggattactgtgaggtgtgccagcagggtggggaaattattctgtgtgacacctgccctcgtgcctaccacctcgtctgccttgatcctgagcttgaccgggctccagagggcaaatggagctgccctcactgtgagaaggagggggtccagtgggaggccaaggaggaagaagaagaatacgaagaggagggagaggaagaaggggagaaggaggaggaggatgatcacatggagtactgccgcgtatgcaaggacggcggggagctcctgtgctgtgacgcgtgcatctcctcctaccacattcattgtctaaaccctcccctgcctgacattcccaatggtgaatggctgtgtccccgatgcacatgccccgtgctgaagggtcgagtgcagaagatcctacattggcggtggggggagccacctgtagcagtgccagcccctcaacaggcagatggaaatccagatgtcccacccccccgtcctcttcaaggcagatcagagcgagagttctttgtcaagtgggtaggactatcctactggcactgctcctgggccaaggagcttcagctggaaatcttccatttggttatgtatcgaaactaccagcggaagaatgacatggatgagcccccacccctggactatggctccggcgaggatgatgggaagagcgacaagcgtaaagtgaaagacccgcactatgctgagatggaggagaagtactatcgttttggcatcaagccagagtggatgaccgtccaccgcatcatcaaccacagtgtggataaaaaggggaattaccactatctagtaaaatggagggacttaccatatgaccagtccacgtgggaggaagatgaaatgaatatccctgaatacgaagaacataagcaaagctactggagacaccgagaactaattatgggggaagaccctgcccagccccgcaagtataagaagaagaagaaggagctacagggtgatgggcctcccagttctcccactaatgatcctaccgtgaaatatgagactcagccacggtttatcacagccactggaggcaccctgcacatgtatcagttggaagggctgaactggctacgcttctcctgggcccagggcactgacaccattctagctgatgagatggggctaggcaagaccatacaaaccatcgtcttcctctactcactctacaaggagggccacacaaaaggtcccttcctggtgagtgccccactctctaccatcattaactgggagcgggagttccagatgtgggcacccaaattctatgtggtgacatacacgggtgacaaggacagccgggccatcattcgtgagaatgaattctcctttgaggacaatgccatcaaagggggcaagaaagcttttaagatgaaaagggaggcacaggtgaagttccatgttctcctgacatcgtatgagctgatcaccattgatcaggcagcacttggttccatccgctgggcctgtcttgtggtagatgaggcccatcgactcaagaacaaccagtccaagtttttcagggttctcaatggttacaagatagatcataagttgctgctgacaggaaccccattgcagaataatctggaggagctcttccatctcctgaacttcctcaccccagagagatttaacaacttggagggcttcctggaggagtttgctgacatatccaaagaggaccagatcaagaaactgcatgatttgctggggccacacatgctgcggagactcaaggcagatgtctttaagaacatgccagccaagacagagctcatcgttcgggtggagctaagccccatgcagaagaaatactacaaatacatcctgactcgaaattttgaggccttgaattcacgaggtggtgggaaccaggtgtcgctgcttaatatcatgatggatcttaagaagtgctgcaaccatccatacctttttcccgtggctgctatggagtcccccaaactccccagtggggcttatgagggtggggcacttattaagtcgtctgggaagctcatgctgctccagaagatgctgcgaaagctgaaggagcaaggacaccgagtgctcatcttctcgcagatgaccaaaatgttagacttgcttgaggacttcttagactatgaaggctacaagtatgagcgcatcgatggtggtatcacgggtgccctgaggcaggaggccatcgatcggtttaatgctcctggggcccaacaattctgcttcctcctgtccacccgagctgggggcctgggcatcaatctggccactgctgacactgtcatcatctttgattctgactggaacccccataatgacatccaggcctttagccgggctcatcggattggccaggccaacaaagtgatgatttaccggtttgtgactcgcgcgtcagtggaagagcgaatcacacaagtggccaagagaaagatgatgctgacacacctggttgtgcggcctgggctgggctccaaggcaggctccatgtccaagcaggagcttgacgacattctcaaatttggcactgaagagctattcaaggatgaaaacgagggggagaacaaggaggaggacagcagtgtgattcattatgacaatgaggccatcgctcggctgttggaccggaaccaggatgcaactgaggacactgacgtgcagaacatgaatgagtatctcagctccttcaaggtggcacagtacgtcgtgcgggaagaagacaagattgaggaaattgagcgagagatcatcaagcaggaggagaatgtggaccctgactactgggagaagctgctgaggcatcactatgagcaacagcaggaagacctagcccggaatctaggcaagggcaagcgggttcgcaagcaagttaactacaatgatgctgctcaggaagaccaagacaaccagtcagagtactcggtgggttcagaggaggaggatgaagacttcgatgaacgtcctgaagggcgtagacagtcaaagaggcagctccggaatgagaaagataagccactgcctccactgctggcccgagtcgggggcaacattgaggtgctgggcttcaacacccgtcagcggaaggctttcctcaatgctgtgatgcgctgggggatgccaccacaggatgccttcaccacacagtggctggtgcgggacctgaggggcaagactgagaaggagtttaaggcctatgtgtctttgttcatgcgccatctgtgtgagcctggggcagacggctctgaaacctttgccgatggggtccctcgggagggactgagtcgccagcaggtgttgacccgcattggagtcatgtctctcgtcaaaaagaaggtgcaggagtttgagcacatcaatgggcgttggtcaatgccggaactgatgcctgaccccagcgccgattctaagcgctcctccagagcctcctctcctaccaaaacgtctcccaccactcctgaggcttctgctaccaacagtccctgcacctctaaacctgctactccagctccaagtgagaaaggagaaggcataaggacacctcttgagaaggaggaagctgaaaaccaggaggaaaagccagagaagaacagcagaattggggagaagatggagacagaggctgatgcccccagcccagccccatcacttggggagcggctggagccaaggaagattcctctagaggatgaggtgccaggggtgcctggagagatggagcctgaacctgggtaccgtggggacagagagaagtcagaagatgtaaaaggtgaccgggagcttcgaccagggcctcgagatgagccacggtccaatgggcgacgagaggaaaagacagagaagccccggttcatgttcaatatcgccgatggtggcttcacagagcttcacacactgtggcagaatgaggaacgggcagctatttcctcggggaaactcaatgagatctggcacagaagacatgactattggcttctggctgggattgtcctccatggctatgcacggtggcaggacatccagaatgatgctcaatttgccattatcaacgagccatttaaaactgaagccaataaggggaactttctggagatgaaaaataagttcctggcccggaggttcaagctcctggagcaggcgctggtgattgaggagcagctgcggcgggcggcctacctgaacctgtcgcaggagccggcgcaccccgccatggccctccacgcccgcttcgccgaggccgagtgcctggccgagagccaccagcacctctccaaggagtcgctggcggggaacaagccggccaacgccgtcctgcacaaggttctgaaccagctggaggagttgctgagcgacatgaaggcggacgtgacccgcctgccagccacgctgtcccgaataccccccatcgcagcccgccttcagatgtccgagcgcagcatcctcagccggctggccagcaagggcacggagcctcaccccacaccggcctacccgccgggtccctacgctacacctccggggtacggggcggccttcagcgccgcacccgtaggggccctggccgccgcaggcgccaattacagccagatgcctgcagggtccttcatcacagccgccaccaacggcccaattcaccgattttttaaaaaagttccagaaatccagtgacgaatgtggtatacaaaaaaatatataaattctttcaacttagaataattaagtcataaaatacatagggtacaaataccacattccgttctaaaatgatatcttaggatcatcaaaagaaaaagaggatttggattatgcaaaaaatgattcctatatatataatcaattatctaactgacatttttgcaaatctaccacaacttcgccttttattgcatatgctaaacaagcagatgctaagtctgtaaactgtgaattaacctcctttttaattaattgttcg

SEQ ID NO: 159815 - DNA, 5901 bp, Artificial Sequence
  derived and/or modified sequence
atgaaggcggccgacacggtcattctttgggcgcgtagcaagaacgaccagttgcgaataagctttccaccagggctgtgttggggcgatagaatgcctgataaagacgatatacgtctgttaccgtccgcactaggcgttaagaagcgcaagcggggcccgaaaaaacaaaaagaaaacaaacccggaaagcccagaaaaagaaagaaacgcgattcagaggaggagtttggttccgagagagacgaataccgagaaaaatcagagagtggcggttctgagtacgggacaggaccagggcgcaagcgccgccggaagcaccgtgagaaaaaggagaaaaagaccaagaggcgtaagaagggggagggggacggcggccaaaagcaggtggagcagaagtctagcgccactctgctgttaacatggggtttagaagatgtggaacacgttttctcggaagaggattaccacacactcaccaattacaaggccttctcccagttcatgaggcctttgatcgctaaaaagaacccaaaaatacctatgtctaagatgatgactattctcggcgccaaatggagggagttctctgctaataacccctttaagggctctgcagcagccgtggccgcagcagcggcggccgcagccgccgctgtggccgagcaagttagcgccgccgtgagttctgctacacctattgctcctagcggtcctcctgcactccctccaccccctgctgccgatattcagccccctcccatccggcgagctaagaccaaggagggtaagggtccaggacataagagacggtctaagtcccccagggtccctgacggcaggaagaagttgagaggaaaaaagatggcaccattgaagatcaagctcggcttactgggcgggaaaagaaagaagggcggctcctatgtgtttcagagcgatgagggccctgaacccgaggcagaagagtcagatcttgacagtggctctgtccattctgcctcagggcgccctgacggtccggtgcggactaaaaagctgaagcgagggagacctggcaggaagaaaaaaaaggttctggggtgccctgccgtggctggagaagaggaagtcgatggatatgagaccgatcaccaggattattgcgaggtatgccagcaggggggagagatcatactgtgcgatacatgtcctcgagcataccaccttgtatgcctggatcctgagctggatcgcgcaccagagggcaaatggtcatgcccacactgcgagaaggaaggagtgcagtgggaggctaaggaagaggaggaagaatacgaggaggagggcgaagaggaaggcgagaaggaagaggaggacgaccacatggagtattgtcgcgtgtgcaaggacggcggggagttgctttgttgcgacgcctgcattagctcctatcacatacattgcttgaaccctccactacctgatattccgaatggcgaatggctgtgcccgaggtgtacatgccctgtgttgaagggtcgagtacaaaagattctccactggcgctggggagaaccccccgtggctgtgcccgcccctcagcaggctgacggcaaccccgatgtgccgcctccaaggcccctgcagggaaggtcggaacgggaattcttcgttaagtgggttggtctgtcctactggcactgttcttgggccaaagagctgcaactcgagatcttccatcttgtaatgtataggaattaccagaggaagaacgatatggacgagccgcctccacttgattacggatctggcgaagacgatggaaaatcggataagaggaaagttaaggaccctcattatgctgagatggaagagaaatactaccggttcggcattaaaccagaatggatgactgtacatagaataatcaatcactctgtggacaaaaagggtaactatcactaccttgtgaagtggcgcgacctgccctatgaccagagcacctgggaagaggatgagatgaacattcccgagtatgaggaacacaaacagtcttattggagacatcgggagctaattatgggcgaagatccggcgcagcctcgaaagtataaaaagaaaaagaaagagttacagggggatggaccccctagtagtcctactaatgaccctacagttaaatatgagacccagccaagatttatcactgcaacagggggtactttgcacatgtaccagctcgagggactgaactggcttcgcttctcctgggcacaaggcaccgataccatactcgctgacgagatggggctgggtaagacaattcagactatcgtgttcctgtactcattgtacaaggaaggacacactaaaggcccctttctcgttagcgccccattgtccaccatcatcaactgggaacgggagtttcaaatgtgggctccgaagttttacgtcgtgacatataccggcgataaagatagcagggctatcatccgtgaaaatgagttctcttttgaggacaatgccattaaagggggtaagaaagccttcaaaatgaagagagaggcccaggttaaattccatgttcttctaacctcgtacgagttaatcactatcgatcaagcagctctgggatcaattagatgggcgtgtcttgttgtggatgaggctcacaggctaaagaacaatcagtccaagttttttcgagtgttaaatggatacaagatcgaccacaagctactactgaccgggaccccattacagaacaacctggaagagctgtttcatctcttaaactttctcacacccgagagatttaataacctggaaggattcctggaagagttcgctgacataagcaaggaggaccaaattaagaagctgcacgacctcttggggccccacatgttgagacggctgaaggcagatgtgtttaaaaacatgcctgcaaagaccgagcttattgttcgagtggagcttagtcccatgcagaaaaagtactacaagtacattctaacgagaaatttcgaagctctgaattcacggggcgggggcaatcaagtaagcttgcttaacataatgatggacctcaagaaatgttgtaatcacccgtatctctttcctgtggctgccatggagagccctaaattgccaagtggggcctatgaagggggagctctcatcaaaagtagcgggaagttaatgctcttacagaagatgcttcgcaaattgaaggagcagggacatagagtactgatcttctctcagatgacaaaaatgctggacctgcttgaagatttcctagattacgaaggatacaagtacgagcgcatcgatggtggtatcaccggcgctctgcggcaagaggcaatcgacaggtttaatgccccgggggcacagcagttctgctttcttctttcaactcgggccggaggcctcggaataaacctcgcaaccgctgacacggtcatcatcttcgacagcgactggaatccccataatgacatccaagcttttagtagggcccacagaatcggccaggcaaacaaagtcatgatttatcgctttgttacccgcgccagtgttgaagaacgcataacccaggtcgcgaagcgaaagatgatgctcactcatcttgtggtgaggccaggtctagggagcaaagcgggctctatgagcaagcaagagcttgatgatatactgaaattcggcacagaagaattgttcaaggacgaaaatgaaggtgagaataaagaagaggacagctcagtcatccactacgacaacgaagccatcgccaggcttctggacagaaatcaagatgcaaccgaggatacagacgtgcagaatatgaatgaatatctcagctcattcaaagtggctcaatacgtggtacgcgaggaagataagattgaggaaatcgaaagagagatcattaaacaggaagaaaacgtagatcctgattattgggaaaagctcctgagacatcactatgagcagcagcaggaagacctggcccgtaatcttggaaagggaaagcgggtaagaaagcaagtcaactacaacgatgccgctcaggaagaccaagataatcagagtgagtacagcgtcggtagcgaagaggaggacgaggattttgatgagagaccggaaggccgtcgccagagtaagcgccagctgaggaacgaaaaggacaaaccactgccaccactcctagccagagtaggcggaaacattgaggtgctcggtttcaatactagacagcgtaaagctttcctaaatgccgtgatgcgttggggaatgccacctcaagatgcatttaccacacagtggcttgtccgcgacctgcgtgggaaaaccgagaaggaattcaaggcttacgtgtcccttttcatgaggcatctttgtgagcccggagccgatggcagtgaaactttcgcagatggagtaccacgcgaaggactttcgcggcagcaagtgttgacacgtattggtgtcatgtccctcgtaaaaaagaaagttcaggagttcgaacacattaatggtcggtggagcatgcccgagctgatgcccgatccgtccgccgatagtaaaagaagttcccgtgcctccagtcccacaaaaacaagccccactacccccgaagcctctgcgaccaactctccatgtacatccaagccagctaccccggcaccgtccgaaaagggtgaaggaattagaaccccactggagaaggaggaagccgaaaatcaggaagagaagccagagaagaattccagaattggagagaaaatggaaacagaagcagatgcaccatccccagcccctagcctgggtgagcgtctcgagcctaggaaaatccccttggaggacgaggtgccaggcgtcccaggagaaatggagccggagccgggctacagaggcgatagagaaaagtctgaagacgtgaaaggagaccgagagctcaggcctgggccccgggatgagcctcgatctaacggccgcagggaagagaagaccgagaagccacggttcatgtttaatatcgccgacggtggttttaccgaactgcacacgctttggcagaacgaggagcgggcggcgatcagtagtggaaagttaaacgagatttggcataggcgccacgattattggctgctggccggtatcgtgctgcacggttatgcgaggtggcaggatatccagaatgacgcccaatttgcaattattaatgagcccttcaaaaccgaggccaacaagggaaacttcctcgaaatgaagaataagtttctggctcgccggttcaagctgctcgaacaggcattagtcattgaagagcagctccgcagagccgcgtacctgaacttgtcacaggagcctgcccatcccgccatggcattgcatgctcgctttgccgaggcggaatgtctcgctgagagccaccagcacttaagtaaagagagcctcgcaggaaataagccagctaacgcagtgctgcataaggtgctgaatcagctggaggagctcttatcagatatgaaagcagatgtgaccagattgcccgccactctttctcgcatacccccaatcgccgctaggttgcagatgagtgagcgctcgatcctgtctagacttgcgtccaagggcactgagcctcatccgactcccgcttacccacctggcccatacgccacaccgccaggttatggtgctgcttttagtgcagcccctgttggtgctctcgcggccgcgggtgccaattatagtcagatgcccgccggcagtttcattacagctgcgaccaacggtccacccgttctggtgaagaaggagaaggagatggtcggggcgctggtgtcagacggacttgatcgcaaggagccacgcgctggcgaagtgatctgtattgatgactag

SEQ ID NO: 159816 - DNA, 5901 bp, Artificial Sequence
  derived and/or modified sequence
atgaaggctgctgacaccgtcatcctgtgggcccggagcaagaatgaccagctgcgcatctccttccccccaggcctgtgctggggagacaggatgccagacaaggatgacatccggctgctgcccagcgccctgggcgtgaagaagaggaagaggggccccaagaagcagaaggagaacaagccaggcaagcccaggaagaggaagaagagggacagcgaggaggagtttggaagtgaaagagatgagtaccgggagaagtctgagagcggcggctctgaatatggaactggacctggcaggaagagaagaaggaagcaccgggagaagaaggagaagaagaccaagaggaggaagaagggggagggagatggcggccagaagcaggtggagcagaagagcagcgccaccctgctgctgacctggggcctggaggatgtggagcacgtgttcagcgaggaggactaccacaccctgaccaactacaaggccttcagccagttcatgaggcccctgattgccaagaagaaccccaagatccccatgagcaagatgatgaccatcctgggcgccaagtggagggagttcagcgccaacaaccccttcaagggcagcgctgctgctgtggccgctgctgctgctgctgctgctgctgctgtggccgagcaggtgtctgctgctgtgagcagcgccacccccatcgcccccagcggccccccagccctgcccccacctcctgctgctgacatccagcccccacccatccggcgggccaagaccaaggagggcaagggccctggccacaagaggaggagcaagagcccccgggtgcctgatggcaggaagaagctgcggggcaagaagatggcccccctgaagatcaagctgggcctgctgggcggcaagaggaagaagggcggcagctatgtgttccagagtgatgagggccctgagcctgaggccgaggagagtgacctggacagcggctctgtgcacagcgccagcggccgcccagatggccctgtgaggaccaagaagctgaagaggggccggcccggcaggaagaagaagaaggtgctgggctgcccagctgtggccggggaggaggaggtggatggctatgaaacagaccaccaggactactgtgaggtgtgccagcagggcggggagatcatcctgtgtgacacctgcccccgggcctaccacctggtgtgcctggaccctgagctggaccgggcccctgagggcaagtggagctgcccccactgtgagaaggagggcgtgcagtgggaggccaaggaggaggaggaggagtatgaggaggagggggaggaggagggggagaaggaggaggaggatgaccacatggagtactgccgggtgtgcaaggatggaggagagctgctgtgctgtgatgcctgcatcagcagctaccacatccactgcctgaacccccccctgcctgacatccccaacggggagtggctgtgcccccgctgcacctgccctgtgctgaagggccgggtgcagaagatcctgcactggcgctggggcgagccccctgtggccgtgcctgccccccagcaggctgatggcaacccagatgtgcccccaccccggcccctgcagggccgctctgagcgggagttctttgtgaagtgggtgggcctgagctactggcactgctcctgggccaaggagctgcagctggagatcttccacctggtgatgtacagaaactaccagaggaagaatgacatggatgagcccccacccctggactatggcagcggagaagatgatggcaagagtgacaagaggaaggtgaaggacccccactatgcagagatggaggagaagtactaccgcttcggcatcaagccagagtggatgacagtgcaccgcatcatcaaccacagcgtggacaagaagggcaactaccactacctggtgaagtggagggacctgccctatgaccagagcacctgggaggaggatgagatgaacatcccagaatatgaggagcacaagcagagctactggaggcaccgggagctgatcatgggagaggaccctgcccagcccaggaagtacaagaagaagaagaaggagctgcagggagatggcccccccagcagccccaccaatgaccccaccgtgaagtatgagacccagccccgcttcatcacagccaccggcggcaccctgcacatgtaccagctggagggcctgaactggctgcgcttctcctgggcccagggcacagacaccatcctggctgatgagatgggcctgggcaagaccatccagaccatcgtgttcctgtacagcctgtacaaggagggccacaccaagggccccttcctggtgtctgcccccctgagcaccatcatcaactgggagcgggagttccagatgtgggcccccaagttctacgtggtgacctacacaggagacaaggacagccgggccatcatccgggagaatgagttctcctttgaggacaatgccatcaagggcggcaagaaggccttcaagatgaagcgggaggcccaggtgaagttccacgtgctgctgaccagctatgagctgatcaccatcgaccaggccgccctgggcagcatccgctgggcctgcctggtggtggatgaggcccaccggctgaagaacaaccagagcaagttcttccgggtgctgaatggctacaagattgaccacaagctgctgctgaccggcacccccctgcagaacaacctggaggagctgttccacctgctgaacttcctgaccccagagcgcttcaacaacctggagggcttcctggaggagtttgctgacatcagcaaggaggaccagatcaagaagctgcatgacctgctgggcccccacatgctgcggcggctgaaggcagatgtgttcaagaacatgcctgccaagacagagctgattgtgcgggtggagctgagccccatgcagaagaagtactacaagtacatcctgaccaggaactttgaggccctgaacagcagaggaggcggcaaccaggtgtccctgctgaacatcatgatggacctgaagaagtgctgcaaccacccctacctgtttcctgtggccgccatggagagccccaagctgcccagcggggcctatgagggcggggccctgatcaagagcagcggcaagctgatgctgctgcagaagatgctgaggaagctgaaggagcagggccaccgggtgctgatcttcagccagatgaccaagatgctggacctgctggaggacttcctggactatgagggctacaagtatgaaagaattgatggcggcatcactggagccctgcggcaggaggccatcgaccgcttcaatgcccctggggcccagcagttctgcttcctgctgagcacccgggccggcggcctgggcatcaacctggccacagctgacaccgtcatcatctttgacagcgactggaacccccacaatgacatccaggccttcagccgggcccacagaattggccaggccaacaaggtgatgatctacagatttgtgacccgggcctctgtggaggagcgcatcacccaggtggccaagaggaagatgatgctgacccacctggtggtgcggcccggcctgggcagcaaggccggctccatgagcaagcaggagctggatgacatcctgaagtttggaacagaggagctgttcaaggatgaaaatgaaggagagaacaaggaggaggacagcagcgtcatccactatgacaatgaggccatcgcccggctgctggacaggaaccaggatgccacagaggacacagatgtgcagaacatgaatgagtacctgagcagcttcaaggtggcccagtatgtggtgcgggaggaggacaagattgaggagattgaaagagagatcatcaagcaggaggagaatgtggaccctgactactgggagaagctgctgcggcaccactatgagcagcagcaggaggacctggccaggaacctgggcaagggcaagagggtgaggaagcaggtgaactacaatgatgctgcccaggaggaccaggacaaccagagcgagtacagcgtgggcagcgaggaggaggatgaggactttgatgagaggcctgagggccggcggcagagcaagaggcagctgagaaatgagaaggacaagcccctgccccccctgctggcccgggtgggcggcaacatcgaggtgctgggcttcaacacccggcagaggaaggccttcctgaatgctgtgatgcgctggggcatgccaccccaggatgccttcaccacccagtggctggtgcgggacctgcggggcaagacagagaaggagttcaaggcctacgtgtccctcttcatgaggcacctgtgtgagcccggggctgatggcagcgagacctttgctgatggagtgccccgggagggcctgagccggcagcaggtgctgacccgcatcggcgtgatgagcctggtgaagaagaaggtgcaggagtttgagcacatcaatggccgctggagcatgcctgagctgatgccagaccccagcgctgacagcaagaggagcagccgggccagcagccccaccaagaccagccccaccaccccagaggccagcgccaccaacagcccctgcaccagcaagccagccaccccagcccccagcgagaagggggagggcatccgcacccccctggagaaggaggaggccgagaaccaggaggagaagccagagaagaacagcagaattggagagaagatggagacagaagcagatgcccccagccctgcccccagcctgggggagcggctggagcccaggaagatccccctggaggatgaggtgcctggggtgcctggagagatggagcctgagcccggctacagaggagaccgggagaagtcagaagatgtgaagggggaccgggagctgcggcccggccccagagatgagcccaggagcaatggaagaagagaggagaagacagagaagccccgcttcatgttcaacattgctgatggcggcttcacagagctgcacaccctgtggcagaatgaggagagagctgccatcagcagcggcaagctgaatgagatctggcacagaagacatgactactggctgctggccggcatcgtgctgcacggctacgcccgctggcaggacatccagaatgatgcccagtttgccatcatcaatgagcccttcaagacagaggccaacaagggcaacttcctggagatgaagaacaagttcctggcccggcgcttcaagctgctggagcaggccctggtgattgaggagcagctgcggcgggccgcctacctgaacctgagccaggagcccgcccacccagccatggccctgcacgccaggtttgctgaggctgaatgtctggccgagagccaccagcacctgagcaaggagagcctggccggcaacaagccagccaatgctgtgctgcacaaggtgctgaaccagctggaggagctgctgagtgacatgaaggcagatgtgacccggctgcctgccaccctgagccgcatcccccccatcgccgcccggctgcagatgtctgagaggagcatcctgagccggctggccagcaagggcacagagccccaccccaccccagcctacccacctggcccctatgccaccccacctggctatggagctgccttctctgctgcccctgtgggcgccctggccgccgccggggccaactacagccagatgcctgctggcagcttcatcacagctgccaccaacggcccccctgtgctggtgaagaaggagaaggagatggtgggcgccctggtgtctgatggcctggacaggaaggagccccgggccggggaggtgatctgcattgatgactag

SEQ ID NO: 159817 - DNA, 5901 bp, Artificial Sequence
  derived and/or modified sequence
atgaaggccgccgacaccgtgatcctgtgggcccggagcaagaacgatcagctccgcatctcctttccgcccggcctatgttggggcgaccgtatgcctgacaaggatgatattagattattgccctcggctctgggagtcaagaagaggaaacgcgggcctaaaaaacaaaaagagaataagcctgggaaaccccgcaagagaaagaaacgggactctgaggaagagtttggatcagagcgtgacgagtaccgcgagaaatcagagtccggtggctcagaatacggaactgggcctggaagaaagcggaggcgcaaacatcgagagaagaaggagaaaaagacaaagaggcgaaagaagggcgaaggcgatggcgggcagaaacaagtggagcagaagagcagtgccaccctgctccttacttgggggctggaggatgttgagcacgtgttttctgaggaggattatcacactctaactaattacaaggcattttcccagtttatgcggccccttatagcaaagaagaaccccaagatcccaatgagcaagatgatgactatcttaggggccaaatggcgggagttcagtgctaacaatccctttaaaggtagcgccgcggccgtcgccgctgccgccgctgctgcggcagcagcggtcgccgaacaggtctccgcagcagtctcaagcgcaacacctattgcgccaagcgggccacccgctctacctcccccaccggctgcggacatccagcctccacctatccggagggccaagacgaaagagggcaaagggcctggacacaaaaggcgatccaaatccccccgagtcccagacgggcggaagaagctccgcggtaagaagatggcacccctgaaaattaaattaggcttgctggggggcaaacgaaaaaaaggcggcagctatgtttttcagtctgatgagggtcccgagccagaggcggaggaatctgatctcgatagcggatctgtgcattctgcctcgggacggccagacggccccgtccgaactaagaagttgaaaagaggccgccctggtaggaagaagaagaaggtgctcggatgtcccgctgttgcgggtgaggaggaggtcgatggttacgagaccgaccaccaggattattgcgaggtctgtcagcaaggcggagagatcatactctgcgacacctgtccacgggcttatcaccttgtttgtcttgaccccgagcttgatagggcccccgaggggaagtggagttgccctcattgcgaaaaagagggcgtccagtgggaagccaaagaggaagaagaggagtacgaggaggaaggtgaagaggagggcgaaaaggaggaagaagatgaccatatggagtactgtcgagtttgcaaagatgggggtgagctgctatgttgtgatgcatgcattagctcgtaccacatccactgtctcaacccccctctaccggacatcccaaatggtgagtggctttgtcctagatgcacttgcccagtgctgaagggtagagtgcagaaaatcctccattggaggtggggcgagccgcccgtcgccgtccctgccccccagcaggctgacggaaatcccgacgtgccacctcccagacctctgcaaggcagatctgagagagagttctttgtgaagtgggtgggtctgtcgtactggcattgctcctgggcaaaagagctgcagctggaaatttttcacctggtcatgtaccggaactatcagcgaaaaaacgatatggacgaaccccccccgcttgattatggctctggggaggacgatggcaagtctgacaaacggaaggttaaagaccctcactacgccgagatggaagagaaatactacaggttcggaataaaacccgagtggatgactgtacaccgtatcattaatcattccgtggacaagaagggtaattaccactacctggtaaagtggcgcgacctcccatacgatcagtccacttgggaagaggacgagatgaacattcccgaatatgaggaacacaagcaatcatattggcggcaccgggagctgattatgggggaggatcccgcccagcccagaaagtacaagaagaaaaagaaagagcttcagggcgatggccccccatcttcccccaccaatgaccccactgtcaagtatgagacccaacctagattcatcaccgccaccgggggcaccttacacatgtaccagctggaagggctgaactggctgcggttcagttgggctcaagggacggatacaattttggccgacgaaatgggacttgggaaaaccatccaaactatcgtcttcctctactcgctgtataaggaggggcacacgaagggcccttttttggtcagtgcccccttgtctactattataaattgggaacgtgagtttcagatgtgggccccaaaattctacgtggtgacgtacacgggcgataaggattctcgggccattattcgggagaatgaattcagcttcgaagataacgccatcaaaggcggaaaaaaagcttttaaaatgaagagagaggcccaggttaagttccacgtgctgctgacctcctacgagctcataactatcgaccaggccgccctgggaagcatcaggtgggcctgtttggtagtagatgaggcccaccgcctgaagaacaaccaaagcaagttttttcgggtgttaaacggatacaagatcgaccacaagttgctgctgacagggacccctctgcaaaacaatctggaagagctgttccacctcctcaattttctaaccccggagcgtttcaacaacttagagggtttcctcgaggagtttgccgatatctctaaggaggatcaaattaaaaaactgcacgacctcctcggacctcacatgctgcgtagattgaaagccgacgtttttaagaacatgcctgccaaaaccgagctcattgtgagagtggaactgtcacctatgcagaagaagtactataagtacattttgacccggaacttcgaagctctgaattcaagaggcgggggaaatcaggtgtctttgcttaacatcatgatggacctcaaaaagtgctgtaaccacccttatctctttcctgtggcagccatggagagccctaagctcccttctggagcatacgaagggggagctttgataaagagcagtggcaagcttatgcttctgcagaaaatgctccggaagttgaaggagcagggtcatagggtgttgattttttcacagatgacgaagatgctagacttactggaggatttcttggattacgaaggatacaagtatgaacgcattgatgggggcatcactggggccctccggcaggaggctatcgaccgattcaatgctccaggagcgcaacaattctgtttcctactttctacaagagcagggggtttgggcatcaacctggccaccgccgacactgttataattttcgatagcgattggaacccccacaacgatattcaggccttctctagggcccaccgcatcgggcaggccaacaaggttatgatataccggttcgtaacccgcgcgtcggtagaggaacgtattacccaggtcgccaagcgcaagatgatgctgacccacctggttgtccggccaggtctggggagcaaagccggaagtatgagcaaacaagagttggatgatatcctaaaatttggtactgaagagctgtttaaagatgagaacgaaggcgaaaacaaagaggaggactcaagcgtgatacactatgataatgaggcgattgcacgactgcttgatagaaatcaggacgcaacagaggacaccgatgtgcaaaacatgaacgagtacctcagctcattcaaagttgctcagtacgttgtgcgggaagaggataagattgaggaaatcgagcgggagatcataaagcaggaagagaatgtggatcccgactactgggaaaagctccttaggcaccactatgaacaacagcaggaggacctagcgcgtaacttaggaaagggaaagagggtgaggaagcaagtgaactataacgatgcggctcaagaggaccaggacaatcagtccgaatacagtgtgggttcagaggaggaggacgaggactttgatgagaggccggagggcagaaggcagtctaagcggcagctgcgaaacgagaaagataaaccgctcccccccctcctcgcgcgtgttggaggcaatattgaggtgttgggcttcaacactaggcagcgtaaggctttcctcaacgcggtgatgaggtggggaatgccaccacaggacgcgttcactactcagtggctggttcgagatctcagagggaaaacagagaaagagttcaaggcatacgtgtccttatttatgagacacctctgcgagcccggcgctgacggcagtgaaacgtttgcagacggggtgccccgcgaaggcctgtctaggcagcaggtgctgacccggatcggagtgatgagcctggtcaaaaagaaagtccaagaattcgagcatattaatggccgctggtcaatgcctgagcttatgcccgatccttccgcagactccaagcgcagcagccgggcctctagccctaccaagacgtccccgactaccccagaagcttccgcaacaaactccccatgtacatcaaaacctgctacgcctgcaccttctgaaaaaggggagggaattcgcacaccacttgagaaagaagaggctgaaaaccaggaagagaagcctgaaaaaaacagtcggattggggagaagatggaaactgaggccgacgcccctagccctgcaccttctctcggggaacgattggaaccaagaaagatcccactggaagacgaagtccccggcgtgccgggcgagatggagcctgaacccggctatcgcggagacagagagaagtccgaggacgtgaagggggatagggaactgcgacccggaccaagggacgaacctcggtcgaatggccggagggaggaaaagaccgagaagccacgatttatgttcaacatcgcagatgggggcttcacagagctacataccttgtggcagaatgaggagcgcgccgcaatttccagcggcaaattgaacgaaatttggcaccggcgccatgactactggcttcttgcagggattgtccttcacgggtatgctaggtggcaggacatccagaatgatgcgcagttcgcaattattaacgaaccatttaagacagaagccaataagggcaattttctcgaaatgaagaacaagtttctagccaggcgatttaaactgctggagcaggccctggtcattgaagagcagcttagaagggctgcttatttgaacctcagccaagagcccgcccatcccgcaatggcacttcacgctcgatttgccgaggctgaatgcttagcagagagtcatcagcaccttagcaaggagagcctggcggggaataagccagctaacgccgtgctacataaggtactgaaccagctggaggagctcctctccgacatgaaggctgacgttactcgactgcccgccacactgtctaggatcccaccaatcgcagctcggctccaaatgagtgaaaggagcatactgtctcggctggcttctaaaggcacggagcctcacccgactccagcataccctcctgggccctacgcgacgcccccgggatacggcgcagcctttagcgctgccccggtgggtgctttggccgcagcgggtgctaattatagccagatgcctgccgggtccttcatcaccgcagccacaaacggtccccccgtcctcgtgaaaaaggaaaaagaaatggttggcgcccttgtctcagacggtctcgaccggaaggagcctagggccggagaagtcatctgcattgatgactag

SEQ ID NO: 159818 - DNA, 5900 bp, Artificial Sequence
  derived and/or modified sequence
atgaaagccgcagacactgtgattctctgggctcggtctaaaaacgaccagctccgaatttcattcccaccgggattatgttggggagatagaatgcccgacaaggatgacattaggctgcttccctctgctctgggtgtcaagaaaaggaaacgcggacctaaaaagcagaaggagaacaagccagggaaaccacgtaagcgtaagaagcgagatagcgaagaggagttcggcagcgaacgcgacgagtatagggaaaagagcgagtctgggggtagcgagtacggtactggtcctggcagaaagagaagacgcaaacaccgggagaagaaggagaaaaagactaaacgaagaaagaagggcgagggtgacgggggtcaaaagcaggtcgagcaaaagagctccgcaacattattgctgacatggggattagaggacgtggaacatgtgttctcagaggaggattaccacaccctgactaactacaaagccttctcacaatttatgcggccactcattgccaagaaaaatccaaagatccctatgtctaaaatgatgactatactaggcgctaagtggcgagaatttagtgctaacaatccattcaaggggtctgctgctgcagttgcagctgctgctgcagcagctgccgctgctgtcgctgagcaggtgtccgccgcagtttccagtgctacacccatcgccccttcaggccctccagccctccctccgcctccggcagccgacatacaaccccctcccattaggagagccaagaccaaagaggggaaaggtcccggtcacaagaggcgctccaagagtcctcgcgtgccagatgggcgtaaaaagctgcgcggaaagaagatggcacccctgaaaatcaagctgggtctcctcggcggaaaacggaaaaaaggtggttcatatgtgtttcagtctgatgaaggcccagagccagaggctgaagagtcagacctcgacagcggctccgtgcactctgcttcaggtaggcccgatggtcccgttcggaccaagaagttaaaacgcggtagacccggacggaagaaaaagaaggttttaggttgtccagcagtggcaggagaggaagaagttgacggttacgagacagatcaccaggactattgcgaagtgtgccagcaggggggagaaattatactgtgtgacacctgtccccgagcctaccacctggtgtgtcttgaccccgaactggaccgggctcctgaaggcaaatggtcttgtccacactgcgagaaagagggtgtgcagtgggaagctaaagaggaagaagaggagtacgaggaggagggcgaagaggaaggcgaaaaggaggaggaagatgaccacatggagtactgtagagtctgtaaagatggcggagagctcctctgctgtgatgcatgcatcagttcttaccacatccattgtctgaaccccccactccccgacatccccaatggcgaatggttatgcccccgatgtacgtgtccggtactgaaggggcgtgtacagaaaattctccattggcggtggggggagccacccgtcgctgtccccgcaccacaacaagccgacggaaacccagatgtgccccctcccaggccgctgcagggcagaagcgaacgggagttctttgtgaaatgggtggggctgagctattggcattgtagctgggctaaggaactccagctcgagatctttcacctggttatgtatcgcaattatcagcgcaaaaatgatatggacgaaccacctccactggattacggcagcggtgaggacgatggtaagtccgataagcggaaagtaaaggacccgcattatgccgagatggaggagaagtactatcggtttggaatcaagcccgaatggatgaccgtgcaccgaatcatcaaccatagcgtggacaaaaaaggtaactaccactacctggtgaaatggcgcgatcttccttatgatcagtcgacatgggaggaggacgagatgaatattccggagtacgaagagcataagcaatcctactggagacatcgggagctcatcatgggtgaagaccccgcacagcctagaaagtataaaaagaaaaaaaaggaactgcagggggatggacccccaagttcccccactaacgatccaacagtgaaatacgaaacacagccacgcttcattactgccacaggaggaactttgcacatgtaccagctcgaggggctgaactggctccgattcagttgggcacaggggactgataccatactggctgacgaaatggggcttggaaagaccatccagaccatcgtgtttctttacagcctgtacaaggagggtcacaccaaaggtccgttcctggttagcgctccccttagcactattatcaattgggagagagaatttcagatgtgggcacctaagttctatgtagtgacgtacaccggggacaaggactcgcgagctatcatccgtgaaaatgagttctcttttgaagacaatgccatcaaaggaggtaaaaaagcattcaagatgaaacgcgaagcacaggtgaaattccatgtgttattgacctcttatgaactcatcaccattgatcaggctgcattaggatcaatacggtgggcttgtctagtggtggacgaggctcacaggctcaaaaataatcagtccaagtttttcagggtcctaaacggatacaagattgatcacaagctattgctgactgggactcctttgcagaacaacttagaggaactgttccacctcctgaattttttgaccccagagcggtttaataacctggaagggttcctggaagaattcgccgacatcagtaaggaagatcagattaagaagctacacgacctactggggcctcacatgctacggaggttgaaggccgacgtgttcaagaacatgcctgctaaaacagagctgatcgtgcgcgtggagctcagtcccatgcagaaaaagtactacaagtatatactgacacggaactttgaggccctgaattcaaggggaggtggcaaccaggtgagccttctgaacatcatgatggatctgaagaaatgttgtaaccatccatatctcttcccggtggccgctatggagtcccccaaactcccttccggagcctatgagggaggcgctctaataaagagctctggcaagctcatgctcttacagaagatgctcaggaaactcaaggagcagggacaccgggtgctcatcttttcacaaatgacaaaaatgctcgacctcctcgaggatttcttggactatgagggatataaatatgagcgcatagatggtggcatcaccggcgctctccggcaggaagcaatcgacagatttaacgcacccggtgcccagcaattttgctttctgttgagcacccgagccggaggcctcggcatcaacctggcaacggctgatacagtaatcatctttgactctgattggaatcctcacaatgacattcaggcctttagtcgggctcacaggatcggacaggccaacaaggtgatgatttaccgatttgttacaagggcctctgtcgaagaaagaattacacaggtggcgaaaagaaagatgatgctgacacacctggtcgtccgtcccggtctgggcagtaaagccggttcaatgtcgaagcaagagctagatgacattctgaagtttggaactgaggaactgtttaaggacgagaatgagggtgagaacaaggaagaagacagtagtgttatccactatgacaacgaagccatcgcccgtctcctagatcgtaatcaggatgccactgaggacacagacgttcaaaatatgaatgaatatctcagcagctttaaggtagctcagtatgtggtccgcgaggaggataaaatcgaggagatagaacgggagataatcaagcaggaggagaacgtcgacccagattactgggagaagctcctgagacatcactacgaacagcagcaggaagacctggccaggaacctcggcaaaggcaaacgcgtccgcaaacaagttaactacaacgacgcagctcaagaagatcaagataaccaatctgaatactccgtcggctctgaggaggaagatgaggacttcgatgaaagaccagagggcaggcgccaaagtaagcgccagctccgtaatgagaaggataagcctctcccgcctctcctggctagggtgggaggtaacatagaggtcctggggttcaacacaaggcaacgtaaggctttcctgaacgccgtgatgaggtgggggatgcctcctcaagacgcctttaccacacagtggctggtgcgggacctcagagggaagaccgagaaggagttcaaggcgtacgtcagtctcttcatgagacacctgtgtgagccgggtgctgacggctctgagacctttgccgacggggtgccaagagagggcttgagccggcagcaagttcttacacggattggagtcatgagcctagtaaaaaaaaaagttcaagagtttgagcacatcaacggcagatggagcatgcctgagctgatgcccgatcctagcgcagactcaaaaaggtcctccagggcctccagtccaaccaagacgtcgcccaccacacctgaagcttctgctaccaattctccttgcacaagcaaacctgccaccccagcaccatccgaaaagggggagggaatccgaacgccactggagaaagaggaggctgaaaaccaggaagagaagccagagaaaaactccagaattggggaaaagatggagacagaggccgatgccccaagccctgcacccagcctcggggaacggctggagccccgtaagatccccttggaggacgaggttcccggagtcccaggagagatggaacccgagcctggttatcgcggtgaccgggaaaaaagcgaggacgtgaagggagacagggaactgcgaccgggtcctagggacgagcccagaagcaatggtaggcgagaagagaaaacggagaagccgaggtttatgttcaacatcgccgacggcggatttacagaattacacactctgtggcagaatgaggaaagggccgctattagtagtggcaagttaaacgaaatctggcacaggagacatgattattggctgttggccggaatagtgctccacggatacgcaaggtggcaggatatccagaatgacgcccagtttgccattattaatgaacccttcaagacagaagcaaataagggcaactttctggaaatgaagaacaagttcctcgctcgacgctttaaactgctcgagcaggcactcgtgatagaggagcagctgcgtagggctgcctacctcaacctgtcgcaagaacccgctcaccccgcaatggcactccacgctcgcttcgccgaagcagagtgtctcgcagagagccatcagcacctttccaaagaaagcttggccggaaacaaaccagcaaatgcagtgctccataaagtgttgaaccagctggaggagctgctttcagatatgaaagcggacgtgactcgcctgcctgctaccctgtccaggattccaccaatagcggctcgcctgcagatgtccgagcgcagtattttatcccggctcgcttctaagggcaccgagccgcatcccacacctgcctacccacctgggccttacgctacacctcccggatacggggctgccttcagtgcagcacctgttggcgcactcgcggcagccggtgccaattacagccagatgcctgcagggtcattcatcacagccgctaccaacggtcctcctgtcctcgtgaaaaaagaaaaggaaatggttggcgctctggtttcagatggcttagacagaaaggagccaagagcaggcgaagtgatttgcatcgacgatta

SEQ ID NO: 159819 - DNA, 7286 bp, Artificial Sequence
  derived and/or modified sequence
atctttgtttgggtctcccatactgcgtatagatgaatgggtcaggatatctggaacaaaatatggaggtgaagggtgagatcgggaaacaaagggtatggccccctagttcccaaagggagcagggagatgggaatagaattgaaggtaggttttaggctacttgggaggaggaatatttaggtaattgtggagactttctcctgtgtgatgaaggcggcagacactgtgatcctgtgggcaagaagtaaaaatgaccagctgaggatttcttttcctccaggactgtgttggggtgacaggatgcctgataaggatgacattcggctgctgccgtcagcattgggtgtgaagaagagaaaacgaggacccaagaagcagaaggagaacaagccaggaaaaccccgaaaacgcaagaagcgtgacagtgaggaggaatttggttctgagcgagatgagtaccgggagaagtcagagagtgggggcagtgaatatggaaccggaccgggtcggaaacgaagaaggaagcaccgagaaaaaaaggagaagaagacaaagcggcggaaaaagggggagggagatggggggcaaaagcaagtggaacagaagtcatcagcaactctgcttctgacctggggcctggaggatgtggagcatgtgttctctgaggaggattaccacacgctcaccaactacaaagccttcagccagttcatgaggcccctaattgctaagaagaatcctaagatcccaatgtctaagatgatgaccatccttggggccaaatggagagagttcagtgccaacaaccccttcaaggggtcagcagctgctgtggcggcggcagcggcagcagcagcagcagctgtagctgagcaggtgtcagctgctgtctcgtcggccacccccatagcaccctccggaccccccgcccttccaccaccccctgctgctgatatccagcccccacccatccgaagagccaaaaccaaagagggcaaaggtccaggccataagaggcggagtaagagcccccgagtgcctgatggacgcaagaagcttcggggaaagaaaatggcaccactcaaaataaaactagggcttctgggtggcaagaggaagaaaggaggctcgtatgtttttcagagcgacgaaggtcctgaaccagaggctgaggaatcagacctggacagtggcagtgtccacagtgcctcaggccggcctgatggccctgtccgcaccaagaaactaaagagaggccggccaggaaggaagaagaagaaggtcctgggctgtcctgcagtggccggggaggaggaggttgatggctacgagacggatcaccaggattactgtgaggtgtgccagcagggtggggaaattattctgtgtgacacctgccctcgtgcctaccacctcgtctgccttgatcctgagcttgaccgggctccagagggcaaatggagctgccctcactgtgagaaggagggggtccagtgggaggccaaggaggaagaagaagaatacgaagaggagggagaggaagaaggggagaaggaggaggaggatgatcacatggagtactgccgcgtatgcaaggacggcggggagctcctgtgctgtgacgcgtgcatctcctcctaccacattcattgtctaaaccctcccctgcctgacattcccaatggtgaatggctgtgtccccgatgcacatgccccgtgctgaagggtcgagtgcagaagatcctacattggcggtggggggagccacctgtagcagtgccagcccctcaacaggcagatggaaatccagatgtcccacccccccgtcctcttcaaggcagatcagagcgagagttctttgtcaagtgggtaggactatcctactggcactgctcctgggccaaggagcttcagctggaaatcttccatttggttatgtatcgaaactaccagcggaagaatgacatggatgagcccccacccctggactatggctccggcgaggatgatgggaagagcgacaagcgtaaagtgaaagacccgcactatgctgagatggaggagaagtactatcgttttggcatcaagccagagtggatgaccgtccaccgcatcatcaaccacagtgtggataaaaaggggaattaccactatctagtaaaatggagggacttaccatatgaccagtccacgtgggaggaagatgaaatgaatatccctgaatacgaagaacataagcaaagctactggagacaccgagaactaattatgggggaagaccctgcccagccccgcaagtataagaagaagaagaaggagctacagggtgatgggcctcccagttctcccactaatgatcctaccgtgaaatatgagactcagccacggtttatcacagccactggaggcaccctgcacatgtatcagttggaagggctgaactggctacgcttctcctgggcccagggcactgacaccattctagctgatgagatggggctaggcaagaccatacaaaccatcgtcttcctctactcactctacaaggagggccacacaaaaggtcccttcctggtgagtgccccactctctaccatcattaactgggagcgggagttccagatgtgggcacccaaattctatgtggtgacatacacgggtgacaaggacagccgggccatcattcgtgagaatgaattctcctttgaggacaatgccatcaaagggggcaagaaagcttttaagatgaagagggaggcacaggtgaagttccatgttctcctgacatcgtatgagctgatcaccattgatcaggcagcacttggttccatccgctgggcctgtcttgtggtagatgaggcccatcgactcaagaacaaccagtccaagtttttcagggttctcaatggttacaagatagatcataagttgctgctgacaggaaccccattgcagaataatctggaggagctcttccatctcctgaacttcctcaccccagagagatttaacaacttggagggcttcctggaggagtttgctgacatatccaaagaggaccagatcaagaaactgcatgatttgctggggccacacatgctgcggagactcaaggcagatgtctttaagaacatgccagccaagacagagctcatcgttcgggtggagctaagccccatgcagaagaaatactacaaatacatcctgactcgaaattttgaggccttgaattcacgaggtggtgggaaccaggtgtcgctgcttaatatcatgatggatcttaagaagtgctgcaaccatccatacctttttcccgtggctgctatggagtcccccaaactccccagtggggcttatgagggtggggcacttattaagtcgtctgggaagctcatgctgctccagaagatgctgcgaaagctgaaggagcaaggacaccgagtgctcatcttctcgcagatgaccaaaatgttagacttgcttgaggacttcttagactatgaaggctacaagtatgagcgcatcgatggtggtatcacgggtgccctgaggcaggaggccatcgatcggtttaatgctcctggggcccaacaattctgcttcctcctgtccacccgagctgggggcctgggcatcaatctggccactgctgacactgtcatcatctttgattctgactggaacccccataatgacatccaggcctttagccgggctcatcggattggccaggccaacaaagtgatgatttaccggtttgtgactcgcgcgtcagtggaagagcgaatcacacaagtggccaagagaaagatgatgctgacacacctggttgtgcggcctgggctgggctccaaggcaggctccatgtccaagcaggagcttgacgacattctcaaatttggcactgaagagctattcaaggatgaaaacgagggggagaacaaggaggaggacagcagtgtgattcattatgacaatgaggccatcgctcggctgttggaccggaaccaggatgcaactgaggacactgacgtgcagaacatgaatgagtatctcagctccttcaaggtggcacagtacgtcgtgcgggaagaagacaagattgaggaaattgagcgagagatcatcaagcaggaggagaatgtggaccctgactactgggagaagctgctgaggcatcactatgagcaacagcaggaagacctagcccggaatctaggcaagggcaagcgggttcgcaagcaagttaactacaatgatgctgctcaggaagaccaagacaaccagtcagagtactcggtgggttcagaggaggaggatgaagacttcgatgaacgtcctgaagggcgtagacagtcaaagaggcagctccggaatgagaaagataagccactgcctccactgctggcccgagtcgggggcaacattgaggtgctgggcttcaacacccgtcagcggaaggctttcctcaatgctgtgatgcgctgggggatgccaccacaggatgccttcaccacacagtggctggtgcgggacctgaggggcaagactgagaaggagtttaaggcctatgtgtctttgttcatgcgccatctgtgtgagcctggggcagacggctctgaaacctttgccgatggggtccctcgggagggactgagtcgccagcaggtgttgacccgcattggagtcatgtctctcgtcaaaaagaaggtgcaggagtttgagcacatcaatgggcgttggtcaatgccggaactgatgcctgaccccagcgccgattctaagcgctcctccagagcctcctctcctaccaaaacgtctcccaccactcctgaggcttctgctaccaacagtccctgcacctctaaacctgctactccagctccaagtgagaaaggagaaggcataaggacacctcttgagaaggaggaagctgaaaaccaggaggaaaagccagagaagaacagcagaattggggagaagatggagacagaggctgatgcccccagcccagccccatcacttggggagcggctggagccaaggaagattcctctagaggatgaggtgccaggggtgcctggagagatggagcctgaacctgggtaccgtggggacagagagaagtcagaagatgtaaaaggtgaccgggagcttcgaccagggcctcgagatgagccacggtccaatgggcgacgagaggaaaagacagagaagccccggttcatgttcaatatcgccgatggtggcttcacagagcttcacacactgtggcagaatgaggaacgggcagctatttcctcggggaaactcaatgagatctggcacagaagacatgactattggcttctggctgggattgtcctccatggctatgcacggtggcaggacatccagaatgatgctcaatttgccattatcaacgagccatttaaaactgaagccaataaggggaactttctggagatgaaaaataagttcctggcccggaggttcaagctcctggagcaggcgctggtgattgaggagcagctgcggcgggcggcctacctgaacctgtcgcaggagccggcgcaccccgccatggccctccacgcccgcttcgccgaggccgagtgcctggccgagagccaccagcacctctccaaggagtcgctggcggggaacaagccggccaacgccgtcctgcacaaggttctgaaccagctggaggagttgctgagcgacatgaaggcggacgtgacccgcctgccagccacgctgtcccgaataccccccatcgcagcccgccttcagatgtccgagcgcagcatcctcagccggctggccagcaagggcacggagcctcaccccacaccggcctacccgccgggtccctacgctacacctccggggtacggggcggccttcagcgccgcacccgtaggggccctggccgccgcaggcgccaattacagccagatgcctgcagggtccttcatcacagccgccaccaacggccctccagtgcttgtgaagaaggagaaggaaatggtgggggcattggtgtcagacgggctggatcggaaggagccccgagccggggaggtgatctgtatagacgactgactggatcccaggcctgcccttcacccaggccccgtccccgaggccgacccccagctcaagcgctggggcctgctgccagccctccaccttccccaccccttgggccatcactgggctaggaacccctttgcccctctctgcagctcctctcttcaagaagggccctttgtctttctccactcccacacacctttcccaccaagccttgaagactgtgctggtgagaagaagtctgggtgggagatggctggcagggtcttccaagtaccttcctcccacactgccaagtatacacaacttcccagtaaatggttgtggggaggaaagaggtggagcctccccagccgtttccctgcagaatcagctctgtctcatgtggaagtggagaatcagccttgcctggcctttaggaacttttgtggggaagagagctttgaagagaggagggggactttagagagggatgaaaatgagccctgggagggaggaagggacgaggaggggtggctgcatgttaccgtcccctacctctccccacgtggagggtggagcagttatgagggaggaagtcaactgctgttcagcctcagaataaaggtgccgttcactggctcagttacctcctgtgtaccggcatcttgtgttgggaatgttcccccctccctagggaccaaggaccacccctacaaaaagagtaatggttgggtgatactccctcaagccaaagaggagctccccaacctgttctagggacccaggtaacctagaagggtgggagagaatacaatgggccagatgtggtggaagcccagctctggggctcaggttcctggaagacttctactaccctccctcctcaaggcctggatacagactaaatttgtataagtcaggcaggggacctagtcagggtcttgggagctaccttgtcgttgggaccagagcaaaatagtggagggcaggctagggaaatgtgggcacatcccccctcccaggaggggccggggagagtggcagtttgcatggcgaaccccccacttcctctttgctgccccttcactttcttgctgcccctttcccagtctctcttcacacccactcctggtctgtcctgatcccctcttctgtatcaggtttattggttgtacatataaattatactttcctttctgtgt

SEQ ID NO: 159820 - DNA, 5901 bp, Artificial Sequence
  derived and/or modified sequence
atgaaggccgccgacaccgtgatcctgtgggccagaagcaagaacgaccagctgagaatcagcttcccccccggcctgtgctggggcgacagaatgcccgacaaggacgacatcagactgctgcccagcgccctgggcgtgaagaagagaaagagaggccccaagaagcagaaggagaacaagcccggcaagcccagaaagagaaagaagagagacagcgaggaggagttcggcagcgagagagacgagtacagagagaagagcgagagcggcggcagcgagtacggcaccggccccggcagaaagagaagaagaaagcacagagagaagaaggagaagaagaccaagagaagaaagaagggcgagggcgacggcggccagaagcaggtggagcagaagagcagcgccaccctgctgctgacctggggcctggaggacgtggagcacgtgttcagcgaggaggactaccacaccctgaccaactacaaggccttcagccagttcatgagacccctgatcgccaagaagaaccccaagatccccatgagcaagatgatgaccatcctgggcgccaagtggagagagttcagcgccaacaaccccttcaagggcagcgccgccgccgtggccgccgccgccgccgccgccgccgccgccgtggccgagcaggtgagcgccgccgtgagcagcgccacccccatcgcccccagcggcccccccgccctgccccccccccccgccgccgacatccagcccccccccatcagaagagccaagaccaaggagggcaagggccccggccacaagagaagaagcaagagccccagagtgcccgacggcagaaagaagctgagaggcaagaagatggcccccctgaagatcaagctgggcctgctgggcggcaagagaaagaagggcggcagctacgtgttccagagcgacgagggccccgagcccgaggccgaggagagcgacctggacagcggcagcgtgcacagcgccagcggcagacccgacggccccgtgagaaccaagaagctgaagagaggcagacccggcagaaagaagaagaaggtgctgggctgccccgccgtggccggcgaggaggaggtggacggctacgagaccgaccaccaggactactgcgaggtgtgccagcagggcggcgagatcatcctgtgcgacacctgccccagagcctaccacctggtgtgcctggaccccgagctggacagagcccccgagggcaagtggagctgcccccactgcgagaaggagggcgtgcagtgggaggccaaggaggaggaggaggagtacgaggaggagggcgaggaggagggcgagaaggaggaggaggacgaccacatggagtactgcagagtgtgcaaggacggcggcgagctgctgtgctgcgacgcctgcatcagcagctaccacatccactgcctgaacccccccctgcccgacatccccaacggcgagtggctgtgccccagatgcacctgccccgtgctgaagggcagagtgcagaagatcctgcactggagatggggcgagccccccgtggccgtgcccgccccccagcaggccgacggcaaccccgacgtgcccccccccagacccctgcagggcagaagcgagagagagttcttcgtgaagtgggtgggcctgagctactggcactgcagctgggccaaggagctgcagctggagatcttccacctggtgatgtacagaaactaccagagaaagaacgacatggacgagcccccccccctggactacggcagcggcgaggacgacggcaagagcgacaagagaaaggtgaaggacccccactacgccgagatggaggagaagtactacagattcggcatcaagcccgagtggatgaccgtgcacagaatcatcaaccacagcgtggacaagaagggcaactaccactacctggtgaagtggagagacctgccctacgaccagagcacctgggaggaggacgagatgaacatccccgagtacgaggagcacaagcagagctactggagacacagagagctgatcatgggcgaggaccccgcccagcccagaaagtacaagaagaagaagaaggagctgcagggcgacggcccccccagcagccccaccaacgaccccaccgtgaagtacgagacccagcccagattcatcaccgccaccggcggcaccctgcacatgtaccagctggagggcctgaactggctgagattcagctgggcccagggcaccgacaccatcctggccgacgagatgggcctgggcaagaccatccagaccatcgtgttcctgtacagcctgtacaaggagggccacaccaagggccccttcctggtgagcgcccccctgagcaccatcatcaactgggagagagagttccagatgtgggcccccaagttctacgtggtgacctacaccggcgacaaggacagcagagccatcatcagagagaacgagttcagcttcgaggacaacgccatcaagggcggcaagaaggccttcaagatgaagagagaggcccaggtgaagttccacgtgctgctgaccagctacgagctgatcaccatcgaccaggccgccctgggcagcatcagatgggcctgcctggtggtggacgaggcccacagactgaagaacaaccagagcaagttcttcagagtgctgaacggctacaagatcgaccacaagctgctgctgaccggcacccccctgcagaacaacctggaggagctgttccacctgctgaacttcctgacccccgagagattcaacaacctggagggcttcctggaggagttcgccgacatcagcaaggaggaccagatcaagaagctgcacgacctgctgggcccccacatgctgagaagactgaaggccgacgtgttcaagaacatgcccgccaagaccgagctgatcgtgagagtggagctgagccccatgcagaagaagtactacaagtacatcctgaccagaaacttcgaggccctgaacagcagaggcggcggcaaccaggtgagcctgctgaacatcatgatggacctgaagaagtgctgcaaccacccctacctgttccccgtggccgccatggagagccccaagctgcccagcggcgcctacgagggcggcgccctgatcaagagcagcggcaagctgatgctgctgcagaagatgctgagaaagctgaaggagcagggccacagagtgctgatcttcagccagatgaccaagatgctggacctgctggaggacttcctggactacgagggctacaagtacgagagaatcgacggcggcatcaccggcgccctgagacaggaggccatcgacagattcaacgcccccggcgcccagcagttctgcttcctgctgagcaccagagccggcggcctgggcatcaacctggccaccgccgacaccgtgatcatcttcgacagcgactggaacccccacaacgacatccaggccttcagcagagcccacagaatcggccaggccaacaaggtgatgatctacagattcgtgaccagagccagcgtggaggagagaatcacccaggtggccaagagaaagatgatgctgacccacctggtggtgagacccggcctgggcagcaaggccggcagcatgagcaagcaggagctggacgacatcctgaagttcggcaccgaggagctgttcaaggacgagaacgagggcgagaacaaggaggaggacagcagcgtgatccactacgacaacgaggccatcgccagactgctggacagaaaccaggacgccaccgaggacaccgacgtgcagaacatgaacgagtacctgagcagcttcaaggtggcccagtacgtggtgagagaggaggacaagatcgaggagatcgagagagagatcatcaagcaggaggagaacgtggaccccgactactgggagaagctgctgagacaccactacgagcagcagcaggaggacctggccagaaacctgggcaagggcaagagagtgagaaagcaggtgaactacaacgacgccgcccaggaggaccaggacaaccagagcgagtacagcgtgggcagcgaggaggaggacgaggacttcgacgagagacccgagggcagaagacagagcaagagacagctgagaaacgagaaggacaagcccctgccccccctgctggccagagtgggcggcaacatcgaggtgctgggcttcaacaccagacagagaaaggccttcctgaacgccgtgatgagatggggcatgcccccccaggacgccttcaccacccagtggctggtgagagacctgagaggcaagaccgagaaggagttcaaggcctacgtgagcctgttcatgagacacctgtgcgagcccggcgccgacggcagcgagaccttcgccgacggcgtgcccagagagggcctgagcagacagcaggtgctgaccagaatcggcgtgatgagcctggtgaagaagaaggtgcaggagttcgagcacatcaacggcagatggagcatgcccgagctgatgcccgaccccagcgccgacagcaagagaagcagcagagccagcagccccaccaagaccagccccaccacccccgaggccagcgccaccaacagcccctgcaccagcaagcccgccacccccgcccccagcgagaagggcgagggcatcagaacccccctggagaaggaggaggccgagaaccaggaggagaagcccgagaagaacagcagaatcggcgagaagatggagaccgaggccgacgcccccagccccgcccccagcctgggcgagagactggagcccagaaagatccccctggaggacgaggtgcccggcgtgcccggcgagatggagcccgagcccggctacagaggcgacagagagaagagcgaggacgtgaagggcgacagagagctgagacccggccccagagacgagcccagaagcaacggcagaagagaggagaagaccgagaagcccagattcatgttcaacatcgccgacggcggcttcaccgagctgcacaccctgtggcagaacgaggagagagccgccatcagcagcggcaagctgaacgagatctggcacagaagacacgactactggctgctggccggcatcgtgctgcacggctacgccagatggcaggacatccagaacgacgcccagttcgccatcatcaacgagcccttcaagaccgaggccaacaagggcaacttcctggagatgaagaacaagttcctggccagaagattcaagctgctggagcaggccctggtgatcgaggagcagctgagaagagccgcctacctgaacctgagccaggagcccgcccaccccgccatggccctgcacgccagattcgccgaggccgagtgcctggccgagagccaccagcacctgagcaaggagagcctggccggcaacaagcccgccaacgccgtgctgcacaaggtgctgaaccagctggaggagctgctgagcgacatgaaggccgacgtgaccagactgcccgccaccctgagcagaatcccccccatcgccgccagactgcagatgagcgagagaagcatcctgagcagactggccagcaagggcaccgagccccaccccacccccgcctacccccccggcccctacgccaccccccccggctacggcgccgccttcagcgccgcccccgtgggcgccctggccgccgccggcgccaactacagccagatgcccgccggcagcttcatcaccgccgccaccaacggcccccccgtgctggtgaagaaggagaaggagatggtgggcgccctggtgagcgacggcctggacagaaaggagcccagagccggcgaggtgatctgcatcgacgactag

SEQ ID NO: 159821 - protein, 483 aa, Artificial Sequence
  derived and/or modified sequence
MSYPQGYLYQPSASLALYSCPAYSTSVISGPRTDELGRSSSGSAFSPYAGSTAFTAPSPGYNSHLQYGADPAAAAAAAFSSYVGSPYDHTPGMAGSLGYHPYAAPLGSYPYGDPAYRKNATRDATATLKAWLNEHRKNPYPTKGEKIMLAIITKMTLTQVSTWFANARRRLKKENKMTWTPRNRSEDEEEEENIDLEKNDEDEPQKPEDKGDPEGPEAGGAEQKAASGCERLQGPPTPAGKETEGSLSDSDFKEPPSEGRLDALQGPPRTGGPSPAGPAAARLAEDPAPHYPAGAPAPGPHPAAGEVPPGPGGPSVIHSPPPPPPPAVLAKPKLWSLAEIATSSDKVKDGGGGNEGSPCPPCPGPIAGQALGGSRASPAPAPSRSPSAQCPFPGGTVLSRPLYYTAPFYPGYTNYGSFGHLHGHPGPGPGPTTGPGSHFNGLNQTVLNRADALAKDPKMLRSQSQLDLCKDSPYELKKGMSDI

SEQ ID NO: 159822 - protein, 146 aa, Artificial Sequence [sequence omitted]

SEQ ID NO: 159823 - DNA, 2078 bp, Artificial Sequence
  derived and/or modified sequence
atgtcctatccgcagggctacttgtaccagccgtccgcctcgctggcgctctactcgtgcccggcgtacagcaccagcgtcatttcggggccccgcacggatgagctcggccgctcttcttcgggctccgcgttctcgccctacgctggctcgactgccttcacggcgccctcgccgggctacaactcgcacctccagtacggcgccgaccccgcggccgccgccgccgccgccttctcctcgtacgtgggctctccctacgaccacacacccggcatggcgggctccttggggtaccatccttacgcggcgcccctgggatcgtacccttacggggacccagcgtaccggaagaacgccacaagggacgccacggctaccctcaaggcctggctcaacgagcaccgcaagaacccctaccccaccaagggcgagaagatcatgctggccatcatcaccaagatgaccctcacccaggtgtccacctggttcgccaacgcgcgccggcgcctcaagaaagagaataaaatgacgtggacgccgcggaaccgcagcgaggacgaggaagaggaggagaacattgacctggagaagaacgacgaggacgagccccagaagcccgaggacaagggcgaccccgagggccccgaagcaggaggagctgagcagaaggcggcttcgggctgcgaacggcttcagggaccacccacccctgcaggcaaggagacggagggcagcctcagcgactcggattttaaggagccgccctcggagggccgcctcgacgcgctgcagggccccccccgcaccggcgggccctccccggctgggccagcggcggcgcggctggcggaggacccggcccctcactaccccgccggagcgccggcgcccggcccgcatccagccgcgggcgaggtgcctccgggtcccggcgggccctcggttatccattcgccgcctccgccgccgcctcctgcggtgctcgccaagcccaaactgtggtctttggcagagatcgccacatcgtcggacaaggtcaaggacgggggcggcgggaacgagggctctccatgcccaccgtgtcccgggcccatagccgggcaagccctaggaggcagccgggcgtcgccggccccggcgccgtcacgctcgccctcggcgcagtgtccttttccaggcgggacggtgctgtcccggcctctctactacaccgcgcccttctatcccggctacacgaactatggctccttcggacaccttcatggccacccggggcccgggccaggccccacaaccggtccggggtctcatttcaatggattaaaccagaccgtgttgaaccgagcggacgctttggctaaagacccgaaaatgttgcggagccagtctcagctagacctgtgcaaagactctccctatgaattgaagaaaggtatgtccgacatttaacgcgggctgcgtcggtcccggacttttctaatttattaaaaacatggccttggcagttatttttccatcaccgagagagagagacagagagagaaaataaactacccctcctattcagaagtttatagtttatggagatggatgacataaaaatgtaaacatctccacacaaaaaaaaaaatgtcttaaccaaccgaaaagaaaaattaaaaaaggatttgtattaaatcttattctgtatatttaatgtagcatttttgtatttaaattgataattcaatatctttgaagtaaattatgaaatcaagacacctgtacaggcatttaatgtttttttgtaatataaatatatacatttgtgtttcccccaaaactgtttcatagttaaaaaatacaagtttaatttaattttttacacctattgattctgctgggtatgagctaaagtattacagaaaggaaacaggttatactcttagatttaaaaagtgaaagaaactgcaggcgcctttgtaaaatgcaaaatatttaattaaaagagattttaacataatgagagccactcattactttttagaagcctcaataaactgtccattgccttggtcaaaaaaaaaaaaaaaaaa

SEQ ID NO: 159824 - DNA, 1452 bp, Artificial Sequence
  derived and/or modified sequence
atgagctatccccaagggtatctatatcagcccagcgcatcactggccctatacagctgtcccgcttattctacgtcagtcatcagcggaccaaggactgatgagctcggaagaagctcaagtggtagtgcgttttctccctatgccggatcaacggcatttaccgctccatccccaggatataattcccatttgcagtatggagctgaccctgcagccgccgcggcagccgcgttttcctcctacgttgggtctccatacgatcacacccccggaatggctgggagcttgggataccatccttatgccgcgccgctggggtcttatccctacggagaccctgcctatcgaaagaacgccacacgggacgcaacagcgaccttgaaggcctggcttaatgaacatcgaaagaatccctacccgactaagggggaaaaaatcatgttggcaatcattacaaagatgacactgacccaggtgtcaacttggttcgccaatgcacggcggcgcctcaagaaagagaataaaatgacatggaccccgagaaaccgtagtgaagatgaagaagaggaggaaaatattgacctcgagaagaacgatgaagatgaacctcagaagcctgaagataaaggggatccagaaggcccggaggccgggggcgctgaacagaaggccgccagcggatgtgagaggctgcagggaccccctactccagcaggaaaggaaaccgagggctcattaagcgattcagacttcaaggaaccaccgtcggaagggagactggacgcccttcaaggacctccaaggacaggaggcccctctccggccggtccggccgcagccaggctagctgaggatcctgctccccactatcctgcaggcgccccggctccggggccgcatccagctgctggtgaggtccccccaggtcccggggggccttctgttatacactcccccccacccccgcctcctccagcagtcttggctaagcctaagctgtggagtttggccgagattgccacaagcagcgataaggtcaaggatgggggtggggggaatgaagggagtccttgccccccttgtcctggtcctattgctgggcaggccctgggcgggagccgggcgagtcctgccccagcaccgtctcgaagcccctctgcccagtgcccttttcctgggggcaccgtgctatctagacccctgtactacaccgcccccttttatcctggctatactaactacggaagcttcgggcaccttcatgggcatccaggtcctggcccagggccgaccaccggtcccggcagccattttaacgggctgaaccagactgtgctcaacagggctgacgctctcgcaaaggaccccaagatgctcaggtcccagtctcagttagatctgtgtaaagacagcccatacgaattgaagaaggggatgagcgacatttag

SEQ ID NO: 159825 - DNA, 2401 bp, Artificial Sequence
  derived and/or modified sequence
cttagcatcttggcaggacctttgcaaaggcaaaagcagagccccccggtgcaaagagcgaggggaaaaaagagaaagcagcaagggaggggaggggaggggaaaaaaagcccagctggggcgagcgaggcgcgcagaggagcgggcgcggcggtcgcagccggaggcgcgcgggaagccagcgaggaggcgccgcgggccggagccccggagccggggccagaggagcggcggcccagggcagccagaggccaggtgcccgcccgctcgccctcgcagggcgccgcccggctcgttggcggccgcggcgcggcgcgccccatgcccgtgtgtggccatgtcctatccgcagggctacttgtaccagccgtccgcctcgctggcgctctactcgtgcccggcgtacagcaccagcgtcatttcggggccccgcacggatgagctcggccgctcttcttcgggctccgcgttctcgccctacgctggctcgactgccttcacggcgccctcgccgggctacaactcgcacctccagtacggcgccgaccccgcggccgccgccgccgccgccttctcctcgtacgtgggctctccctacgaccacacacccggcatggcgggctccttggggtaccatccttacgcggcgcccctgggatcgtacccttacggggacccagcgtaccggaagaacgccacaagggacgccacggctaccctcaaggcctggctcaacgagcaccgcaagaacccctaccccaccaagggcgagaagatcatgctggccatcatcaccaagatgaccctcacccaggtgtccacctggttcgccaacgcgcgccggcgcctcaagaaagagaataaaatgacgtggacgccgcggaaccgcagcgaggacgaggaagaggaggagaacattgacctggagaagaacgacgaggacgagccccagaagcccgaggacaagggcgaccccgagggccccgaagcaggaggagctgagcagaaggcggcttcgggctgcgaacggcttcagggaccacccacccctgcaggcaaggagacggagggcagcctcagcgactcggattttaaggagccgccctcggagggccgcctcgacgcgctgcagggccccccccgcaccggcgggccctccccggctgggccagcggcggcgcggctggcggaggacccggcccctcactaccccgccggagcgccggcgcccggcccgcatccagccgcgggcgaggtgcctccgggtcccggcgggccctcggttatccattcgccgcctccgccgccgcctcctgcggtgctcgccaagcccaaactgtggtctttggcagagatcgccacatcgtcggacaaggtcaaggacgggggcggcgggaacgagggctctccatgcccaccgtgtcccgggcccatagccgggcaagccctaggaggcagccgggcgtcgccggccccggcgccgtcacgctcgccctcggcgcagtgtccttttccaggcgggacggtgctgtcccggcctctctactacaccgcgcccttctatcccggctacacgaactatggctccttcggacaccttcatggccacccggggcccgggccaggccccacaaccggtccggggtctcatttcaatggattaaaccagaccgtgttgaaccgagcggacgctttggctaaagacccgaaaatgttgcggagccagtctcagctagacctgtgcaaagactctccctatgaattgaagaaaggtatgtccgacatttaacgcgggctgcgtcggtcccggacttttctaatttattaaaaacatggccttggcagttatttttccatcaccgagagagagagacagagagagaaaataaactacccctcctattcagaagtttatagtttatggagatggatgacataaaaatgtaaacatctccacacaaaaaaaaaaatgtcttaaccaaccgaaaagaaaaattaaaaaaggatttgtattaaatcttattctgtatatttaatgtagcatttttgtatttaaattgataattcaatatctttgaagtaaattatgaaatcaagacacctgtacaggcatttaatgtttttttgtaatataaatatatacatttgtgtttcccccaaaactgtttcatagttaaaaaatacaagtttaatttaattttttacacctattgattctgctgggtatgagctaaagtattacagaaaggaaacaggttatactcttagatttaaaaagtgaaagaaactgcaggcgcctttgtaaaatgcaaaatatttaattaaaagagattttaacataatgagagccactcattactttttagaagcctcaataaactgtccattgccttggtcaaaa

SEQ ID NO: 159826 - DNA, 1452 bp, Artificial Sequence
  derived and/or modified sequence
atgagctacccccagggctacctgtaccagcccagcgccagcctggccctgtacagctgcccagcctacagcaccagcgtcatcagcggccccaggacagatgagctgggccgcagcagcagcggcagcgccttcagcccctatgccggcagcacagccttcaccgcccccagccctggctacaacagccacctgcagtatggagctgaccctgctgctgctgctgctgctgccttcagcagctatgtgggcagcccctatgaccacaccccaggcatggccggcagcctgggctaccacccctatgctgcccccctgggcagctacccctatggagaccctgcctacaggaagaatgccaccagagatgccacagccaccctgaaggcctggctgaatgagcacaggaagaacccctaccccaccaagggggagaagatcatgctggccatcatcaccaagatgaccctgacccaggtgtccacctggtttgccaatgcccggcggcggctgaagaaggagaacaagatgacctggacccccaggaacagaagtgaagatgaggaggaggaggagaacatcgacctggagaagaatgatgaagatgagccccagaagccagaggacaagggggaccctgagggccctgaggccggcggcgctgagcagaaggccgccagcggctgtgagcggctgcagggcccccccaccccagctgggaaggagacagagggcagcctgagtgacagcgacttcaaggagcccccatctgagggccgcctggatgccctgcagggcccccccaggactggaggccccagccctgctggccctgctgctgcccggctggctgaagatcctgccccccactacccagctggggccccagcccctggcccccaccctgctgctggggaggtgcccccaggccctgggggccccagcgtcatccacagccccccacctcctcctcctcctgctgtgctggccaagcccaagctgtggagcctggccgagatcgccaccagcagtgacaaggtgaaggatggcggcggcggcaatgaaggcagcccctgccccccctgccccggccccatcgccggccaggccctgggcggcagccgggccagccctgccccagcccccagccgcagccccagcgcccagtgccccttccctgggggcaccgtgctgagccggcccctgtactacacagcccccttctacccaggctacaccaactacggcagctttggccacctgcacggccaccctggccctggccctggccccaccactggacctggcagccacttcaacggcctgaaccagacagtgctgaacagagcagatgccctggccaaggaccccaagatgctgcggagccagagccagctggacctgtgcaaggacagcccctatgagctgaagaagggcatgtctgacatctag

SEQ ID NO: 159827 - DNA, 1452 bp, Artificial Sequence
  derived and/or modified sequence
atgagctacccccagggctacctgtaccagcccagcgccagcctggctctgtacagttgccctgcatattcgactagtgttataagcggtccccgtacagatgagttgggccgctcgtctagcggatctgctttctctccctacgctggcagcaccgccttcaccgcccccagcccgggttacaactcccacctgcagtacggcgcagatcccgccgcggcagctgctgcagccttttcctcctacgtcggcagcccttatgatcatacacctggaatggctgggagcctggggtaccatccttatgctgcccccctggggtcttatccttacggagatcccgcctatcgtaagaacgccacgcgggacgctaccgcgacattaaaggcctggctgaacgagcatcgcaagaatccctaccccactaaaggagagaaaattatgctggctatcataaccaagatgacactcacacaggtgagtacctggttcgccaacgcccggcgtagactgaagaaggagaacaaaatgacctggacccctagaaaccgcagcgaagacgaggaggaagaggaaaacatcgacctcgagaaaaacgatgaggacgaacctcaaaaaccagaagacaagggggatcctgaagggccagaagcaggcggggcagagcagaaagcggcgagcggatgcgaaaggctgcagggccccccaactccagctggtaaagagaccgaaggttccctcagcgattccgatttcaaggagccaccaagtgaaggcagactggacgcacttcagggccctcctcgcaccggcggcccctcccctgcaggcccggctgccgcgcgcctggccgaggacccggcgcctcattatcctgcaggggccccagctccaggcccacatcccgctgcaggcgaagtgcccccagggcctggcgggcccagcgtaatccatagcccgccaccgccccctccacctgcagttcttgctaaacccaagctgtggtctctagccgagatcgccacttccagcgataaggttaaggacggcggaggcggaaacgaggggtctccttgtcccccgtgccccgggccaatcgcagggcaggccctgggaggttctcgtgcctcgcctgctcccgcccctagcaggagcccctccgctcagtgcccatttcccggcggcactgtgctgagcagaccactctattatacggcccccttttaccctggctacaccaattacggcagcttcgggcatctgcacggacaccccggtcccggtccaggacccaccaccggccctggatcacactttaacggactaaaccaaacggtgctgaaccgcgccgatgctctggccaaagatcccaaaatgcttaggagccagagccaactggatctttgtaaagactccccgtacgagttgaagaaaggaatgagtgatatttag

SEQ ID NO: 159828 - DNA, 1452 bp, Artificial Sequence
  derived and/or modified sequence
atgagctacccacaaggttatctgtatcagccaagcgctagtctggccctttactcatgtccagcatacagtacctctgtaataagtggccctagaacagatgaacttggcaggagttcgtcgggaagcgctttctcaccatacgctggatccacggcatttaccgccccatcccctggatataactctcacttgcagtacggtgctgaccccgcagccgcagcagctgctgcctttagtagttatgtgggcagtccctacgatcatactcctgggatggcagggagtctgggatatcatccctatgccgcacccttgggctcatacccttatggcgatccggcttaccgcaaaaacgccacccgtgacgctacggccacgctcaaggcctggctgaacgaacaccgcaagaatccctatcccaccaaaggtgagaagattatgttggccatcatcaccaagatgacactgacacaggtatctacctggtttgctaacgctcgcagaagactcaaaaaggagaataaaatgacctggaccccacggaaccgctctgaagatgaagaggaggaggaaaatatcgacctcgagaaaaatgacgaggacgagccacagaaaccagaggacaaaggagaccccgagggtccagaagctggcggtgctgagcagaaggccgcttcagggtgtgaacggttacaaggaccacccacgcccgctggtaaggaaacagagggatccctttccgactctgactttaaggagccaccatcggagggaagactggacgctcttcagggtcccccaagaaccggagggccttcgccagcagggccagcggcagcgcgattagccgaggacccagcccctcattatcccgctggcgcacctgctccaggtccacaccccgcagccggtgaggttcccccaggcccaggtggaccatctgtgatccacagcccccctcctcctcctcctcccgctgtattagccaaacctaaactgtggtccctcgcagaaatcgccactagttctgataaggtgaaggatggcggtggagggaatgaaggatccccctgcccaccttgtccaggacctatcgcgggtcaggcattaggaggatctcgagcctcaccagctccagccccttctcggtccccctccgctcagtgcccttttcctggcggaactgtgctgagccgcccactgtactacacggcaccattctaccctggatacacaaactacggctcgtttggtcacctccatggccacccgggtcccggtcccggacccaccacgggccctgggtcacacttcaacgggctgaaccagactgtcctaaatagggccgatgccttggccaaggatccaaagatgcttaggagtcagtcgcagttggatctttgtaaggactccccctatgaactgaagaaaggaatgagcgacatctag

SEQ ID NO: 159829 - DNA, 1452 bp, Artificial Sequence
  derived and/or modified sequence
atgagctacccccagggctacctgtaccagcccagcgccagcctggccctgtacagctgccccgcctacagcaccagcgtgatcagcggccccagaaccgacgagctgggcagaagcagcagcggcagcgccttcagcccctacgccggcagcaccgccttcaccgcccccagccccggctacaacagccacctgcagtacggcgccgaccccgccgccgccgccgccgccgccttcagcagctacgtgggcagcccctacgaccacacccccggcatggccggcagcctgggctaccacccctacgccgcccccctgggcagctacccctacggcgaccccgcctacagaaagaacgccaccagagacgccaccgccaccctgaaggcctggctgaacgagcacagaaagaacccctaccccaccaagggcgagaagatcatgctggccatcatcaccaagatgaccctgacccaggtgagcacctggttcgccaacgccagaagaagactgaagaaggagaacaagatgacctggacccccagaaacagaagcgaggacgaggaggaggaggagaacatcgacctggagaagaacgacgaggacgagccccagaagcccgaggacaagggcgaccccgagggccccgaggccggcggcgccgagcagaaggccgccagcggctgcgagagactgcagggcccccccacccccgccggcaaggagaccgagggcagcctgagcgacagcgacttcaaggagccccccagcgagggcagactggacgccctgcagggcccccccagaaccggcggccccagccccgccggccccgccgccgccagactggccgaggaccccgccccccactaccccgccggcgcccccgcccccggcccccaccccgccgccggcgaggtgccccccggccccggcggccccagcgtgatccacagccccccccccccccccccccccgccgtgctggccaagcccaagctgtggagcctggccgagatcgccaccagcagcgacaaggtgaaggacggcggcggcggcaacgagggcagcccctgccccccctgccccggccccatcgccggccaggccctgggcggcagcagagccagccccgcccccgcccccagcagaagccccagcgcccagtgccccttccccggcggcaccgtgctgagcagacccctgtactacaccgcccccttctaccccggctacaccaactacggcagcttcggccacctgcacggccaccccggccccggccccggccccaccaccggccccggcagccacttcaacggcctgaaccagaccgtgctgaacagagccgacgccctggccaaggaccccaagatgctgagaagccagagccagctggacctgtgcaaggacagcccctacgagctgaagaagggcatgagcgacatctag

SEQ ID NO: 159830 - protein, 175 aa, Artificial Sequence
  derived and/or modified sequence
MASLRVERAGGPRLPRTRVGRPAALRLLLLLGAVLNPHEALAQPLPTTGTPGSEGGTVKNYETAVQFCWNHYKDQMDPIEKDWCDWAMISRPYSTLRDCLEHFAELFDLGFPNPLAERIIFETHQIHFANCSLVQPTFSDPPEDVLLAMIIAPICLIPFLITLVVWRSKDSEAQA

SEQ ID NO: 159831 - DNA, 528 bp, Artificial Sequence
  derived and/or modified sequence
atggcctctcttcgggtcgagcgggctggtggcccacgactgcccagaacacgtgtcgggagaccagccgcactgagactgctgctattgctgggtgccgttctaaaccctcacgaagccctggcccagccactcccgactacgggcacaccgggatcggaaggtggaacggtgaagaactacgaaacggccgtgcaattttgttggaaccactacaaagatcaaatggaccccatcgagaaggattggtgtgactgggccatgatcagcagaccctactccacactgcgcgactgtttagagcatttcgctgagctcttcgatctcggttttcctaatccactcgcggagcggatcatcttcgagacccatcagattcacttcgccaactgttcgttggttcagcccacattcagtgacccgcccgaggacgtactcttggccatgattattgccccaatctgcttgatccccttcctcatcacattggtcgtctggaggtctaaggactccgaagcgcaggcgtag

SEQ ID NO: 159832 - DNA, 528 bp, Artificial Sequence
  derived and/or modified sequence
atggccagcctgcgggtggagagagctgggggcccccggctgcccaggaccagggtgggccggcctgctgccctgcggctgctgctgctgctgggcgctgtgctgaacccccatgaggccctggcccagcccctgcccaccaccggcaccccaggcagcgagggcggcaccgtgaagaactatgaaacagctgtgcagttctgctggaaccactacaaggaccagatggaccccatcgagaaggactggtgtgactgggccatgatcagccggccctacagcaccctgcgggactgcctggagcactttgctgagctgtttgacctgggcttccccaaccccctggccgagcgcatcatctttgagacccaccagatccactttgccaactgcagcctggtgcagcccaccttcagtgaccccccagaagatgtgctgctggccatgatcatcgcccccatctgcctgatccccttcctgatcaccctggtggtgtggaggagcaaggacagcgaggcccaggcctag

SEQ ID NO: 159833 - DNA, 528 bp, Artificial Sequence
  derived and/or modified sequence
atggccagcctgcgggtggagcgggccggcggcccccggctgcccagaactcgggtgggtaggcccgctgccctccggcttttgctcctgttgggcgccgttctcaatccccacgaggccctggcacagcccttgccaacaaccggtactccaggatcagagggtggcaccgtcaaaaattacgagactgccgttcaattttgctggaatcactataaggaccagatggacccgatcgagaaggattggtgcgactgggctatgatttcaagaccttattccactcttcgcgactgcttagagcacttcgctgagctttttgatctgggcttccctaacccactcgcggagcgtataattttcgagacccatcagattcactttgccaattgctctttggttcagcccactttttcagacccgcctgaagacgtgctgttggcgatgatcatcgccccgatctgcctaattccttttctgataaccctggtggtgtggcggtccaaagactcagaggcacaggcctag

SEQ ID NO: 159834 - DNA, 528 bp, Artificial Sequence
  derived and/or modified sequence
atggcttccctgcgagttgaacgtgctggaggaccacgcctccccagaacacgggtcggtcggccagccgcactccgccttctgctcttgcttggcgcagtacttaacccgcacgaagcgctggcacaacctttacccactactggcacccctggcagcgaagggggtacagtgaaaaactacgaaactgccgttcagttttgctggaatcattataaagatcagatggatccaatcgagaaggactggtgtgattgggcaatgatcagcagaccatattcaaccctcagagattgcctggagcattttgcggaactatttgacctcgggttccctaatcccttggccgaaaggattattttcgagacccatcagatacacttcgctaactgttctttggtccagccaacctttagcgatccacctgaggacgtgctgctcgccatgatcatcgcccctatatgtcttattccattcctgatcactctggtcgtttggcgctcgaaggacagtgaagcccaagcatag

SEQ ID NO: 159835 - DNA, 781 bp, Artificial Sequence
  derived and/or modified sequence
ggatataggcgcccccacacccgggcccggctcagcgccgccgccgctcctcgcctccttgctgcacgatggcctcgctccgggtggagcgcgccggcggcccgcgtctccctaggacccgagtcgggcggccggcagcgctccgcctcctcctcctgctgggcgctgtcctgaatccccacgaggccctggctcagcctcttcccaccacaggcacaccagggtcagaaggggggacggtgaagaactatgagacagctgtccaattttgctggaatcattataaggatcaaatggatcctatcgaaaaggattggtgcgactgggccatgattagcaggccttatagcaccctgcgagattgcctggagcactttgcagagttgtttgacctgggcttccccaatcccttggcagagaggatcatctttgagactcaccagatccactttgccaactgctccctggtgcagcccaccttctctgaccccccagaggatgtactcctggccatgatcatagcccccatctgcctcatccccttcctcatcactcttgtagtatggaggagtaaagacagtgaggcccaggcctagggggccacgagcttctcaacaaccatgttactccacttccccacccccaccaggcctccctcctcccctcctactcccttttctcactctcatccccaccacagatccctggattgctgggaatggaagccaggtggggtcatggcacaagttctgtaatcttcaaaataaaactttttttttgt

SEQ ID NO: 159836 - DNA, 528 bp, Artificial Sequence
  derived and/or modified sequence
atggccagcctgagagtggagagagccggcggccccagactgcccagaaccagagtgggcagacccgccgccctgagactgctgctgctgctgggcgccgtgctgaacccccacgaggccctggcccagcccctgcccaccaccggcacccccggcagcgagggcggcaccgtgaagaactacgagaccgccgtgcagttctgctggaaccactacaaggaccagatggaccccatcgagaaggactggtgcgactgggccatgatcagcagaccctacagcaccctgagagactgcctggagcacttcgccgagctgttcgacctgggcttccccaaccccctggccgagagaatcatcttcgagacccaccagatccacttcgccaactgcagcctggtgcagcccaccttcagcgacccccccgaggacgtgctgctggccatgatcatcgcccccatctgcctgatccccttcctgatcaccctggtggtgtggagaagcaaggacagcgaggcccaggcctag

SEQ ID NO: 159837 - protein, 148 aa, Artificial Sequence
  derived and/or modified sequence
MARALCRLPRRGLWLLLAHHLFMTTACQEANYGALLRELCLTQFQVDMEAVGETLWCDWGRTIRSYRELADCTWHMAEKLGCFWPNAEVDRFFLAVHGRYFRSCPISGRAVRDPPGSILYPFIVVPITVTLLVTALVVWQSKRTEGIV

SEQ ID NO: 159838 - DNA, 447 bp, Artificial Sequence
  derived and/or modified sequence
atggccagggctttgtgccggttacccaggcgggggctttggctgctcctggcccaccatttattcatgactactgcctgccaagaagctaactacggcgctctgctcagagaactgtgtctcacccagtttcaggtggacatggaagctgtaggtgagacactttggtgcgattggggccggaccatcaggtcgtaccgggaactcgccgattgtacctggcatatggctgaaaagctcggatgtttctggcctaacgccgaggtggaccggttcttccttgctgtgcatggccggtacttccgatcctgcccaataagtggcagagcagtccgtgatcccccgggcagtatactgtacccctttatagtggtaccaataacggtcacactcttagtcactgccttggtcgtgtggcagtccaaacgcaccgaagggatcgtgtag

SEQ ID NO: 159839 - DNA, 447 bp, Artificial Sequence
  derived and/or modified sequence
atggcccgggccctgtgccgcctgccccggcggggcctgtggctgctgctggcccaccacctgttcatgaccacagcctgccaggaggccaactacggggccctgctgcgggagctgtgcctgacccagttccaggtggacatggaggccgtgggggagaccctgtggtgtgactggggccgcaccatccgcagctaccgggagctggccgactgcacctggcacatggccgagaagctgggctgcttctggcccaatgctgaggtggaccgcttcttcctggccgtgcacggccgctacttccgcagctgccccatcagcggccgggctgtgcgggaccccccaggcagcatcctgtaccccttcatcgtggtgcccatcaccgtgaccctgctggtgacagccctggtggtgtggcagagcaagaggacagagggcatcgtgtag

SEQ ID NO: 159840 - DNA, 447 bp, Artificial Sequence
  derived and/or modified sequence
atggcccgggccctgtgccggctgccccggcggggcctgtggctgttactcgctcaccacctttttatgactacggcatgccaggaagctaactacggcgctcttctgagggaactctgcttgacccagttccaggtcgatatggaggccgtcggcgaaactctctggtgtgattggggtagaacaatccggagctatagagagttggctgactgcacctggcacatggccgagaagctgggatgcttctggcccaatgccgaggtggatcgcttcttccttgcagtgcatgggcgctattttaggagctgtccaattagtgggcgagcagtcagggatcccccgggatcaatcctgtaccccttcatcgtggtacccatcaccgtgacactgctggtcactgcccttgtggtttggcagtctaaaagaacggaaggaattgtgtag

SEQ ID NO: 159841 - DNA, 447 bp, Artificial Sequence
  derived and/or modified sequence
atggccagggctctctgccgcctgccacgaaggggcctctggctcctcctagctcatcacttgtttatgactactgcatgtcaagaggccaactacggtgccctgttaagagagctgtgtcttacccagtttcaggtggacatggaggctgtcggtgagactttgtggtgtgactgggggaggacaatcagaagttatcgtgagctagctgactgtacatggcacatggccgagaaattaggctgcttctggccaaacgccgaggtcgaccgcttttttcttgcggtgcacggaagatactttaggtcttgcccaatttctggcagagcggtacgggaccccccaggcagtattctgtatccgttcattgtggtgcctattacagtgacgttgctggtgacggctcttgtggtgtggcagagtaagagaactgaggggatcgtgtag

SEQ ID NO: 159842 - DNA, 447 bp, Artificial Sequence
  derived and/or modified sequence
atggcgagggccctctgcaggctgcctcgcagaggtctgtggcttttactcgctcaccatttgttcatgaccacagcctgccaggaagctaactacggcgccctcctgcgagaactctgtctgacccagttccaggtcgacatggaggcagtaggcgagaccctgtggtgcgactggggccggactatacgctcatatcgagaactcgcagactgtacatggcacatggcggaaaaactaggatgtttctggccgaatgccgaggtagatagattcttcttagctgtccacgggcgatatttccgaagctgcccgatctctggtcgtgcagtgagggatcccccgggatctattctttacccattcatcgtagtcccaatcactgttacacttttggtcaccgccctggtggtctggcagtcgaaacgaaccgaaggcatcgtgtag

SEQ ID NO: 159843 - DNA, 447 bp, Artificial Sequence
  derived and/or modified sequence
atggcccgcgcactgtgtagactgccgcgcagaggactttggctcttgttagctcaccaccttttcatgaccacagcatgccaggaggcgaactacggtgccctgctccgcgaattgtgtcttactcagtttcaggttgatatggaggcagtaggcgaaaccctgtggtgcgactggggacggacaattagatcctatcgagagttagcggattgcacctggcacatggccgaaaaattggggtgcttctggcctaacgcagaggtggatagattcttcctcgctgtgcacggaagatatttccggagttgccctatcagtggccgcgccgtaagggacccacccggatcaatcctgtacccctttattgtcgttcccatcacagtgacacttctggttaccgctctcgttgtttggcagtctaagaggactgaagggatcgtgtag

SEQ ID NO: 159844 - DNA, 910 bp, Artificial Sequence
  derived and/or modified sequence
gcggccgccgcctcccaccgctcccgcgcccgctcccgcccccggcgcgtctcctccgggcccgcgccgcggcgggctcagtcctcagcggggcgcgtggcgagcggactcgactcggcaccgctgtgcaccatggcccgggccctgtgccgcctcccgcggcgcggcctctggctgctcctggcccatcacctcttcatgaccactgcctgccaggaggctaactacggtgccctcctccgggagctctgcctcacccagttccaggtagacatggaggccgtcggggagacgctgtggtgtgactggggcaggaccatcaggagctacagggagctggccgactgcacctggcacatggcggagaagctgggctgcttctggcccaatgcagaggtggacaggttcttcctggcagtgcatggccgctacttcaggagctgccccatctcaggcagggccgtgcgggacccgcccggcagcatcctctaccccttcatcgtggtccccatcacggtgaccctgctggtgacggcactggtggtctggcagagcaagcgcactgagggcattgtgtaggcggggcccaggctgcccgcgggtgcacccaggctgcagggtgaggccaggcaggcctgggtaggggcagcttctggagccttgggacagagcaggcccacaatgccccccttcttccagccaagaagagctcacaggagtccagagtagccgaggctctggtattaacctggaagcccccctggctggaggccaccgccaccctaggaagggggcagggacgtgaccttgacttacctctggaaagggtcccagcctagactgcttaccccatagccacatttgtggatgagtggtttgtgattaaaagggatgttcttgaacttggaaa

SEQ ID NO: 159845 - DNA, 650 bp, Artificial Sequence
  derived and/or modified sequence
ggagagcgggcattctggaaagcgtgggcccatcacctcttcatgaccactgcctgccaggaggctaactacggtgccctcctccgggagctctgcctcacccagttccaggtagacatggaggccgtcggggagacgctgtggtgtgactggggcaggaccatcaggagctacagggagctggccgactgcacctggcacatggcggagaagctgggctgcttctggcccaatgcagaggtggacaggttcttcctggcagtgcatggccgctacttcaggagctgccccatctcaggcagggccgtgcgggacccgcccggcagcatcctctaccccttcatcgtggtccccatcacggtgaccctgctggtgacggcactggtggtctggcagagcaagcgcactgagggcattgtgtaggcggggcccaggctgcccgcgggtgcacccaggctgcagggtgaggccaggcaggcctgggtaggggcagcttctggagccttgggacagagcaggcccacaatgccccccttcttccagccaagaagagctcacaggagtccagagtagccgaggctctggtattaacctggaagcccccctggctggaggccaccgccaccctaggaagggggcagggacgtgac

SEQ ID NO: 159846 - DNA, 857 bp, Artificial Sequence
  derived and/or modified sequence
gcagctgccagagtgccaccaaagcaaacctcatctcaagactctgtggccaggccctcacaacctcctgccaggctctcgctacctacccatcaacagcaagactcccaggccatctcaatccccccaaagagccctgttcctccagccccacggcttctgttcacctgccgtgctgtccccgcctctgcccacccactcatcctgcagatctggagcagcattccagggcctgcccatcacctcttcatgaccactgcctgccaggaggctaactacggtgccctcctccgggagctctgcctcacccagttccaggtagacatggaggccgtcggggagacgctgtggtgtgactggggcaggaccatcaggagctacagggagctggccgactgcacctggcacatggcggagaagctgggctgcttctggcccaatgcagaggtggacaggttcttcctggcagtgcatggccgctacttcaggagctgccccatctcaggcagggccgtgcgggacccgcccggcagcatcctctaccccttcatcgtggtccccatcacggtgaccctgctggtgacggcactggtggtctggcagagcaagcgcactgagggcattgtgtaggcggggcccaggctgcccgcgggtgcacccaggctgcagggtgaggccaggcaggcctgggtaggggcagcttctggagccttgggacagagcaggcccacaatgccccccttcttccagccaagaagagctcacaggagtccagagtagccgaggctctggtattaacctggaagcccccctggctggaggccaccgccaccctaggaagggggcagggacgtgac

SEQ ID NO: 159847 - DNA, 734 bp, Artificial Sequence
  derived and/or modified sequence
agtcctcagcggggcgcgtggcgagcggactcgactcggcaccgctgtgcaccatggcccgggccctgtgccgcctcccgcggcgcggcctctggctgctcctgggcaggatagcctgaggcacgcttgcttcactcccaggcagaatggccactgagaaatccggcccatcacctcttcatgaccactgcctgccaggaggctaactacggtgccctcctccgggagctctgcctcacccagttccaggtagacatggaggccgtcggggagacgctgtggtgtgactggggcaggaccatcaggagctacagggagctggccgactgcacctggcacatggcggagaagctgggctgcttctggcccaatgcagaggtggacaggttcttcctggcagtgcatggccgctacttcaggagctgccccatctcaggcagggccgtgcgggacccgcccggcagcatcctctaccccttcatcgtggtccccatcacggtgaccctgctggtgacggcactggtggtctggcagagcaagcgcactgagggcattgtgtaggcggggcccaggctgcccgcgggtgcacccaggctgcagggtgaggccaggcaggcctgggtaggggcagcttctggagccttgggacagagcaggcccacaatgccccccttcttccagccaagaagagctcacaggagtccagagtagccgaggctctggtattaacctgg

SEQ ID NO: 159848 - DNA, 447 bp, Artificial Sequence
  derived and/or modified sequence
atggccagagccctgtgcagactgcccagaagaggcctgtggctgctgctggcccaccacctgttcatgaccaccgcctgccaggaggccaactacggcgccctgctgagagagctgtgcctgacccagttccaggtggacatggaggccgtgggcgagaccctgtggtgcgactggggcagaaccatcagaagctacagagagctggccgactgcacctggcacatggccgagaagctgggctgcttctggcccaacgccgaggtggacagattcttcctggccgtgcacggcagatacttcagaagctgccccatcagcggcagagccgtgagagacccccccggcagcatcctgtaccccttcatcgtggtgcccatcaccgtgaccctgctggtgaccgccctggtggtgtggcagagcaagagaaccgagggcatcgtgtag

SEQ ID NO: 159849 - protein, 148 aa, Artificial Sequence
  derived and/or modified sequence
METGALRRPQLLPLLLLLCGGCPRAGGCNETGMLERLPLCGKAFADMMGKVDVWKWCNLSEFIVYYESFTNCTEMEANVVGCYWPNPLAQGFITGIHRQFFSNCTVDRVHLEDPPDEVLIPLIVIPVVLTVAMAGLVVWRSKRTDTLL

SEQ ID NO: 159850 - protein, 151 aa, Artificial Sequence
  derived and/or modified sequence
METGALRRPQLLPLLLLLCGGCPRAGGCNETGMLERLPLCGKAFADMMGKVDVWKWCNLSEFIVYYESFTNCTEMEANVVGCYWPNPLAQGFITGIHRQFFSNCTVDRVHLEDPPDEVLIPLIVIPVVLTVAMAGLVVWRSKRTDTLLCGN

SEQ ID NO: 159851 - DNA, 447 bp, Artificial Sequence
  derived and/or modified sequence
atggaaaccggggccctgcgccgcccgcagctccttccgctgctcttgttgctctgtggagggtgtcccagagccggcggctgcaatgagactggaatgctcgagcggctgcctctgtgtgggaaggcctttgcagacatgatgggcaaggtggatgtgtggaagtggtgtaacctgagcgagtttatcgtgtattacgaaagcttcaccaattgtaccgagatggaggcaaacgtagtcggatgctactggcccaatcctctcgcccaaggcttcatcaccggaattcacagacagtttttttctaactgtacagtggaccgtgtccatttagaggatcctcctgacgaagtgctgatacctctgattgtgattcctgtggtgctgacggtggccatggcggggctggttgtctggcgaagtaaacggaccgacactttactctag

SEQ ID NO: 159852 - DNA, 447 bp, Artificial Sequence
  derived and/or modified sequence
atggaaactggagctcttcgccggccacaactccttccactactgctgctgctgtgcggagggtgccctcgcgcaggaggatgtaatgaaactggcatgctggagcggctgcccctatgtggcaaggccttcgcagacatgatggggaaagtggacgtgtggaaatggtgcaatctgtcagaattcatagtgtattatgaaagttttacaaattgtaccgaaatggaggccaacgtggtcggctgctactggccaaacccattagcacaggggtttatcactgggatacatagacagttcttttctaattgtacagtagatcgggtccacctcgaggatccaccagatgaggtgcttatcccactgatcgtgatacccgtggtgctcaccgtagccatggctggcctggtggtttggcgtagcaagcggacagacacattgctgtag

SEQ ID NO: 159853 - DNA, 456 bp, Artificial Sequence
  derived and/or modified sequence
atggagacgggtgccctgaggcgacctcagctactcccactcctgctgctgttgtgcgggggatgccccagagccgggggctgcaacgagaccggcatgctcgagcgcctgcctctgtgcggaaaggcatttgcagacatgatgggcaaggtggacgtgtggaagtggtgcaatctgtctgagtttattgtctactatgagtcatttactaactgtaccgagatggaggctaacgtggtcggatgctattggcccaacccactagcacaggggttcatcaccggtattcaccgccagtttttctctaattgcacagtggatagggttcatctagaggatcctcccgacgaggtccttatccctctgatcgtgattcccgtggtactcactgtagccatggccggactggtagtgtggcgatccaagagaaccgatacattgttatgcggaaactag

SEQ ID NO: 159854 - DNA, 447 bp, Artificial Sequence
  derived and/or modified sequence
atggagactggagccctgcggcggccccagctgctgcccctgctgctgctgctgtgtggcggctgccccagggctgggggctgcaatgaaacaggcatgctggagcggctgcccctgtgtgggaaggcctttgctgacatgatgggcaaggtggatgtgtggaagtggtgcaacctgtctgagttcatcgtgtactatgagagcttcaccaactgcacagagatggaggccaacgtggtgggctgctactggcccaaccccctggcccagggcttcatcaccggcatccaccggcagttcttcagcaactgcaccgtggacagagtgcacctggaggaccccccagatgaggtgctgatccccctgattgtcatccctgtggtgctgactgtggccatggccggcctggtggtgtggaggagcaagaggacagacaccctgctgtag

SEQ ID NO: 159855 - DNA, 456 bp, Artificial Sequence
  derived and/or modified sequence
atggagactggagccctgcggcggccccagctgctgcccctgctgctgctgctgtgtggcggctgccccagggctgggggctgcaatgaaacaggcatgctggagcggctgcccctgtgtgggaaggcctttgctgacatgatgggcaaggtggatgtgtggaagtggtgcaacctgtctgagttcatcgtgtactatgagagcttcaccaactgcacagagatggaggccaacgtggtgggctgctactggcccaaccccctggcccagggcttcatcaccggcatccaccggcagttcttcagcaactgcaccgtggacagagtgcacctggaggaccccccagatgaggtgctgatccccctgattgtcatccctgtggtgctgactgtggccatggccggcctggtggtgtggaggagcaagaggacagacaccctgctgtgtggcaactag

SEQ ID NO: 159856 - DNA, 447 bp, Artificial Sequence
  derived and/or modified sequence
atggagaccggcgccctgcggcggccccagctgctgcccctgctgctcctgttgtgtggaggttgtccacgtgctggcgggtgcaacgaaacgggtatgctcgagagactgcccctctgcggaaaagcgttcgcagatatgatgggaaaagtcgacgtctggaaatggtgcaatctgtcggaattcatcgtctactacgaatccttcacaaactgcaccgaaatggaagccaacgtggtggggtgctactggccaaacccactagctcagggattcatcacaggaatccatcgacagtttttttccaattgcacagttgatagagtgcatctcgaagatccgccagatgaggtgctcataccgctgatagtgatacctgttgtgttaaccgtcgctatggccggtctggtcgtgtggaggtccaagcgaaccgatacgctgctgtag

SEQ ID NO: 159857 - DNA, 447 bp, Artificial Sequence
  derived and/or modified sequence
atggagaccggcgccctgcggcggccccagctgctgcccctgctgcttcttctgtgtggcggatgcccgagggccgggggatgtaacgaaacagggatgctggaaagactgccgctctgtggtaaagcctttgccgatatgatgggtaaggtggatgtgtggaaatggtgcaatctgagcgagttcatagtctattatgaaagctttacaaactgcactgagatggaagccaatgttgtcgggtgttattggcctaaccccctggctcaggggtttattactgggatccaccggcagttttttagcaactgcaccgtggatcgggtgcacctggaggatccccctgacgaagtgctgatacccctaattgtaatcccggtggtgctcaccgtggccatggccggactggtcgtatggcggagtaagcggacagacactctcctgtag

SEQ ID NO: 159858 - DNA, 456 bp, Artificial Sequence
  derived and/or modified sequence
atggagaccggcgccctgcggcggccccagctgctgcccctgctgttgctcctgtgtggtggatgccccagggctggcggctgtaatgagacaggcatgctggagagactgcccctttgtggcaaagcttttgcggatatgatgggaaaggtcgacgtatggaagtggtgtaacttatccgaattcattgtgtactacgagtccttcacgaactgtactgaaatggaagctaacgtcgtgggttgctactggccaaaccccctcgcacagggtttcattacaggcatccatcgccagttctttagcaactgtactgtcgatcgggtgcacctagaggatccgcctgacgaagttctgattccactcatcgtgattccggttgtgctgaccgttgctatggctggtctggtagtctggaggagcaagaggacagacaccctcttatgtggtaactag

SEQ ID NO: 159859 - DNA, 447 bp, Artificial Sequence
  derived and/or modified sequence
atggaaaccggcgctctgagaagaccacagctgctgccactgttactgctcctctgcggaggatgtccacgcgctggcggttgtaacgagactgggatgttggaacggcttccactgtgtgggaaagcttttgcagacatgatgggcaaggtcgatgtgtggaaatggtgcaacttgtccgaattcattgtgtactacgagagctttaccaattgtacagaaatggaagcgaacgtagtcggctgctattggccgaatcccctcgcacaggggtttattactgggatccaccgacagtttttctctaattgtacagtggaccgagtacacctcgaggacccgcctgacgaggtgctgatacccctgatcgtcatccctgtggtgctcactgtggcaatggctggcctcgtggtgtggcgctcaaaacgtacagatacactgctctag

SEQ ID NO: 159860 - DNA, 447 bp, Artificial Sequence
  derived and/or modified sequence
atggaaactggagccttgagaagaccacaactgctcccattattactactgctctgtgggggttgtccccgagctggtgggtgcaatgagactggaatgctcgaacggttacccctgtgcggaaaagccttcgccgatatgatggggaaagtggacgtctggaagtggtgcaacctgagcgagtttattgtgtactacgaaagtttcaccaactgtacggagatggaggccaacgtggtgggctgttactggcctaatccacttgcccaggggttcataacgggaattcataggcagttcttcagtaactgcacagtagatcgtgtgcacctggaggatcctcctgacgaagtgcttattcctcttattgtcattccggttgtgctaacagtcgcaatggcaggtcttgtggtttggagatctaaacgcacggatacactgctctag

SEQ ID NO: 159861 - DNA, 456 bp, Artificial Sequence
  derived and/or modified sequence
atggagacaggggcactgcggcgtccacagcttcttcctctgttgttactgctatgtggcggttgtccccgtgctgggggatgcaacgagaccggtatgttggagcgccttccactttgcggaaaggccttcgctgatatgatgggcaaagtggatgtgtggaagtggtgtaacctcagcgagttcattgtatactacgaaagcttcacaaattgcactgaaatggaagctaatgtcgtcggttgctactggccgaatccgctcgcacaaggtttcatcacagggatccatagacagttcttctccaattgtactgtggacagggtacatctcgaagaccctcccgacgaggtgctgataccactaattgtgatacctgtggtcctgactgtcgcgatggccggattggtggtctggcggtcgaaacgaactgacacactcctttgcggcaactag

SEQ ID NO: 159862 - DNA, 1323 bp, Artificial Sequence
  derived and/or modified sequence
agcgggaccgagcgtgacccagctgcggccggccagccatggagactggagcgctgcggcgcccgcaacttctcccgttgctgctgctgctctgcggtgggtgtcccagagcaggcggctgcaacgagacaggcatgttggagaggctgcccctgtgtgggaaggctttcgcagacatgatgggcaaggtggacgtctggaagtggtgcaacctgtccgagttcatcgtgtactatgagagtttcaccaactgcaccgagatggaggccaatgtcgtgggctgctactggcccaaccccctggcccagggcttcatcaccggcatccacaggcagttcttctccaactgcaccgtggacagggtccacttggaggaccccccagacgaggttctcatcccgctgatcgttatacccgtcgttctgactgtcgccatggctggcctggtggtgtggcgcagcaaacgcaccgacacgctgctgtgagggtcccggtgagatggagtgggtcacacctggcaagctggaagaaagttccctggggatgggagagcgggtgggtgctgccaatctccagctactgtggccacaccccacctggtcatgggcagacccctcccttcctgggctgacctgctccctcgaggccagcctgctccctggctgaggctcaggctatccgcccaagctctttgctcattctagggccagtggaggaaaatgtgataaggccagagcttgtgtgctgggcacagaaatcacctgctgcatcctgtgctccgcaggctgggccggagcctctgcccgcaggtttctatgctgtttcttagcacagaatccagcctagccttagccgcagtctaggccctgcttggactaggactccttgcttgaccccatctctggttcctgccctggctcctgcaccagccccagctcctgcctacatccaggcagaaagataggcaggggctcttggaagacgttccgtgctgtgacctccgagccctcctggtgggaagacagctggaaaggctgggaggagaagggaggggctgggggttcccaggagccatgcgtggcctgcagagtccattccatcatgatgctgtgcccgctatgggctgtgtccatgaccagaggctggagtgggggtgtgttagagcccctcaccgggacttgctgtgcggatggggcctgggcctccttcctacaggggctcctctgtgggtgaggggccctctggaatggcatcccatgagcttgtggcctctatctgctaccatctgtgttttatctgagtaaagttaccttacttctggaa

SEQ ID NO: 159863 - DNA, 559 bp, Artificial Sequence
  derived and/or modified sequence
atggagactggagcgctgcggcgcccgcaacttctcccgttgctgctgctgctctgcggtgggtgtcccagagcaggcggctgcaacgagacaggcatgttggagaggctgcccctgtgtgggaaggctttcgcagacatgatgggcaaggtggacgtctggaagtggtgcaacctgtccgagttcatcgtgtactatgagagtttcaccaactgcaccgagatggaggccaatgtcgtgggctgctactggcccaaccccctggcccagggcttcatcaccggcatccacaggcagttcttctccaactgcaccgtggacagggtccacttggaggaccccccagacgaggttctcatcccgctgatcgttatacccgtcgttctgactgtcgccatggctggcctggtggtgtggcgcagcaaacgcaccgacacgctgctgtgagggtcccgatgtggaaattgaggctcagaaatgtaaggggacttgctgaagagtggtcttttatattttcctggcctgctgccctactgaatccagccctgagaggtgacaa

SEQ ID NO: 159864 - DNA, 543 bp, Artificial Sequence
  derived and/or modified sequence
atggagactggagcgctgcggcgcccgcaacttctcccgttgctgctgctgctctgcggtgggtgtcccagagcaggcggctgcaacgagacaggcatgttggagaggctgcccctgtgtgggaaggctttcgcagacatgatgggcaaggtggacgtctggaagtggtgcaacctgtccgagttcatcgtgtactatgagagtttcaccaactgcaccgagatggaggccaatgtcgtgggctgctactggcccaaccccctggcccagggcttcatcaccggcatccacaggcagttcttctccaactgcaccgtggacagggtccacttggaggaccccccagacgaggttctcatcccgctgatcgttatacccgtcgttctgactgtcgccatggctggcctggtggtgtggcgcagcaaacgcaccgacacgctgctatgtggaaattgaggctcagaaatgtaaggggacttgctgaagagtggtcttttatattttcctggcctgctgccctactgaatccagccctgagaggtg

SEQ ID NO: 159865 - DNA, 447 bp, Artificial Sequence
  derived and/or modified sequence
atggagaccggcgccctgagaagaccccagctgctgcccctgctgctgctgctgtgcggcggctgccccagagccggcggctgcaacgagaccggcatgctggagagactgcccctgtgcggcaaggccttcgccgacatgatgggcaaggtggacgtgtggaagtggtgcaacctgagcgagttcatcgtgtactacgagagcttcaccaactgcaccgagatggaggccaacgtggtgggctgctactggcccaaccccctggcccagggcttcatcaccggcatccacagacagttcttcagcaactgcaccgtggacagagtgcacctggaggacccccccgacgaggtgctgatccccctgatcgtgatccccgtggtgctgaccgtggccatggccggcctggtggtgtggagaagcaagagaaccgacaccctgctgtag

SEQ ID NO: 159866 - DNA, 456 bp, Artificial Sequence
  derived and/or modified sequence
atggagaccggcgccctgagaagaccccagctgctgcccctgctgctgctgctgtgcggcggctgccccagagccggcggctgcaacgagaccggcatgctggagagactgcccctgtgcggcaaggccttcgccgacatgatgggcaaggtggacgtgtggaagtggtgcaacctgagcgagttcatcgtgtactacgagagcttcaccaactgcaccgagatggaggccaacgtggtgggctgctactggcccaaccccctggcccagggcttcatcaccggcatccacagacagttcttcagcaactgcaccgtggacagagtgcacctggaggacccccccgacgaggtgctgatccccctgatcgtgatccccgtggtgctgaccgtggccatggccggcctggtggtgtggagaagcaagagaaccgacaccctgctgtgcggcaactag

SEQ ID NO: 159867 - protein, 322 aa, Artificial Sequence
  derived and/or modified sequence
MADRDSGSEQGGAALGSGGSLGHPGSGSGSGGGGGGGGGGGGSGGGGGGAPGGLQHETQELASKRVDIQNKRFYLDVKQNAKGRFLKIAEVGAGGNKSRLTLSMSVAVEFRDYLGDFIEHYAQLGPSQPPDLAQAQDEPRRALKSEFLVRENRKYYMDLKENQRGRFLRIRQTVNRGPGLGSTQGQTIALPAQGLIEFRDALAKLIDDYGVEEEPAELPEGTSLTVDNKRFFFDVGSNKYGVFMRVSEVKPTYRNSITVPYKVWAKFGHTFCKYSEEMKKIQEKQREKRAACEQLHQQQQQQQEETAAATLLLQGEEEGEED

SEQ ID NO: 159868 - DNA, 2614 bp, Artificial Sequence
  derived and/or modified sequence
cgactgaggcggcgggcggagcggcaggcggcggcggcgcggcagcggagcgcagcatcatggcggaccgagacagcggcagcgagcagggtggtgcggcgctgggttcgggcggctccctggggcaccccggctcgggctcaggctccggcgggggcggtggtggcggcgggggcggcggcggcagtggcggcggcggcggcggggccccaggggggctgcagcacgagacgcaggagctggcctccaagcgggtggacatccagaacaagcgcttctacctggacgtgaagcagaacgccaagggccgcttcctgaagatcgccgaggtgggcgcgggcggcaacaagagccgccttactctctccatgtcagtggccgtggagttccgcgactacctgggcgacttcatcgagcactacgcgcagctgggccccagccagccgccggacctggcccaggcgcaggacgagccgcgccgggcgctcaaaagcgagttcctggtgcgcgagaaccgcaagtactacatggatctcaaggagaaccagcgcggccgcttcctgcgcatccgccagacggtcaaccgggggcctggcctgggctccacgcagggccagaccattgcgctgcccgcgcaggggctcatcgagttccgtgacgctctggccaagctcatcgacgactacggagtggaggaggagccggccgagctgcccgagggcacctccttgactgtggacaacaagcgcttcttcttcgatgtgggctccaacaagtacggcgtgtttatgcgagtgagcgaggtgaagcccacctatcgcaactccatcaccgtgccctacaaggtgtgggccaagttcggacacaccttctgcaagtactcggaggagatgaagaagattcaagagaagcagagggagaagcgggctgcctgtgagcagcttcaccagcagcaacagcagcagcaggaggagaccgccgctgccaccctgctactgcagggtgaggaagaaggggaagaagattgatcaaactgaatgaaacccccacacacacacacatgcatacacacacacacacagccacacacacagaaaatatactgtaaagaaagagagaaaataaaaagttaaaaagttaaaaaaaaaaaaaaacctgttaactccaagggagcaccacccacagaacctccaccaactgacagtttctcttcttgacttgccacccatcgctggatgttgtccactttatccaccatataaaacagtaagcagctgctaaaaacaaaaaaaatacaaaaagtaataacattatatgaactgtgtttcctacttgattaaaaaatataaagaactgagtgtttatttccctaattaaccaagaacttttgtacacgtttaagctattattattaaaaagtgtttgcaaaatggtcaagattataatattgctgaattatataaaagtccttttcatgttgagctaacatttgactttagcacaaaaaagagatattttagaacacgtaaaataatatttttagtttttctcattttgttaccaaatttcaaaccttacatggaggttattatagtatatttgacaccctatatacctgtgattagagatgtgtatatatatgagggctaggcatgctgtgtgtctgagctttgtctaaatgttatgcagaagtttgtagagttaaaggtacgtaggtttaattcatgcaaggtaaacaataagtgctctcttttatacaatatgcattgcatctggaccttaaacttataaaaatggtcagtgaaacttctgtgaacatgaagaaattattaaaaaaggcatttaaatgaaatttgctaagttgtgatttttatggttggaaccaaagttattcaaatagtaaaaggaaaaagaaagaaaaaggagatctcccataatatttttctgcatctgtttgctttgactgagtaggcgttttgtcattattgtgtatatgagatgtacttgtatcgttcataatatattttttttattatgtgtagaaagattttaaaaaactaacgtgcagcaatttccagtgaacctgtacttggacatcaggtagtgagtctatttgtggtcactagcactgtctcctaaacttgtaagaggtctgaagctattctttgatttttgctagtgctattaacttatgtagacctgttaaaaagcagagcaacacaattatagttatcctactgagccatggattctgagttttgttttaaaagtgaaagccaagttggtgtatgtaaaggatttccatgtagctgtggtgctagttattactggctacattatatgctaagtgtatttgtgttccccaagtgtacaagccttctatcaaaagtatgttctataactcatatattcaaggtgtagggtatgaaaatgcaaagtttaggagagcactttaccaagctggtgtcctccaaactgaaattgtttgtaacgatagtcttttacaggttttcctttaaagatgtttgtgtgcttttaattgacaactaacttcttgctgctgtatagtaaaatattaatatatttttatcattaaactgctgcatgactatca

SEQ ID NO: 159869 - DNA, 969 bp, Artificial Sequence
  derived and/or modified sequence
atggccgacagagacagcggcagcgagcagggcggcgccgccctgggcagcggcggcagcctgggccaccccggcagcggcagcggcagcggcggcggcggcggcggcggcggcggcggcggcggcagcggcggcggcggcggcggcgcccccggcggcctgcagcacgagacccaggagctggccagcaagagagtggacatccagaacaagagattctacctggacgtgaagcagaacgccaagggcagattcctgaagatcgccgaggtgggcgccggcggcaacaagagcagactgaccctgagcatgagcgtggccgtggagttcagagactacctgggcgacttcatcgagcactacgcccagctgggccccagccagccccccgacctggcccaggcccaggacgagcccagaagagccctgaagagcgagttcctggtgagagagaacagaaagtactacatggacctgaaggagaaccagagaggcagattcctgagaatcagacagaccgtgaacagaggccccggcctgggcagcacccagggccagaccatcgccctgcccgcccagggcctgatcgagttcagagacgccctggccaagctgatcgacgactacggcgtggaggaggagcccgccgagctgcccgagggcaccagcctgaccgtggacaacaagagattcttcttcgacgtgggcagcaacaagtacggcgtgttcatgagagtgagcgaggtgaagcccacctacagaaacagcatcaccgtgccctacaaggtgtgggccaagttcggccacaccttctgcaagtacagcgaggagatgaagaagatccaggagaagcagagagagaagagagccgcctgcgagcagctgcaccagcagcagcagcagcagcaggaggagaccgccgccgccaccctgctgctgcagggcgaggaggagggcgaggaggactag

SEQ ID NO: 159870 - DNA, 969 bp, Artificial Sequence
  derived and/or modified sequence
atggctgaccgcgacagcggatccgagcaaggaggggctgccttgggttctgggggttccctcggtcatcctggatccggcagcgggtccggcggcgggggcggcggcggaggcggcggcggtggaagtggcggcggcggaggcggagcgccaggcggtcttcagcatgaaacccaggagcttgcatctaaacgagtggacatacaaaacaagagattctatttagatgtaaagcagaatgccaaaggccggttcttaaagatcgcagaggttggcgccggaggaaataagtctaggcttaccctatcaatgtccgtagccgtggagtttagagactacctaggggatttcattgagcactacgcacagctgggcccgagccagccgccagatctggctcaggcgcaggacgaaccgcgaagggccctaaagtccgagttcctggttagagaaaaccggaagtactatatggatctgaaagaaaatcaacgggggagatttctgcggatcaggcagaccgttaatcgcggcccgggacttggctcaactcagggtcagacaattgccctccccgcccaggggttgattgagttccgagatgcgctggcaaagctgatcgatgattacggagtcgaggaggaacccgctgagctccccgaggggacttctttgacggtcgataacaaacggttcttttttgatgtcggaagcaacaagtacggggtcttcatgcgtgtatcagaagtaaagcctacttatcgaaattctatcaccgtgccctataaggtgtgggccaagtttggccataccttttgcaaatattcagaggaaatgaaaaagattcaagaaaagcagcgcgaaaagagagccgcatgcgaacagctgcatcagcagcagcaacaacagcaagaggaaacagctgccgctaccctgcttctacaaggagaggaagagggtgaagaagattag

SEQ ID NO: 159871 - DNA, 969 bp, Artificial Sequence
  derived and/or modified sequence
atggctgaccgggacagcggcagcgagcagggcggggccgccctgggcagcggcggcagcctgggccaccctggcagcggcagcggcagcggcggcggcggcggcggcggcggcggcggcggcggcagcggcggcggcggcggcggggcccctgggggcctgcagcacgagacccaggagctggccagcaagagggtggacatccagaacaagcgcttctacctggatgtgaagcagaatgccaagggccgcttcctgaagattgctgaggtgggcgccggcggcaacaagagccggctgaccctgtccatgtctgtggccgtggagttccgggactacctgggggacttcatcgagcactacgcccagctgggccccagccagcccccagacctggcccaggcccaggatgagccccggcgggccctgaagtctgagttcctggtgagagaaaataggaagtactacatggacctgaaggagaaccagaggggccgcttcctgcgcatccggcagacagtgaacagaggccctggcctgggcagcacccagggccagaccatcgccctgcctgcccagggcctcatcgagttcagagatgccctggccaagctgattgatgattatggagtggaggaggagcctgctgagctgcctgagggcaccagcctgactgtggacaacaagcgcttcttctttgatgtgggcagcaacaagtatggagtcttcatgagggtgtctgaggtgaagcccacctacagaaacagcatcaccgtgccctacaaggtgtgggccaagtttggccacaccttctgcaagtacagcgaggagatgaagaagatccaggagaagcagcgggagaagagagctgcctgtgagcagctgcaccagcagcagcagcagcagcaggaggagacagctgctgccaccctgctgctgcagggcgaggaggagggggaggaggactag

SEQ ID NO: 159872 - DNA, 969 bp, Artificial Sequence
  derived and/or modified sequence
atggccgaccgggacagcggcagcgagcagggcggcgccgccctggggagcggggggagtctcgggcaccctggatcagggtccggcagtgggggagggggcggaggaggaggtggcggggggggtagcgggggcggcgggggcggtgccccgggaggactgcagcatgaaactcaggagctcgcttcgaaacgggttgatatacagaacaagagattctatcttgatgtgaagcagaatgccaaaggacgcttcctgaaaattgctgaggttggagccgggggcaacaaaagcaggctcaccttgtccatgtctgtagcagttgagtttcgtgactatttaggggactttatcgaacactacgctcaactgggtccttcccagcccccagatttggcccaggcacaggacgaaccacgccgcgctctcaagagcgaatttctggtgagagagaataggaaatactacatggacttaaaagaaaatcagcggggaaggttcctaagaatccgacaaacggttaatcggggccctggcttaggatccactcagggccagaccatcgccctgccagcgcagggcttgatagaatttagggacgccctggcgaagctgattgacgattacggggtggaggaagaacccgcggaattgccggaaggaaccagcctgacggttgacaacaagcggtttttttttgacgttggatccaacaaatacggagtctttatgcgggtgagcgaggttaaaccgacctaccggaatagtatcacagtcccatataaagtatgggctaagttcggacataccttctgtaaatatagcgaggagatgaaaaaaatccaggaaaaacagcgcgaaaagagagctgcatgtgagcagctacaccagcagcagcagcagcagcaggaagagactgcggcagccaccttgctcttacaaggggaggaagagggcgaagaggattag

SEQ ID NO: 159873 - DNA, 969 bp, Artificial Sequence
  derived and/or modified sequence
atggccgatagagactccgggtcggagcaaggtggggctgctttggggagtggcggttccctcggacaccctggaagcggaagtggcagcggaggagggggaggaggtgggggtgggggaggcggatccggcggagggggaggcggagcgccagggggtttacaacatgaaacacaggaactcgcttcaaagcgagtggacatccagaacaaacgcttctatctggacgttaagcaaaacgccaaagggcgttttcttaagatcgccgaagtcggcgcaggagggaacaaatctcgcctgaccttgagtatgtctgtcgccgtcgaattccgagactatttgggagattttatcgagcactacgcccagctgggcccaagtcagccgcctgacctggctcaggcccaggacgagccgcgacgtgccttgaagagtgagtttttagtgagggaaaacagaaaatattacatggatttgaaggaaaatcagaggggcagattcctgagaattagacagacagtgaatagaggtcctgggcttgggagtactcagggacagaccatcgctttgcctgcccaaggacttattgaattccgggatgcactggctaagctgatcgatgactatggggtggaagaggagcccgcagaactgccagaaggcacatctctcacggtcgataataaacgtttttttttcgacgttggaagcaataaatacggagtgttcatgcgcgtgtctgaggtgaaaccaacctacagaaactctattacggtcccatacaaagtctgggccaaattcggacatacgttctgcaagtactcggaagaaatgaagaagatccaggaaaagcagcgtgagaagcgagcagcctgtgagcagttgcatcagcagcagcagcagcaacaagaagagaccgcagcagctacactgttgctgcagggggaggaagagggcgaggaagactag

SEQ ID NO: 159874 - protein, 263 aa, Artificial Sequence
  derived and/or modified sequence
MRPGAPGPLWPLPWGALAWAVGFVSSMGSGNPAPGGVCWLQQGQEATCSLVLQTDVTRAECCASGNIDTAWSNLTHPGNKINLLGFLGLVHCLPCKDSCDGVECGPGKACRMLGGRPRCECAPDCSGLPARLQVCGSDGATYRDECELRAARCRGHPDLSVMYRGRCRKSCEHVVCPRPQSCVVDQTGSAHCVVCRAAPCPVPSSPGQELCGNNNVTYISSCHMRQATCFLGRSIGVRHAGSCAGTPEEPPGGESAEEEENFV

SEQ ID NO: 159875 - DNA, 2511 bp, Artificial Sequence
  derived and/or modified sequence
gggaagtcggtgccgctgccgtctctgcgttcgccatgcgtcccggggcgccagggccactctggcctctgccctggggggccctggcttgggccgtgggcttcgtgagctccatgggctcggggaaccccgcgcccggtggtgtttgctggctccagcagggccaggaggccacctgcagcctggtgctccagactgatgtcacccgggccgagtgctgtgcctccggcaacattgacaccgcctggtccaacctcacccacccggggaacaagatcaacctcctcggcttcttgggccttgtccactgccttccctgcaaagattcgtgcgacggcgtggagtgcggcccgggcaaggcgtgccgcatgctggggggccgcccgcgctgcgagtgcgcgcccgactgctcggggctcccggcgcggctgcaggtctgcggctcagacggcgccacctaccgcgacgagtgcgagctgcgcgccgcgcgctgccgcggccacccggacctgagcgtcatgtaccggggccgctgccgcaagtcctgtgagcacgtggtgtgcccgcggccacagtcgtgcgtcgtggaccagacgggcagcgcccactgcgtggtgtgtcgagcggcgccctgccctgtgccctccagccccggccaggagctttgcggcaacaacaacgtcacctacatctcctcgtgccacatgcgccaggccacctgcttcctgggccgctccatcggcgtgcgccacgcgggcagctgcgcaggcacccctgaggagccgccaggtggtgagtctgcagaagaggaagagaacttcgtgtgagcctgcaggacaggcctgggcctggtgcccgaggccccccatcatcccctgttatttattgccacagcagagtctaatttatatgccacggacactccttagagcccggattcggaccacttggggatcccagaacctccctgacgatatcctggaaggactgaggaagggaggcctgggggccggctggtgggtgggatagacctgcgttccggacactgagcgcctgatttagggcccttctctaggatgccccagcccctaccctaagacctattgccggggaggattccacacttccgctcctttggggataaacctattaattattgctactatcaagagggctgggcattctctgctggtaattcctgaagaggcatgactgcttttctcagccccaagcctctagtctgggtgtgtacggagggtctagcctgggtgtgtacggagggtctagcctgggtgagtacggagggtctagcctgggtgagtacggagggtctagcctgggtgagtacggagggtctagcctgggtgtgtatggaggatctagcctgggtgagtatggagggtctagcctgggtgagtatggagggtctagcctgggtgtgtatggagggtctagcctgggtgagtatggagggtctagcctgggtgtgtatggagggtctagcctgggtgagtatggagggtctagcctgggtgtgtacggagggtctagtctgagtgcgtgtggggacctcagaacactgtgaccttagcccagcaagccaggcccttcatgaaggccaagaaggctgccaccattccctgccagcccaagaactccagcttccccactgcctctgtgtgcccctttgcgtcctgtgaaggccattgagaaatgcccagtgtgccccctgggaaagggcacggcctgtgctcctgacacgggctgtgcttggccacagaaccacccagcgtctcccctgctgctgtccacgtcagttcatgaggcaacgtcgcgtggtctcagacgtggagcagccagcggcagctcagagcagggcactgtgtccggcggagccaagtccactctgggggagctctggcggggaccacgggccactgctcacccactggccccgaggggggtgtagacgccaagactcacgcatgtgtgacatccggagtcctggagccgggtgtcccagtggcaccactaggtgcctgctgcctccacagtggggttcacacccagggctccttggtcccccacaacctgccccggccaggcctgcagacccagactccagccagacctgcctcacccaccaatgcagccggggctggcgacaccagccaggtgctggtcttgggccagttctcccacgacggctcaccctcccctccatctgcgttgatgctcagaatcgcctacctgtgcctgcgtgtaaaccacagcctcagaccagctatggggagaggacaacacggaggatatccagcttccccggtctggggtgaggaatgtggggagcttgggcatcctcctccagcctcctccagcccccaggcagtgccttacctgtggtgcccagaaaagtgcccctaggttggtgggtctacaggagcctcagccaggcagcccaccccaccctggggccctgcctcaccaaggaaataaagactcaagccattt

SEQ ID NO: 159876 - DNA, 792 bp, Artificial Sequence
  derived and/or modified sequence
atgcgaccaggggcccctggcccactgtggccacttccctggggagctctggcttgggcggtaggcttcgtctccagtatggggtctgggaaccctgctcctggaggagtctgttggttgcaacaaggtcaggaggcaacatgcagcctagtcctgcaaaccgacgtgactcgggctgagtgttgtgcttctggtaacattgataccgcttggtcaaatctgacccaccctggtaacaaaatcaacctgcttgggttcctgggtctggtgcactgtttgccctgcaaggatagctgcgacggcgtggagtgtggtccaggaaaagcatgccggatgctgggaggcagacccagatgtgagtgcgcacccgactgcagcggcctccctgcaaggttacaagtgtgcgggtccgacggcgctacttatagagacgagtgtgaactaagagcagcacgctgtcgcggccaccccgatctctctgtgatgtatcggggaagatgccgcaagtcctgcgaacacgtggtgtgcccacgaccacagtcatgtgtggtggaccagactggctctgctcattgcgtggtctgtagggcggctccctgccccgtgccctcttctccaggccaggagctgtgtggaaataataatgttacctacatatcgtcgtgtcacatgcgccaggccacttgcttcttggggaggagtattggtgtgcgacacgcaggctcatgtgcaggcacccccgaggagcctccagggggagagagcgctgaggaggaggagaattttgtatag

SEQ ID NO: 159877 - DNA, 792 bp, Artificial Sequence
  derived and/or modified sequence
atgaggcctggggcccctggccccctgtggcccctgccctggggcgccctggcctgggccgtgggctttgtgtcctccatgggcagcggcaacccagcccctgggggcgtgtgctggctgcagcagggccaggaggccacctgcagcctggtgctgcagacagatgtgaccagggctgagtgctgtgccagcggcaacatcgacacagcctggagcaacctgacccaccctggcaacaagatcaacctgctgggcttcctgggcctggtgcactgcctgccctgcaaggacagctgtgatggagtggagtgtggccctgggaaggcctgcaggatgctgggcggccggccccgctgtgaatgtgccccagactgcagcggcctgcctgcccggctgcaggtgtgtggcagtgatggagccacctacagagatgaatgtgagctgcgggccgcccgctgccggggccacccagacctgtctgtgatgtaccggggccgctgcaggaagagctgtgaacatgtggtgtgcccccggccccagagctgtgtggtggaccagacaggcagcgcccactgtgtggtgtgcagagctgccccctgccctgtgcccagcagccctggccaggagctgtgtggcaacaacaacgtgacctacatcagcagctgccacatgaggcaggccacctgcttcctgggccgcagcattggagtgagacatgctggcagctgtgccggcaccccagaggagcccccaggaggagagagcgctgaggaggaggagaactttgtgtag

SEQ ID NO: 159878 - DNA, 792 bp, Artificial Sequence
  derived and/or modified sequence
atgcggcccggcgcccccggccccctgtggcccctgccctggggcgctctggcgtgggcggttggttttgtgtcaagcatggggagtggaaaccctgctccaggcggagtgtgttggcttcaacaaggtcaggaagccacctgcagcttggtattgcaaacagacgtgactcgcgcagaatgctgtgcgtcaggaaatatcgatactgcttggtcaaacctgacccatcctggcaacaaaatcaatttactgggctttcttgggctagtgcactgtctcccatgtaaggatagctgcgatggtgtcgaatgtggtcctggaaaggcatgccgcatgttaggcggtagacccagatgtgagtgcgctccagattgttcaggccttccggcacggctccaggtgtgcggctcagacggtgccacgtatcgggacgaatgcgaacttcgggctgccagatgtcggggccatcccgatttgagcgtgatgtaccgcggaaggtgtcggaagagttgcgagcacgtcgtgtgccctcggccccagtcttgcgtggtcgaccaaaccggtagcgctcattgtgtggtatgccgggctgcaccttgtcctgtcccttcgagcccagggcaggagctgtgtggtaataataacgtgacttacatcagttcttgccacatgcgccaggccacctgctttctcggcagaagtattggtgtgcgccacgccggctcttgcgcaggaacaccagaggaaccaccaggtggcgaaagcgccgaagaggaagagaactttgtgtag

SEQ ID NO: 159879 - DNA, 792 bp, Artificial Sequence
  derived and/or modified sequence
atgagacctggcgctcctgggccactgtggcctcttccatggggggcactggcctgggccgtcggctttgtgtcttcaatgggctccggcaacccggctcccggaggtgtgtgttggttgcagcaggggcaagaggcgacctgctcacttgtactgcagaccgacgtcactagagctgaatgctgtgcaagcgggaatatcgatacggcctggtcgaatctgacacatcctggaaataaaattaacttactcgggttcctggggctagtccattgcctcccatgtaaggattcttgtgatggagttgaatgcggcccagggaaagcctgcagaatgcttggtggccgaccacgctgtgaatgcgcccctgattgttccggcctgcctgccaggttgcaggtgtgtggatctgatggagccacataccgggacgaatgcgagctgcgggcagcaaggtgtcgcggtcatccagacttgtctgtcatgtacaggggcaggtgtcgaaagtcctgtgagcacgttgtctgccctcgaccccaaagttgtgtggttgaccagactggatctgcccactgtgtggtatgcagagctgcaccatgcccagtccccagctctcccggtcaggaactgtgtggaaacaacaatgtgacttacatttcatcatgccacatgagacaggccacttgcttcctcggtagatcaattggcgtccgccacgccggtagttgtgctgggacacctgaggaaccgcctggcggtgaatccgcggaggaggaagagaactttgtctag

SEQ ID NO: 159880 - DNA, 792 bp, Artificial Sequence
  derived and/or modified sequence
atgcgacctggggcacctggacctctttggccccttccatggggtgcacttgcttgggcagtaggtttcgtgtcaagcatgggaagcgggaatccagcacctggtggagtgtgctggctccagcagggacaggaggccacatgtagccttgtgttgcagacagatgttacccgtgctgagtgctgtgcgagcggtaacattgacacagcatggtcaaacctgacacaccccggtaataagattaatctcctgggcttcttgggtcttgttcattgcctgccatgtaaagactcatgtgatggcgttgagtgcggcccaggaaaggcttgtagaatgctcggaggtaggcccagatgtgagtgcgctcctgactgttcagggcttccagcccggctgcaagtctgtgggtccgatggggctacatatagagacgaatgtgaactcagagccgctcggtgtcgagggcaccctgacctttcagtaatgtacaggggtagatgtagaaagagctgtgaacatgtggtctgcccacgtccacaaagctgcgtggtagaccaaacgggatcagcccattgcgtcgtatgtagggccgctccttgtccagtcccctcttctcccggacaggaactttgcggaaataacaacgtcacttacatatcctcgtgtcacatgagacaagccacctgcttcctcggccgttccatcggtgtgagacatgcaggtagctgtgctggaacaccggaagagcctcctggcggagaatccgcagaggaggaagagaattttgtctag

SEQ ID NO: 159881 - DNA, 792 bp, Artificial Sequence
  derived and/or modified sequence
atgaggcctggagcccctggccctttgtggccccttccttggggagctctcgcttgggctgttggattcgtttcttctatgggtagcggaaatcccgctcctgggggtgtgtgctggttacagcaggggcaggaggcaacatgttcacttgtcctgcagaccgatgtaacacgggccgagtgctgcgcatcaggcaacattgacactgcatggagtaatttaactcacccaggtaataagattaacctactcggctttctgggacttgtacactgccttccatgcaaagactcttgcgacggcgttgaatgtggtccgggaaaggcgtgtcgaatgctgggtggcaggcccaggtgtgaatgtgctcccgactgctcagggctccctgcaaggctccaggtttgtggatccgatggcgccacatacagagacgagtgtgaacttcgggcggccagatgtcgcggtcatcctgatctatccgtgatgtaccggggaagatgtcgaaagagttgtgaacacgtggtgtgccccaggccacagtcttgtgtcgtggaccagacaggctctgctcactgcgtcgtgtgccgtgctgctccatgccccgtcccaagtagtcctggccaggaattgtgcggcaacaacaacgttacatatatttcttcgtgccacatgcgtcaagcaacatgtttccttggtaggtctattggtgtacgtcatgctggatcctgcgccggcacccccgaagaacctccaggcggggagtctgcagaagaggaagagaacttcgtatag

SEQ ID NO: 159882 - DNA, 792 bp, Artificial Sequence
  derived and/or modified sequence
atgagacccggcgcccccggccccctgtggcccctgccctggggcgccctggcctgggccgtgggcttcgtgagcagcatgggcagcggcaaccccgcccccggcggcgtgtgctggctgcagcagggccaggaggccacctgcagcctggtgctgcagaccgacgtgaccagagccgagtgctgcgccagcggcaacatcgacaccgcctggagcaacctgacccaccccggcaacaagatcaacctgctgggcttcctgggcctggtgcactgcctgccctgcaaggacagctgcgacggcgtggagtgcggccccggcaaggcctgcagaatgctgggcggcagacccagatgcgagtgcgcccccgactgcagcggcctgcccgccagactgcaggtgtgcggcagcgacggcgccacctacagagacgagtgcgagctgagagccgccagatgcagaggccaccccgacctgagcgtgatgtacagaggcagatgcagaaagagctgcgagcacgtggtgtgccccagaccccagagctgcgtggtggaccagaccggcagcgcccactgcgtggtgtgcagagccgccccctgccccgtgcccagcagccccggccaggagctgtgcggcaacaacaacgtgacctacatcagcagctgccacatgagacaggccacctgcttcctgggcagaagcatcggcgtgagacacgccggcagctgcgccggcacccccgaggagccccccggcggcgagagcgccgaggaggaggagaacttcgtgtag

SEQ ID NO: 159883 - protein, 303 aa, Artificial Sequence
  derived and/or modified sequence
MKGKEEKEGGARLGAGGGSPEKSPSAQELKEQGNRLFVGRKYPEAAACYGRAITRNPLVAVYYTNRALCYLKMQQHEQALADCRRALELDGQSVKAHFFLGQCQLEMESYDEAIANLQRAYSLAKEQRLNFGDDIPSALRIAKKKRWNSIEERRIHQESELHSYLSRLIAAERERELEECQRNHEGDEDDSHVRAQQACIEAKHDKYMADMDELFSQVDEKRKKRDIPDYLCGKISFELMREPCITPSGITYDRKDIEEHLQRVGHFDPVTRSPLTQEQLIPNLAMKEVIDAFISENGWVEDY

SEQ ID NO: 159884 - DNA, 912 bp, Artificial Sequence
  derived and/or modified sequence
atgaagggcaaggaggagaaggagggcggcgccagactgggcgccggcggcggcagccccgagaagagccccagcgcccaggagctgaaggagcagggcaacagactgttcgtgggcagaaagtaccccgaggccgccgcctgctacggcagagccatcaccagaaaccccctggtggccgtgtactacaccaacagagccctgtgctacctgaagatgcagcagcacgagcaggccctggccgactgcagaagagccctggagctggacggccagagcgtgaaggcccacttcttcctgggccagtgccagctggagatggagagctacgacgaggccatcgccaacctgcagagagcctacagcctggccaaggagcagagactgaacttcggcgacgacatccccagcgccctgagaatcgccaagaagaagagatggaacagcatcgaggagagaagaatccaccaggagagcgagctgcacagctacctgagcagactgatcgccgccgagagagagagagagctggaggagtgccagagaaaccacgagggcgacgaggacgacagccacgtgagagcccagcaggcctgcatcgaggccaagcacgacaagtacatggccgacatggacgagctgttcagccaggtggacgagaagagaaagaagagagacatccccgactacctgtgcggcaagatcagcttcgagctgatgagagagccctgcatcacccccagcggcatcacctacgacagaaaggacatcgaggagcacctgcagagagtgggccacttcgaccccgtgaccagaagccccctgacccaggagcagctgatccccaacctggccatgaaggaggtgatcgacgccttcatcagcgagaacggctgggtggaggactactag

SEQ ID NO: 159885 - DNA, 912 bp, Artificial Sequence
  derived and/or modified sequence
atgaaaggtaaggaggaaaaagagggcggcgcacgactgggcgccggagggggatctccagagaagtctccgtcggctcaggagctgaaagagcaagggaacagactgttcgtgggccgcaaatatccggaggccgctgcctgctacggtagggccatcaccaggaacccccttgtggccgtttactacacaaaccgtgctctctgttacctgaaaatgcagcagcacgagcaggccttggccgattgtcgtagagccctggaactggacggacagtccgtaaaggctcattttttccttgggcaatgtcagcttgaaatggagagctacgacgaggcaatagcaaatttgcagagagcatactctctggcaaaggagcagcgcctcaatttcggtgacgacatccctagcgcactgaggatcgctaagaagaagcggtggaatagcatcgaagaaaggcggatccaccaggaatctgagttgcactcatacttgtcacggttgatagcagccgaacgagaaagagagctggaggagtgtcagcggaatcatgaaggtgacgaggacgacagccacgtgagggcccaacaggcatgtattgaggccaagcacgacaaatacatggccgatatggacgagttattctcccaggtggacgaaaaaaggaaaaagagagatataccagattacctgtgcgggaaaatctccttcgaactcatgcgggaaccctgtatcaccccctcggggatcacatatgatagaaaagacattgaggaacacttgcaacgggtgggtcattttgatcccgtgacaaggtcccctctgacccaggaacagctgattccaaatctggccatgaaggaagtgatagatgccttcatcagcgaaaacggatgggtcgaggactactag

SEQ ID NO: 159886 - DNA, 912 bp, Artificial Sequence
  derived and/or modified sequence
atgaagggcaaggaggagaaggagggcggggcccggctgggcgccggcggcggcagccctgagaagagccccagcgcccaggagctgaaggagcagggcaaccggctgtttgtgggcaggaagtacccagaggccgccgcctgctacggccgggccatcaccaggaaccccctggtggccgtgtactacaccaacagagccctgtgctacctgaagatgcagcagcacgagcaggccctggccgactgccggcgggccctggagctggatggccagagcgtgaaggcccacttcttcctgggccagtgccagctggagatggagagctatgatgaggccatcgccaacctgcagagggcctacagcctggccaaggagcagaggctgaactttggagatgacatccccagcgccctgagaattgccaagaagaagcgctggaacagcattgaggagcggcgcatccaccaggagagcgagctgcacagctacctgagccggctgattgctgctgagcgggagcgggagctggaggagtgccagaggaaccacgagggagatgaagatgacagccacgtgcgggcccagcaggcctgcatcgaggccaagcatgacaagtacatggctgacatggatgagctgttcagccaggtggatgagaagaggaagaagagggacatcccagactacctgtgtgggaagatcagctttgagctgatgagggagccctgcatcacccccagcggcatcacctatgacaggaaggacatcgaggagcacctgcagagggtgggccactttgatcctgtgaccaggagccccctgacccaggagcagctgatccccaacctggccatgaaggaggtgattgatgccttcatcagtgaaaatggctgggtggaggactactag

SEQ ID NO: 159887 - DNA, 912 bp, Artificial Sequence
  derived and/or modified sequence
atgaagggcaaggaggagaaggagggcggcgcccggctgggcgccggagggggaagtcccgaaaaaagcccaagtgcccaggagcttaaagaacagggaaaccgcctgttcgtcggtcgtaagtaccctgaagcagcagcctgttacggtagagcaattacgcgaaatcctctggtcgcggtgtactacactaacagagccttgtgctatctcaagatgcagcagcatgagcaggccctggcagactgtcggcgagccttagaactggatggccagtccgttaaggctcactttttccttggacagtgtcagttggaaatggagagctacgacgaagctattgcaaatctacagcgcgcatactcccttgccaaagagcagagactgaacttcggagatgacatcccttcagcactcaggatcgccaagaaaaagagatggaatagcatcgaggagagacggattcaccaggaaagcgagctccatagttatctgtcacgcctgattgccgccgaaagagagcgcgaactcgaggagtgccaaaggaatcacgagggggacgaagacgactcccacgtacgggctcagcaggcttgtatcgaggccaaacacgataagtacatggctgatatggacgagttgttctcccaggtagatgaaaagcgcaaaaaacgcgacatcccagattatctctgtgggaagatttctttcgaattgatgcgtgagccatgcattacccccagcgggatcacttacgaccggaaggacatcgaggagcacctacagcgcgtgggacacttcgacccagtgactcgctctccactgactcaggaacagcttattccaaatctagcgatgaaagaagttatcgatgcatttatctccgaaaatggatgggttgaggattattag

SEQ ID NO: 159888 - DNA, 912 bp, Artificial Sequence
  derived and/or modified sequence
atgaagggcaaagaggagaaggagggaggcgctcgcctcggagcaggaggaggcagccctgagaaaagcccctccgcccaggagctgaaggagcaggggaatcgcctgtttgtcggcagaaagtacccagaggctgctgcttgttatggaagggctattactcggaatcctctggtcgcggtgtactacacaaacagggccctttgctacttaaagatgcagcagcatgaacaggcattagcggattgccgaagagctctagagctcgatggtcagagtgtaaaagcccacttttttttggggcagtgtcaactagagatggaatcctatgacgaggcaatcgcgaacttgcagcgcgcttactccctggcgaaagaacagcggctgaattttggagatgacatacctagcgcattaaggatcgcgaaaaagaagcgctggaactccatagaggagcgtcggatccaccaggagagcgaactacactcctacctatcacgacttatcgctgccgaacgcgaacgcgaactcgaggaatgtcagcgtaaccacgaaggcgatgaagacgactcacatgtcagagcccaacaggcttgcattgaagccaagcacgacaagtacatggcagatatggacgagcttttctcccaggtggacgagaagaggaaaaaacgcgacattcctgattacttgtgcggcaagatcagtttcgaactcatgcgggaaccatgcatcacgccttccgggattacttacgaccggaaagacatcgaagaacacctgcagcgggtgggtcatttcgaccctgtgacacggagcccgctcacccaagaacagttaatcccgaacctggccatgaaggaggtgatcgacgctttcatctcggaaaacgggtgggtagaggactattag

SEQ ID NO: 159889 - DNA, 1426 bp, Artificial Sequence
  derived and/or modified sequence
tggagcgttcctcccagcccccgacgtcgcgggcccagtgtccccgtccaggctggttgggcgcacgcgcggccccactcgcccccacgcgtgcgtccccgctggtcccgcccccggccggaagttccggcggcggagctgggccgggcccgagcggatcgcgggctcgggctgcggggctccggctgcgggcgctgggccgcgaggcgcggagcttgggagcggagcccaggccgtgccgcgcggcgccatgaagggcaaggaggagaaggagggcggcgcacggctgggcgctggcggcggaagccccgagaagagcccgagcgcgcaggagctcaaggagcagggcaatcgtctgttcgtgggccgaaagtacccggaggcggcggcctgctacggccgcgcgatcacccggaacccgctggtggccgtgtattacaccaaccgggccttgtgctacctgaagatgcagcagcacgagcaggccctggccgactgccggcgcgccctggagctggacgggcagtctgtgaaggcgcacttcttcctggggcagtgccagctggagatggagagctatgatgaggccatcgccaatctgcagcgagcttacagcctggccaaggagcagcggctgaacttcggggacgacatccccagcgctcttcgaatcgcgaagaagaagcgctggaacagcattgaggagcggcgcatccaccaggagagcgagctgcactcctacctctccaggctcattgccgcggagcgtgagagggagctggaagagtgccagcgaaaccacgagggtgatgaggacgacagccacgtccgggcccagcaggcctgcattgaggccaagcacgacaagtacatggcggacatggacgagcttttttctcaggtggatgagaagaggaagaagcgagacatccccgactacctgtgtggcaagatcagctttgagctgatgcgggagccgtgcatcacgcccagtggcatcacctacgaccgcaaggacatcgaggagcacctgcagcgtgtgggtcattttgaccccgtgacccggagccccctgacccaggaacagctcatccccaacttggctatgaaggaggttattgacgcattcatctctgagaatggctgggtggaggactactgaggttccctgccctacctggcgtcctggtccaggggagccctgggcagaagcccccggcccctatacatagtttatgttcctggccaccccgaccgcttcccccaagttctgctgttggactctggactgtttcccctctcagcatcgcttttgctgggccgtgatcgtccccctttgtgggctggaaaagcaggtgagggtgggctgggctgaggccattgccgccactatctgtgtaataaaatccgtgagcacgaggtggga

SEQ ID NO: 159890 - protein, 1221 aa, Artificial Sequence
  derived and/or modified sequence
MITSELPVLQDSTNETTAHSDAGSELEETEVKGKRKRGRPGRPPSTNKKPRKSPGEKSRIEAGIRGAGRGRANGHPQQNGEGEPVTLFEVVKLGKSAMQSVVDDWIESYKQDRDIALLDLINFFIQCSGCRGTVRIEMFRNMQNAEIIRKMTEEFDEDSGDYPLTMPGPQWKKFRSNFCEFIGVLIRQCQYSIIYDEYMMDTVISLLTGLSDSQVRAFRHTSTLAAMKLMTALVNVALNLSIHQDNTQRQYEAERNKMIGKRANERLELLLQKRKELQENQDEIENMMNSIFKGIFVHRYRDAIAEIRAICIEEIGVWMKMYSDAFLNDSYLKYVGWTLHDRQGEVRLKCLKALQSLYTNRELFPKLELFTNRFKDRIVSMTLDKEYDVAVEAIRLVTLILHGSEEALSNEDCENVYHLVYSAHRPVAVAAGEFLHKKLFSRHDPQAEEALAKRRGRNSPNGNLIRMLVLFFLESELHEHAAYLVDSLWESSQELLKDWECMTELLLEEPVQGEEAMSDRQESALIELMVCTIRQAAEAHPPVGRGTGKRVLTAKERKTQIDDRNKLTEHFIITLPMLLSKYSADAEKVANLLQIPQYFDLEIYSTGRMEKHLDALLKQIKFVVEKHVESDVLEACSKTYSILCSEEYTIQNRVDIARSQLIDEFVDRFNHSVEDLLQEGEEADDDDIYNVLSTLKRLTSFHNAHDLTKWDLFGNCYRLLKTGIEHGAMPEQIVVQALQCSHYSILWQLVKITDGSPSKEDLLVLRKTVKSFLAVCQQCLSNVNTPVKEQAFMLLCDLLMIFSHQLMTGGREGLQPLVFNPDTGLQSELLSFVMDHVFIDQDEENQSMEGDEEDEANKIEALHKRRNLLAAFSKLIIYDIVDMHAAADIFKHYMKYYNDYGDIIKETLSKTRQIDKIQCAKTLILSLQQLFNELVQEQGPNLDRTSAHVSGIKELARRFALTFGLDQIKTREAVATLHKDGIEFAFKYQNQKGQEYPPPNLAFLEVLSEFSSKLLRQDKKTVHSYLEKFLTEQMMERREDVWLPLISYRNSLVTGGEDDRMSVNSGSSSSKTSSVRNKKGRPPLHKKRVEDESLDNTWLNRTDTMIQTPGPLPAPQLTSTVLRENSRPMGDQIQEPESEHGSEPDFLHNRGLMEEDAEPIFEDVMMSSRSQLEDMNEEFEDTMVIDLPPSRNRRERAELRPDFFDSAAIIEDDSGFGMPMF

SEQ ID NO: 159891 - protein, 1258 aa, Artificial Sequence
  derived and/or modified sequence
MITSELPVLQDSTNETTAHSDAGSELEETEVKGKRKRGRPGRPPSTNKKPRKSPGEKSRIEAGIRGAGRGRANGHPQQNGEGEPVTLFEVVKLGKSAMQSVVDDWIESYKQDRDIALLDLINFFIQCSGCRGTVRIEMFRNMQNAEIIRKMTEEFDEDSGDYPLTMPGPQWKKFRSNFCEFIGVLIRQCQYSIIYDEYMMDTVISLLTGLSDSQVRAFRHTSTLAAMKLMTALVNVALNLSIHQDNTQRQYEAERNKMIGKRANERLELLLQKRKELQENQDEIENMMNSIFKGIFVHRYRDAIAEIRAICIEEIGVWMKMYSDAFLNDSYLKYVGWTLHDRQGEVRLKCLKALQSLYTNRELFPKLELFTNRFKDRIVSMTLDKEYDVAVEAIRLVTLILHGSEEALSNEDCENVYHLVYSAHRPVAVAAGEFLHKKLFSRHDPQAEEALAKRRGRNSPNGNLIRMLVLFFLESELHEHAAYLVDSLWESSQELLKDWECMTELLLEEPVQGEEAMSDRQESALIELMVCTIRQAAEAHPPVGRGTGKRVLTAKERKTQIDDRNKLTEHFIITLPMLLSKYSADAEKVANLLQIPQYFDLEIYSTGRMEKHLDALLKQIKFVVEKHVESDVLEACSKTYSILCSEEYTIQNRVDIARSQLIDEFVDRFNHSVEDLLQEGEEADDDDIYNVLSTLKRLTSFHNAHDLTKWDLFGNCYRLLKTGIEHGAMPEQIVVQALQCSHYSILWQLVKITDGSPSKEDLLVLRKTVKSFLAVCQQCLSNVNTPVKEQAFMLLCDLLMIFSHQLMTGGREGLQPLVFNPDTGLQSELLSFVMDHVFIDQDEENQSMEGDEEDEANKIEALHKRRNLLAAFSKLIIYDIVDMHAAADIFKHYMKYYNDYGDIIKETLSKTRQIDKIQCAKTLILSLQQLFNELVQEQGPNLDRTSAHVSGIKELARRFALTFGLDQIKTREAVATLHKDGIEFAFKYQNQKGQEYPPPNLAFLEVLSEFSSKLLRQDKKTVHSYLEKFLTEQMMERREDVWLPLISYRNSLVTGGEDDRMSVNSGSSSSKTSSVRNKKGRPPLHKKRVEDESLDNTWLNRTDTMIQTPGPLPAPQLTSTVLRENSRPMGDQIQEPESEHGSEPDFLHNPQMQISWLGQPKLEDLNRKDRTGMNYMKVRTGVRHAVRGLMEEDAEPIFEDVMMSSRSQLEDMNEEFEDTMVIDLPPSRNRRERAELRPDFFDSAAIIEDDSGFGMPMF

SEQ ID NO: 159892 - DNA, 3666 bp, Artificial Sequence
  derived and/or modified sequence
atgatcacatccgaactcccagtgctgcaagactccactaatgaaacaaccgcccatagcgacgccggcagtgagctggaggagaccgaagtgaagggcaagcgaaagcgggggcgccccggcagaccgccttctaccaataagaagccgcgtaagtcaccgggagagaagtccagaatagaggcaggaattaggggcgccggaagaggacgcgcaaacggccatcctcagcagaacggcgagggagagccagttactctattcgaggtggtgaagttgggaaagtccgctatgcaatccgtcgtggatgattggatcgagtcctacaagcaggatagagacatcgcactgctggacctcattaacttctttattcagtgctccgggtgccggggtacagttcgtatcgagatgttcaggaacatgcagaacgctgagattatcaggaaaatgactgaggagttcgatgaggattctggtgattatcccctcacaatgcccggaccccagtggaagaaattcagatctaatttctgtgaatttatcggggtgctgatccgacaatgccagtacagtatcatctatgacgaatatatgatggacacagtgatttcactgctcaccggccttagtgattcccaggtgcgcgccttcagacacacgagtacactggccgccatgaagttgatgaccgcgctggttaacgtcgcccttaacctctccatccaccaagacaatacccaaagacagtacgaggctgaaaggaataagatgatagggaagagagctaatgagagattggagctgctgttgcagaagcgtaaggagttgcaggagaatcaggatgagatcgagaacatgatgaatagtatcttcaaaggaatctttgtgcataggtaccgtgacgctatcgccgagatcagggccatttgtatagaggagattggggtctggatgaaaatgtattctgacgcctttttgaacgactcatatcttaaatacgtgggctggaccttgcacgacaggcagggtgaggttcggctgaaatgcctgaaagctctgcagtcgctgtacaccaatagggaactcttccccaagctggagctgttcaccaatagattcaaagataggatcgtgtccatgacactggataaagaatacgacgtggccgtagaggccatcagactcgtgaccctcatcttgcatgggtccgaagaagcattgtccaatgaagattgcgagaacgtctaccatttagtctactccgcccataggccagtggcggtcgccgccggggagtttctacacaagaaactgttctcccgccacgatccgcaggcagaggaggcactggctaagagaagaggtagaaacagccccaatggcaatttgatcaggatgctggtattattttttctcgaatccgagttgcatgaacacgcggcgtacctggtggattctctctgggagagtagtcaagaactgctcaaggactgggagtgtatgactgagctcctactcgaggaaccagtgcagggggaagaggctatgagcgacagacaggagagcgcactgatcgaactaatggtgtgcaccatcaggcaggccgccgaggcccacccccctgtggggagaggcacaggaaagcgagtgctgaccgccaaggagcgaaaaacccagatcgacgaccgcaacaagctcacagaacacttcataatcactcttccaatgcttttgtctaagtactctgctgacgctgagaaggtcgcgaatctgctgcaaatcccgcagtacttcgacctggagatatactcaaccgggcgcatggagaagcacctggatgcgctgctgaagcaaattaaattcgtggtcgaaaaacatgttgagtcagacgttctcgaggcatgttccaagacctacagtatcctttgcagcgaagagtataccatccagaatcgcgtcgatatcgcaagaagccaactgatcgacgagtttgtggacagatttaaccatagtgtcgaagatttgctgcaagagggcgaggaggcagatgatgacgatatctacaacgttctatcaaccctgaaacgtctgacctcattccacaatgcccatgatcttacgaagtgggacctattcgggaactgctaccgcctgctgaaaacaggcattgaacatggagcgatgccggaacagattgtggtgcaggcactgcaatgttcccactacagcatcctctggcagctggttaagatcacagacggtagcccctctaaggaggacctgctggtgctccgtaagaccgtcaagtcttttctggccgtgtgccagcagtgtttgtcaaacgttaacactcccgtcaaggagcaagctttcatgctgctttgcgacctgttgatgattttttctcaccagctgatgaccgggggaagagagggtctccaaccattggtgtttaacccagatacggggctgcagagtgagcttctaagcttcgtaatggatcatgtgttcatcgaccaagacgaagagaaccagtcgatggagggggacgaagaggacgaagccaacaagatagaagctttgcacaagcggcggaacttgttggctgcgttcagcaaactcatcatttacgatatcgtggacatgcacgctgcagccgacatttttaagcactatatgaaatactacaatgactacggggacatcataaaggaaaccctttcgaagacacgtcagatcgataaaatccagtgtgcaaaaactctgattctgtctctccaacagctttttaacgagctggttcaagaacaggggccaaacttggatcgcacgagcgctcatgtgtccggaataaaggaactagcaagaaggtttgccctgacttttggcctcgatcagatcaagaccagagaggccgttgcaaccctccacaaggatggcattgaattcgcctttaagtatcagaaccaaaagggccaagagtatcctccgcccaacttggcatttctggaggtactcagcgagttttcttccaaactcctcagacaggacaagaagacagtgcactcatatctcgagaagttccttacagagcagatgatggagcgaagagaggatgtctggcttcccttgatttcctaccgcaacagtctggtgaccggcggggaagacgataggatgtctgtaaattctggatcgagtagcagcaagacgagctccgtaagaaataagaaagggcgtccacctctgcacaagaagcgggtcgaagatgaaagtctagataacacttggctgaaccggactgacaccatgatacagactcctggacccctccccgcaccccagttgacctccacggtgctgagggaaaattcccgtcccatgggggaccagattcaggagcccgagtccgaacacgggtcagagcccgacttccttcataacaggggcctcatggaagaggacgccgagcctatctttgaagacgtgatgatgagtagccgcagccagcttgaggacatgaacgaggagtttgaggataccatggtgatcgatctgcccccatccagaaaccggcgggaaagggctgagctgagaccagacttttttgattcagccgcgatcatcgaagatgatagcggcttcgggatgccgatgttctag

SEQ ID NO: 159893 - DNA, 3777 bp, Artificial Sequence
  derived and/or modified sequence
atgataacgtcggagctccccgtactgcaggattccactaatgaaactaccgcccattcggatgccggcagcgaactggaggagaccgaggtgaaagggaagagaaagagaggaagacccggccgacctccaagcacaaacaagaaaccgcgaaaatctcctggcgagaagtcacggatcgaagccggcatcaggggagccgggagagggagagcgaacgggcatccacagcagaatggggagggagaaccagtcactctttttgaggtggtgaaattaggcaaaagcgcaatgcagtccgtcgtggacgattggatagagtcatataagcaagatcgtgacatcgcccttctggatcttattaatttcttcattcaatgttccgggtgccggggcacagtgcggattgagatgttccgaaatatgcagaacgccgagattattcggaagatgacagaggagtttgacgaagacagcggtgactatcccctaaccatgcccggcccgcagtggaagaaattccgcagtaatttttgtgaattcatcggcgtgctcatacgccagtgtcagtattccataatttacgatgaatatatgatggatacggtaattagtttactgaccgggctgagcgacagccaggtaagagcctttcgacatacgtcaacgctcgccgccatgaaactgatgacagctctggtcaacgtggcgctgaatctcagtattcaccaggataacacccagcggcagtacgaagcagagagaaacaaaatgatcggtaagagggcgaacgagcgtcttgagttgttgcttcaaaagcggaaagagctccaagagaatcaggacgaaattgagaacatgatgaatagtatcttcaaggggatattcgtccacagatacagagatgccatcgctgaaatcagagcaatatgcatagaggagatcggagtgtggatgaagatgtacagtgacgcattccttaacgattcatatctaaaatacgtgggctggacgctgcatgaccggcagggggaagtaagactgaagtgcttgaaggcccttcagtccctgtatactaaccgggaacttttccctaagctggagctgttcaccaatcggttcaaagatcgaattgtgagcatgaccctcgataaggagtacgatgttgcagtcgaagctattaggctagtgacccttatactccacggaagtgaggaggctctgagcaacgaagattgcgaaaatgtctaccacctcgtgtatagtgcccacagaccagtagccgtggccgcaggagaattcttacataagaagttgttcagcaggcacgacccgcaggccgaagaagctttggctaagcgacgtgggcgtaacagtcctaacggaaacctcattcggatgctggttctgttttttctcgaatctgaactgcatgagcatgccgcttatttagtcgacagtctctgggagtccagccaagagcttttgaaagactgggagtgtatgacagagctcctcctggaggagccagtccagggtgaggaagcaatgagtgatagacaggagagcgctctcatagagctgatggtatgtaccattcgccaggctgcggaggcccacccgcctgtagggcgtggcaccggaaaacgcgtcctgacggctaaggaaaggaaaacccagatagatgacagaaacaagcttactgaacacttcattatcacattacctatgcttctctccaagtactcagctgacgccgaaaaggtggccaatttacttcagatcccccaatactttgatctggaaatctattccacagggagaatggagaaacacttagacgccctcctcaagcagatcaaattcgttgtggagaagcatgttgagtctgacgtgctagaggcatgctccaagacctacagtatcctgtgctccgaagaatacaccatccagaacagagttgacatcgcacgcagccaattgattgacgaatttgtggaccggttcaaccattctgtagaagacttgcttcaggagggagaggaggccgatgacgacgacatctacaacgttctgtccacactgaagcgactgacctcatttcataacgcccacgacctcactaaatgggatctctttgggaactgctatcgtttactcaagaccggtatagaacacggggccatgccagaacagattgttgtgcaagctctccagtgttcccactatagtatcctctggcaattggttaaaatcactgatggcagtccctccaaggaggacctgctcgtacttaggaagacggtgaagtctttcctggccgtctgccaacagtgtctgagcaacgtgaacacacctgttaaggaacaggcctttatgttgctgtgcgatttgctgatgatattttcacaccagctcatgacaggtgggcgtgagggcttgcagcccttggtctttaacccagacaccggcctgcagagcgaactcttgagctttgtgatggatcatgtattcatagatcaggatgaagagaaccagagcatggaaggcgacgaggaggacgaggcaaacaagatcgaagcattgcataagcgtcggaatctcctggccgccttttcaaaactgatcatctatgacattgttgacatgcacgccgctgcagatatcttcaagcattacatgaagtattataacgactacggtgacattattaaagagacactcagcaaaacaagacagatcgacaagatccagtgcgccaaaacactaattctctcactacagcaactgttcaacgagctggtccaggaacaggggccgaacctggaccgcaccagcgcacatgtttcaggaattaaggagctagcacgaaggttcgcgctcacttttggcctcgatcaaattaagacccgggaggccgtggccacactgcacaaagacggaatcgagttcgccttcaagtaccagaaccagaaaggccaggagtatccacctccaaacctggcatttctagaggttctttccgagttcagctccaagctattacggcaagacaaaaagaccgtgcattcctacctcgaaaagtttttaaccgagcagatgatggagaggagagaagatgtgtggctcccccttatatcgtatcgtaacagtctggttacaggcggtgaggacgataggatgtcggtcaattccggatcctcaagctctaagacgagctccgtccggaacaagaagggccgcccacctctacacaaaaaacgtgtggaggacgagtcactggataatacgtggctgaataggacggatacaatgatacagacccccgggcctctgcccgcaccacaactgacgtccactgtattgagggagaattcgaggccgatgggcgaccagatacaggagccagagagcgagcacggctcagaacccgacttcctgcataatccccaaatgcagatttcgtggctcgggcagcctaaactggaggatcttaaccggaaagataggaccggcatgaattatatgaaagtacgaactggggttagacatgcagtccgaggcttgatggaggaggatgccgagccgatctttgaggatgtcatgatgagctctaggtcacagctggaggatatgaacgaggagtttgaagacacaatggtgatcgacctgccgccgagtcgcaaccggcgggagcgagctgagttacgacccgacttttttgattcggccgcgatcatcgaagatgatagcggatttgggatgccaatgttttag

SEQ ID NO: 159894 - DNA, 2997 bp, Artificial Sequence
  derived and/or modified sequence
atgaagctgatgaccgccctggtgaatgttgcccttaacctttctattcaccaggataacactcagcggcagtatgaggcagagagaaacaaaatgataggaaagagagccaatgaacggctcgagctccttctgcagaagcggaaggagctccaagaaaaccaggacgaaatagagaacatgatgaatagcatttttaaaggcatctttgttcatagatatagagatgccattgctgaaattcgagctatttgtatcgaggagatcggggtttggatgaagatgtatagtgacgcctttttgaacgattcctatctgaagtacgtggggtggacactccatgatagacagggggaggttaggctcaaatgtttaaaggcactgcagagcctctacactaatagggaactcttccctaagctggaactgtttacgaaccgattcaaagatcggatcgtgtcaatgaccctcgataaggagtacgacgtggctgtcgaggctatacgtctagtgaccctcatcttgcacggaagcgaagaagcacttagtaacgaggactgcgaaaatgtgtaccaccttgtctattctgcccacaggccagttgccgtggcagcgggggaattcctccacaaaaaactgttctccagacatgaccctcaagcagaggaagccctggccaagagaagaggccgcaactctcccaacggaaatttgatcaggatgctggtcctgtttttcctcgaatccgagctgcatgagcatgcagcatatctggtcgatagcctgtgggaaagttcccaggagctgctgaaggattgggaatgcatgacagaactgttgctcgaggaaccagtgcagggggaggaagctatgtcagaccggcaggaatctgcccttatagaactgatggtgtgcacaattaggcaggcagcagaagctcacccaccggttggacgaggcaccggtaagcgagtcttaaccgcaaaggaacgcaagacacagatcgacgatcggaataagctcacggagcactttataatcactctgcctatgttgttgagcaagtattctgctgacgccgaaaaggtcgcgaacctcctacagatacctcagtactttgatttggaaatttatagcacgggccgaatggaaaagcacttagatgctctgttaaagcagataaagttcgtcgtcgagaaacacgtggagagcgacgtgctggaggcttgctccaaaacgtattccattctctgttccgaagagtacactatccagaaccgcgttgacattgccagatcccagctgattgacgagttcgtggataggtttaatcactctgtggaagatctactgcaggaaggcgaagaagccgatgacgacgacatatataacgtgctctccacgctcaaacgcctcacaagttttcataacgctcacgatctgacgaagtgggacttgtttgggaattgttatcggctgttgaaaaccggaatcgagcacggagctatgcctgagcagatagtggtgcaggctttgcagtgttcccactacagtattctctggcagttagtgaagataaccgatggctcacccagtaaggaagatttgcttgtcctgagaaagactgtcaaatccttcctggcggtgtgtcagcaatgcctgtctaacgtaaacactcccgtcaaggaacaggccttcatgctgttgtgcgatcttttgatgatattctcccaccagctgatgactggcggacgagaagggttacagcccttggtctttaatcccgacactgggcttcaaagtgaactgctttcctttgtgatggaccacgtctttattgatcaggacgaagagaaccagtcgatggagggggacgaggaggatgaggctaacaagatagaggccttacataagaggaggaatctgttagccgctttttcaaagctgatcatttacgatatcgtggatatgcacgccgcagccgacatttttaagcattatatgaaactgttcaatgagttggtgcaggagcagggcccaaacctggaccggaccagcgcccatgtgagcggcatcaaggaactggcccgccgctttgctcttacattcggactcgatcagatcaagacccgggaagcagtggcaactctgcacaaggacggaatagagttcgcattcaagtaccagaaccagaaaggccaggagtacccacctccaaacctcgctttcctggaggtgttatctgaatttagtagcaagctgttgcggcaagacaaaaaaaccgtccattcatacttggaaaaatttctgacagaacagatgatggaacgacgggaggacgtttggttgccactgatctcctaccggaattccttagtgacgggaggtgaggacgaccggatgagtgttaattccggcagctcaagttctaaaacatcatccgtgagaaataaaaagggccgacctcctcttcataaaaaacgcgtggaggatgaatctctggataatacgtggctgaacagaacagatactatgatccagactccagggccgctgccagccccccaattgacctcaaccgtgctgcgggagaatagccggccaatgggggaccaaattcaggagccagaaagcgagcacgggtccgaaccagacttcctccataaccctcagatgcagatcagctggctaggacagcctaagctggaagacctcaataggaaggaccggaccggtatgaattacatgaaggtgcggactggcgtgcgtcatgctgtccgcggtttaatggaggaagatgcagaacccatcttcgaggacgtgatgatgagtagccgctctcagctggaggacatgaatgaggaattcgaagatacaatggtcatcgatctgcccccctcccgcaataggagagagcgggccgagctccggcctgattttttcgatagcgctgctattattgaggacgattctggatttggaatgccaatgttctag

SEQ ID NO: 159895 - DNA, 2529 bp, Artificial Sequence
  derived and/or modified sequence
atgactctggacaaggagtacgatgtggccgtcgaggccatccggttggttactctcattttgcagctgttcagccggcatgaccctcaggctgaggaagccctggctaagcgccggggacgcaactcccccaatgggaacctgatacgaatgctcgtgctgttctttctcgaatccgaattgcacgaacacgctgcctaccttgtcgactccctgtgggaatcgtcgcaagaactgctcaaagactgggaatgcatgaccgagctgctgctggaggaacccgtgcagggggaagaggccatgtccgatcggcaggaatcggcactgatcgaactgatggtctgcactatcagacaagccgctgaagctcacccccctgtagggagggggacgggtaaaagggtccttactgcaaaggagcgtaaaactcaaatcgacgataggaataaactgactgagcactttatcatcaccttgccaatgctgctatctaaatattcggctgacgctgagaaagtcgccaacctactccagatccctcagtacttcgaccttgagatatactctacaggccgcatggagaagcatctcgacgccttgctaaagcagataaaatttgtggtcgagaaacatgtcgagtccgacgtactggaggcctgcagcaagacgtactctattttatgttcagaagaatatacaatccagaatcgcgtggatatcgcaaggtcacagctgatcgacgaattcgttgatcggttcaatcacagcgtggaagatttactccaggagggagaagaggccgacgacgacgacatctataacgtgctttccacattaaagcgcctcacaagcttccacaacgcccacgacctgacaaagtgggatctatttggaaactgctatcggcttctcaagaccggcattgagcatggagccatgcccgagcaaatcgtcgtccaggccctccagtgctcccattacagcatactgtggcagctggtgaaaattacagacggcagcccctctaaagaggatctactggtgctgcggaagacggtcaaatctttcttggccgtgtgccagcagtgcttgagcaacgtcaacactcccgtgaaggagcaggcattcatgctgctctgcgatctgctaatgatcttttctcatcagcttatgacagggggccgcgaggggcttcagcccttggtgttcaatcctgacactggtcttcagtctgagctccttagtttcgtgatggaccacgtgttcatcgaccaagatgaggaaaatcagtccatggaaggcgacgaggaagatgaggcgaataagatagaggctctgcataaaaggcgaaatctgctcgctgccttcagcaagctcattatttacgacatcgtagacatgcatgctgccgcggacatttttaagcactacatgaagtactataatgactacggagacattatcaaagaaaccctcagcaaaacccgccagattgacaaaatccaatgcgctaagacactcatcctgtctctacagcagctcttcaatgaactggtgcaagagcaagggcctaacctggataggaccagtgcgcacgtgtccgggataaaggagttggccagacgcttcgcgttgacctttggcttggaccagatcaagaccagagaggcggtagctaccttgcataaagatgggatcgaattcgcctttaagtaccagaaccaaaaagggcaggaatatccaccacctaaccttgcttttctggaggtgctgagtgagttctccagtaaactgctgagacaagataaaaaaaccgtacactcttacctggagaaattcttaactgaacagatgatggagaggcgagaggacgtctggctgcccctcatttcatatcgcaattctctcgtgaccggaggggaggacgacaggatgtcagtcaattctggtagcagcagcagcaagacatcctctgtgaggaataagaagggccggccacccctacacaaaaagagagtcgaggacgaaagtctcgacaatacatggctaaacagaaccgacactatgatccagacccctggcccactgcctgccccacagcttacaagtactgtcctccgagaaaactctcggcctatgggcgatcagatacaagagccagagtctgaacatggcagtgagcccgatttccttcacaacccacagatgcagatctcatggttgggtcaacctaagctggaggacctgaataggaaagacaggacagggatgaactatatgaaggttcggactggtgtgcgacacgctgtgaggggtttgatggaggaggatgccgaacctatttttgaggatgtgatgatgagcagcagaagccagctggaggatatgaatgaagagtttgaagatactatggtaatcgacctgcctccatcgaggaatagacgagagcgagcagagctccgtccggattttttcgactccgccgctattattgaagacgacagtgggtttggcatgcccatgttttag

SEQ ID NO: 159896 - DNA, 3666 bp, Artificial Sequence
  derived and/or modified sequence
atgatcaccagcgagctgcctgtgctgcaggacagcaccaatgagaccacagcccacagtgatgctggcagcgagctggaggagacagaggtgaagggcaagaggaagaggggccggcccggccggccccccagcaccaacaagaagcccaggaagagccctggagagaagagccgcatcgaggccggcatcagaggagctggccggggccgggccaacggccacccccagcagaatggagagggggagcctgtgaccctgtttgaggtggtgaagctgggcaagagcgccatgcagagcgtggtggatgactggattgagagctacaagcaggaccgggacatcgccctgctggacctgatcaacttcttcatccagtgcagcggctgccggggcaccgtgcgcatcgagatgttcaggaacatgcagaatgctgagatcatcaggaagatgacagaggagtttgatgaagattctggggactaccccctgaccatgcctggcccccagtggaagaagttccgcagcaacttctgtgagttcatcggcgtgctgatccggcagtgccagtacagcatcatctatgatgagtacatgatggacaccgtcatcagcctgctgaccggcctgagtgacagccaggtgcgggccttccgccacaccagcaccctggccgccatgaagctgatgacagccctggtgaatgtggccctgaacctgagcatccaccaggacaacacccagaggcagtatgaagctgagaggaacaagatgattggcaagagggccaatgaaaggctggagctgctgctgcagaagaggaaggagctgcaggagaaccaggatgaaattgagaacatgatgaacagcatcttcaagggcatctttgtgcaccgctacagagatgccatcgccgagatccgggccatctgcatcgaggagattggagtgtggatgaagatgtacagtgatgccttcctgaatgacagctacctgaagtatgtgggctggaccctgcatgaccggcagggcgaggtgcggctgaagtgcctgaaggccctgcagagcctgtacaccaaccgggagctgttccccaagctggagctgttcaccaaccgcttcaaggaccgcatcgtgtccatgaccctggacaaggagtatgatgtggccgtggaggccatccggctggtgaccctcatcctgcacggcagcgaggaggccctgagcaatgaagactgtgaaaatgtgtaccacctggtgtacagcgcccacaggcctgtggccgtggccgccggggagttcctgcacaagaagctgttcagcagacatgacccccaggccgaggaggccctggccaagaggcggggcaggaacagccccaatggaaacctgatccgcatgctggtgctcttcttcctggagagcgagctgcacgagcacgccgcctacctggtggacagcctgtgggagagcagccaggagctgctgaaggactgggagtgcatgacagagctgctgctggaggagcctgtgcagggcgaggaggccatgtctgaccggcaggagagcgccctgattgagctgatggtgtgcaccatccggcaggccgctgaggcccacccccctgtgggccggggcaccgggaagagggtgctgacagccaaggagaggaagacccagattgatgacaggaacaagctgacagagcacttcatcatcaccctgcccatgctgctgagcaagtacagcgcagatgctgagaaggtggccaacctgctgcagatcccccagtactttgacctggagatctacagcacaggccgcatggagaagcacctggatgccctgctgaagcagatcaagtttgtggtggagaagcacgtggagagtgatgtgctggaggcctgcagcaagacctacagcatcctgtgcagcgaggagtacaccatccagaacagagtggacatcgcccggagccagctgattgatgaatttgtggaccgcttcaaccacagcgtggaggacctgctgcaggagggggaggaggctgatgatgatgacatctacaacgtgctgagcaccctgaagaggctgaccagcttccacaatgcccatgacctgaccaagtgggacctgtttggaaactgctaccgcctgctgaagacaggcatcgagcacggggccatgcctgagcagatcgtggtgcaggccctgcagtgcagccactacagcatcctgtggcagctggtgaagatcacagatggcagccccagcaaggaggacctgctggtgctgaggaagacagtgaagagcttcctggccgtgtgccagcagtgcctgagcaatgtgaacacccctgtgaaggagcaggccttcatgctgctgtgtgacctgctgatgatcttcagccaccagctgatgactggaggccgggagggcctgcagcccctggtgttcaacccagacaccggcctgcagagcgagctgctgagctttgtgatggaccacgtgttcatcgaccaggatgaggagaaccagagcatggagggagatgaagaagatgaggccaacaagattgaggccctgcacaagagaagaaacctgctggccgccttcagcaagctgatcatctatgacatcgtggacatgcatgctgctgctgacatcttcaagcactacatgaagtactacaatgactatggagacatcatcaaggagaccctgagcaagacccggcagattgacaagatccagtgtgccaagaccctcatcctgagcctgcagcagctgttcaatgagctggtgcaggagcagggccccaacctggacaggaccagcgcccacgtgtctggcatcaaggagctggccaggagatttgccctgaccttcggcctggaccagatcaagacccgggaggccgtggccaccctgcacaaggatggcatcgagtttgccttcaagtaccagaaccagaagggccaggagtaccccccacccaacctggccttcctggaggtgctgtctgagttcagcagcaagctgctgcggcaggacaagaagacagtgcacagctacctggagaagttcctgacagagcagatgatggagaggagagaagatgtgtggctgcccctcatctcctacagaaacagcctggtgactggaggagaagatgacaggatgtctgtgaacagcggcagcagcagcagcaagaccagctctgtgaggaacaagaagggccggccccccctgcacaagaagagggtggaggatgagagcctggacaacacctggctgaacagaacagacaccatgatccagaccccaggccccctgcctgccccccagctgaccagcacagtgctgcgggagaacagccggcccatgggagaccagatccaggagcctgagagcgagcacggcagcgagccagacttcctgcacaacagaggcctgatggaggaggatgctgagcccatctttgaagatgtgatgatgagcagccgcagccagctggaggacatgaatgaggagtttgaggacaccatggtgattgacctgccccccagcaggaacagaagagaaagagctgagctgcggccagacttctttgacagcgctgccatcattgaagatgacagcggcttcggcatgcccatgttttag

SEQ ID NO: 159897 - DNA, 3777 bp, Artificial Sequence
  derived and/or modified sequence
atgatcaccagcgagctgcctgtgctgcaggacagcaccaatgagaccacagcccacagtgatgctggcagcgagctggaggagacagaggtgaagggcaagaggaagaggggccggcccggccggccccccagcaccaacaagaagcccaggaagagccctggagagaagagccgcatcgaggccggcatcagaggagctggccggggccgggccaacggccacccccagcagaatggagagggggagcctgtgaccctgtttgaggtggtgaagctgggcaagagcgccatgcagagcgtggtggatgactggattgagagctacaagcaggaccgggacatcgccctgctggacctgatcaacttcttcatccagtgcagcggctgccggggcaccgtgcgcatcgagatgttcaggaacatgcagaatgctgagatcatcaggaagatgacagaggagtttgatgaagattctggggactaccccctgaccatgcctggcccccagtggaagaagttccgcagcaacttctgtgagttcatcggcgtgctgatccggcagtgccagtacagcatcatctatgatgagtacatgatggacaccgtcatcagcctgctgaccggcctgagtgacagccaggtgcgggccttccgccacaccagcaccctggccgccatgaagctgatgacagccctggtgaatgtggccctgaacctgagcatccaccaggacaacacccagaggcagtatgaagctgagaggaacaagatgattggcaagagggccaatgaaaggctggagctgctgctgcagaagaggaaggagctgcaggagaaccaggatgaaattgagaacatgatgaacagcatcttcaagggcatctttgtgcaccgctacagagatgccatcgccgagatccgggccatctgcatcgaggagattggagtgtggatgaagatgtacagtgatgccttcctgaatgacagctacctgaagtatgtgggctggaccctgcatgaccggcagggcgaggtgcggctgaagtgcctgaaggccctgcagagcctgtacaccaaccgggagctgttccccaagctggagctgttcaccaaccgcttcaaggaccgcatcgtgtccatgaccctggacaaggagtatgatgtggccgtggaggccatccggctggtgaccctcatcctgcacggcagcgaggaggccctgagcaatgaagactgtgaaaatgtgtaccacctggtgtacagcgcccacaggcctgtggccgtggccgccggggagttcctgcacaagaagctgttcagcagacatgacccccaggccgaggaggccctggccaagaggcggggcaggaacagccccaatggaaacctgatccgcatgctggtgctcttcttcctggagagcgagctgcacgagcacgccgcctacctggtggacagcctgtgggagagcagccaggagctgctgaaggactgggagtgcatgacagagctgctgctggaggagcctgtgcagggcgaggaggccatgtctgaccggcaggagagcgccctgattgagctgatggtgtgcaccatccggcaggccgctgaggcccacccccctgtgggccggggcaccgggaagagggtgctgacagccaaggagaggaagacccagattgatgacaggaacaagctgacagagcacttcatcatcaccctgcccatgctgctgagcaagtacagcgcagatgctgagaaggtggccaacctgctgcagatcccccagtactttgacctggagatctacagcacaggccgcatggagaagcacctggatgccctgctgaagcagatcaagtttgtggtggagaagcacgtggagagtgatgtgctggaggcctgcagcaagacctacagcatcctgtgcagcgaggagtacaccatccagaacagagtggacatcgcccggagccagctgattgatgaatttgtggaccgcttcaaccacagcgtggaggacctgctgcaggagggggaggaggctgatgatgatgacatctacaacgtgctgagcaccctgaagaggctgaccagcttccacaatgcccatgacctgaccaagtgggacctgtttggaaactgctaccgcctgctgaagacaggcatcgagcacggggccatgcctgagcagatcgtggtgcaggccctgcagtgcagccactacagcatcctgtggcagctggtgaagatcacagatggcagccccagcaaggaggacctgctggtgctgaggaagacagtgaagagcttcctggccgtgtgccagcagtgcctgagcaatgtgaacacccctgtgaaggagcaggccttcatgctgctgtgtgacctgctgatgatcttcagccaccagctgatgactggaggccgggagggcctgcagcccctggtgttcaacccagacaccggcctgcagagcgagctgctgagctttgtgatggaccacgtgttcatcgaccaggatgaggagaaccagagcatggagggagatgaagaagatgaggccaacaagattgaggccctgcacaagagaagaaacctgctggccgccttcagcaagctgatcatctatgacatcgtggacatgcatgctgctgctgacatcttcaagcactacatgaagtactacaatgactatggagacatcatcaaggagaccctgagcaagacccggcagattgacaagatccagtgtgccaagaccctcatcctgagcctgcagcagctgttcaatgagctggtgcaggagcagggccccaacctggacaggaccagcgcccacgtgtctggcatcaaggagctggccaggagatttgccctgaccttcggcctggaccagatcaagacccgggaggccgtggccaccctgcacaaggatggcatcgagtttgccttcaagtaccagaaccagaagggccaggagtaccccccacccaacctggccttcctggaggtgctgtctgagttcagcagcaagctgctgcggcaggacaagaagacagtgcacagctacctggagaagttcctgacagagcagatgatggagaggagagaagatgtgtggctgcccctcatctcctacagaaacagcctggtgactggaggagaagatgacaggatgtctgtgaacagcggcagcagcagcagcaagaccagctctgtgaggaacaagaagggccggccccccctgcacaagaagagggtggaggatgagagcctggacaacacctggctgaacagaacagacaccatgatccagaccccaggccccctgcctgccccccagctgaccagcacagtgctgcgggagaacagccggcccatgggagaccagatccaggagcctgagagcgagcacggcagcgagccagacttcctgcacaacccccagatgcagatctcctggctgggccagcccaagctggaggacctgaacaggaaggacagaacaggcatgaactacatgaaggtgaggactggagtgagacatgctgtgcggggcctgatggaggaggatgctgagcccatctttgaagatgtgatgatgagcagccgcagccagctggaggacatgaatgaggagtttgaggacaccatggtgattgacctgccccccagcaggaacagaagagagcgggcagagctgcggccagacttctttgattctgctgccatcattgaagatgattctggcttcggcatgcccatgttttag

SEQ ID NO: 159898 - DNA, 2997 bp, Artificial Sequence
  derived and/or modified sequence
atgaagctgatgacagccctggtgaatgtggccctgaacctgagcatccaccaggacaacacccagaggcagtatgaagctgagaggaacaagatgattggcaagagggccaatgaaaggctggagctgctgctgcagaagaggaaggagctgcaggagaaccaggatgaaattgagaacatgatgaacagcatcttcaagggcatctttgtgcaccgctacagagatgccatcgccgagatccgggccatctgcatcgaggagattggagtgtggatgaagatgtacagtgatgccttcctgaatgacagctacctgaagtatgtgggctggaccctgcatgaccggcagggcgaggtgcggctgaagtgcctgaaggccctgcagagcctgtacaccaaccgggagctgttccccaagctggagctgttcaccaaccgcttcaaggaccgcatcgtgtccatgaccctggacaaggagtatgatgtggccgtggaggccatccggctggtgaccctcatcctgcacggcagcgaggaggccctgagcaatgaagactgtgaaaatgtgtaccacctggtgtacagcgcccacaggcctgtggccgtggccgccggggagttcctgcacaagaagctgttcagcagacatgacccccaggccgaggaggccctggccaagaggcggggcaggaacagccccaatggaaacctgatccgcatgctggtgctcttcttcctggagagcgagctgcacgagcacgccgcctacctggtggacagcctgtgggagagcagccaggagctgctgaaggactgggagtgcatgacagagctgctgctggaggagcctgtgcagggcgaggaggccatgtctgaccggcaggagagcgccctgattgagctgatggtgtgcaccatccggcaggccgctgaggcccacccccctgtgggccggggcaccgggaagagggtgctgacagccaaggagaggaagacccagattgatgacaggaacaagctgacagagcacttcatcatcaccctgcccatgctgctgagcaagtacagcgcagatgctgagaaggtggccaacctgctgcagatcccccagtactttgacctggagatctacagcacaggccgcatggagaagcacctggatgccctgctgaagcagatcaagtttgtggtggagaagcacgtggagagtgatgtgctggaggcctgcagcaagacctacagcatcctgtgcagcgaggagtacaccatccagaacagagtggacatcgcccggagccagctgattgatgaatttgtggaccgcttcaaccacagcgtggaggacctgctgcaggagggggaggaggctgatgatgatgacatctacaacgtgctgagcaccctgaagaggctgaccagcttccacaatgcccatgacctgaccaagtgggacctgtttggaaactgctaccgcctgctgaagacaggcatcgagcacggggccatgcctgagcagatcgtggtgcaggccctgcagtgcagccactacagcatcctgtggcagctggtgaagatcacagatggcagccccagcaaggaggacctgctggtgctgaggaagacagtgaagagcttcctggccgtgtgccagcagtgcctgagcaatgtgaacacccctgtgaaggagcaggccttcatgctgctgtgtgacctgctgatgatcttcagccaccagctgatgactggaggccgggagggcctgcagcccctggtgttcaacccagacaccggcctgcagagcgagctgctgagctttgtgatggaccacgtgttcatcgaccaggatgaggagaaccagagcatggagggagatgaagaagatgaggccaacaagattgaggccctgcacaagagaagaaacctgctggccgccttcagcaagctgatcatctatgacatcgtggacatgcatgctgctgctgacatcttcaagcactacatgaagctgttcaatgagctggtgcaggagcagggccccaacctggacaggaccagcgcccacgtgtctggcatcaaggagctggccaggagatttgccctgaccttcggcctggaccagatcaagacccgggaggccgtggccaccctgcacaaggatggcatcgagtttgccttcaagtaccagaaccagaagggccaggagtaccccccacccaacctggccttcctggaggtgctgtctgagttcagcagcaagctgctgcggcaggacaagaagacagtgcacagctacctggagaagttcctgacagagcagatgatggagaggagagaagatgtgtggctgcccctcatctcctacagaaacagcctggtgactggaggagaagatgacaggatgtctgtgaacagcggcagcagcagcagcaagaccagctctgtgaggaacaagaagggccggccccccctgcacaagaagagggtggaggatgagagcctggacaacacctggctgaacagaacagacaccatgatccagaccccaggccccctgcctgccccccagctgaccagcacagtgctgcgggagaacagccggcccatgggagaccagatccaggagcctgagagcgagcacggcagcgagccagacttcctgcacaacccccagatgcagatctcctggctgggccagcccaagctggaggacctgaacaggaaggacagaacaggcatgaactacatgaaggtgaggactggagtgagacatgctgtgcggggcctgatggaggaggatgctgagcccatctttgaagatgtgatgatgagcagccgcagccagctggaggacatgaatgaggagtttgaggacaccatggtgattgacctgccccccagcaggaacagaagagagcgggcagagctgcggccagacttctttgattctgctgccatcattgaagatgattctggcttcggcatgcccatgttttag

SEQ ID NO: 159899 - DNA, 2529 bp, Artificial Sequence
  derived and/or modified sequence
atgaccctggacaaggagtatgatgtggccgtggaggccatccggctggtgaccctcatcctgcagctgttcagcagacatgacccccaggccgaggaggccctggccaagaggcggggcaggaacagccccaatggaaacctgatccgcatgctggtgctcttcttcctggagagcgagctgcacgagcacgccgcctacctggtggacagcctgtgggagagcagccaggagctgctgaaggactgggagtgcatgacagagctgctgctggaggagcctgtgcagggcgaggaggccatgtctgaccggcaggagagcgccctgattgagctgatggtgtgcaccatccggcaggccgctgaggcccacccccctgtgggccggggcaccgggaagagggtgctgacagccaaggagaggaagacccagattgatgacaggaacaagctgacagagcacttcatcatcaccctgcccatgctgctgagcaagtacagcgcagatgctgagaaggtggccaacctgctgcagatcccccagtactttgacctggagatctacagcacaggccgcatggagaagcacctggatgccctgctgaagcagatcaagtttgtggtggagaagcacgtggagagtgatgtgctggaggcctgcagcaagacctacagcatcctgtgcagcgaggagtacaccatccagaacagagtggacatcgcccggagccagctgattgatgaatttgtggaccgcttcaaccacagcgtggaggacctgctgcaggagggggaggaggctgatgatgatgacatctacaacgtgctgagcaccctgaagaggctgaccagcttccacaatgcccatgacctgaccaagtgggacctgtttggaaactgctaccgcctgctgaagacaggcatcgagcacggggccatgcctgagcagatcgtggtgcaggccctgcagtgcagccactacagcatcctgtggcagctggtgaagatcacagatggcagccccagcaaggaggacctgctggtgctgaggaagacagtgaagagcttcctggccgtgtgccagcagtgcctgagcaatgtgaacacccctgtgaaggagcaggccttcatgctgctgtgtgacctgctgatgatcttcagccaccagctgatgactggaggccgggagggcctgcagcccctggtgttcaacccagacaccggcctgcagagcgagctgctgagctttgtgatggaccacgtgttcatcgaccaggatgaggagaaccagagcatggagggagatgaagaagatgaggccaacaagattgaggccctgcacaagagaagaaacctgctggccgccttcagcaagctgatcatctatgacatcgtggacatgcatgctgctgctgacatcttcaagcactacatgaagtactacaatgactatggagacatcatcaaggagaccctgagcaagacccggcagattgacaagatccagtgtgccaagaccctcatcctgagcctgcagcagctgttcaatgagctggtgcaggagcagggccccaacctggacaggaccagcgcccacgtgtctggcatcaaggagctggccaggagatttgccctgaccttcggcctggaccagatcaagacccgggaggccgtggccaccctgcacaaggatggcatcgagtttgccttcaagtaccagaaccagaagggccaggagtaccccccacccaacctggccttcctggaggtgctgtctgagttcagcagcaagctgctgcggcaggacaagaagacagtgcacagctacctggagaagttcctgacagagcagatgatggagaggagagaagatgtgtggctgcccctcatctcctacagaaacagcctggtgactggaggagaagatgacaggatgtctgtgaacagcggcagcagcagcagcaagaccagctctgtgaggaacaagaagggccggccccccctgcacaagaagagggtggaggatgagagcctggacaacacctggctgaacagaacagacaccatgatccagaccccaggccccctgcctgccccccagctgaccagcacagtgctgcgggagaacagccggcccatgggagaccagatccaggagcctgagagcgagcacggcagcgagccagacttcctgcacaacccccagatgcagatctcctggctgggccagcccaagctggaggacctgaacaggaaggacagaacaggcatgaactacatgaaggtgaggactggagtgagacatgctgtgcggggcctgatggaggaggatgctgagcccatctttgaagatgtgatgatgagcagccgcagccagctggaggacatgaatgaggagtttgaggacaccatggtgattgacctgccccccagcaggaacagaagagagcgggcagagctgcggccagacttctttgattctgctgccatcattgaagatgattctggcttcggcatgcccatgttttag

SEQ ID NO: 159900 - DNA, 3666 bp, Artificial Sequence
  derived and/or modified sequence
atgatcaccagcgagctgcccgtgctgcaggacagcaccaacgagaccactgcccatagcgatgccggaagtgagctggaggaaaccgaagtcaagggaaaaaggaaaagaggaagaccaggccgccctcccagcaccaacaaaaagcctaggaagtcacctggagaaaagagcagaatcgaggcaggtatccgaggggcaggccggggccgggccaacggccaccctcagcagaacggagaaggtgaacccgtcacactgtttgaggtggtgaagctcgggaaaagcgcaatgcagtctgttgtagatgactggattgaatcctataaacaggatcgtgacattgctctgctggacctaatcaacttcttcatccaatgctccgggtgtcggggtaccgtccgcatcgaaatgtttcggaacatgcagaacgccgagattattaggaagatgaccgaggaattcgatgaggattccggggactatcccctcacaatgcccggtcctcagtggaagaaatttcgatccaacttctgtgagttcattggggtactaataaggcaatgtcagtattcgataatctatgatgagtatatgatggataccgtgattagcctactcactggcctgagtgactctcaggtgagagcatttcggcatacatctactcttgcagccatgaagttaatgaccgctctggtgaatgttgccctgaatctaagcatccaccaggataatacccagcgccagtacgaggccgaacgcaacaagatgatcggaaagagggccaatgaaagattggagctgttgctccagaaaaggaaagaattgcaggagaaccaggatgaaatcgaaaacatgatgaactctatctttaagggaattttcgttcaccgctatagagatgctatcgcagaaattagggccatctgtatagaagaaatcggagtgtggatgaagatgtacagcgacgcattcctgaatgacagctatctaaagtatgtgggctggactcttcatgatcgccaaggagaagtccgtctgaagtgcctcaaagctctccagtccctctacacaaaccgcgaattattcccaaagttagagctctttacaaataggtttaaggacagaattgtctctatgacgctggacaaggagtatgacgttgctgtggaggctatccggctagttacacttatcctccacggaagtgaagaagccttatccaatgaggactgcgaaaacgtctaccatcttgtgtacagtgcccaccggccagtcgccgtggctgccggtgaatttctgcacaaaaagctcttctcgcgacacgacccccaggcagaggaggcactggccaagagacgtggtcgcaacagcccaaacggcaatttgattcgtatgcttgtgctctttttccttgaatccgaactgcacgagcacgctgcttacctagtggactctctgtgggagagctcccaggaactgctcaaggattgggagtgcatgaccgaattgctgctcgaggaacctgtgcagggggaggaggccatgtccgaccgacaggagtccgcactcatagaactgatggtgtgtactatcagacaggccgccgaggcacacccacccgtgggacggggcactggtaagagggtcctgacagctaaggaaaggaaaacgcagatcgatgacagaaacaaactgacagaacatttcataatcactctgccaatgctgctgtcgaaatattctgcagatgccgagaaagtagcaaacttgttgcagatacctcagtacttcgacttagagatctattctacaggcagaatggagaaacacctggatgcactgctcaagcagatcaagtttgtggtggagaagcacgtagagtccgacgttcttgaggcgtgctctaaaacatactccattctgtgctccgaagagtacacaatccagaatcgcgtcgatatcgcccgatctcaactcattgatgagttcgtcgacagattcaatcatagtgtcgaggatcttctgcaggaaggcgaggaagcagatgacgacgatatctacaacgtgctgtcaacactgaaaagactgactagcttccacaacgcccacgatctgacaaaatgggatctgttcggcaattgctatcggttgctgaaaaccgggattgagcatggagccatgcccgagcagatagtggttcaggccctgcagtgtagtcactacagcatcttatggcaactggttaaaatcactgatggcagcccctccaaagaggatctgctggttctgcggaaaaccgtaaagagctttttggccgtatgtcagcaatgtttaagcaacgtcaacacaccagtgaaggagcaggcttttatgctgctgtgtgatctgctcatgatcttctctcaccagttaatgacagggggccgtgaagggctccagcctctcgttttcaaccccgataccggactgcaatccgagctgctctcgtttgtgatggatcacgtattcatagatcaggacgaggaaaatcagtcaatggagggcgatgaagaggatgaggctaataaaatagaggccctgcacaaacggaggaacctgctggctgcttttagcaagctgatcatctacgacattgtggatatgcacgcagccgctgacatattcaaacattatatgaagtattacaatgattatggagacatcattaaagaaaccctcagcaaaacaagacagatcgacaagatccagtgcgctaagactctaatcctttctctgcagcaattgtttaacgagctggtgcaggagcaggggcctaatttggacaggacctctgctcatgttagcggtattaaagaattggcccgccgattcgccctgacatttggactggaccagattaagacacgggaggcagtggcaactttacacaaggatggaatagaattcgctttcaaatatcagaaccagaagggccaagagtaccctccacccaatttagctttccttgaggtcctgagcgaattcagctccaaattgcttcggcaagacaaaaagaccgtgcactcatacctggagaaatttctcacagagcaaatgatggagcgcagagaggacgtttggctccctctaatttcatatcgaaattcgctggtgactggaggagaagacgacaggatgtctgtgaattctggctcctcatcttctaaaacgtcatccgttaggaataaaaaagggaggcctcctttgcataagaagagagttgaggacgagagcttggacaacacctggctgaacaggacagacacaatgatacaaacaccaggcccgctgcccgcaccacaattaacaagcactgtactgagagagaactctcgccccatgggggatcaaatacaagaacccgagtcggaacacgggtcggagccggatttcttacacaatcgggggctcatggaggaagacgctgagcctatttttgaggatgtgatgatgtccagcaggagtcagctcgaagatatgaacgaagagtttgaagatacaatggtgatcgacctcccaccgagccggaacagaagggagagagccgaactgcgaccagacttcttcgattccgctgccattattgaggatgattcaggtttcggtatgcctatgttttag

SEQ ID NO: 159901 - DNA, 3777 bp, Artificial Sequence
  derived and/or modified sequence
atgatcaccagcgagctgcccgtgctgcaggacagcaccaacgagactactgctcattcagacgctggaagtgaactcgaggagactgaagtgaagggcaagaggaaaagaggcagaccggggagaccgccctccacaaacaagaagcctcgcaaaagccccggagaaaaatcccgtattgaggcaggaataagaggagctggtcggggcagagccaacgggcatccacagcagaacggggagggtgagcctgtgactttgtttgaagtagtcaagctcggaaagagtgcaatgcagagcgtggtcgatgattggatcgagagctacaaacaggatagagatattgcccttctggacttgatcaacttttttatacagtgctccggatgtcggggcaccgtgcggattgaaatgttcaggaatatgcaaaacgccgagattattcgaaaaatgactgaggaatttgatgaagacagcggcgattatcctctgaccatgcccggtccccaatggaaaaagttcagaagcaacttttgcgaatttatcggagtcctaatcaggcagtgccaatattcaataatctatgacgagtacatgatggacacggtgatttcgttactaactgggctctccgactcccaggtacgggcatttaggcacaccagcacgctcgccgccatgaaactgatgacagctcttgtaaacgtggctctcaatctgagcattcatcaggacaacacccagcggcaatacgaggctgaacgtaacaagatgatcggaaagagagctaatgagaggctcgagctactgcttcagaaaaggaaagagttacaggagaaccaggatgaaatcgagaacatgatgaacagtattttcaaggggattttcgtccatcgttaccgggatgctatcgctgagattagagccatttgcatcgaggaaattggcgtatggatgaagatgtactcggacgccttcttaaatgactcatatttaaaatacgtgggctggactcttcatgaccggcagggcgaggtgcgcctgaagtgtctgaaagccctgcaatcactgtacactaacagagaactgttcccaaaactagagttattcacaaaccgcttcaaggatcgaatcgtctctatgactctggataaggagtacgatgtagccgttgaggctatccggctggtgaccctcattctgcatggaagcgaggaggccctgtcgaatgaagattgtgagaatgtgtaccacttggtgtattctgctcaccgccctgtcgcagtggcagccggagaattcctccataagaaactgttttcacgtcatgatcctcaagctgaagaggcactggctaagcgccgggggcgcaactccccgaatggaaaccttatcaggatgctggtgctgttcttcctggaatcagaacttcacgagcatgccgcgtacctcgtggattctctctgggagtcatcccaggagctgctcaaggattgggaatgtatgacggaactgctgctggaggaaccagtgcagggtgaagaagctatgtctgatcgacaggagtccgctctgattgagctcatggtctgcaccatcagacaggccgctgaggcccatcctccggttggtcgtggtaccgggaagcgagttctgaccgcaaaagaacgcaagactcagatcgacgataggaacaaactaaccgagcatttcattattaccctcccaatgctgctgtccaagtacagcgccgacgctgaaaaagtggcaaacctgctgcagattccccagtattttgatttagaaatctattccaccggtcggatggaaaaacatctggacgcattgctcaagcagatcaagtttgtggttgagaaacatgtagagagcgacgtgctcgaggcgtgcagtaaaacatatagtatcctttgctctgaagaatatacaatccagaatcgggttgacattgctagatcacagttgattgatgaatttgtcgaccggttcaatcatagcgtcgaagacctcctccaggagggcgaagaggcagacgacgacgatatctataatgtgctgagcactttaaaacgcctcacctccttccacaacgcgcatgacttgacaaagtgggatctgttcggtaattgctatagattgctcaaaactgggatcgaacacggcgccatgccagaacaaattgtagttcaagcgctgcagtgtagtcattactcaatcttatggcagctcgtgaagataacagatggaagcccatccaaggaagatctcttagtgctccggaaaaccgtgaaaagcttcctcgctgtatgccagcagtgcctgtcaaacgtaaataccccggtgaaggagcaagcatttatgctcctatgcgacctgctgatgatcttctcacaccagctgatgaccggcggccgagaagggttgcagcctctggtgttcaaccccgatacagggctgcaatctgagcttttgtccttcgtcatggaccacgtgttcatcgatcaggatgaggagaaccagtccatggaaggggatgaggaggatgaggccaacaaaattgaagccctgcataagcggcgcaacctcctcgcagccttcagcaaactgatcatttacgacattgtcgacatgcacgccgccgcagatattttcaaacattatatgaagtattataatgattacggcgatatcattaaggagacactctcaaaaacccgtcagattgacaagattcagtgtgctaagaccttaattctttcgcttcagcagctttttaacgaactggtgcaagagcaggggccaaatctggaccgcacatccgcccatgtctctgggattaaggaactggctcgccgcttcgccctcaccttcggactggaccaaatcaagactagggaggccgttgcaaccttgcacaaagacggaatagaattcgcctttaagtaccaaaaccagaaggggcaggagtacccaccaccaaacctagcgtttctcgaggtcctaagtgagttcagttccaagcttctgagacaagataaaaaaactgttcattcctatctggagaaattcttaactgaacaaatgatggagcggcgtgaagacgtctggttgcctctgatatcatacagaaatagcctcgtgaccggcggggaggatgaccgaatgtccgttaacagcggatcttcctcgagcaaaacaagtagtgtccgtaacaagaaaggcaggccccctttacataagaagcgagttgaagacgaatccctcgacaatacatggttgaacagaacagacaccatgatccaaacccccggtccgctccccgcaccacagctcacctctacagtcctgcgggaaaattcacgtcctatgggagaccagattcaggagcctgagagcgagcatggctcagagccagacttcctccataatccccagatgcaaatcagttggctgggccagcccaaactggaagacttaaaccgcaaagataggactggcatgaactatatgaaagtgcgtacaggggtgcgacatgctgttaggggcttgatggaggaagacgccgagcccatctttgaggacgtaatgatgtcctcacggagccagctggaggatatgaacgaggaatttgaggataccatggtcattgatctgcccccgtcccggaaccggcgggagagggctgagctccggccagatttcttcgattcggccgccattatcgaggatgactcagggtttgggatgccaatgttttag

SEQ ID NO: 159902 - DNA, 2997 bp, Artificial Sequence
  derived and/or modified sequence
atgaagctgatgaccgccctggtgaacgtggccctgaacctgagcattcaccaggataacactcaaagacagtatgaggcggaacgcaataagatgattggcaagcgcgctaatgaacggttggagctactgttgcagaagcgtaaagaactgcaagagaaccaggacgagatcgaaaatatgatgaattcgatatttaagggtatcttcgttcaccgctatagagacgctattgccgagataagagcaatatgcatcgaggagatcggcgtttggatgaagatgtatagcgacgctttcctaaacgatagctacctaaagtacgtcggttggaccctgcacgatcgccagggtgaggtgaggctgaagtgtttaaaagcattgcagtccctctatacaaaccgagagttgttcccaaagcttgaactcttcacgaatcgctttaaagatcgtattgtctccatgactctggacaaggagtacgatgtcgcagtggaagccattcgccttgtaacactcattttgcacggctccgaggaggctctgtctaatgaagactgtgaaaatgtgtatcatttggtgtattccgcacacaggccagtcgcggtggccgcaggagaattcctgcataagaagctgtttagtcggcatgacccccaggctgaggaagctctagcaaagcgacgagggagaaacagtcccaatggcaatttgattcggatgctggtgctcttcttcctggaaagtgagctgcatgaacatgcggcgtacctggtggactctctctgggagtcaagccaggaattgctcaaagattgggagtgtatgaccgagctgttgctggaagaaccagttcagggcgaagaggccatgagcgatcgccaagaatctgcactgattgagctaatggtgtgcacaatcaggcaagccgccgaggcccatccacctgtaggccggggcacggggaagagagtgctgaccgcgaaggaaagaaagactcaaattgacgatcgcaacaagttgaccgaacacttcatcattacgctccccatgctactttccaaatactccgcagatgctgaaaaagtggctaacttgctccagatacctcagtactttgatctggagatatacagtacagggagaatggaaaaacacctggacgcgttgcttaagcagatcaagttcgtcgtcgagaaacacgtggagagcgacgttcttgaggcttgctccaagacctacagtattctatgctcggaagaatacacaatccagaatcgggtcgacatcgcccgatctcagcttatagatgagtttgtggacaggtttaatcactcagttgaagacctgctgcaggaaggcgaagaggcggatgatgacgacatctataacgtgttgtccacactgaaaaggctgactagcttccataacgctcatgacctgactaaatgggatctcttcggtaattgttatagactcctgaagacaggaatcgagcacggtgccatgccagagcagattgttgtgcaggctctacagtgttcacattattcgatactgtggcaactcgtgaaaataacagacggcagtccttcgaaggaggatctactggtcttgcgcaaaaccgttaaatcctttctggctgtgtgccagcaatgtctgtctaacgtgaatacccccgtgaaggagcaggcattcatgctgctgtgcgaccttctgatgattttctcccatcaacttatgacgggcggacgagaggggctacagccactcgtcttcaacccagacaccggtctgcagagcgagttactgagctttgtgatggatcacgttttcatcgaccaagacgaagagaaccagtccatggaaggagatgaggaagatgaggcaaacaaaatagaggctctgcacaaaaggagaaatttgctggccgcatttagtaagttgattatttatgatatcgtcgatatgcatgctgctgccgacatcttcaagcattacatgaagttatttaacgaactggttcaagagcagggaccaaacctggatcgaacatcagcgcacgtgtctggtatcaaggagcttgcccgtcgatttgccctgacttttggtctggatcagataaagacccgggaggcggtggccacgctacataaggatggaatagagttcgcgttcaaataccagaaccagaagggccaggagtatccaccgcccaatttggccttcctggaagtcttgagtgaatttagcagcaaactgctcaggcaggacaagaaaacagtacactcatatctggagaagttccttacagagcagatgatggaaaggagagaagacgtgtggctgccattaatctcatataggaatagtttggtcacgggaggggaggacgaccgtatgagcgtaaatagcggctcatcttcttctaagacctcttctgtgagaaacaagaagggtagacccccattgcacaaaaagcgtgttgaagacgaaagtctcgataacacatggctgaatagaaccgacaccatgatccaaacacctgggccgttgcccgcgccccagctcacttctaccgtgctccgtgagaactcacgcccgatgggcgatcagatccaggaaccggagagtgagcatggatctgagcctgatttcttgcacaatcctcagatgcaaatctcttggctaggacagcctaagctcgaagatttaaaccgcaaagacaggacaggcatgaattatatgaaagtgagaacaggggttaggcatgccgtgcgtggattgatggaggaagacgccgagccaatcttcgaggatgtaatgatgtcctccagatcccagcttgaggatatgaacgaagaattcgaagatacgatggtcatcgatctaccccctagtagaaatcgcagagagcgtgcagagctccggccagatttttttgactcagctgcaataatcgaggacgactcaggattcggaatgccaatgttctag

SEQ ID NO: 159903 - DNA, 2529 bp, Artificial Sequence
  derived and/or modified sequence
atgaccctggacaaggagtacgacgtggccgtggaggccatccggctcgttacgctcattctccagctcttcagccgccacgacccccaggccgaggaggcgctggccaagcggcgaggccggaacagccccaacggaaatctgatcagaatgctcgtcctcttttttctggagagcgagttgcacgagcacgccgcatatttggtggacagtctttgggaatccagccaagaacttctgaaagattgggaatgcatgaccgagcttttgctggaagagccggtgcagggagaagaggccatgagtgatcgtcaggagtctgctttaattgaattgatggtatgcacgattcggcaagcggcagaagcccaccctcctgtagggagaggcactggtaagcgcgtgctaaccgctaaggagagaaagacacagatcgacgaccgaaataaactcacagagcactttataatcactctccctatgttgctgtcaaagtactcagccgacgcagagaaggtggctaaccttcttcaaattcctcagtactttgatctggagatttactccacggggcgcatggaaaaacatctcgatgctcttcttaaacagatcaagttcgtcgtggaaaagcacgtagagagcgacgtgttggaagcctgcagcaagacatattcaatcctctgcagcgaagaatatactatacagaatagggttgacatagctcggagtcagctgattgacgaattcgtggatcggttcaaccatagcgtggaggatctgcttcaggaaggagaggaagcagatgatgacgatatatacaacgtgctatctacgctcaagcggctcacatctttccacaacgctcatgacctaactaaatgggacctctttgggaattgctaccgacttctgaaaacaggcatcgagcacggagcaatgcctgagcagatcgtggtgcaggccctgcagtgcagccactatagtatattatggcagctggtgaagatcaccgacgggagtccaagtaaggaggacctgctggtgttgagaaaaactgttaagagctttctggcggtgtgccaacagtgtctcagcaatgtgaatacccccgtaaaggagcaggcctttatgctgctgtgcgatcttctcatgatcttttcacaccagcttatgaccgggggacgtgaggggctgcaacccttggtgttcaatcctgacaccggcctccagagtgagttactttcttttgttatggaccacgtgttcatcgaccaggatgaagagaaccagagtatggagggggacgaagaggatgaggctaacaagattgaggccctgcataagagacgaaatctgctagccgcctttagcaaactgatcatctatgacattgtcgacatgcatgccgcggccgacattttcaaacattatatgaaatattacaatgactatggcgatattattaaggagaccctctccaagactcgccagattgacaagatacaatgcgccaaaacacttattctgagcctgcagcaattgttcaacgagctcgtgcaggagcagggcccaaatctcgatagaacctccgcacatgtttcaggcattaaagagctcgcccgtcgttttgctttgactttcggtctggatcaaattaaaactagagaggccgtggcgaccctgcataaggatggaattgagtttgccttcaagtaccagaaccagaagggtcaagaatacccaccccctaacttagcctttctggaagtgctgtctgaattttcttcaaagctattacggcaggataagaagaccgtccatagttatttggagaagtttttgaccgaacaaatgatggaaaggcgagaggacgtctggctgccactaataagttacagaaatagcttggtgacaggcggcgaggatgacagaatgagcgtcaattctgggtccagtagcagcaaaacctcttccgtgcgaaataaaaaaggccggccccctctgcacaaaaagagagttgaggatgagagcctagataatacctggctaaacagaactgataccatgatccaaacacctggcccattgcccgccccccagcttaccagtactgtgctgcgagagaactctcgccccatgggggaccaaattcaggaacccgagagtgagcacggctcagagcctgatttcttacataaccctcaaatgcagatctcatggctgggacagcctaagctcgaggacctgaataggaaagacaggaccgggatgaactatatgaaggtgcgaacaggggtcagacatgccgtgagaggactcatggaggaggatgccgagcctatttttgaggacgtaatgatgagttcaagatcacagctcgaagacatgaacgaagaattcgaggataccatggtaatagatttaccgccttccagaaatcgacgcgagcgggccgagcttagacctgacttctttgattccgctgctataattgaggatgattccgggtttgggatgcccatgttctag

SEQ ID NO: 159904 - DNA, 5951 bp, Artificial Sequence
  derived and/or modified sequence
attggcgtgtggaaaatgccaccagatggcgggttaggattgcagctccgttgaaggcgcggcccccgctcccgaacccccggcgaccaccccgtaacaacccccccacatcgggaataacacaccggagacttttggggggaaactaggtcgatggtcggcggcgcccggatgggcagctgaggattgcctttgaggttattttaaaagttttgagttgtacagcacttgattattttgctgcattgtgaaaggacctctccagcaatgattacttcagaattaccagtgttacaggattcaactaatgaaactactgcccattccgatgctggcagcgagcttgaagaaacagaggtcaaaggaaaaagaaaaaggggtcgtcctggccggcctccatctacaaataagaaacctcgaaaatctccaggtgagaagagcagaattgaagctggaattagaggagcaggccgtggaagagctaatggacaccctcaacagaatggggaaggggagcctgtcacattatttgaggtggtgaaactggggaaaagtgcaatgcagtccgtggtggatgactggattgaatcatataaacaagacagggacatcgcacttctggatttaatcaacttttttatccagtgttcaggatgtcgaggtactgtgagaatagagatgtttcgaaatatgcagaatgcagaaatcatcagaaaaatgactgaagaatttgatgaggacagtggtgattatcctcttaccatgcctggacctcagtggaaaaaatttcgttcaaacttttgtgaatttattggagtcctgattcgacagtgtcagtatagcataatttatgatgagtatatgatggacacagtaatctcccttttgacgggtttgtcagactcccaggtcagagcttttaggcatacaagtaccctggctgccatgaagctcatgactgctctggtgaatgttgccttaaacctcagtattcatcaggataatacccagagacaatatgaagccgagagaaataaaatgattgggaagagagccaatgaaaggttggagttactacttcagaaacgcaaagagctgcaagaaaatcaggatgaaatcgaaaatatgatgaactctatttttaagggtatatttgttcatagataccgtgatgctattgctgagattagagccatttgtattgaagaaattggagtatggatgaaaatgtatagtgatgccttcctaaatgacagttacctaaaatatgttggctggactcttcatgacaggcaaggggaagtcaggctgaagtgtttgaaagctctgcagagtctatataccaatagagaattattccccaaattggaactattcactaaccgattcaaggatcgcattgtatcaatgacacttgataaagaatatgatgttgctgtggaagctattcgattggttactctgatacttcatggaagtgaagaagctctttccaatgaagactgtgaaaatgtttaccacttggtgtactcggcacatcgccctgttgctgtggcagctggagagttccttcacaaaaagctatttagcagacatgacccacaagcagaagaagcattagcaaagaggaggggaagaaacagcccgaatggaaacctcattaggatgctggttcttttctttcttgaaagtgagttacatgaacatgcagcctacttggtggacagtttatgggagagctctcaagaactgttgaaagactgggaatgtatgacagagttgctattagaagaacctgttcaaggagaggaagcaatgtctgatcgtcaagagagtgctcttatagagctaatggtttgtacaattcgtcaagctgctgaggcacatcctccagtgggaaggggtaccggcaagagagtgctaactgccaaagaaaggaaaactcaaattgatgatagaaacaaattgactgaacattttattattacacttcctatgttactgtcaaagtattctgcagatgcagagaaggtagcaaacttgctacaaatcccacagtattttgatttagaaatctacagcacaggtagaatggaaaagcatctggatgctttattaaaacagattaagtttgttgtggagaaacacgtagaatcagatgttctagaagcctgcagtaaaacctatagtatcttatgcagtgaagaatataccatccagaacagagttgacatagctcgaagccagctgattgatgagtttgtagatcgattcaatcattctgtggaagacctattgcaagagggagaagaagctgatgatgatgacatttacaatgttctttctacattaaagcggttaacttcttttcacaatgcacatgatctcacaaaatgggatctctttggtaattgctacagattattgaagactggaattgaacatggagccatgccagaacagatagtcgtgcaagcactgcagtgttcccattattcgattctttggcagttggtgaaaattactgatggctctccttccaaagaggatttgttggtattgaggaaaacggtgaaatcctttttggctgtttgccagcagtgcctgtctaatgttaatactccagtgaaagaacaggctttcatgttactctgtgatcttctgatgattttcagccaccaattaatgacaggtggcagagagggccttcagcctttggtgttcaatccagatactggactccaatctgaactcctcagttttgtgatggatcacgtttttattgaccaagacgaggagaaccagagcatggagggtgatgaagaagatgaagctaataaaattgaggccttacataaaagaaggaatctacttgctgctttcagcaaacttatcatttatgacattgttgacatgcatgcagctgcagacatcttcaaacactacatgaagtattacaatgactatggtgatattattaaggaaacactgagtaaaaccaggcagattgataaaattcagtgtgccaagactctcattctcagtttgcaacagttatttaatgaacttgttcaagagcaaggtcccaacctagataggacatctgcccatgtcagtggcattaaagaactggcacgtcgctttgcccttacatttggattggaccagattaagacacgagaagcagttgccacacttcacaaggatggcatagagtttgcatttaaataccaaaatcagaaaggacaagagtatccacctcctaatctggcttttcttgaagtactaagtgaattttcttctaaacttcttcgacaggacaaaaagacagttcattcatacctagagaaattccttaccgagcagatgatggaaaggagggaggatgtatggcttccactcatctcctatagaaattcattagtcactgggggtgaagatgatagaatgtctgtgaacagtggaagtagcagcagcaaaacctcatcagtaaggaataagaaaggacgacctccacttcataaaaaacgagtagaagatgagagtctggataacacatggctaaacaggactgacaccatgattcagactcctggccccctgccagcaccacaactcacatccactgtactgcgggagaacagtcggcccatgggagaccagattcaagaacctgagtctgaacatggttctgaaccagactttttacacaatcggggtctaatggaggaagatgctgagcccatctttgaagatgtgatgatgtcatcccgaagccagttagaagatatgaatgaagaatttgaggacaccatggttattgatctgcctccatcaagaaatcggcgagagagagctgagctaaggccagacttctttgactctgcagctatcatagaagatgattcaggatttggaatgcctatgttctgaagtctgaagaaaatttacaaatctggaactctattatttagagctagaggcctatatactgtgatagcttgtatggggaaaaacacttttgatgtgatctgatttgttttttaatcaaatgattaaggtcaatccctttttgcagtgacagaagaggagcatgtaaattacccaagggaatgttggtgaatgtcaactcagaaagactgacctgaaaatcatttgtgtcctactattggacttatcccaatacagatgtgtgtgtttttctggagggaggaagaaattttaaatttttaaaacagctgtcaagataaacactgttatacacctgttttatgaaaactcaacattgagtaaaaaaaaacatatttttaactttattttcctgttgtacaatttaaaaaccgttttaacattttgcctttttatgttttaaaagctaaccatttttattaaacctatgagtaagcagctcatcctaattgcgaagagtgttttggagttcactggatttggttgacctttgtggaacacaaataatgaaggagcagaacattgacaagctaagatgaaattctgacatagtacatctctgccaaaaaccacacaccctctgtggatatggatatgaattcccagattttatatactcttgaataaaaggtttatttttatttataagtgggcataaaataagaaatgtccatgcagccatttttccaacagatgctgtacaccgttcattttatatagactagggagattcaaatacagtgcattttctattggtatttgttctgtgcatttttagcaacttctaccagcaaataaagtattctcagtaaaacgaaaatgattctcaagttatcagtttgctgtttttaccacttatttcatgccctgccaaattcaagttacacagacttccattttcttaagataatcaatcatgaagaaatcctttatcaatcattcaaaagtaattttaagtgtaacataactgtgtttacttcccatgcacttaatacccttatgcgctaattttgtgaattaagtttactgattatagaagtatgtgctgcatagaagtctgtgcttagagggtgaagttcctaagcttaccttgaattacagctacatttcagtgttaaatgtgcatattaagaataattcttttggggaaagaaattatgaatcttcaggacagtctacaatggtttagagttacattctgcctagacttttatgacttgctgctattgttttaaaaaccccacttagtctctctcttcctttctgatttctaaagtaagcctcagaatttccaaaccaattcatccacagctgtttctgggctggtttttaaagtagctgcaacagaatcatgaggctttccctttttatcaaatacgaaaaacattttttaaaattctgcacacccagtgatcatcttttgtgcgggaaagcaagatgatgatggatgattttattcatccttttagtaaagacacaaaacatttttctcaacatttgtacagttctgaaaaaaacctggtcaccaaaaatatcttctctgctaattcagcaattcttgggctccagttaggggagctggggcctcactttctcccagaattgtgggcttcactggaagtgaaggtgcaggaatgactggactgtccaccccagccctgcctgcctgtggttttggccagggagcaagccatgaggtgccctggcacatgcacaaattgatcctttgcgtgacagtcttgtatggaaaacagatgctgacagaattgtagactaccatgccacacaaaaaggctaaatatctactccaatgggtttccagttcagtttgaagtcaatcaaatttttgtattttcggtgtctccttgattggttttgctagtaattctgtaaattgtacatttgcaatatgaggttttttttccttttgtacaatttgaaactgatgcttcacctttcctttaataaactattcaaaatca

SEQ ID NO: 159905 - DNA, 6053 bp, Artificial Sequence
  derived and/or modified sequence
ggaaaatgccaccagatggcgggttaggattgcagctccgttgaaggcgcggcccccgctcccgaacccccggcgaccaccccgtaacaacccccccacatcgggaataacacaccggagacttttggggggaaactaggtcgatggtcggcggcgcccggatgggcagctgaggattgcctttgaggttattttaaaagttttgagttgtacagcacttgattattttgctgcattgtgaaaggacctctccagcaatgattacttcagaattaccagtgttacaggattcaactaatgaaactactgcccattccgatgctggcagcgagcttgaagaaacagaggtcaaaggaaaaagaaaaaggggtcgtcctggccggcctccatctacaaataagaaacctcgaaaatctccaggtgagaagagcagaattgaagctggaattagaggagcaggccgtggaagagctaatggacaccctcaacagaatggggaaggggagcctgtcacattatttgaggtggtgaaactggggaaaagtgcaatgcagtccgtggtggatgactggattgaatcatataaacaagacagggacatcgcacttctggatttaatcaacttttttatccagtgttcaggatgtcgaggtactgtgagaatagagatgtttcgaaatatgcagaatgcagaaatcatcagaaaaatgactgaagaatttgatgaggacagtggtgattatcctcttaccatgcctggacctcagtggaaaaaatttcgttcaaacttttgtgaatttattggagtcctgattcgacagtgtcagtatagcataatttatgatgagtatatgatggacacagtaatctcccttttgacgggtttgtcagactcccaggtcagagcttttaggcatacaagtaccctggctgccatgaagctcatgactgctctggtgaatgttgccttaaacctcagtattcatcaggataatacccagagacaatatgaagccgagagaaataaaatgattgggaagagagccaatgaaaggttggagttactacttcagaaacgcaaagagctgcaagaaaatcaggatgaaatcgaaaatatgatgaactctatttttaagggtatatttgttcatagataccgtgatgctattgctgagattagagccatttgtattgaagaaattggagtatggatgaaaatgtatagtgatgccttcctaaatgacagttacctaaaatatgttggctggactcttcatgacaggcaaggggaagtcaggctgaagtgtttgaaagctctgcagagtctatataccaatagagaattattccccaaattggaactattcactaaccgattcaaggatcgcattgtatcaatgacacttgataaagaatatgatgttgctgtggaagctattcgattggttactctgatacttcatggaagtgaagaagctctttccaatgaagactgtgaaaatgtttaccacttggtgtactcggcacatcgccctgttgctgtggcagctggagagttccttcacaaaaagctatttagcagacatgacccacaagcagaagaagcattagcaaagaggaggggaagaaacagcccgaatggaaacctcattaggatgctggttcttttctttcttgaaagtgagttacatgaacatgcagcctacttggtggacagtttatgggagagctctcaagaactgttgaaagactgggaatgtatgacagagttgctattagaagaacctgttcaaggagaggaagcaatgtctgatcgtcaagagagtgctcttatagagctaatggtttgtacaattcgtcaagctgctgaggcacatcctccagtgggaaggggtaccggcaagagagtgctaactgccaaagaaaggaaaactcaaattgatgatagaaacaaattgactgaacattttattattacacttcctatgttactgtcaaagtattctgcagatgcagagaaggtagcaaacttgctacaaatcccacagtattttgatttagaaatctacagcacaggtagaatggaaaagcatctggatgctttattaaaacagattaagtttgttgtggagaaacacgtagaatcagatgttctagaagcctgcagtaaaacctatagtatcttatgcagtgaagaatataccatccagaacagagttgacatagctcgaagccagctgattgatgagtttgtagatcgattcaatcattctgtggaagacctattgcaagagggagaagaagctgatgatgatgacatttacaatgttctttctacattaaagcggttaacttcttttcacaatgcacatgatctcacaaaatgggatctctttggtaattgctacagattattgaagactggaattgaacatggagccatgccagaacagatagtcgtgcaagcactgcagtgttcccattattcgattctttggcagttggtgaaaattactgatggctctccttccaaagaggatttgttggtattgaggaaaacggtgaaatcctttttggctgtttgccagcagtgcctgtctaatgttaatactccagtgaaagaacaggctttcatgttactctgtgatcttctgatgattttcagccaccaattaatgacaggtggcagagagggccttcagcctttggtgttcaatccagatactggactccaatctgaactcctcagttttgtgatggatcacgtttttattgaccaagacgaggagaaccagagcatggagggtgatgaagaagatgaagctaataaaattgaggccttacataaaagaaggaatctacttgctgctttcagcaaacttatcatttatgacattgttgacatgcatgcagctgcagacatcttcaaacactacatgaagtattacaatgactatggtgatattattaaggaaacactgagtaaaaccaggcagattgataaaattcagtgtgccaagactctcattctcagtttgcaacagttatttaatgaacttgttcaagagcaaggtcccaacctagataggacatctgcccatgtcagtggcattaaagaactggcacgtcgctttgcccttacatttggattggaccagattaagacacgagaagcagttgccacacttcacaaggatggcatagagtttgcatttaaataccaaaatcagaaaggacaagagtatccacctcctaatctggcttttcttgaagtactaagtgaattttcttctaaacttcttcgacaggacaaaaagacagttcattcatacctagagaaattccttaccgagcagatgatggaaaggagggaggatgtatggcttccactcatctcctatagaaattcattagtcactgggggtgaagatgatagaatgtctgtgaacagtggaagtagcagcagcaaaacctcatcagtaaggaataagaaaggacgacctccacttcataaaaaacgagtagaagatgagagtctggataacacatggctaaacaggactgacaccatgattcagactcctggccccctgccagcaccacaactcacatccactgtactgcgggagaacagtcggcccatgggagaccagattcaagaacctgagtctgaacatggttctgaaccagactttttacacaatcctcagatgcagatctcttggttaggccagccgaagttagaagacttaaatcggaaggacagaacaggaatgaactacatgaaagtgagaactggagtgaggcatgctgttcggggtctaatggaggaagatgctgagcccatctttgaagatgtgatgatgtcatcccgaagccagttagaagatatgaatgaagaatttgaggacaccatggttattgatctgcctccatcaagaaatcggcgagagagagctgagctaaggccagacttctttgactctgcagctatcatagaagatgattcaggatttggaatgcctatgttctgaagtctgaagaaaatttacaaatctggaactctattatttagagctagaggcctatatactgtgatagcttgtatggggaaaaacacttttgatgtgatctgatttgttttttaatcaaatgattaaggtcaatccctttttgcagtgacagaagaggagcatgtaaattacccaagggaatgttggtgaatgtcaactcagaaagactgacctgaaaatcatttgtgtcctactattggacttatcccaatacagatgtgtgtgtttttctggagggaggaagaaattttaaatttttaaaacagctgtcaagataaacactgttatacacctgttttatgaaaactcaacattgagtaaaaaaaaacatatttttaactttattttcctgttgtacaatttaaaaaccgttttaacattttgcctttttatgttttaaaagctaaccatttttattaaacctatgagtaagcagctcatcctaattgcgaagagtgttttggagttcactggatttggttgacctttgtggaacacaaataatgaaggagcagaacattgacaagctaagatgaaattctgacatagtacatctctgccaaaaaccacacaccctctgtggatatggatatgaattcccagattttatatactcttgaataaaaggtttatttttatttataagtgggcataaaataagaaatgtccatgcagccatttttccaacagatgctgtacaccgttcattttatatagactagggagattcaaatacagtgcattttctattggtatttgttctgtgcatttttagcaacttctaccagcaaataaagtattctcagtaaaacgaaaatgattctcaagttatcagtttgctgtttttaccacttatttcatgccctgccaaattcaagttacacagacttccattttcttaagataatcaatcatgaagaaatcctttatcaatcattcaaaagtaattttaagtgtaacataactgtgtttacttcccatgcacttaatacccttatgcgctaattttgtgaattaagtttactgattatagaagtatgtgctgcatagaagtctgtgcttagagggtgaagttcctaagcttaccttgaattacagctacatttcagtgttaaatgtgcatattaagaataattcttttggggaaagaaattatgaatcttcaggacagtctacaatggtttagagttacattctgcctagacttttatgacttgctgctattgttttaaaaaccccacttagtctctctcttcctttctgatttctaaagtaagcctcagaatttccaaaccaattcatccacagctgtttctgggctggtttttaaagtagctgcaacagaatcatgaggctttccctttttatcaaatacgaaaaacattttttaaaattctgcacacccagtgatcatcttttgtgcgggaaagcaagatgatgatggatgattttattcatccttttagtaaagacacaaaacatttttctcaacatttgtacagttctgaaaaaaacctggtcaccaaaaatatcttctctgctaattcagcaattcttgggctccagttaggggagctggggcctcactttctcccagaattgtgggcttcactggaagtgaaggtgcaggaatgactggactgtccaccccagccctgcctgcctgtggttttggccagggagcaagccatgaggtgccctggcacatgcacaaattgatcctttgcgtgacagtcttgtatggaaaacagatgctgacagaattgtagactaccatgccacacaaaaaggctaaatatctactccaatgggtttccagttcagtttgaagtcaatcaaatttttgtattttcggtgtctccttgattggttttgctagtaattctgtaaattgtacatttgcaatatgaggttttttttccttttgtacaatttgaaactgatgcttcacctttcctttaataaactattcaaaatcag

SEQ ID NO: 159906 - DNA, 5204 bp, Artificial Sequence
  derived and/or modified sequence
attggcgtgtggaaaatgccaccagatggcgggttaggattgcagctccgttgaaggcgcggcccccgctcccgaacccccggcgaccaccccgtaacaacccccccacatcgggaataacacaccggagacttttggggggaaactaggtcgatggtcggcggcgcccggatgggcagctgaggattgcctttgaggttattttaaaagttttgagttgtacagcacttgattattttgctgcattgtgaaaggacctctccagcaatgattacttcagaattaccagtgttacaggattcaactaatgaaactactgcccattccgatgctggcagcgagcttgaagaaacagaggtcaaaggaaaaagaaaaaggggtcgtcctggccggcctccatctacaaataagaaacctcgaaaatctccaggtgagaagagcagaattgaagctggaattagaggagcaggccgtggaagagctaatggacaccctcaacagaatggggaaggggagcctgtcacattatttgaggtggtgaaactggggaaaagtgcaatgcagagatgttgacctttcaaataggtcagtgttgtccaggctgacctcgaacttctgggcccaagtgatcctccccggcctgagcctctcgagtagctgggactacagagccttcatgttgtttgcattcacttggttggaaggggagagagaaagagaagcagtgtctacttcttagaagcctttggcccctctatttacattccattgatgggaacttaccacatactcagtccgtggtggatgactggattgaatcatataaacaagacagggacatcgcacttctggatttaatcaacttttttatccagtgttcaggatgtcgaggtactgtgagaatagagatgtttcgaaatatgcagaatgcagaaatcatcagaaaaatgactgaagaatttgatgaggacagtggtgattatcctcttaccatgcctggacctcagtggaaaaaatttcgttcaaacttttgtgaatttattggagtcctgattcgacagtgtcagtatagcataatttatgatgagtatatgatggacacagtaatctcccttttgacgggtttgtcagactcccaggtcagagcttttaggcatacaagtaccctggctggacaagtcttggggactagataaaatgggcaggaacatttaatcctctgcttcaaagactatgtgcatggacagttacaaggcagttatggccagatatgattatcggctttggaataaaatgctccttgacattgcttaaatcttagctgagaagagagacaatcagccatgaagctcatgactgctctggtgaatgttgccttaaacctcagtattcatcaggataatacccagagacaatatgaagccgagagaaataaaatgattgggaagagagccaatgaaaggttggagttactacttcagaaacgcaaagagctgcaagaaaatcaggatgaaatcgaaaatatgatgaactctatttttaagggtatatttgttcatagataccgtgatgctattgctgagattagagccatttgtattgaagaaattggagtatggatgaaaatgtatagtgatgccttcctaaatgacagttacctaaaatatgttggctggactcttcatgacaggcaaggggaagtcaggctgaagtgtttgaaagctctgcagagtctatataccaatagagaattattccccaaattggaactattcactaaccgattcaaggatcgcattgtatcaatgacacttgataaagaatatgatgttgctgtggaagctattcgattggttactctgatacttcatggaagtgaagaagctctttccaatgaagactgtgaaaatgtttaccacttggtgtactcggcacatcgccctgttgctgtggcagctggagagttccttcacaaaaagctatttagcagacatgacccacaagcagaagaagcattagcaaagaggaggggaagaaacagcccgaatggaaacctcattaggatgctggttcttttctttcttgaaagtgagttacatgaacatgcagcctacttggtggacagtttatgggagagctctcaagaactgttgaaagactgggaatgtatgacagagttgctattagaagaacctgttcaaggagaggaagcaatgtctgatcgtcaagagagtgctcttatagagctaatggtttgtacaattcgtcaagctgctgaggcacatcctccagtgggaaggggtaccggcaagagagtgctaactgccaaagaaaggaaaactcaaattgatgatagaaacaaattgactgaacattttattattacacttcctatgttactgtcaaagtattctgcagatgcagagaaggtagcaaacttgctacaaatcccacagtattttgatttagaaatctacagcacaggtagaatggaaaagcatctggatgctttattaaaacagattaagtttgttgtggagaaacacgtagaatcagatgttctagaagcctgcagtaaaacctatagtatcttatgcagtgaagaatataccatccagaacagagttgacatagctcgaagccagctgattgatgagtttgtagatcgattcaatcattctgtggaagacctattgcaagagggagaagaagctgatgatgatgacatttacaatgttctttctacattaaagcggttaacttcttttcacaatgcacatgatctcacaaaatgggatctctttggtaattgctacagattattgaagactggaattgaacatggagccatgccagaacagatagtcgtgcaagcactgcagtgttcccattattcgattctttggcagttggtgaaaattactgatggctctccttccaaagaggatttgttggtattgaggaaaacggtgaaatcctttttggctgtttgccagcagtgcctgtctaatgttaatactccagtgaaagaacaggctttcatgttactctgtgatcttctgatgattttcagccaccaattaatgacaggtggcagagagggccttcagcctttggtgttcaatccagatactggactccaatctgaactcctcagttttgtgatggatcacgtttttattgaccaagacgaggagaaccagagcatggagggtgatgaagaagatgaagctaataaaattgaggccttacataaaagaaggaatctacttgctgctttcagcaaacttatcatttatgacattgttgacatgcatgcagctgcagacatcttcaaacactacatgaagttatttaatgaacttgttcaagagcaaggtcccaacctagataggacatctgcccatgtcagtggcattaaagaactggcacgtcgctttgcccttacatttggattggaccagattaagacacgagaagcagttgccacacttcacaaggatggcatagagtttgcatttaaataccaaaatcagaaaggacaagagtatccacctcctaatctggcttttcttgaagtactaagtgaattttcttctaaacttcttcgacaggacaaaaagacagttcattcatacctagagaaattccttaccgagcagatgatggaaaggagggaggatgtatggcttccactcatctcctatagaaattcattagtcactgggggtgaagatgatagaatgtctgtgaacagtggaagtagcagcagcaaaacctcatcagtaaggaataagaaaggacgacctccacttcataaaaaacgagtagaagatgagagtctggataacacatggctaaacaggactgacaccatgattcagactcctggccccctgccagcaccacaactcacatccactgtactgcgggagaacagtcggcccatgggagaccagattcaagaacctgagtctgaacatggttctgaaccagactttttacacaatcctcagatgcagatctcttggttaggccagccgaagttagaagacttaaatcggaaggacagaacaggaatgaactacatgaaagtgagaactggagtgaggcatgctgttcggggtctaatggaggaagatgctgagcccatctttgaagatgtgatgatgtcatcccgaagccagttagaagatatgaatgaagaatttgaggacaccatggttattgatctgcctccatcaagaaatcggcgagagagagctgagctaaggccagacttctttgactctgcagctatcatagaagatgattcaggatttggaatgcctatgttctgaagtctgaagaaaatttacaaatctggaactctattatttagagctagaggcctatatactgtgatagcttgtatggggaaaaacacttttgatgtgatctgatttgttttttaatcaaatgattaaggtcaatccctttttgcagtgacagaagaggagcatgtaaattacccaagggaatgttggtgaatgtcaactcagaaagactgacctgaaaatcatttgtgtcctactattggacttatcccaatacagatgtgtgtgtttttctggagggaggaagaaattttaaatttttaaaacagctgtcaagataaacactgttatacacctgttttatgaaaactcaacattgagtaaaaaaaaacatatttttaactttattttcctgttgtacaatttaaaaaccgttttaacattttgcctttttatgttttaaaagctaaccatttttattaaacctatgagtaagcagctcatcctaattgcgaagagtgttttggagttcactggatttggttgacctttgtggaacacaaataatgaaggagcagaacattgacaagctaagatgaaattctgacatagtacatctctgccaaaaaccacacaccctctgtggatatggatatgaattcccagattttatatactcttgaataaaaggtttatttttatttataagtgggcataaaataagaaatgtccatgcagccatttttccaacagatgctgtacaccgttcattttatatagactagggagattcaaatacagtgcattttctattggtatttgttctgtgcatttttagcaacttctaccagcaaataaagtattctcagtaaaacgaaaatgattctc

SEQ ID NO: 159907 - DNA, 2883 bp, Artificial Sequence
  derived and/or modified sequence
tgcagagtctatataccaatagagaattattccccaaattggaactattcactaaccgattcaaggatcgcattgtatcaatgacacttgataaagaatatgatgttgctgtggaagctattcgattggttactctgatacttcagctatttagcagacatgacccacaagcagaagaagcattagcaaagaggaggggaagaaacagcccgaatggaaacctcattaggatgctggttcttttctttcttgaaagtgagttacatgaacatgcagcctacttggtggacagtttatgggagagctctcaagaactgttgaaagactgggaatgtatgacagagttgctattagaagaacctgttcaaggagaggaagcaatgtctgatcgtcaagagagtgctcttatagagctaatggtttgtacaattcgtcaagctgctgaggcacatcctccagtgggaaggggtaccggcaagagagtgctaactgccaaagaaaggaaaactcaaattgatgatagaaacaaattgactgaacattttattattacacttcctatgttactgtcaaagtattctgcagatgcagagaaggtagcaaacttgctacaaatcccacagtattttgatttagaaatctacagcacaggtagaatggaaaagcatctggatgctttattaaaacagattaagtttgttgtggagaaacacgtagaatcagatgttctagaagcctgcagtaaaacctatagtatcttatgcagtgaagaatataccatccagaacagagttgacatagctcgaagccagctgattgatgagtttgtagatcgattcaatcattctgtggaagacctattgcaagagggagaagaagctgatgatgatgacatttacaatgttctttctacattaaagcggttaacttcttttcacaatgcacatgatctcacaaaatgggatctctttggtaattgctacagattattgaagactggaattgaacatggagccatgccagaacagatagtcgtgcaagcactgcagtgttcccattattcgattctttggcagttggtgaaaattactgatggctctccttccaaagaggatttgttggtattgaggaaaacggtgaaatcctttttggctgtttgccagcagtgcctgtctaatgttaatactccagtgaaagaacaggctttcatgttactctgtgatcttctgatgattttcagccaccaattaatgacaggtggcagagagggccttcagcctttggtgttcaatccagatactggactccaatctgaactcctcagttttgtgatggatcacgtttttattgaccaagacgaggagaaccagagcatggagggtgatgaagaagatgaagctaataaaattgaggccttacataaaagaaggaatctacttgctgctttcagcaaacttatcatttatgacattgttgacatgcatgcagctgcagacatcttcaaacactacatgaagtattacaatgactatggtgatattattaaggaaacactgagtaaaaccaggcagattgataaaattcagtgtgccaagactctcattctcagtttgcaacagttatttaatgaacttgttcaagagcaaggtcccaacctagataggacatctgcccatgtcagtggcattaaagaactggcacgtcgctttgcccttacatttggattggaccagattaagacacgagaagcagttgccacacttcacaaggatggcatagagtttgcatttaaataccaaaatcagaaaggacaagagtatccacctcctaatctggcttttcttgaagtactaagtgaattttcttctaaacttcttcgacaggacaaaaagacagttcattcatacctagagaaattccttaccgagcagatgatggaaaggagggaggatgtatggcttccactcatctcctatagaaattcattagtcactgggggtgaagatgatagaatgtctgtgaacagtggaagtagcagcagcaaaacctcatcagtaaggaataagaaaggacgacctccacttcataaaaaacgagtagaagatgagagtctggataacacatggctaaacaggactgacaccatgattcagactcctggccccctgccagcaccacaactcacatccactgtactgcgggagaacagtcggcccatgggagaccagattcaagaacctgagtctgaacatggttctgaaccagactttttacacaatcctcagatgcagatctcttggttaggccagccgaagttagaagacttaaatcggaaggacagaacaggaatgaactacatgaaagtgagaactggagtgaggcatgctgttcggggtctaatggaggaagatgctgagcccatctttgaagatgtgatgatgtcatcccgaagccagttagaagatatgaatgaagaatttgaggacaccatggttattgatctgcctccatcaagaaatcggcgagagagagctgagctaaggccagacttctttgactctgcagctatcatagaagatgattcaggatttggaatgcctatgttctgaagtctgaagaaaatttacaaatctggaactctattatttagagctagaggcctatatactgtgatagcttgtatggggaaaaacacttttgatgtgatctgatttgttttttaatcaaatgattaaggtcaatccctttttgcagtgacagaagaggagcatgtaaattacccaagggaatgttggtgaatgtcaactcagaaagactgacctgaaaatcatttgtgtcctactattggacttatcccaatacagatgtgtgtgtttttctgga

SEQ ID NO: 159908 - DNA, 3666 bp, Artificial Sequence
  derived and/or modified sequence
atgatcacctccgagttgcctgtactgcaggattctacaaatgagactacggcccactctgatgccggtagtgaactcgaagaaacagaggtgaaaggcaagcgcaaacgcggacggccaggtaggcccccatctacaaataaaaagcctcgaaaaagccccggtgagaagtctcggattgaagccggtattagaggtgccggacgcggacgcgcaaatggccacccccagcagaatggtgagggagaaccagtcaccctcttcgaggttgtgaagcttggcaagagtgcgatgcaaagcgtcgtggacgactggattgagtcctataaacaggaccgggatattgcgctacttgatctcatcaactttttcattcagtgctctggctgcagaggaacggtccgaatcgaaatgttcagaaacatgcagaacgcagaaatcattcgaaagatgacagaggagtttgatgaggacagtggtgactacccactcacaatgcccggtccacagtggaagaagtttagaagcaacttctgcgagttcatcggagtgctgatcagacagtgtcaatactccatcatctacgacgagtatatgatggataccgtgatctccttattgactggcctgtctgactcccaggttagagcttttcgccacaccagcaccctcgccgctatgaagctcatgactgcactcgtgaatgtagctcttaacctatctattcaccaagataatacccagcgccagtatgaagccgagagaaataagatgataggaaagagagctaatgaacggttggagctcctgcttcagaagaggaaggaacttcaggagaatcaggatgagatcgaaaatatgatgaactccatttttaaagggatcttcgtccatcgttatcgcgacgcaattgccgaaatcagggccatatgtatcgaggagatcggggtgtggatgaagatgtactcggatgcttttctcaatgactcgtaccttaagtacgtcgggtggactctccacgaccgacagggagaagtgcgcctcaagtgcttgaaggccctccaaagcctctacacaaaccgtgagctcttcccaaagctcgaactatttaccaaccgtttcaaagaccgaattgtgagcatgacactggataaggaatatgacgtggccgttgaggctatccgtctggtaaccctcattctgcatggctcagaagaggctctgagcaacgaggattgtgagaatgtttatcatctggtgtactctgcacaccgtcccgtggccgtggcagcaggtgagttcctgcacaaaaagctgttttctcgccacgacccacaggccgaggaagctctggctaaacgcagaggacgaaacagcccaaacggcaacctcattagaatgctcgtgctattctttctcgaaagtgaactccatgagcacgcagcttatttggtggacagcctgtgggaaagtagccaagaactgctgaaggactgggagtgcatgactgaactgctgctcgaagaacccgtccagggagaagaagcaatgtctgaccggcaggagtcagccttgattgagctgatggtgtgcaccatccggcaggcggctgaagcccaccccccagtcggtcggggtacaggcaagcgggtgttgaccgccaaagagcgcaaaacgcaaatcgatgataggaacaaactcaccgagcatttcattataaccttgccaatgctgctgtccaagtactccgcagacgccgagaaagtggctaatttgctgcagatcccgcagtattttgatctcgagatttacagcacaggccgaatggaaaaacatctggatgcattactgaagcaaattaagtttgtcgtggagaagcacgtcgagtctgatgtcctcgaggcctgttcaaagacatactccattttgtgtagcgaagagtatacaatccagaaccgcgtcgacatcgcccgatcgcagctgatcgatgagttcgttgacaggtttaaccactccgtggaggatctccttcaggaaggagaagaggccgacgacgacgacatttataacgttttaagtaccctgaagaggcttacgtcgtttcataatgcccacgatttgacaaaatgggatctgtttggtaactgttacagactactgaagaccggcattgaacacggggctatgcccgagcagattgtggtccaggccctgcagtgctcacactattccatcttgtggcagctggtgaagattaccgacggatctccttccaaagaagacctgttagtcctgcgtaagaccgtgaaatcttttctggccgtatgccaacagtgccttagcaatgtgaacacccccgtgaaagaacaggcctttatgctgctgtgtgaccttctgatgatcttttctcatcagctcatgaccggcggacgcgagggtctccaacctcttgtgttcaatcccgacactggactccaatccgagctgctgagctttgtgatggaccacgtgtttatcgaccaggacgaagagaaccagtcgatggaaggcgacgaggaggacgaggcgaataaaattgaggccctccataaaaggcgtaatctcctggccgcattctcaaaacttattatatacgatatcgtcgacatgcacgccgctgccgacattttcaagcattacatgaagtattacaacgattacggagatatcatcaaggaaacgctgtctaagactcgccaaattgacaaaatccagtgcgccaagacccttatactgtcactgcaacagctgttcaacgagctcgtgcaggagcagggtcccaatctcgataggactagcgcgcacgtctccggaatcaaagaactggcacggcgtttcgctctaactttcggtttggatcagatcaagaccagggaggccgtggcgacactccataaggatggcatagaattcgcctttaagtaccaaaatcaaaagggccaggagtatcctccaccaaatctggccttcctggaggtgctgtcagagttttcttctaagctgctgaggcaggataaaaagacagtgcattcttatctggaaaagttcctgacagaacagatgatggagcgtcgggaagacgtgtggttgccgctgatctcttacaggaattccctggtaaccgggggagaagacgacagaatgagtgtgaactccgggagctccagttccaagacctcctctgttcgaaacaaaaagggtcggccacctctgcacaagaagcgggtagaagatgaaagtttagacaacacctggctcaatagaactgatacgatgatacagacccctgggccactgccggctccacaactcacatcaaccgttctgagggaaaactcgcgtcctatgggtgatcagattcaggagcccgagagcgaacatggtagtgagccagacttcctgcataaccgtggcctgatggaggaagacgcagaacctatctttgaggatgtgatgatgagtagccgctcacagctggaagatatgaatgaagagtttgaagacaccatggttatagacctccctccctcccgaaatcgcagggagagagcggagctgagaccagacttctttgattctgccgctatcatcgaagatgactccggctttggaatgcctatgttttag

SEQ ID NO: 159909 - DNA, 3777 bp, Artificial Sequence
  derived and/or modified sequence
atgattaccagcgaactccccgtgctccaggacagcacaaatgaaactacggcccacagtgatgctggctctgaactcgaagagactgaggtcaaaggtaagagaaagagagggagaccgggtcgccctccttccaccaacaagaaaccccgaaaaagcccaggcgaaaaaagtcgcatcgaggctggaattcgcggagccggaagaggccgtgctaacgggcatccccagcagaacggagagggggagcctgtgaccctattcgaggtcgtgaaattaggtaagtccgccatgcagtcagtggtggacgattggattgagtcttacaaacaagatcgagatatcgcgctattagatctgattaatttctttattcagtgcagcggctgcagaggaacagtcaggatcgaaatgtttagaaatatgcagaacgcagaaataatccggaaaatgactgaagaatttgacgaagattccggcgattaccctttgacaatgccagggccacagtggaaaaagtttaggtctaatttctgcgaattcatcggcgttctgatcagacagtgccagtactctattatctatgatgaatatatgatggacaccgtaatttccctgttgacaggcctgagtgatagccaggtgcgggcttttcggcatacctccacattagccgcaatgaagcttatgacagctctggtgaacgtcgcactaaacctcagcatccaccaggataatacgcagcgccagtacgaagcggaaagaaacaagatgataggaaagagagccaatgaacgattggaacttctgttgcagaagagaaaggagttacaagaaaaccaagatgagatcgagaacatgatgaatagtatcttcaaaggcatctttgtgcaccgatacagagacgcaattgccgaaatcagagcgatctgtattgaagagataggcgtttggatgaagatgtactcggacgcctttctaaatgatagctatctcaaatatgtcggatggacactgcacgacagacagggcgaggtgcgcttaaagtgcctcaaggccctacaaagtttgtacactaatagggagctgttccccaagttggaattgtttaccaatcgttttaaggaccgaatcgtttctatgacgttagataaggagtacgatgtggcagtcgaagctatcaggttagtcacactcatactgcacgggtcggaagaggccttgtcaaatgaggactgtgagaacgtctaccatctggtgtattccgcacaccgacccgtcgccgtggccgctggcgaattcctgcataagaagttatttagtcggcacgacccccaggccgaagaggccctggccaagagaagggggagaaattcccccaatggtaacctgatccgaatgttagtgttgttcttcctcgagtctgagttacacgagcatgcagcgtacctagttgattcattgtgggagagctctcaggaactcctgaaggactgggaatgtatgactgagctgcttttggaagagccagtgcagggcgaggaggcgatgagtgaccgccaggagagtgccctgatcgagctcatggtttgtaccattaggcaggcagctgaggcccacccaccagtgggcagaggaaccgggaaacgcgtgttgactgccaaagaacgcaaaacgcaaattgacgatcggaacaagctgaccgagcatttcatcatcacactgcctatgctgctctcaaaatacagtgccgacgcagaaaaagtggcaaacctgctccagatcccccagtatttcgacttggagatttacagcacaggcaggatggagaagcacctggatgcgctactgaagcaaattaagttcgttgtggagaaacatgttgaaagtgacgtgttagaagcttgcagcaagacttactccattttatgttcagaggagtataccattcagaaccgcgtagatattgcgcgaagccaattgatcgatgaattcgtcgatcgcttcaatcattcagttgaggatctgttgcaagaaggggaggaagctgatgacgacgacatttacaacgtgctgtccaccctaaagcgcctgacctcatttcataacgcgcacgacttgaccaaatgggacctgtttggtaactgctatcgtctgctaaagaccggcattgagcatggagcgatgccggaacagatcgtcgttcaggccctccagtgctcccactattccatactgtggcaactggtgaagatcacggatggaagtcccagtaaggaagatctgctagtattacgaaagacagtgaagtcattccttgcagtgtgccagcagtgtctgtccaatgtgaataccccagttaaggagcaggctttcatgctcctgtgtgatctgctcatgattttcagtcaccagcttatgactggaggtcgagagggcctgcaaccgctagtatttaaccctgacaccggcctgcagtctgaactcctgtcattcgtcatggaccatgtcttcatcgatcaggacgaagagaatcagagtatggaaggtgacgaagaggatgaagcaaataagattgaggcattgcataaacgcaggaatctcctcgccgcattcagcaaacttatcatctacgacatcgtggatatgcacgcagctgctgatatctttaaacactacatgaagtattataatgattacggagacataatcaaggagactctatctaagaccaggcagattgacaaaatccaatgtgccaagactctgatcttgagtctgcagcagctgtttaacgagctcgtgcaggaacagggcccaaacctggatcgtacttcagcacatgtctctggtatcaaggaactcgcgcgtcgctttgccctcactttcggattagaccagataaagacccgcgaggcggtggcaaccctccataaggatggcatcgaattcgcattcaaatatcagaatcagaagggccaggagtatccacccccaaatctcgcgttcctggaagtgttaagtgagttctctagcaaacttctcaggcaagacaaaaaaacagtgcactcttatttagaaaaattcctaacggagcagatgatggagaggagggaggatgtgtggctgccgctgattagctaccgcaactcccttgtcaccgggggagaggatgatcgcatgtctgtcaactccggcagttctagcagcaaaactagtagcgtccggaacaaaaagggcagaccaccactccataagaaacgagtggaggacgagtccctcgacaacacatggctcaataggaccgatacgatgatccagactcctggaccactccccgcaccgcagctcacttctaccgttctgcgtgagaactcgaggcccatgggagatcagattcaggagcctgagagtgaacacggttctgagccggatttcctgcataatccgcaaatgcagataagctggctcggacagcctaagctcgaggacctgaaccggaaagatcggacgggaatgaactatatgaaagtacgaacaggcgtacgccacgccgttcggggactcatggaggaagatgccgagcctatcttcgaagacgtgatgatgtctagtcgatctcaactagaggatatgaatgaggaatttgaagacacaatggtcatagatttgccacctagcagaaatagaagagaaagggccgaattaaggcccgatttctttgacagtgccgctatcatagaagacgatagcggcttcggcatgccaatgttctag

SEQ ID NO: 159910 - DNA, 2997 bp, Artificial Sequence
  derived and/or modified sequence
atgaagctgatgacggcactggtgaatgtggccctcaatctgagcatccatcaggacaacacacagcgccagtacgaggctgagcggaacaaaatgattggcaaaagggccaatgagaggttggaactactgctccaaaagaggaaggagctgcaggaaaatcaagatgaaatcgaaaacatgatgaattccatctttaagggcatcttcgtccacaggtacagggacgccatcgctgagattagggctatttgtatagaggaaattggcgtgtggatgaaaatgtacagcgacgccttccttaacgacagctatctgaagtatgttggatggactcttcacgatagacagggtgaagtccggctgaagtgccttaaggctctgcagtccctgtataccaatagagaactatttcccaagctggagctatttaccaacaggtttaaggataggatcgtgtccatgactctggacaaagaatatgatgtagctgtggaagctatccgacttgtcacgctgatccttcatggcagtgaggaggccttatcaaatgaggactgcgagaacgtgtatcatctggtctacagcgctcaccgcccagtcgccgtcgcagctggcgagttcctccacaaaaagctcttttctcggcacgacccccaggccgaggaggcattggccaagcgaaggggacgtaattctccaaacggaaacctgatcagaatgctggtactcttctttcttgaatctgagctgcacgagcacgccgcttacctagtggactctctttgggaatcctcccaggaactcctgaaagattgggaatgcatgactgagcttctcctcgaagagcctgtgcagggggaagaggcgatgtctgacaggcaagagagcgccctgattgaattgatggtgtgcaccatcaggcaagccgcagaggcccaccctcctgtgggacggggtacaggcaagcgcgtcctcacagcgaaggagcgcaaaacacagatcgatgaccggaataaactgaccgaacatttcatcattacactcccaatgcttctgtccaaatattcagctgacgccgaaaaagttgccaatctgctacagatccctcagtactttgatcttgagatctacagcaccgggcgaatggaaaaacatctggacgctctgctgaaacagatcaagtttgttgtggaaaaacatgtcgagtctgacgtacttgaagcatgcagtaagacctactcaatcctgtgttcagaagagtatacaattcagaacagggttgacatcgccaggagccagttgatcgacgaatttgtggatagatttaaccactcagttgaggacctgctgcaagagggggaggaggcggacgacgacgacatttataacgttctgagcacactgaaacggctgacatcatttcacaatgctcacgatttaacaaaatgggacctttttggcaactgttaccgcttactgaagacgggaatcgagcacggtgctatgcctgagcaaatcgtggtgcaggctctgcagtgttcccactacagtatcctatggcagctagtaaaaattaccgacggctcaccctcgaaagaagacttgcttgtcttacgcaaaactgtaaaatcatttctagccgtatgtcagcagtgtttgagcaacgtgaacacacccgtcaaagagcaagcattcatgctcctatgcgacctgctcatgatcttttcccatcaactgatgacaggcggtagagagggcctccagccactcgtcttcaatccagataccggcttgcagagtgagctgctgagtttcgtgatggaccatgtatttatcgatcaggatgaggaaaatcagagtatggagggcgatgaggaagatgaggccaacaagattgaggcccttcataaacgtaggaatctcctagcggctttttcgaaactcatcatttatgatatagttgacatgcacgcggcagcggacattttcaaacactacatgaaattatttaacgagcttgtccaagagcagggtccaaatctggatcggaccagcgcacacgttagtggaatcaaagaactggctcgccgatttgctctgacatttggcctggatcagataaagacacgagaagctgtggcgaccctccataaggacgggatagagttcgctttcaagtaccagaaccaaaaggggcaagaatatcccccacctaacctcgccttcctcgaagtcctcagcgagttcagttctaagcttttacgtcaggacaaaaagactgtgcacagttacctcgagaaatttctgaccgagcagatgatggaaaggagagaggatgtatggctcccactaatcagctaccggaactcactagtcaccgggggtgaggatgataggatgagtgtcaacagtgggagctctagctccaaaacgtcctctgtgagaaacaagaaggggagaccacccctccacaagaaacgcgtcgaggatgaatccctggacaatacgtggctcaatcgcacagacacaatgatacagacgcccggaccccttccggcaccccaactcacgagtaccgtgttgcgcgaaaattctcggcctatgggggaccagattcaggaaccagagagtgagcacgggagcgaaccggactttcttcacaacccacagatgcagatcagctggctcggccaaccaaagctcgaggacttaaacaggaaggacagaacaggaatgaattatatgaaagtcagaaccggggtgcgacacgccgtgagagggctcatggaagaggatgctgaacccatcttcgaggacgtgatgatgagcagtaggagccagcttgaagacatgaacgaggaatttgaggatactatggtgatcgatctgcccccatcccgtaatcgcagagagagagccgagcttaggccagatttttttgacagcgcagcaattattgaggacgatagcggctttgggatgcccatgttttag

SEQ ID NO: 159911 - DNA, 2529 bp, Artificial Sequence
  derived and/or modified sequence
atgacactcgacaaagagtatgacgtggccgtagaagccataagacttgtgacactgatactgcagttatttagtcggcacgatccacaggccgaagaagccctagcgaaaaggcgaggaaggaattcccccaacgggaacctgatcagaatgcttgtactgttcttcctggaatcagaactccatgagcacgcagcttatttggtggactcgctgtgggagtcgtcgcaggaattactgaaagactgggaatgtatgaccgagttacttctggaagagcctgttcagggggaggaggcaatgagcgatcgccaagaaagtgcacttattgagctcatggtctgcaccatacgtcaggccgcagaggcacacccacccgtcggcagaggaactgggaagagggtcctaacagcgaaagagcgcaagacccagattgacgatcggaacaagctcacggaacattttataataaccctccccatgctcctctccaaatactcagccgatgctgaaaaggttgcaaatttgctgcagatccctcagtacttcgaccttgagatctactctactggcagaatggaaaagcacctggatgcattacttaaacagattaagttcgtggtggaaaaacacgttgagtctgatgtcttagaagcatgttccaagacatacagcattctgtgtagtgaggaatatactattcagaatcgggttgatattgccagatctcagttgatagatgaatttgtggatcggttcaatcacagtgtagaggacctcctacaggaaggagaggaggctgatgatgacgacatctacaatgtcctgagtacactgaagaggttaacttctttccacaatgcgcatgacctcacaaagtgggaccttttcggtaactgttacagactgctgaaaaccgggattgagcatggagccatgcctgagcagatcgtcgtgcaagccctgcagtgttcacactattccattctatggcaacttgtaaagatcactgatggttccccttccaaggaagacctcttggtgctgaggaagaccgtgaaatcctttctcgcagtctgtcaacagtgcctgtcaaatgtgaatacaccagttaaggaacaagcattcatgctgctctgcgatctgctaatgattttttcacaccagctgatgactggtggcagagagggcctccagccccttgtattcaacccagataccgggctgcagagtgagttactcagtttcgtgatggatcacgtatttatcgatcaagatgaagagaatcaatcaatggaaggcgacgaggaagacgaggccaacaaaatcgaggcgctgcacaagcgccgtaatctcctcgctgctttcagtaagctcatcatttacgacatcgtcgacatgcatgccgcagcagatatcttcaagcactatatgaagtattataacgactacggggatatcatcaaggagacgctgtcaaaaactcggcagattgacaagattcagtgtgccaaaactctgattttatccctccagcaactgtttaatgaactcgtacaggagcagggacccaatcttgataggaccagtgcgcatgtctctggaatcaaagagctggctcgacgtttcgcattgaccttcggtctagatcagattaaaactcgtgaggctgtcgccaccctgcataaggacggcatcgagtttgcgttcaagtatcagaatcagaaagggcaagaatatcctccacctaatttggcattcctggaagttttgagcgaattctcgagcaaactgctccgccaggataagaaaaccgtgcactcctacctagagaagttcttgacggaacagatgatggagcggagagaggatgtttggctgccactgatctcctaccgtaattctctggtgacaggaggggaagatgataggatgagcgtcaatagcggttcgtcatcttcaaaaacatcgtcagttcgtaacaaaaagggcaggccaccgcttcataagaagcgtgtcgaagatgaatcattggataacacctggttaaatcgcaccgatactatgatccagacgccaggccctctgccggcacctcaactcacctcgactgtcttgcgagagaattcacgccctatgggggatcagatccaggagccagagagcgagcatgggagtgagccggatttcctccacaatccccagatgcagatttcatggctcggccagcccaaactcgaggacttgaatagaaaagatagaaccggtatgaattacatgaaggttcggacaggcgtgaggcacgccgtcagggggctaatggaagaagatgccgaacccatctttgaagatgtcatgatgagcagtcgatctcagctggaggacatgaatgaggagttcgaagataccatggtcatcgatctgccaccgtccaggaacaggagagaaagagccgagctgcgacctgacttctttgattctgctgcaattatagaggatgattctggttttggcatgcccatgttttag

SEQ ID NO: 159912 - DNA, 3666 bp, Artificial Sequence
  derived and/or modified sequence
atgatcaccagcgagctgcccgtgctgcaggacagcaccaacgagaccaccgcccacagcgacgccggcagcgagctggaggagaccgaggtgaagggcaagagaaagagaggcagacccggcagaccccccagcaccaacaagaagcccagaaagagccccggcgagaagagcagaatcgaggccggcatcagaggcgccggcagaggcagagccaacggccacccccagcagaacggcgagggcgagcccgtgaccctgttcgaggtggtgaagctgggcaagagcgccatgcagagcgtggtggacgactggatcgagagctacaagcaggacagagacatcgccctgctggacctgatcaacttcttcatccagtgcagcggctgcagaggcaccgtgagaatcgagatgttcagaaacatgcagaacgccgagatcatcagaaagatgaccgaggagttcgacgaggacagcggcgactaccccctgaccatgcccggcccccagtggaagaagttcagaagcaacttctgcgagttcatcggcgtgctgatcagacagtgccagtacagcatcatctacgacgagtacatgatggacaccgtgatcagcctgctgaccggcctgagcgacagccaggtgagagccttcagacacaccagcaccctggccgccatgaagctgatgaccgccctggtgaacgtggccctgaacctgagcatccaccaggacaacacccagagacagtacgaggccgagagaaacaagatgatcggcaagagagccaacgagagactggagctgctgctgcagaagagaaaggagctgcaggagaaccaggacgagatcgagaacatgatgaacagcatcttcaagggcatcttcgtgcacagatacagagacgccatcgccgagatcagagccatctgcatcgaggagatcggcgtgtggatgaagatgtacagcgacgccttcctgaacgacagctacctgaagtacgtgggctggaccctgcacgacagacagggcgaggtgagactgaagtgcctgaaggccctgcagagcctgtacaccaacagagagctgttccccaagctggagctgttcaccaacagattcaaggacagaatcgtgagcatgaccctggacaaggagtacgacgtggccgtggaggccatcagactggtgaccctgatcctgcacggcagcgaggaggccctgagcaacgaggactgcgagaacgtgtaccacctggtgtacagcgcccacagacccgtggccgtggccgccggcgagttcctgcacaagaagctgttcagcagacacgacccccaggccgaggaggccctggccaagagaagaggcagaaacagccccaacggcaacctgatcagaatgctggtgctgttcttcctggagagcgagctgcacgagcacgccgcctacctggtggacagcctgtgggagagcagccaggagctgctgaaggactgggagtgcatgaccgagctgctgctggaggagcccgtgcagggcgaggaggccatgagcgacagacaggagagcgccctgatcgagctgatggtgtgcaccatcagacaggccgccgaggcccacccccccgtgggcagaggcaccggcaagagagtgctgaccgccaaggagagaaagacccagatcgacgacagaaacaagctgaccgagcacttcatcatcaccctgcccatgctgctgagcaagtacagcgccgacgccgagaaggtggccaacctgctgcagatcccccagtacttcgacctggagatctacagcaccggcagaatggagaagcacctggacgccctgctgaagcagatcaagttcgtggtggagaagcacgtggagagcgacgtgctggaggcctgcagcaagacctacagcatcctgtgcagcgaggagtacaccatccagaacagagtggacatcgccagaagccagctgatcgacgagttcgtggacagattcaaccacagcgtggaggacctgctgcaggagggcgaggaggccgacgacgacgacatctacaacgtgctgagcaccctgaagagactgaccagcttccacaacgcccacgacctgaccaagtgggacctgttcggcaactgctacagactgctgaagaccggcatcgagcacggcgccatgcccgagcagatcgtggtgcaggccctgcagtgcagccactacagcatcctgtggcagctggtgaagatcaccgacggcagccccagcaaggaggacctgctggtgctgagaaagaccgtgaagagcttcctggccgtgtgccagcagtgcctgagcaacgtgaacacccccgtgaaggagcaggccttcatgctgctgtgcgacctgctgatgatcttcagccaccagctgatgaccggcggcagagagggcctgcagcccctggtgttcaaccccgacaccggcctgcagagcgagctgctgagcttcgtgatggaccacgtgttcatcgaccaggacgaggagaaccagagcatggagggcgacgaggaggacgaggccaacaagatcgaggccctgcacaagagaagaaacctgctggccgccttcagcaagctgatcatctacgacatcgtggacatgcacgccgccgccgacatcttcaagcactacatgaagtactacaacgactacggcgacatcatcaaggagaccctgagcaagaccagacagatcgacaagatccagtgcgccaagaccctgatcctgagcctgcagcagctgttcaacgagctggtgcaggagcagggccccaacctggacagaaccagcgcccacgtgagcggcatcaaggagctggccagaagattcgccctgaccttcggcctggaccagatcaagaccagagaggccgtggccaccctgcacaaggacggcatcgagttcgccttcaagtaccagaaccagaagggccaggagtaccccccccccaacctggccttcctggaggtgctgagcgagttcagcagcaagctgctgagacaggacaagaagaccgtgcacagctacctggagaagttcctgaccgagcagatgatggagagaagagaggacgtgtggctgcccctgatcagctacagaaacagcctggtgaccggcggcgaggacgacagaatgagcgtgaacagcggcagcagcagcagcaagaccagcagcgtgagaaacaagaagggcagaccccccctgcacaagaagagagtggaggacgagagcctggacaacacctggctgaacagaaccgacaccatgatccagacccccggccccctgcccgccccccagctgaccagcaccgtgctgagagagaacagcagacccatgggcgaccagatccaggagcccgagagcgagcacggcagcgagcccgacttcctgcacaacagaggcctgatggaggaggacgccgagcccatcttcgaggacgtgatgatgagcagcagaagccagctggaggacatgaacgaggagttcgaggacaccatggtgatcgacctgccccccagcagaaacagaagagagagagccgagctgagacccgacttcttcgacagcgccgccatcatcgaggacgacagcggcttcggcatgcccatgttctag

SEQ ID NO: 159913 - DNA, 3777 bp, Artificial Sequence
  derived and/or modified sequence
atgatcaccagcgagctgcccgtgctgcaggacagcaccaacgagaccaccgcccacagcgacgccggcagcgagctggaggagaccgaggtgaagggcaagagaaagagaggcagacccggcagaccccccagcaccaacaagaagcccagaaagagccccggcgagaagagcagaatcgaggccggcatcagaggcgccggcagaggcagagccaacggccacccccagcagaacggcgagggcgagcccgtgaccctgttcgaggtggtgaagctgggcaagagcgccatgcagagcgtggtggacgactggatcgagagctacaagcaggacagagacatcgccctgctggacctgatcaacttcttcatccagtgcagcggctgcagaggcaccgtgagaatcgagatgttcagaaacatgcagaacgccgagatcatcagaaagatgaccgaggagttcgacgaggacagcggcgactaccccctgaccatgcccggcccccagtggaagaagttcagaagcaacttctgcgagttcatcggcgtgctgatcagacagtgccagtacagcatcatctacgacgagtacatgatggacaccgtgatcagcctgctgaccggcctgagcgacagccaggtgagagccttcagacacaccagcaccctggccgccatgaagctgatgaccgccctggtgaacgtggccctgaacctgagcatccaccaggacaacacccagagacagtacgaggccgagagaaacaagatgatcggcaagagagccaacgagagactggagctgctgctgcagaagagaaaggagctgcaggagaaccaggacgagatcgagaacatgatgaacagcatcttcaagggcatcttcgtgcacagatacagagacgccatcgccgagatcagagccatctgcatcgaggagatcggcgtgtggatgaagatgtacagcgacgccttcctgaacgacagctacctgaagtacgtgggctggaccctgcacgacagacagggcgaggtgagactgaagtgcctgaaggccctgcagagcctgtacaccaacagagagctgttccccaagctggagctgttcaccaacagattcaaggacagaatcgtgagcatgaccctggacaaggagtacgacgtggccgtggaggccatcagactggtgaccctgatcctgcacggcagcgaggaggccctgagcaacgaggactgcgagaacgtgtaccacctggtgtacagcgcccacagacccgtggccgtggccgccggcgagttcctgcacaagaagctgttcagcagacacgacccccaggccgaggaggccctggccaagagaagaggcagaaacagccccaacggcaacctgatcagaatgctggtgctgttcttcctggagagcgagctgcacgagcacgccgcctacctggtggacagcctgtgggagagcagccaggagctgctgaaggactgggagtgcatgaccgagctgctgctggaggagcccgtgcagggcgaggaggccatgagcgacagacaggagagcgccctgatcgagctgatggtgtgcaccatcagacaggccgccgaggcccacccccccgtgggcagaggcaccggcaagagagtgctgaccgccaaggagagaaagacccagatcgacgacagaaacaagctgaccgagcacttcatcatcaccctgcccatgctgctgagcaagtacagcgccgacgccgagaaggtggccaacctgctgcagatcccccagtacttcgacctggagatctacagcaccggcagaatggagaagcacctggacgccctgctgaagcagatcaagttcgtggtggagaagcacgtggagagcgacgtgctggaggcctgcagcaagacctacagcatcctgtgcagcgaggagtacaccatccagaacagagtggacatcgccagaagccagctgatcgacgagttcgtggacagattcaaccacagcgtggaggacctgctgcaggagggcgaggaggccgacgacgacgacatctacaacgtgctgagcaccctgaagagactgaccagcttccacaacgcccacgacctgaccaagtgggacctgttcggcaactgctacagactgctgaagaccggcatcgagcacggcgccatgcccgagcagatcgtggtgcaggccctgcagtgcagccactacagcatcctgtggcagctggtgaagatcaccgacggcagccccagcaaggaggacctgctggtgctgagaaagaccgtgaagagcttcctggccgtgtgccagcagtgcctgagcaacgtgaacacccccgtgaaggagcaggccttcatgctgctgtgcgacctgctgatgatcttcagccaccagctgatgaccggcggcagagagggcctgcagcccctggtgttcaaccccgacaccggcctgcagagcgagctgctgagcttcgtgatggaccacgtgttcatcgaccaggacgaggagaaccagagcatggagggcgacgaggaggacgaggccaacaagatcgaggccctgcacaagagaagaaacctgctggccgccttcagcaagctgatcatctacgacatcgtggacatgcacgccgccgccgacatcttcaagcactacatgaagtactacaacgactacggcgacatcatcaaggagaccctgagcaagaccagacagatcgacaagatccagtgcgccaagaccctgatcctgagcctgcagcagctgttcaacgagctggtgcaggagcagggccccaacctggacagaaccagcgcccacgtgagcggcatcaaggagctggccagaagattcgccctgaccttcggcctggaccagatcaagaccagagaggccgtggccaccctgcacaaggacggcatcgagttcgccttcaagtaccagaaccagaagggccaggagtaccccccccccaacctggccttcctggaggtgctgagcgagttcagcagcaagctgctgagacaggacaagaagaccgtgcacagctacctggagaagttcctgaccgagcagatgatggagagaagagaggacgtgtggctgcccctgatcagctacagaaacagcctggtgaccggcggcgaggacgacagaatgagcgtgaacagcggcagcagcagcagcaagaccagcagcgtgagaaacaagaagggcagaccccccctgcacaagaagagagtggaggacgagagcctggacaacacctggctgaacagaaccgacaccatgatccagacccccggccccctgcccgccccccagctgaccagcaccgtgctgagagagaacagcagacccatgggcgaccagatccaggagcccgagagcgagcacggcagcgagcccgacttcctgcacaacccccagatgcagatcagctggctgggccagcccaagctggaggacctgaacagaaaggacagaaccggcatgaactacatgaaggtgagaaccggcgtgagacacgccgtgagaggcctgatggaggaggacgccgagcccatcttcgaggacgtgatgatgagcagcagaagccagctggaggacatgaacgaggagttcgaggacaccatggtgatcgacctgccccccagcagaaacagaagagagagagccgagctgagacccgacttcttcgacagcgccgccatcatcgaggacgacagcggcttcggcatgcccatgttctag

SEQ ID NO: 159914 - DNA, 2997 bp, Artificial Sequence
  derived and/or modified sequence
atgaagctgatgaccgccctggtgaacgtggccctgaacctgagcatccaccaggacaacacccagagacagtacgaggccgagagaaacaagatgatcggcaagagagccaacgagagactggagctgctgctgcagaagagaaaggagctgcaggagaaccaggacgagatcgagaacatgatgaacagcatcttcaagggcatcttcgtgcacagatacagagacgccatcgccgagatcagagccatctgcatcgaggagatcggcgtgtggatgaagatgtacagcgacgccttcctgaacgacagctacctgaagtacgtgggctggaccctgcacgacagacagggcgaggtgagactgaagtgcctgaaggccctgcagagcctgtacaccaacagagagctgttccccaagctggagctgttcaccaacagattcaaggacagaatcgtgagcatgaccctggacaaggagtacgacgtggccgtggaggccatcagactggtgaccctgatcctgcacggcagcgaggaggccctgagcaacgaggactgcgagaacgtgtaccacctggtgtacagcgcccacagacccgtggccgtggccgccggcgagttcctgcacaagaagctgttcagcagacacgacccccaggccgaggaggccctggccaagagaagaggcagaaacagccccaacggcaacctgatcagaatgctggtgctgttcttcctggagagcgagctgcacgagcacgccgcctacctggtggacagcctgtgggagagcagccaggagctgctgaaggactgggagtgcatgaccgagctgctgctggaggagcccgtgcagggcgaggaggccatgagcgacagacaggagagcgccctgatcgagctgatggtgtgcaccatcagacaggccgccgaggcccacccccccgtgggcagaggcaccggcaagagagtgctgaccgccaaggagagaaagacccagatcgacgacagaaacaagctgaccgagcacttcatcatcaccctgcccatgctgctgagcaagtacagcgccgacgccgagaaggtggccaacctgctgcagatcccccagtacttcgacctggagatctacagcaccggcagaatggagaagcacctggacgccctgctgaagcagatcaagttcgtggtggagaagcacgtggagagcgacgtgctggaggcctgcagcaagacctacagcatcctgtgcagcgaggagtacaccatccagaacagagtggacatcgccagaagccagctgatcgacgagttcgtggacagattcaaccacagcgtggaggacctgctgcaggagggcgaggaggccgacgacgacgacatctacaacgtgctgagcaccctgaagagactgaccagcttccacaacgcccacgacctgaccaagtgggacctgttcggcaactgctacagactgctgaagaccggcatcgagcacggcgccatgcccgagcagatcgtggtgcaggccctgcagtgcagccactacagcatcctgtggcagctggtgaagatcaccgacggcagccccagcaaggaggacctgctggtgctgagaaagaccgtgaagagcttcctggccgtgtgccagcagtgcctgagcaacgtgaacacccccgtgaaggagcaggccttcatgctgctgtgcgacctgctgatgatcttcagccaccagctgatgaccggcggcagagagggcctgcagcccctggtgttcaaccccgacaccggcctgcagagcgagctgctgagcttcgtgatggaccacgtgttcatcgaccaggacgaggagaaccagagcatggagggcgacgaggaggacgaggccaacaagatcgaggccctgcacaagagaagaaacctgctggccgccttcagcaagctgatcatctacgacatcgtggacatgcacgccgccgccgacatcttcaagcactacatgaagctgttcaacgagctggtgcaggagcagggccccaacctggacagaaccagcgcccacgtgagcggcatcaaggagctggccagaagattcgccctgaccttcggcctggaccagatcaagaccagagaggccgtggccaccctgcacaaggacggcatcgagttcgccttcaagtaccagaaccagaagggccaggagtaccccccccccaacctggccttcctggaggtgctgagcgagttcagcagcaagctgctgagacaggacaagaagaccgtgcacagctacctggagaagttcctgaccgagcagatgatggagagaagagaggacgtgtggctgcccctgatcagctacagaaacagcctggtgaccggcggcgaggacgacagaatgagcgtgaacagcggcagcagcagcagcaagaccagcagcgtgagaaacaagaagggcagaccccccctgcacaagaagagagtggaggacgagagcctggacaacacctggctgaacagaaccgacaccatgatccagacccccggccccctgcccgccccccagctgaccagcaccgtgctgagagagaacagcagacccatgggcgaccagatccaggagcccgagagcgagcacggcagcgagcccgacttcctgcacaacccccagatgcagatcagctggctgggccagcccaagctggaggacctgaacagaaaggacagaaccggcatgaactacatgaaggtgagaaccggcgtgagacacgccgtgagaggcctgatggaggaggacgccgagcccatcttcgaggacgtgatgatgagcagcagaagccagctggaggacatgaacgaggagttcgaggacaccatggtgatcgacctgccccccagcagaaacagaagagagagagccgagctgagacccgacttcttcgacagcgccgccatcatcgaggacgacagcggcttcggcatgcccatgttctag

SEQ ID NO: 159915 - DNA, 2529 bp, Artificial Sequence
  derived and/or modified sequence
atgaccctggacaaggagtacgacgtggccgtggaggccatcagactggtgaccctgatcctgcagctgttcagcagacacgacccccaggccgaggaggccctggccaagagaagaggcagaaacagccccaacggcaacctgatcagaatgctggtgctgttcttcctggagagcgagctgcacgagcacgccgcctacctggtggacagcctgtgggagagcagccaggagctgctgaaggactgggagtgcatgaccgagctgctgctggaggagcccgtgcagggcgaggaggccatgagcgacagacaggagagcgccctgatcgagctgatggtgtgcaccatcagacaggccgccgaggcccacccccccgtgggcagaggcaccggcaagagagtgctgaccgccaaggagagaaagacccagatcgacgacagaaacaagctgaccgagcacttcatcatcaccctgcccatgctgctgagcaagtacagcgccgacgccgagaaggtggccaacctgctgcagatcccccagtacttcgacctggagatctacagcaccggcagaatggagaagcacctggacgccctgctgaagcagatcaagttcgtggtggagaagcacgtggagagcgacgtgctggaggcctgcagcaagacctacagcatcctgtgcagcgaggagtacaccatccagaacagagtggacatcgccagaagccagctgatcgacgagttcgtggacagattcaaccacagcgtggaggacctgctgcaggagggcgaggaggccgacgacgacgacatctacaacgtgctgagcaccctgaagagactgaccagcttccacaacgcccacgacctgaccaagtgggacctgttcggcaactgctacagactgctgaagaccggcatcgagcacggcgccatgcccgagcagatcgtggtgcaggccctgcagtgcagccactacagcatcctgtggcagctggtgaagatcaccgacggcagccccagcaaggaggacctgctggtgctgagaaagaccgtgaagagcttcctggccgtgtgccagcagtgcctgagcaacgtgaacacccccgtgaaggagcaggccttcatgctgctgtgcgacctgctgatgatcttcagccaccagctgatgaccggcggcagagagggcctgcagcccctggtgttcaaccccgacaccggcctgcagagcgagctgctgagcttcgtgatggaccacgtgttcatcgaccaggacgaggagaaccagagcatggagggcgacgaggaggacgaggccaacaagatcgaggccctgcacaagagaagaaacctgctggccgccttcagcaagctgatcatctacgacatcgtggacatgcacgccgccgccgacatcttcaagcactacatgaagtactacaacgactacggcgacatcatcaaggagaccctgagcaagaccagacagatcgacaagatccagtgcgccaagaccctgatcctgagcctgcagcagctgttcaacgagctggtgcaggagcagggccccaacctggacagaaccagcgcccacgtgagcggcatcaaggagctggccagaagattcgccctgaccttcggcctggaccagatcaagaccagagaggccgtggccaccctgcacaaggacggcatcgagttcgccttcaagtaccagaaccagaagggccaggagtaccccccccccaacctggccttcctggaggtgctgagcgagttcagcagcaagctgctgagacaggacaagaagaccgtgcacagctacctggagaagttcctgaccgagcagatgatggagagaagagaggacgtgtggctgcccctgatcagctacagaaacagcctggtgaccggcggcgaggacgacagaatgagcgtgaacagcggcagcagcagcagcaagaccagcagcgtgagaaacaagaagggcagaccccccctgcacaagaagagagtggaggacgagagcctggacaacacctggctgaacagaaccgacaccatgatccagacccccggccccctgcccgccccccagctgaccagcaccgtgctgagagagaacagcagacccatgggcgaccagatccaggagcccgagagcgagcacggcagcgagcccgacttcctgcacaacccccagatgcagatcagctggctgggccagcccaagctggaggacctgaacagaaaggacagaaccggcatgaactacatgaaggtgagaaccggcgtgagacacgccgtgagaggcctgatggaggaggacgccgagcccatcttcgaggacgtgatgatgagcagcagaagccagctggaggacatgaacgaggagttcgaggacaccatggtgatcgacctgccccccagcagaaacagaagagagagagccgagctgagacccgacttcttcgacagcgccgccatcatcgaggacgacagcggcttcggcatgcccatgttctag

SEQ ID NO: 159916 - protein, 542 aa, Artificial Sequence
  derived and/or modified sequence
MVAHDETGGLLPIKRTIRVLDVNNQSFREQEEPSNKRVRPLARVTSLANLISPVRNGAVRRFGQTIQSFTLRGDHRSPASAQKFSSRSTVPTPAKRRSSALWSEMLDITMKESLTTREIRRQEAIYEMSRGEQDLIEDLKLARKAYHDPMLKLSIMSEEELTHIFGDLDSYIPLHEDLLTRIGEATKPDGTVEQIGHILVSWLPRLNAYRGYCSNQLAAKALLDQKKQDPRVQDFLQRCLESPFSRKLDLWSFLDIPRSRLVKYPLLLKEILKHTPKEHPDVQLLEDAILIIQGVLSDINLKKGESECQYYIDKLEYLDEKQRDPRIEASKVLLCHGELRSKSGHKLYIFLFQDILVLTRPVTRNERHSYQVYRQPIPVQELVLEDLQDGDVRMGGSFRGAFSNSEKAKNIFRIRFHDPSPAQSHTLQANDVFHKQQWFNCIRAAIAPFQSAGSPPELQGLPELHEECEGNHPSARKLTAQRRASTVSSVTQVEVDENAYRCGSGMQMAEDSKSLKTHQTQPGIRRARDKALSGGKRKETLV

SEQ ID NO: 159917 - protein, 415 aa, Artificial Sequence
  derived and/or modified sequence
MSRGEQDLIEDLKLARKAYHDPMLKLSIMSEEELTHIFGDLDSYIPLHEDLLTRIGEATKPDGTVEQIGHILVSWLPRLNAYRGYCSNQLAAKALLDQKKQDPRVQDFLQRCLESPFSRKLDLWSFLDIPRSRLVKYPLLLKEILKHTPKEHPDVQLLEDAILIIQGVLSDINLKKGESECQYYIDKLEYLDEKQRDPRIEASKVLLCHGELRSKSGHKLYIFLFQDILVLTRPVTRNERHSYQVYRQPIPVQELVLEDLQDGDVRMGGSFRGAFSNSEKAKNIFRIRFHDPSPAQSHTLQANDVFHKQQWFNCIRAAIAPFQSAGSPPELQGLPELHEECEGNHPSARKLTAQRRASTVSSVTQVEVDENAYRCGSGMQMAEDSKSLKTHQTQPGIRRARDKALSGGKRKETLV

SEQ ID NO: 159918 - DNA, 483 bp, Artificial Sequence
  derived and/or modified sequence
atggtggcccacgacgaaacgggcggcctactacccatcaagaggactattagagttctggatgtgaataatcagtccttcagggagcaggaggaacttacacacatcttcggagacctggatagctatattcctctacacgaggatttactcacacggattggggaagcaaccaaacccgacggcactgtggaacagatcggccacatacttgtaagttggctccccagactcaatgcataccgggggtattgctccaatcagctggcagccaaggcgctgctggaccaaaagaagcaggacccacgagtccaggactttctgcaacgctgcctggagagcccattcagcaggaagctggatctctggtcctttctggacatccctaggtcacggttagtcaagtatcccctcctgctgaaagaaattctgaagcacactcccaaggagcacccggacgtacagctgcttgaagacgcttag

SEQ ID NO: 159919 - DNA, 1629 bp, Artificial Sequence
  derived and/or modified sequence
atggttgcacacgacgagactggtgggctcctccctattaagcgcaccattcgcgtccttgatgtgaacaatcagagctttcgggaacaagaggaaccttccaacaagcgtgtgcgacccctggccagagttacgtcactcgccaacctaatttctcctgtgagaaatggtgccgtgcggaggtttgggcagaccattcaaagtttcaccctccgcggggatcacagatctccagcttctgctcaaaagttttcatctagatctacagtgcccacccctgcaaagagacgaagttctgccctttggtctgaaatgctcgacattacgatgaaagagtcccttactaccagagaaattaggcggcaggaagccatctacgaaatgagcagaggggaacaggatctgattgaggaccttaaactcgctcggaaggcctatcatgatcccatgctgaaattgtctatcatgagtgaagaggaactgacccacattttcggggacttggattcttacattccactgcatgaggatctgctgacccgaatcggcgaggcgactaagcctgatggcactgtggaacagattgggcacattctagtaagctggctgccacgcctgaatgcttacagagggtattgctctaaccaactggctgccaaagcgctcctcgatcaaaagaagcaggacccccgggtgcaggatttcctgcagcgatgtctggaatcaccgttttcaagaaagctggacctgtggagtttccttgacattcccaggagcaggctggtcaagtatccactgttactgaaggaaatactgaaacatacaccgaaagaacacccagacgtgcagctgctggaagacgctatcctcatcattcagggagttctcagtgatatcaacctgaaaaaaggggagagtgagtgtcaatattacatcgacaaattagaatacctcgacgagaagcagagagaccccaggatcgaagcgtccaaagtacttctgtgtcatggagagctccgttccaaatctggtcacaagctgtatattttcttgttccaggatattctcgtcttaactcgccccgttactagaaatgagcgtcattcataccaggtttaccgccagccaatccccgtgcaggagctcgtgctggaggaccttcaggatggcgatgtgcgcatgggagggtcattccgaggcgcgtttagcaattccgaaaaggcaaaaaacattttcaggattcgctttcatgatcccagccccgcacagtctcacacactgcaggctaacgatgttttccataaacaacagtggtttaattgtatacgggccgctattgcccctttccaaagtgccggatctcctccagagttacaggggctccctgagctccatgaagagtgcgaaggcaatcacccttctgcccgcaagttgaccgctcaaagacgggcctccacagtctccagtgtgacgcaagtcgaagtggacgaaaacgcttaccgctgcggctctggaatgcaaatggccgaggactcgaaatccctgaaaacgcatcagactcagccgggtatcaggagagcacgagacaaggccctctcaggcggtaagcgtaaggaaactcttgtgtag

SEQ ID NO: 159920 - DNA, 483 bp, Artificial Sequence
  derived and/or modified sequence
atggtggcacacgacgaaactgggggcttgttgcctataaaaaggaccattcgagtcctcgacgttaacaaccagtctttccgggagcaagaggaactcacccacatcttcggtgatcttgactcttacattcctttacacgaggatctcctgacgaggatcggggaggcgacaaagccggacggaacggtggagcaaataggccatatactggtgagttggctccccaggctgaatgcctatcggggctactgcagcaaccaacttgcggctaaggccctgttggaccagaagaagcaggatccgagggtccaggacttcctccagcgatgtctggagtcacctttcagccgcaagctggacctgtggagcttcctcgacataccccgaagtcgtctcgtcaagtatcctcttcttcttaaggagattctgaaacacacccctaaagaacaccccgacgttcaattgctggaagacgcttag

SEQ ID NO: 159921 - DNA, 1248 bp, Artificial Sequence
  derived and/or modified sequence
atgtcccgcggagagcaggatctgatcgaggatcttaagctggcccgaaaggcctatcatgacccaatgctcaagctgtctatcatgagcgaagaagagctaactcacatatttggggatctggactcttacatccctctccacgaagacctactcactcgcatcggagaggcgacaaagccagacggaacggttgagcagatcggacatattctggtgtcttggctgcccaggctgaatgcttacagaggttactgcagtaatcagctggccgctaaagcattgcttgatcagaagaagcaggaccccagggttcaggactttctccaaaggtgcttagaatcacccttcagcagaaagctggacctgtggtcatttctggatattcctcgatctaggcttgtgaagtatcccctgttgttaaaagaaattctgaagcatacccctaaagagcaccctgatgtccaactgctggaagacgctatactgatcattcagggggtccttagcgacatcaatctcaagaaaggcgagtcagagtgtcagtattacatagataagctcgagtacctcgacgagaaacagcgtgatcccagaattgaggcttcaaaggtcctcctctgccatggagaattgcggtcaaagagtggacacaaactctatattttcctattccaggacattctcgtgctgactcgtcctgtgacccggaatgagcggcattcctatcaggtgtatcgccagcctattccggtgcaggaacttgtgttggaggacctgcaggacggagatgttcggatgggaggctccttccggggcgccttcagcaactccgagaaggccaaaaacatctttaggatccgttttcacgaccctagcccggcccagagtcacactctccaggcaaacgacgtgttccataagcaacaatggtttaattgcatcagagccgccatagctcccttccaaagcgccggtagccctccagagctgcagggactcccggaacttcatgaggagtgtgaggggaaccaccccagtgcacggaaactgaccgcacaaagaagggccagtacagtcagtagcgtcactcaggttgaagttgacgagaacgcctatagatgcggctcaggcatgcagatggccgaagatagtaagagccttaagacccatcagacacagcctgggattagacgagctcgcgataaggccctcagcgggggcaagcgcaaggagacccttgtgtag

SEQ ID NO: 159922 - DNA, 483 bp, Artificial Sequence
  derived and/or modified sequence
atggtggcccatgatgaaacaggaggcctgctgcccatcaagaggaccatccgggtgctggatgtgaacaaccagagcttccgggagcaggaggagctgacccacatctttggagacctggacagctacatccccctgcacgaggacctgctgacccgcatcggggaggccaccaagccagatggcaccgtggagcagatcggccacatcctggtgtcctggctgccccggctgaatgcctaccggggctactgcagcaaccagctggccgccaaggccctgctggaccagaagaagcaggacccccgggtgcaggacttcctgcagcgctgcctggagagccccttcagcaggaagctggacctgtggagcttcctggacatccccaggagccggctggtgaagtaccccctgctgctgaaggagatcctgaagcacacccccaaggagcacccagatgtgcagctgctggaggatgcctag

SEQ ID NO: 159923 - DNA, 1629 bp, Artificial Sequence
  derived and/or modified sequence
atggtggcccatgatgaaacaggaggcctgctgcccatcaagaggaccatccgggtgctggatgtgaacaaccagagcttccgggagcaggaggagcccagcaacaagagggtgcggcccctggcccgggtgaccagcctggccaacctgatcagccctgtgagaaatggagctgtgcggcgcttcggccagaccatccagagcttcaccctgcggggggaccacaggagccctgccagcgcccagaagttcagcagccgcagcacagtgcccaccccagccaagaggaggagcagcgccctgtggagcgagatgctggacatcaccatgaaggagagcctgaccacccgggagatccggcggcaggaggccatctatgagatgagcagaggagagcaggacctgattgaggacctgaagctggccaggaaggcctaccatgaccccatgctgaagctgagcatcatgtctgaggaggagctgacccacatctttggagacctggacagctacatccccctgcacgaggacctgctgacccgcatcggggaggccaccaagccagatggcaccgtggagcagatcggccacatcctggtgtcctggctgccccggctgaatgcctaccggggctactgcagcaaccagctggccgccaaggccctgctggaccagaagaagcaggacccccgggtgcaggacttcctgcagcgctgcctggagagccccttcagcaggaagctggacctgtggagcttcctggacatccccaggagccggctggtgaagtaccccctgctgctgaaggagatcctgaagcacacccccaaggagcacccagatgtgcagctgctggaggatgccatcctgatcatccagggcgtgctgagtgacatcaacctgaagaagggggagagcgagtgccagtactacatcgacaagctggagtacctggatgagaagcagagggaccccagaattgaggccagcaaggtgctgctgtgccacggggagctgcggagcaagagcggccacaagctgtacatcttcctgttccaggacatcctggtgctgaccaggcctgtgaccagaaatgaaagacacagctaccaggtgtaccggcagcccatccctgtgcaggagctggtgctggaggacctgcaggatggagatgtgaggatgggcggcagcttccggggggccttcagcaacagcgagaaggccaagaacatcttccgcatccgcttccatgaccccagccctgcccagagccacaccctgcaggccaatgatgtgttccacaagcagcagtggttcaactgcatccgggccgccatcgcccccttccagagcgctggcagccccccagagctgcagggcctgcctgagctgcatgaagaatgtgagggcaaccaccccagcgccaggaagctgacagcccagaggcgggccagcacagtgtcctctgtgacccaggtggaggtggatgaaaatgcctaccgctgtggcagcggcatgcagatggccgaggacagcaagagcctgaagacccaccagacccagcccggcatcagaagagcccgggacaaggccctgagcggcggcaagaggaaggagaccctggtgtag

SEQ ID NO: 159924 - DNA, 1248 bp, Artificial Sequence
  derived and/or modified sequence
atgagcagaggagagcaggacctgattgaggacctgaagctggccaggaaggcctaccatgaccccatgctgaagctgagcatcatgtctgaggaggagctgacccacatctttggagacctggacagctacatccccctgcacgaggacctgctgaccagaattggagaggccaccaagccagatggcaccgtggagcagatcggccacatcctggtgtcctggctgccccggctgaatgcctaccggggctactgcagcaaccagctggccgccaaggccctgctggaccagaagaagcaggacccccgggtgcaggacttcctgcagcgctgcctggagagccccttcagcaggaagctggacctgtggagcttcctggacatccccaggagccggctggtgaagtaccccctgctgctgaaggagatcctgaagcacacccccaaggagcacccagatgtgcagctgctggaggatgccatcctgatcatccagggcgtgctgagtgacatcaacctgaagaagggggagagcgagtgccagtactacatcgacaagctggagtacctggatgagaagcagagggacccccgcatcgaggccagcaaggtgctgctgtgccacggggagctgcggagcaagagcggccacaagctgtacatcttcctgttccaggacatcctggtgctgaccaggcctgtgaccagaaatgaaagacacagctaccaggtgtaccggcagcccatccctgtgcaggagctggtgctggaggacctgcaggatggagatgtgaggatgggcggcagcttccggggggccttcagcaacagcgagaaggccaagaacatcttccgcatccgcttccatgaccccagccctgcccagagccacaccctgcaggccaatgatgtgttccacaagcagcagtggttcaactgcatccgggccgccatcgcccccttccagagcgctggcagccccccagagctgcagggcctgcctgagctgcacgaggagtgtgagggcaaccaccccagcgccaggaagctgacagcccagaggcgggccagcacagtgtcctctgtgacccaggtggaggtggatgaaaatgcctaccgctgtggcagcggcatgcagatggccgaggacagcaagagcctgaagacccaccagacccagcccggcatccggcgggcccgggacaaggccctgagcggcggcaagaggaaggagaccctggtgtag

SEQ ID NO: 159925 - DNA, 483 bp, Artificial Sequence
  derived and/or modified sequence
atggtggcccacgacgagaccggcggcctgctgcccatcaagcggactattagggtgctggacgtcaacaaccagtcctttcgggaacaggaggaactcacacatatttttggtgacctggactcatacattccgttgcatgaggacctcctgactcgtatcggcgaggctacaaagcctgacggaacagtggagcaaatagggcatattctagttagctggttgccaagactcaatgcgtatcgagggtattgctcaaaccagctcgcggctaaggctctgctggatcagaagaagcaagacccacgggtgcaggactttctacaacggtgtctagaaagcccatttagtcgcaaacttgacctgtggtctttcttggatatccccaggagcagattggtgaagtatccgctgctgcttaaagaaatcctaaagcacacgccaaaggaacatccagacgtgcaattgctggaggacgcctag

SEQ ID NO: 159926 - DNA, 1629 bp, Artificial Sequence
  derived and/or modified sequence
atggtggcccacgacgagaccggcggcctgctgcccatcaagcggactattcgtgttctcgatgtcaataaccagagtttccgggagcaggaagagccatctaataagagggtgagacctctggcgagggtcacatctctggctaatctgatctcgcctgtgagaaacggtgccgtgcgccgattcggtcagacaatccagtccttcacattgagaggagaccaccggtcaccggcgagcgcccagaaattttcttcccgctcaactgttccaacccccgctaaacggagatcctcggccctctggagtgagatgctcgacatcaccatgaaagaatccctgacaactcgcgagattcggcgacaggaggccatctacgaaatgtcccgaggcgagcaggatcttatcgaggatcttaagctggccaggaaggcttatcatgatccgatgcttaagctgtctatcatgagcgaggaggaattaacacatatatttggtgatcttgacagctatatcccacttcatgaagacctgctgactcgcattggtgaagcaaccaagccagacggcacagtcgaacagatcgggcacatccttgttagttggctgccaaggttgaatgcttatagagggtactgcagcaatcagctcgctgccaaggcgctgctggaccaaaaaaaacaggaccctcgcgtacaggatttcctgcaaaggtgcttggagagcccatttagtagaaagctcgatctctggtccttccttgatatccccaggtcaagactcgtcaagtacccacttcttctgaaagaaatcctgaagcacacccccaaggaacacccggacgtgcaacttttagaggacgctatcctgatcatccaaggggttctatcagatattaatctcaagaaaggggagtccgagtgtcaatactatatcgacaagctagaatacttagacgagaagcagcgggaccctaggatagaggcttcaaaagtgttgctctgccacggtgagctaaggagcaaaagtgggcacaaactctacatatttctgttccaggatatccttgtgctgacgcgcccagtaacaaggaacgagagacacagttatcaggtgtacagacagccaatacctgtgcaggaattagttcttgaagatcttcaagatggagacgtcaggatggggggatcttttagaggagctttcagtaactccgagaaggccaaaaatatttttaggatccgttttcatgaccccagtcctgcccagtcccacacattgcaggctaacgatgttttccataaacaacagtggttcaactgtattcgcgctgcaatcgctccttttcaaagtgctggtagtccccctgaactgcaaggtctgccagagctgcacgaagaatgtgagggcaaccaccccagcgcaagaaaactaaccgcgcagcggagggctagcactgtttcctcagtaactcaggtggaagttgacgagaacgcctatagatgtggctccggcatgcaaatggcagaggattccaagagcctgaaaacgcaccaaacccagcctggtattaggcgtgcaagggacaaggctttgtctggcggtaagagaaaagagaccttggtctag

SEQ ID NO: 159927 - DNA, 483 bp, Artificial Sequence
  derived and/or modified sequence
atggtggcccacgacgagaccggcggcctgctgcccatcaagcggacaataagagtcttggacgttaacaatcaaagctttagggagcaagaggagttaacccacatcttcggagatctggacagctatatacccctacacgaagatctcttgactagaattggggaagctaccaagccagatggcacagtcgaacagatcggacacatacttgtgtcctggttgcctcgtctgaacgcgtacagagggtattgttctaatcagcttgctgcaaaggccttgctggaccagaagaaacaggacccacgagttcaagattttctgcagagatgtttggagagcccattctcacgcaagctcgatttgtggagcttcctcgacatccctaggtcccgccttgtgaagtaccccctgcttctgaaggagatcttgaagcatacgccgaaagaacatcctgacgtgcaactgctggaggatgcatag

SEQ ID NO: 159928 - DNA, 1248 bp, Artificial Sequence
  derived and/or modified sequence
atgagccggggcgagcaggacctgatcgaggacctgaagctggccagaaaagcttaccatgaccccatgctcaaactgtctatcatgtcagaagaggagctgacacacatctttggggatctggacagctacattccacttcacgaagacctgctgacgagaataggagaagccacaaagcccgacgggactgtagagcagatcggccatatcctcgttagctggctgccacgactcaacgcttaccggggctattgcagcaatcagctagccgcaaaagccttactcgatcaaaagaagcaggacccaagagttcaggatttcctgcagagatgcctggagtctccttttagccggaaattagacttgtggtcgttcttagacatacctaggtcccgcctggtcaagtatccccttctgctgaaggagatcctaaaacacaccccaaaggagcatccagatgtgcaattgctggaggacgcgatccttattattcagggagtcctctctgacatcaacttaaaaaagggtgaaagtgaatgccaatactatatcgacaagctcgagtacctcgacgagaaacaaagagaccctcgcatcgaggcctctaaggtcctgctctgccatggagaactgagatctaaaagtggacataaattgtacatttttttgtttcaggacatcctcgtgctcacccgtccagttaccagaaacgaacgacattcttatcaagtctatcgtcaacctattccagtccaagagctagtcttagaggacctgcaggacggagatgtccgtatgggcggatcatttcgcggggcttttagtaactctgagaaggcaaagaacatcttccgtatccgctttcacgaccctagccctgcccagagccacaccctacaggccaatgacgtgtttcataaacagcaatggtttaattgcattcgggctgccattgctccctttcaatccgccggaagtccacccgaacttcagggcctccccgagctccacgaggaatgtgagggcaaccacccgagtgctaggaaactcaccgcacagagacgcgcgtcaactgtatcctccgtcacacaagttgaagtggatgaaaacgcttaccggtgcggatctggaatgcagatggctgaggacagcaaatccttgaagactcatcagacgcagccagggatcaggcgcgcgcgcgacaaagctctcagcgggggaaaacgaaaggagacactcgtgtag

SEQ ID NO: 159929 - DNA, 2689 bp, Artificial Sequence
  derived and/or modified sequence
atggtggcacatgatgagactggaggtctcctacctattaaaaggaccatacgagtcctagatgtcaataaccagtccttcagagaacaagaggaactcacacatatatttggtgatctggactcttacatacctctgcatgaagatttgttgacaagaataggagaagcaaccaagcctgatggaacagtggagcagattggtcacattctcgtgagctggttaccgcgcttgaatgcctacagaggttactgtagtaaccagctggcagccaaagctcttcttgatcaaaagaaacaggatccaagagtccaagacttcctccagcgatgtctcgagtctcccttcagtcgaaaactagatctttggagtttcctagatatccctcgaagtcgcctagtcaaataccctttactgttaaaagaaattcttaaacacactccaaaagagcaccctgatgttcagcttctggaggatgctatattgataatacagggagtcctctctgatatcaacttgaagaaaggtgaatccgagtgccagtattacatcgacaagctggagtacctggatgaaaagcagagggaccccagaatcgaagcgagcaaagtgctgctgtgccatggggagctgcggagcaagagtggacataaactttacattttcctgtttcaagacatcttggttctgactcggcccgtcacacggaacgaacggcactcttaccaggtttaccggcagccaatcccagtccaagagctagtcctagaagacctgcaggatggagatgtgagaatgggaggctcctttcgaggagctttcagtaactcagagaaagctaaaaatatctttagaattcgcttccatgacccctctccagcccagtctcacactctgcaagccaatgacgtgttccacaagcagcagtggttcaactgtattcgagcggccattgcccccttccagtcggcaggcagtccacctgagctgcagggcctgccggagctgcacgaagagtgtgaggggaaccacccctctgcgaggaaactcacagcccagaggagggcatccacagtttccagtgttactcaggtagaagttgatgaaaacgcttacagatgtggctctggcatgcagatggcagaggacagcaagagcttaaagacacaccagacacagcccggcatccgaagagcgagggacaaagccctttctggtggcaaacggaaagagactttggtgtagagaaggctctgtgtgttaactgatgggagagactgtttgtttataaatgtgtacagttttgttttctcgtaaggggagcatcatagggttactttataccagttgtaacattttcattgtttttggttgttcttttttctttttttaatggcagctaaagatatacagattactgttaaattgcagtccttttttttttaaagatattttcttgaattatttagaacatggtaagcctggtattttttaatcaaacaaaatatttatgaaatgggttttctcttaattctggattcatcatggctttctaataccaattgtaatatttacaatattcaccaaaacttagaattttgcaaatgctggaattctgccagtgtttctttgctaagccttgcatgcaaaatttgaaattttaacattggcacccaaaacctacatggaatgtatgtctggagtatttcaaactttacattgaaacataatttccttggaaaacaaaccataagcctgaggaggtttttatcaactggaatgctttatattagtttgtttttcactgtacattcctcattttacattcatttaacctgccgattatttaatttttttattgtaaagtagtttttagcatttgcttttatttttttactttgatgccttttcaaattggcatgtctttaaagtatttttcttcctgattaaaaatgtgtgtgtatgtgtgtgtgtgtgtgtatatatatatatatttttaaatcacattaattttaccaagtgaaaccaagccatactgtttttgagccaattaagaaaattgccatttttaaagtgtagcatttcagggtaaagacccatgaaatggcttgatgtattctagactactgaaagaaaaccacttcaaagattttgttgaaagttttagtgttgtctgaaatgcaagagggaaggtgattggtagtgagttaaaagaaaaagagaggaaaagagagtagttttgtcttcaagtaaaatgtctggttgtgccagacatttcacaagtgtgaaaggagataggagaagctcaacttgagggcgtgtagtaagttgtagaaggctcgaggggacgtggacttatttgccttggtttgcaatacctgcaaataatgagtttgaaaagaaacaatgaaatgtgttaaaaatttgaccatattagataaattttcgtggatttagtcataagatggaaaaagactggtgaatcttttattacaaaatgtttctgttaaaatgggatcatcatctttgaaaggggggaggaggagtaaaagcccgattataatggtgatcaattcaagtcagtgttgactattctgtgaaatatatttggccagtggaaatgataatcagaaaagactgtaaatagatccatccaaatgatttctctgtacaaatgaatgatactatt

SEQ ID NO: 159930 - DNA, 3253 bp, Artificial Sequence
  derived and/or modified sequence
aagcctctgctccaccgcggcgagaggcatgggcacgtggctgccgagggtggccgagctctgggaagaaaagcccgtgtgcctctgcatagcgtcgctacagcgctgactcggtgtggattgattggaaaggtttgagggagtacttgggaagcatggtggcacatgatgagactggaggtctcctacctattaaaaggaccatacgagtcctagatgtcaataaccagtccttcagagaacaagaggagccaagcaataaaagagttcgacctctggctcgtgtcacgtccttggcaaatttaatctctcctgtaagaaatggagctgtcagacgttttggtcaaacaatacagtcatttacccttcgtggtgaccacagatccccagcctctgcccagaagttttctagcaggtcaacagtcccaacacccgccaagagaaggagcagtgcactgtggtcagagatgctggacatcaccatgaaggagtctctcaccaccagggagatcagacggcaggaggcaatatatgaaatgtcccgaggtgaacaggatttaattgaggatctcaaacttgcaagaaaggcctatcatgaccccatgttaaagttgtccatcatgtcagaagaggaactcacacatatatttggtgatctggactcttacatacctctgcatgaagatttgttgacaagaataggagaagcaaccaagcctgatggaacagtggagcagattggtcacattctcgtgagctggttaccgcgcttgaatgcctacagaggttactgtagtaaccagctggcagccaaagctcttcttgatcaaaagaaacaggatccaagagtccaagacttcctccagcgatgtctcgagtctcccttcagtcgaaaactagatctttggagtttcctagatatccctcgaagtcgcctagtcaaataccctttactgttaaaagaaattcttaaacacactccaaaagagcaccctgatgttcagcttctggaggatgctatattgataatacagggagtcctctctgatatcaacttgaagaaaggtgaatccgagtgccagtattacatcgacaagctggagtacctggatgaaaagcagagggaccccagaatcgaagcgagcaaagtgctgctgtgccatggggagctgcggagcaagagtggacataaactttacattttcctgtttcaagacatcttggttctgactcggcccgtcacacggaacgaacggcactcttaccaggtttaccggcagccaatcccagtccaagagctagtcctagaagacctgcaggatggagatgtgagaatgggaggctcctttcgaggagctttcagtaactcagagaaagctaaaaatatctttagaattcgcttccatgacccctctccagcccagtctcacactctgcaagccaatgacgtgttccacaagcagcagtggttcaactgtattcgagcggccattgcccccttccagtcggcaggcagtccacctgagctgcagggcctgccggagctgcacgaagagtgtgaggggaaccacccctctgcgaggaaactcacagcccagaggagggcatccacagtttccagtgttactcaggtagaagttgatgaaaacgcttacagatgtggctctggcatgcagatggcagaggacagcaagagcttaaagacacaccagacacagcccggcatccgaagagcgagggacaaagccctttctggtggcaaacggaaagagactttggtgtagagaaggctctgtgtgttaactgatgggagagactgtttgtttataaatgtgtacagttttgttttctcgtaaggggagcatcatagggttactttataccagttgtaacattttcattgtttttggttgttcttttttctttttttaatggcagctaaagatatacagattactgttaaattgcagtccttttttttttaaagatattttcttgaattatttagaacatggtaagcctggtattttttaatcaaacaaaatatttatgaaatgggttttctcttaattctggattcatcatggctttctaataccaattgtaatatttacaatattcaccaaaacttagaattttgcaaatgctggaattctgccagtgtttctttgctaagccttgcatgcaaaatttgaaattttaacattggcacccaaaacctacatggaatgtatgtctggagtatttcaaactttacattgaaacataatttccttggaaaacaaaccataagcctgaggaggtttttatcaactggaatgctttatattagtttgtttttcactgtacattcctcattttacattcatttaacctgccgattatttaatttttttattgtaaagtagtttttagcatttgcttttatttttttactttgatgccttttcaaattggcatgtctttaaagtatttttcttcctgattaaaaatgtgtgtgtatgtgtgtgtgtgtgtgtatatatatatatatttttaaatcacattaattttaccaagtgaaaccaagccatactgtttttgagccaattaagaaaattgccatttttaaagtgtagcatttcagggtaaagacccatgaaatggcttgatgtattctagactactgaaagaaaaccacttcaaagattttgttgaaagttttagtgttgtctgaaatgcaagagggaaggtgattggtagtgagttaaaagaaaaagagaggaaaagagagtagttttgtcttcaagtaaaatgtctggttgtgccagacatttcacaagtgtgaaaggagataggagaagctcaacttgagggcgtgtagtaagttgtagaaggctcgaggggacgtggacttatttgccttggtttgcaatacctgcaaataatgagtttgaaaagaaacaatgaaatgtgttaaaaatttgaccatattagataaattttcgtggatttagtcataagatggaaaaagactggtgaatcttttattacaaaatgtttctgttaaaatgggatcatcatctttgaaaggggggaggaggagtaaaagcccgattataatggtgatcaattcaagtcagtgttgactattctgtgaaatatatttggccagtggaaatgataatcagaaaagactgtaaatagatccatccaaatgatttctctgtacaaatgaatgatactattaaaaaaaaaaaaagcacacacataa

SEQ ID NO: 159931 - DNA, 637 bp, Artificial Sequence
  derived and/or modified sequence
agaagcctctgctccaccgcggcgagaggcatgggcacgtggctgccgagggtggccgagctctgggaagaaaagcccgtgtgcctctgcatagcgtcgctacagcgctgactcggtgtggattgattggaaaggtttgagggagtacttgggaagcatggtggcacatgatgagactggaggtctcctacctattaaaaggaccatacgagtcctagatgtcaataaccagtccttcagagaacaagaggaactcacacatatatttggtgatctggactcttacatacctctgcatgaagatttgttgacaagaataggagaagcaaccaagcctgatggaacagtggagcagattggtcacattctcgtgagctggttaccgcgcttgaatgcctacagaggttactgtagtaaccagctggcagccaaagctcttcttgatcaaaagaaacaggatccaagagtccaagacttcctccagcgatgtctcgagtctcccttcagtcgaaaactagatctttggagtttcctagatatccctcgaagtcgcctagtcaaataccctttactgttaaaagaaattcttaaacacactccaaaagagcaccctgatgttcagcttctggaggatgct

SEQ ID NO: 159932 - DNA, 483 bp, Artificial Sequence
  derived and/or modified sequence
atggttgctcacgacgagacaggaggcttactgccaatcaaaagaacaatccgcgtgctagacgtcaacaaccaaagtttcagagaacaagaggaattaacccacatcttcggagatttggatagttatatccctctgcacgaggatctgctcacccgaatcggtgaagcaaccaagcccgacggaactgtggaacagatcgggcacattcttgtgagctggctgccccgactgaacgcctaccggggatattgctctaaccagctggctgccaaagctctcctagaccaaaaaaaacaagaccctagggtgcaggactttctccaaaggtgtctcgaatcccctttcagccggaagttagacctgtggagcttcctggatatccctaggtcccggctcgtgaaatatcctctgctgctgaaagaaattcttaagcacaccccaaaagagcatcccgacgtgcagttgcttgaagacgcctag

SEQ ID NO: 159933 - DNA, 1629 bp, Artificial Sequence
  derived and/or modified sequence
atggtggcgcacgacgagactggaggcctgctccctataaagaggaccattcgcgtacttgatgttaacaaccagtcattccgggagcaagaagagccctcaaataagcgggtgagacctctggccagagttacctcactggccaatctgattagtcctgtccggaacggcgcagtgagaaggttcggccagaccatccagtcgttcacactccgcggagaccaccgtagcccagcctcggcccagaagttttcttctcggagcacggtaccaacccccgctaaacgcagatcctccgccctgtggagcgaaatgctggacattactatgaaggagtctctgacaacacgagaaatccgacgacaagaggcgatctatgagatgagcaggggggagcaggatctgatcgaagacctgaagctcgccagaaaggcataccacgaccctatgctgaaactttctatcatgtcagaggaggaactgacgcatattttcggcgacctagattcttacatcccactacacgaggacctgttgactcgcatcggtgaggctaccaagccagatggcactgtcgagcagatagggcatatattggtatcatggctgccccgactcaatgcgtatcgcggatattgttccaatcaactggcagccaaagccctgttagaccagaaaaagcaggatccgagagtacaggacttcctacagagatgcctcgaaagcccattctccagaaagcttgatctgtggtctttccttgatattcctcgatccagattggtgaaataccctttgctcctgaaggaaatcctgaaacacactccaaaagaacatccggatgtccagctgctcgaggacgccattctgattatacaaggtgtgctttctgacattaatctcaaaaaaggcgagagcgagtgtcagtactacatagataagctagagtatctggatgaaaaacaacgcgaccccagaattgaagccagcaaggtattgctgtgccacggggaattgcggtctaagtctggccacaagttgtatatttttctttttcaagatattcttgtgctcacacgtccagttacaagaaatgagaggcattcttaccaggtgtacaggcaaccaatccctgttcaggagctggtacttgaagatctgcaagacggggacgtgaggatgggcggaagtttccggggagcctttagtaatagcgagaaagctaagaacatcttccggataaggttccatgatccctccccagcgcagtcccatactctccaggcaaacgatgtctttcataagcaacaatggtttaattgtatcagggcggcaattgccccatttcagtccgcgggatctcctcccgagctccagggcttacccgagctgcatgaagagtgcgaaggaaaccacccttcagcaaggaagttaacagcccaaagacgagcctccacagtatctagtgtaacacaggttgaggtggatgagaacgcgtatagatgcggatccggaatgcagatggctgaggactccaagtcactgaagacacaccaaacccaaccaggtatcagaagagctagagataaagccttgtccggaggcaaacgaaaagaaacattggtttag

SEQ ID NO: 159934 - DNA, 483 bp, Artificial Sequence
  derived and/or modified sequence
atggtcgcacatgacgagacaggtggactgctccccataaaaaggactatccgggttctagatgttaataatcagtccttcagagagcaggaagaattgacacacatcttcggcgacctcgactcctacatccccctccatgaggacctcctgacaaggatcggagaagcaacaaagcccgacgggacagtggagcagatcggccatatcctcgtgtcttggctaccaagactaaatgcctacaggggatactgcagcaaccagctggcagcaaaggcgcttctggatcagaaaaagcaagacccgcgagtacaagactttttacagaggtgtctggagtcgccattcagtcgaaagctggacctgtggtccttcctcgatataccacgtagccggctggttaaataccccctgctccttaaggagatcttgaagcacacccctaaggagcatccagacgtgcaactgctcgaggatgcatag

SEQ ID NO: 159935 - DNA, 1248 bp, Artificial Sequence
  derived and/or modified sequence
atgtcccggggagaacaggacctgattgaggatctgaagctagccaggaaggcctatcatgacccgatgctgaagctgagtataatgtctgaagaggagttaacacacatcttcggcgatctggattcttacatacctctccatgaggacctgctgacaagaatcggtgaggcgacgaaacctgatggtaccgttgaacaaatcggccatatattggtgtcttggcttcctagattgaacgcctaccgcggttattgcagtaatcagctggccgctaaagccctcctcgaccaaaagaagcaggatccaagagttcaggattttctacaacggtgtctggaatcaccttttagtcgtaagctagacctgtggtctttcctggatatacccagatcccgactcgtgaagtaccccctcttgctgaaggagatcctgaaacatacacctaaggaacaccccgatgtgcagttgctcgaggatgctattctcattatccaaggggtgctgtccgatatcaacctcaagaaaggtgagtccgagtgtcagtattacatcgacaaactggaatatctcgacgaaaaacagcgtgacccccgaatcgaggctagtaaggtcctgttgtgtcatggtgagctccgctccaaaagtggtcacaagctgtatatttttctcttccaggatatactcgtcctcaccaggccagtgacccgaaatgagcgccactcctaccaggtctatcgccagcctataccagtacaggaactcgtcctggaggacctccaggacggtgacgtaaggatggggggatctttcagaggcgcattctccaattcggaaaaggctaagaatattttcagaattcgatttcatgatccctcaccagcccaatctcataccctgcaggccaatgacgttttccataagcagcagtggttcaattgtatcagagccgcaattgctccattccagtcagctgggagcccccctgaactacaagggctccctgaacttcacgaggaatgcgaaggaaaccacccctctgcgcgtaaactgaccgcacagcgtcgggcttccactgtaagctccgtgacacaggtggaagtggatgaaaatgcctatcggtgtggctccgggatgcagatggcggaggactctaagtcactcaagacccatcaaactcagccaggtattaggagggcgagagacaaggcgctgagtggcggtaagcgcaaggagaccctggtttag

SEQ ID NO: 159936 - DNA, 483 bp, Artificial Sequence
  derived and/or modified sequence
atggtggcccacgacgagaccggcggcctgctgcccatcaagagaaccatcagagtgctggacgtgaacaaccagagcttcagagagcaggaggagctgacccacatcttcggcgacctggacagctacatccccctgcacgaggacctgctgaccagaatcggcgaggccaccaagcccgacggcaccgtggagcagatcggccacatcctggtgagctggctgcccagactgaacgcctacagaggctactgcagcaaccagctggccgccaaggccctgctggaccagaagaagcaggaccccagagtgcaggacttcctgcagagatgcctggagagccccttcagcagaaagctggacctgtggagcttcctggacatccccagaagcagactggtgaagtaccccctgctgctgaaggagatcctgaagcacacccccaaggagcaccccgacgtgcagctgctggaggacgcctag

SEQ ID NO: 159937 - DNA, 1629 bp, Artificial Sequence
  derived and/or modified sequence
atggtggcccacgacgagaccggcggcctgctgcccatcaagagaaccatcagagtgctggacgtgaacaaccagagcttcagagagcaggaggagcccagcaacaagagagtgagacccctggccagagtgaccagcctggccaacctgatcagccccgtgagaaacggcgccgtgagaagattcggccagaccatccagagcttcaccctgagaggcgaccacagaagccccgccagcgcccagaagttcagcagcagaagcaccgtgcccacccccgccaagagaagaagcagcgccctgtggagcgagatgctggacatcaccatgaaggagagcctgaccaccagagagatcagaagacaggaggccatctacgagatgagcagaggcgagcaggacctgatcgaggacctgaagctggccagaaaggcctaccacgaccccatgctgaagctgagcatcatgagcgaggaggagctgacccacatcttcggcgacctggacagctacatccccctgcacgaggacctgctgaccagaatcggcgaggccaccaagcccgacggcaccgtggagcagatcggccacatcctggtgagctggctgcccagactgaacgcctacagaggctactgcagcaaccagctggccgccaaggccctgctggaccagaagaagcaggaccccagagtgcaggacttcctgcagagatgcctggagagccccttcagcagaaagctggacctgtggagcttcctggacatccccagaagcagactggtgaagtaccccctgctgctgaaggagatcctgaagcacacccccaaggagcaccccgacgtgcagctgctggaggacgccatcctgatcatccagggcgtgctgagcgacatcaacctgaagaagggcgagagcgagtgccagtactacatcgacaagctggagtacctggacgagaagcagagagaccccagaatcgaggccagcaaggtgctgctgtgccacggcgagctgagaagcaagagcggccacaagctgtacatcttcctgttccaggacatcctggtgctgaccagacccgtgaccagaaacgagagacacagctaccaggtgtacagacagcccatccccgtgcaggagctggtgctggaggacctgcaggacggcgacgtgagaatgggcggcagcttcagaggcgccttcagcaacagcgagaaggccaagaacatcttcagaatcagattccacgaccccagccccgcccagagccacaccctgcaggccaacgacgtgttccacaagcagcagtggttcaactgcatcagagccgccatcgcccccttccagagcgccggcagcccccccgagctgcagggcctgcccgagctgcacgaggagtgcgagggcaaccaccccagcgccagaaagctgaccgcccagagaagagccagcaccgtgagcagcgtgacccaggtggaggtggacgagaacgcctacagatgcggcagcggcatgcagatggccgaggacagcaagagcctgaagacccaccagacccagcccggcatcagaagagccagagacaaggccctgagcggcggcaagagaaaggagaccctggtgtag

SEQ ID NO: 159938 - DNA, 1248 bp, Artificial Sequence
  derived and/or modified sequence
atgagcagaggcgagcaggacctgatcgaggacctgaagctggccagaaaggcctaccacgaccccatgctgaagctgagcatcatgagcgaggaggagctgacccacatcttcggcgacctggacagctacatccccctgcacgaggacctgctgaccagaatcggcgaggccaccaagcccgacggcaccgtggagcagatcggccacatcctggtgagctggctgcccagactgaacgcctacagaggctactgcagcaaccagctggccgccaaggccctgctggaccagaagaagcaggaccccagagtgcaggacttcctgcagagatgcctggagagccccttcagcagaaagctggacctgtggagcttcctggacatccccagaagcagactggtgaagtaccccctgctgctgaaggagatcctgaagcacacccccaaggagcaccccgacgtgcagctgctggaggacgccatcctgatcatccagggcgtgctgagcgacatcaacctgaagaagggcgagagcgagtgccagtactacatcgacaagctggagtacctggacgagaagcagagagaccccagaatcgaggccagcaaggtgctgctgtgccacggcgagctgagaagcaagagcggccacaagctgtacatcttcctgttccaggacatcctggtgctgaccagacccgtgaccagaaacgagagacacagctaccaggtgtacagacagcccatccccgtgcaggagctggtgctggaggacctgcaggacggcgacgtgagaatgggcggcagcttcagaggcgccttcagcaacagcgagaaggccaagaacatcttcagaatcagattccacgaccccagccccgcccagagccacaccctgcaggccaacgacgtgttccacaagcagcagtggttcaactgcatcagagccgccatcgcccccttccagagcgccggcagcccccccgagctgcagggcctgcccgagctgcacgaggagtgcgagggcaaccaccccagcgccagaaagctgaccgcccagagaagagccagcaccgtgagcagcgtgacccaggtggaggtggacgagaacgcctacagatgcggcagcggcatgcagatggccgaggacagcaagagcctgaagacccaccagacccagcccggcatcagaagagccagagacaaggccctgagcggcggcaagagaaaggagaccctggtgtag

SEQ ID NO: 159939 - protein, 561 aa, Artificial Sequence
  derived and/or modified sequence
MAIATSTQLARALYDNTAESPQELSFRRGDVLRVLQREGAGGLDGWCLCSLHGQQGIVPANRVKLLPAGPAPKPSLSPASPAQPGSPYPAPDHSNEDQEVYVVPPPARPCPTSGPPAGPCPPSPDLIYKIPRASGTQLAAPRDALEVYDVPPTALRVPSSGPYDCPASFSHPLTRVAPQPPGEDDAPYDVPLTPKPPAELEPDLEWEGGREPGPPIYAAPSNLKRASALLNLYEAPEELLADGEGGGTDEGIYDVPLLGPEAPPSPEPPGALASHDQDTLAQLLARSPPPPHRPRLPSAESLSRRPLPALPVPEAPSPSPVPSPAPGRKGSIQDRPLPPPPPRLPGYGGPKVEGDPEGREMEDDPAGHHNEYEGIPMAEEYDYVHLKGMDKAQGSRPPDQACTGDPELPERGMPAPQEALSPGEPLVVSTGDLQLLYFYAGQCQSHYSALQAAVAALMSSTQANQPPRLFVPHSKRVVVAAHRLVFVGDTLGRLAASAPLRAQVRAAGTALGQALRATVLAVKGAALGYPSSPAIQEMVQCVTELAGQALQFTTLLTSLAP

SEQ ID NO: 159940 - DNA, 1686 bp, Artificial Sequence
  derived and/or modified sequence
atggctatcgccacatctacacagctagcgcgcgcgctgtatgacaataccgccgaaagccctcaggaactctccttccggaggggcgacgtgttgagggtactgcagagggagggtgctggtggcttggacgggtggtgcttgtgcagtctacacggccagcagggcattgtgcccgccaaccgggtgaagctcttgcctgccggaccagctcccaaacccagcttaagtccagccagtccagctcagccaggctctccctaccccgcccctgatcacagcaacgaggaccaggaagtgtacgttgtgcctccacccgccaggccctgtccaacatccggaccgccagcaggcccttgtccgccctctcctgatctgatatataaaattccgcgcgcatctggaacacagctcgctgcaccgcgagatgcgctggaggtgtacgatgtcccccctaccgcactgcgtgttcccagctcaggcccatacgactgcccagcgtcgttttcacaccctctgacacgagtcgcgcctcaaccgccgggcgaagacgatgctccttatgacgtgcctctcacccctaaaccccctgccgaactggagcctgatctcgaatgggagggaggccgagaacccgggccaccaatatatgctgctccctcaaacctcaagagggccagcgccctactcaatctgtatgaagcccccgaagagctgctggccgacggggagggtggcggaaccgacgaggggatctacgatgtgcctttgcttggccctgaggcccctccttcgccagaaccgcctggagccctggcctcgcacgatcaggacactctggcacagctactggctcgatccccccccccacctcaccggccgagactccccagcgccgagagtctgtcccggcgcccattgccagctctgcctgtgccagaggcaccatcaccgagtcccgtgcccagcccagcacccgggcggaagggcagcatacaggaccggcccctgccaccgccgccaccacgactgcctgggtatggaggtccgaaggttgagggagatccagagggcagggaaatggaagacgaccctgctggacaccataatgagtatgaaggaatacccatggcggaggaatacgactacgtacacctcaaaggaatggataaagcgcaagggagccgtcctcctgatcaagcatgcaccggtgaccccgagcttcccgagagggggatgcccgcacctcaggaggccttgtctcctggcgaaccactggtggtgtctaccggggacctgcagcttctgtatttttacgccggacagtgccaaagccactattccgccctacaggcggccgtcgccgcccttatgtctagcacccaggctaatcaaccaccccgactatttgtgccccactccaagcgtgtggtggtcgccgcccatcgcctcgtgtttgtgggcgacaccttgggccgactggcagccagcgcaccgctgcgtgcacaggtgagggcagctggaaccgcgctcggtcaagccctaagagcaaccgtgctcgccgtgaagggtgctgcattaggctatccatcttctcctgccatacaggagatggttcagtgtgtgactgagttggcagggcaggcacttcagttcacaacgctgttgacctctcttgcaccttag

SEQ ID NO: 159941 - DNA, 1686 bp, Artificial Sequence
  derived and/or modified sequence
atggccatcgccaccagcacccagctggcccgggccctgtatgacaacacagctgagagcccccaggagctgtccttcagaagaggagatgtgctgcgggtgctgcagcgggagggcgctgggggcctggatggctggtgcctgtgcagcctgcacggccagcagggcatcgtgcctgccaacagagtgaagctgctgcctgctggccctgcccccaagcccagcctgagccctgccagccctgcccagcccggcagcccctacccagccccagaccacagcaatgaagaccaggaggtgtatgtggtgcccccaccagcccggccctgccccaccagcggccccccagctggcccctgcccccccagcccagacctgatctacaagatcccccgggccagcggcacccagctggccgcccccagagatgccctggaggtgtatgatgtgcccccaacagccctgcgggtgcccagcagcggcccctatgactgcccagccagcttcagccaccccctgaccagggtggccccccagcccccaggagaagatgatgccccctatgatgtgcccctgacccccaagcccccagctgagctggagccagacctggagtgggagggcggccgggagcccggcccccccatctatgctgcccccagcaacctgaagagggccagcgccctgctgaacctgtatgaggcccctgaggagctgctggctgatggagagggcggcggcacagatgagggcatctatgatgtgcccctgctgggccctgaggccccacccagccctgagcccccaggggccctggccagccatgaccaggacaccctggcccagctgctggcccggagccccccaccaccccaccggccccggctgcccagcgctgagagcctgagccggcggcccctgcctgccctgcctgtgcctgaggcccccagccccagccctgtgcccagccctgcccctggcaggaagggcagcatccaggaccggcccctgcccccacctccaccccggctgcccggctatggaggccccaaggtggagggggaccctgagggccgggagatggaggatgatcctgctggccaccacaatgaatatgagggcatccccatggccgaggagtatgactatgtgcacctgaagggcatggacaaggcccagggcagccggcccccagaccaggcctgcacaggagaccctgagctgcctgagcggggcatgcctgccccccaggaggccctgagccctggagagcccctggtggtgtccactggagacctgcagctgctgtacttctacgccggccagtgccagagccactacagcgccctgcaggccgctgtggccgccctgatgagcagcacccaggccaaccagcccccccggctgtttgtgccccacagcaagagggtggtggtggccgcccaccggctggtgtttgtgggggacaccctgggccgcctggccgccagcgcccccctgcgggcccaggtgcgggctgctggaacagccctgggccaggccctgcgggccaccgtgctggccgtgaagggagctgccctgggctaccccagcagccctgccatccaggagatggtgcagtgtgtgacagagctggccggccaggccctgcagttcaccaccctgctgaccagcctggccccctag

SEQ ID NO: 159942 - DNA, 1686 bp, Artificial Sequence
  derived and/or modified sequence
atggccatcgccaccagcacccagctggcccgggccctgtacgacaatactgctgagagccctcaggagcttagcttcaggaggggtgatgtcctgcgcgtcctacagcgagagggtgccgggggactggatggctggtgtttatgcagtctacacggtcagcaaggtatcgtgcccgccaatcgcgttaagttactgcctgcaggaccggcaccaaagccctctctttcgccggcttctccagcccagcctggtagtccctaccccgccccagatcacagtaacgaggatcaagaggtatacgtggtgcccccccctgccaggccttgtccaacaagtgggccaccagccggtccatgcccaccatcaccagacttgatttataaaattcccagagcctcaggaactcaactggcagcaccacgggacgccctcgaggtgtatgacgtgccccctaccgcacttcgggtgccctcctcggggccatacgattgtcccgctagtttctcccatccactgactagggtggccccacagcctcccggggaagacgatgctccatacgacgtcccgcttactccaaaaccaccggccgagctcgagccagatcttgaatgggaaggcggcagagagccaggcccacctatctatgccgcaccttctaacctcaaacgtgcttctgccctgctcaatttgtacgaagctccagaggaacttctggccgacggggaaggagggggcacagacgaagggatctacgatgttcccttactcggtcctgaagcacccccgagtccagagccgcctggcgctctcgccagccatgaccaggacaccttagcccaactgctcgctcgctccccgccaccaccccacaggccacgtctcccaagtgcagagagtcttagtcgtcggccactccctgctctgccagtccctgaagcaccatctccgtctccggttcctagccccgcacctggtagaaagggaagtatccaggaccgcccactcccaccaccgcctccccgcctcccagggtatggcgggccaaaggtcgaaggcgaccctgaaggcagagaaatggaggacgatccagcgggacaccataatgaatatgagggtatccccatggctgaagagtacgactatgtgcatttgaagggaatggataaagcacagggaagcagacctccagatcaggcttgcacaggcgatcctgagttacctgagcgtgggatgcccgctccacaggaggccttgagccctggagagcccctggtggttagtacgggcgatctccagttgctctatttttacgcaggccagtgtcagtctcactacagcgccctgcaggcagccgttgctgccctaatgtcctcaacacaagcaaatcagcctcccaggctgttcgtaccccatagcaaaagggtggtggtggccgcccatcggctcgtctttgtcggggatacactggggaggttagctgcttctgcccctcttcgtgctcaggtgagagctgctggaaccgccctggggcaggcactccgagctaccgtgctagctgtgaaaggcgctgccttggggtacccatcctcaccagcgattcaagagatggtgcagtgtgttacagagctggccggacaggcactgcagttcaccaccctgttaaccagtctggcaccatag

SEQ ID NO: 159943 - DNA, 1686 bp, Artificial Sequence
  derived and/or modified sequence
atggcaatagccacgtcaacacaactcgctagagccctctatgataacaccgccgagtctcctcaggagctctcctttaggaggggggatgtcctgagagtgctgcagcgtgaaggagcaggaggcctagacggttggtgcctttgctccctgcacgggcagcagggtatagtcccggctaatcgggtgaagttacttccggctgggccagctccaaaaccaagtctttctcctgcctcaccagcgcagccaggctcaccttatccggcaccagaccattcgaatgaagaccaggaagtctacgtggtgcccccaccagcccgaccttgccccacatccgggcctcctgccggtccttgccctccgagccccgacctgatctacaagattccacgcgcaagtgggactcaactggctgccccacgcgacgcattagaagtctatgatgttcccccaaccgcgctccgagtgccatcttccggcccatatgactgccctgcgtccttttcacatcccctgaccagagtggctcctcagccgccaggcgaagatgatgcgccttatgatgtccccctgacgccgaaaccccctgcagagctggagcccgatctggagtgggaggggggaagggaacctggcccacctatctacgctgcaccgtccaacttgaagcgggcatccgctttgctgaacctgtacgaggctcccgaggagctgctcgccgacggggaggggggtggaacggatgaagggatctacgatgttcccctgctcggacctgaggcacccccttcacctgagccacctggcgcactagcatcacacgaccaagacacactggctcagctccttgcgagatcccccccacctccgcacaggcccaggctcccttctgctgagtccttaagtcgtcgacccttaccagcactgcctgtgcccgaggcgccaagcccgagccctgtgccatctccagctcctggcaggaagggatcaatccaggatcgcccacttccccctccgccaccacggcttcccggatacggcggaccaaaagttgagggggaccctgagggacgcgagatggaggacgatcccgcaggccaccataacgagtacgaggggatccccatggctgaggaatatgattatgtgcatttgaaaggtatggataaggcccagggatccagacccccagaccaggcctgtacaggtgacccggagctgcccgagcgcggtatgccggctccccaggaggctttatctcctggcgaacctttagttgtctctacaggtgatctgcagttgttgtacttctacgcaggacagtgccagagtcactattccgccctgcaagccgcagttgctgccctgatgtccagtactcaagcaaaccagcctcccagactgttcgttccccactcaaagcgagtcgtcgttgctgcgcaccggctggtgtttgtgggtgataccctcgggaggttggccgcttcagcccctctgcgggcacaggtaagggctgcagggactgccctcggacaggcccttagagccaccgtcctggcagtgaaaggcgcagccctagggtacccatcttccccagcaatccaagagatggttcagtgtgtcacagaactcgctgggcaggctctgcagttcacaaccctcctgacatcactcgccccatag

SEQ ID NO: 159944 - DNA, 1686 bp, Artificial Sequence
  derived and/or modified sequence
atggccatcgccaccagcacccagctggccagagccctgtacgacaacaccgccgagagcccccaggagctgagcttcagaagaggcgacgtgctgagagtgctgcagagagagggcgccggcggcctggacggctggtgcctgtgcagcctgcacggccagcagggcatcgtgcccgccaacagagtgaagctgctgcccgccggccccgcccccaagcccagcctgagccccgccagccccgcccagcccggcagcccctaccccgcccccgaccacagcaacgaggaccaggaggtgtacgtggtgcccccccccgccagaccctgccccaccagcggcccccccgccggcccctgcccccccagccccgacctgatctacaagatccccagagccagcggcacccagctggccgcccccagagacgccctggaggtgtacgacgtgccccccaccgccctgagagtgcccagcagcggcccctacgactgccccgccagcttcagccaccccctgaccagagtggccccccagccccccggcgaggacgacgccccctacgacgtgcccctgacccccaagccccccgccgagctggagcccgacctggagtgggagggcggcagagagcccggcccccccatctacgccgcccccagcaacctgaagagagccagcgccctgctgaacctgtacgaggcccccgaggagctgctggccgacggcgagggcggcggcaccgacgagggcatctacgacgtgcccctgctgggccccgaggccccccccagccccgagccccccggcgccctggccagccacgaccaggacaccctggcccagctgctggccagaagccccccccccccccacagacccagactgcccagcgccgagagcctgagcagaagacccctgcccgccctgcccgtgcccgaggcccccagccccagccccgtgcccagccccgcccccggcagaaagggcagcatccaggacagacccctgcccccccccccccccagactgcccggctacggcggccccaaggtggagggcgaccccgagggcagagagatggaggacgaccccgccggccaccacaacgagtacgagggcatccccatggccgaggagtacgactacgtgcacctgaagggcatggacaaggcccagggcagcagaccccccgaccaggcctgcaccggcgaccccgagctgcccgagagaggcatgcccgccccccaggaggccctgagccccggcgagcccctggtggtgagcaccggcgacctgcagctgctgtacttctacgccggccagtgccagagccactacagcgccctgcaggccgccgtggccgccctgatgagcagcacccaggccaaccagccccccagactgttcgtgccccacagcaagagagtggtggtggccgcccacagactggtgttcgtgggcgacaccctgggcagactggccgccagcgcccccctgagagcccaggtgagagccgccggcaccgccctgggccaggccctgagagccaccgtgctggccgtgaagggcgccgccctgggctaccccagcagccccgccatccaggagatggtgcagtgcgtgaccgagctggccggccaggccctgcagttcaccaccctgctgaccagcctggccccctag

SEQ ID NO: 159945 - DNA, 3118 bp, Artificial Sequence
  derived and/or modified sequence
ctccaggcaacttggggcaagcgtctcagttctcgctctcccttcctcccagcggggtcgccgcagaccccagccctgggagcaccgctctgcagcgcggccggcgggtggagacggttggcccctaaactcgctcgtccagcccaaccgccccggcggcttctcccagccctcgaggctctcctgagcggcctggagaggcgtcgagcgcagcccagcgcccgcctgctcacccgccccggcccgggaagggaattttcggatcctgcgagcccggggcgcccccgcggcctagggcgggcagctcccggggcctggccgagccggtggcgcccgggaggccgcggggacagcacgcagcgcgcgcccttggatgccgtcccgcagcgacgccccggcccgccccgctcctcctcctgcctggctagcctgcctctcatttgggaagttttgtgggttttctttctcctcctccaaccttggcggaggccacgactcaggcgccacagctgggggctagaggccgcggaccatggtgcggggcagccaccgctgaagtcagcaaaaccgagcctggcctgaggcaggctgcgcgggaggccaaagccatggccattgccacgtcgacccagctggcccgggcactgtatgacaacaccgctgagtccccccaggagctgtccttccgccgaggggatgtcctacgggtcctgcagagagagggcgctggtggactggacggctggtgcctctgctccctacacggccagcagggcattgtgcccgccaacagggtgaagctcttgcctgctggcccagcacccaagcccagcctctctcctgcgtccccagcccagcctggctcaccatatccagccccagatcacagcaatgaggaccaggaggtgtatgtggtgccgcccccagctcggccctgtccaacctcaggacctccagctggaccttgcccaccctctcctgacctcatctacaaaatccccagagctagtgggacccagctggctgctcccagagatgccttggaggtctacgatgtgccccccaccgccctccgggtgccctccagtggcccctatgactgccctgcctccttttcccaccctctgacccgggttgccccgcagccccctggagaggatgatgctccctatgatgtgcctctgaccccaaagccacctgcagagctggaaccagatctggagtgggaaggaggccgggagccggggccccccatctatgctgccccctccaacctgaaacgagcgtcagccttactcaatttgtatgaagcacccgaggaactgctggcagacggggagggcgggggcactgatgaggggatctacgatgtgcctctgctggggccagaggctcccccttctccagagccccctggagccttggcctcccatgaccaggacaccctggcccagcttctggccagaagccccccacccccacacaggccccggctcccctcagctgagagcctgtcccgccgccctctgcctgccctgcctgtccctgaggcccccagcccctccccagtgccctctcctgccccaggccggaagggcagcatccaggaccggcctctgcccccacccccaccccgcctgcctggttatggaggccccaaggtcgagggggatccagagggcagggagatggaggatgacccagcaggacaccacaatgagtacgagggcattccgatggccgaggagtatgactatgtccacctgaagggcatggacaaagctcagggatctaggcccccggatcaggcctgcacaggggatcctgaactgcccgagagggggatgccggcgccgcaggaggccctgtccccaggggagccactggttgtgtccaccggagatctgcagctcctgtacttctatgctgggcaatgccagagccactactcagccctgcaggcagccgtggcagccctgatgtccagtacccaggctaatcagcccccgcgccttttcgtgccccacagcaagagggtggtggtggctgctcatcgcctggtgtttgttggggacaccctgggccggctggcagcctctgcccctctgagagcacaggtcagggctgcaggtacagcactgggccaggcattgcgggccactgtgctggctgtcaagggagctgccctgggctacccatccagccctgccatccaagagatggtgcagtgtgtaacagaactggcagggcaggccctgcaattcactaccctgctcactagcctggctccatgaaggtcctttggcacagctctgctcctcccctgcctgccaaagcccccctttaggccttgggtggctggaaggctttgttaagggactaggagaaatgggggtatctttcccctttcctgccctttctgctcatctcaacctctcacagaggtgtcttctccccctaacctacagctttttgtacaagccattttgtgtaaattatttatatttaatattattccctgctttgtcaggagcaggtactaggctctggggcagtgaggaactagatccttctctcctcagcctagggtggaggtcactgcactaccacccacctctggaagactggctgtgaaaagtcaggtggcagaaacctggggccacatagagcctctctcttttcctgtttcttggctctagaagatcagcactgcactgttagctgagagtgcgggcaagacataaactgtccagagtttgaaggttctcggaaagaccggagggcttctccccacagaaggcggagagagctggggctcagacatgggtgtgcaccttaataaaccctgctgtctgcctccctgactctgcttcttgggagcatggtgagcagccctggtgctcagcagccatacctatgggacacacactacgaaaaggatgcctttagggtttgggggagattttactcctttcttcaacaactattcactggacaagttctctgctcccatgacgcgccaggcacagttctgcaagtatattgtgaatgtattgttctagtgggatacacaaataagtcagttaaaatacataaataaaaacataaacctgccata

SEQ ID NO: 159946 - protein, 514 aa, Artificial Sequence
  derived and/or modified sequence
MAVWLAQWLGPLLLVSLWGLLAPASLLRRLGEHIQQFQESSAQGLGLSLGPGAAALPKVGWLEQLLDPFNVSDRRSFLQRYWVNDQHWVGQDGPIFLHLGGEGSLGPGSVMRGHPAALAPAWGALVISLEHRFYGLSIPAGGLEMAQLRFLSSRLALADVVSARLALSRLFNISSSSPWICFGGSYAGSLAAWARLKFPHLIFASVASSAPVRAVLDFSEYNDVVSRSLMSTAIGGSLECRAAVSVAFAEVERRLRSGGAAQAALRTELSACGPLGRAENQAELLGALQALVGGVVQYDGQTGAPLSVRQLCGLLLGGGGNRSHSTPYCGLRRAVQIVLHSLGQKCLSFSRAETVAQLRSTEPQLSGVGDRQWLYQTCTEFGFYVTCENPRCPFSQLPALPSQLDLCEQVFGLSALSVAQAVAQTNSYYGGQTPGANKVLFVNGDTDPWHVLSVTQALGSSESTLLIRTGSHCLDMAPERPSDSPSLRLGRQNIFQQLQTWLKLAKESQIKGEV

SEQ ID NO: 159947 - protein, 273 aa, Artificial Sequence
  derived and/or modified sequence
MAVWLAQWLGPLLLVSLWGLLAPASLLRRLGEHIQQFQESSAQGLGLSLGPGAAALPKVGWLEQLLDPFNVSDRRSFLQRYWVNDQHWVGQDGPIFLHLGGEGSLGPGSVMRGHPAALAPAWGALVISLEHRFYGLSIPAGGLEMAQLRFLSSRLALADVVSARLALSRLFNISSSSPWICFGGSYAGSLAAWARLKFPHLIFASVASSAPVRAVLDFSEYNDIVLHSLGQKCLSFSRAETVAQLRSTEPQLSGVGDRQWLYQTCTEFGFYIT

SEQ ID NO: 159948 - protein, 166 aa, Artificial Sequence
  derived and/or modified sequence
MAVWLAQWLGPLLLVSLWGLLAPASLLRRLGEHIQQFQESSAQGLGLSLGPGAAALPKVGWLEQLLDPFNVSDRRSFLQRYWVNDQHWVGQDGPIFLHLGGEGSLGPGSVMRGHPAALAPAWGALVISLEHRFYGLSIPAGGLEMAQLRFLSSRLALSCTAWARSV

SEQ ID NO: 159949 - protein, 165 aa, Artificial Sequence
  derived and/or modified sequence
  misc_feature (1)..(1): Xaa can be any naturally occurring amino acid
XVMRGHPAALAPAWGALVISLEHRFYGLSIPAGGLEMAQLRFLSSRLALADVVSARLALSRLFNISSSSPWICFGGSYAGSLAAWARLKFPHLIFASVASSAPVRAVLDFSEYNDIVLHSLGQKCLSFSRAETVAQLRSTEPQLSGVGDRQWLYQTCTEFGFYVT

SEQ ID NO: 159950 - DNA, 1545 bp, Artificial Sequence
  derived and/or modified sequence
atggctgtttggctagctcaatggctcggtccactgttgttagtgagcttgtggggtttgctggcgcccgcctctctgctgagaaggttgggcgagcacatccagcagttccaggaatcgagtgcgcagggcctcggtctgagtttggggcccggtgcggcagcactccctaaggttgggtggctggagcagctcctggaccccttcaacgtttccgaccgacgctcatttcttcaaagatactgggtcaatgatcaacattgggtagggcaggacggtcccatttttctgcacctaggaggagagggatctctcgggccgggttctgttatgaggggccaccctgccgccctggctccggcttggggcgcattagtgatctcgctggagcaccgattctacggactgtcaatacccgccggcggcctggagatggcccagctgcgttttctcagcagccggctggctctagctgacgttgtctctgcacgcctcgccctgagccgcttatttaacattagttccagtagcccatggatctgttttggcggatcatatgcaggctccctagccgcctgggcacgcctgaaattcccccacctaatttttgctagtgtagcaagttccgctcccgtcagggccgtgttagacttttccgagtacaacgacgtggtttcccgctctctgatgtccactgctataggcggatctctagagtgcagagcagctgtctcagttgcattcgccgaggtagaacgccgactgagatcaggtggagcagctcaagccgctctgcgtacagaactatccgcgtgtggccctctaggacgtgcagagaaccaggctgaacttttgggggcattacaagccctggtgggcggagtcgtgcaatacgatggacagaccggggcacccctctctgttaggcagctatgtgggcttctgttaggcggcggcggtaacagatctcacagcactccttactgtggcttgaggcgcgctgtgcagatcgtgctccattctcttggccaaaagtgtctctccttctcacgggcagagaccgtagcccagttacggagcaccgagccgcagctgagcggcgtcggcgatcgccagtggctgtaccagacatgcactgaattcggattttacgttacttgtgagaatcctcggtgccccttttcccagctgcccgcgctgcctagtcagctcgatctgtgtgaacaggtatttggactatccgccttatccgtcgcccaggctgttgctcagaccaactcttactacggaggccaaacgccaggggccaacaaggtgctgttcgtaaatggggatacagacccgtggcacgtgctgagcgtcacccaggccctgggcagctccgagagcacacttctaataaggactggaagccactgtttggacatggcccctgagagaccttctgattccccatcacttcgactaggccgccaaaatatctttcagcagcttcagacatggctcaagctggccaaagaaagccagattaaaggcgaggtgtag

SEQ ID NO: 159951 - DNA, 822 bp, Artificial Sequence
  derived and/or modified sequence
atggccgtgtggttggcacaatggctgggcccactccttctggtgtctctgtggggcctcttggcacctgcctcactgctcaggaggctgggggagcacatccagcaattccaggagtccagtgctcagggcctggggctgagtttaggccctggggcagccgcgttgccaaaggtcgggtggctcgaacagctcctagacccgtttaacgtgtctgacaggaggagcttcctgcagcgctactgggtgaatgatcagcattgggtagggcaggatgggcccattttccttcatttgggcggtgaaggatcgttaggacccggcagcgtcatgagaggacatcctgctgccctggcaccagcatggggggcgctggtgatctcactagaacataggttttatgggctgagtatccccgctgggggccttgaaatggcacagctaaggttcctgagcagccgactggctctggcagacgtagtgtccgcccgtctggccctgtcccggcttttcaatatttcatccagctccccttggatttgctttggcgggtcttatgcgggatccctggcagcctgggcgagactgaaatttccccatctcatcttcgcatccgttgcctcttccgctcccgtccgtgctgtccttgacttctcggagtataacgacatagtcctccacagtctgggacagaaatgtctttccttctctagggcggaaactgttgcccagcttcggtcaaccgaacctcaactaagcggagtgggcgacaggcagtggctataccagacctgcaccgagtttggattttacatcacctag

SEQ ID NO: 159952 - DNA, 501 bp, Artificial Sequence
  derived and/or modified sequence
atggcagtctggctggcccagtggctaggccctctcctgttggtttctctgtgggggctcctggcccccgcttcactgctccgtaggctgggtgaacacatacagcagttccaggaaagcagtgcacaagggttgggtttgtctttgggccctggggccgcggcattaccaaaggtgggttggttggagcaactgctcgacccttttaacgtgtccgaccgacgttccttccttcaacggtattgggtcaatgatcagcactgggttggccaggacggacccatctttctccatctcgggggagagggatccctgggcccagggagcgtgatgaggggccatccagcagcccttgctcctgcctggggagccctcgtgatctctttagagcacagattctacggcctgtccatcccggccggcggcctggagatggcccagctaagatttctgtcaagcaggctggctctttcctgcaccgcctgggcgaggagcgtctag

SEQ ID NO: 159953 - DNA, 498 bp, Artificial Sequence
  derived and/or modified sequence
taggtcatgaggggacacccagccgcgctcgcccccgcttggggcgctctggttatatctctcgagcaccgtttctacggcctcagcattcccgcagggggccttgaaatggcccagttgcgcttcctgtcatcccgcctcgccctggccgatgtggtttctgcaaggctcgcgctaagccgcttattcaatatctctagcagttccccctggatatgttttggaggttcatacgccggtagcttggctgcctgggctcgtttgaagttcccccacctcattttcgcatccgtagcatcgtccgctcctgttagggcagtattggatttcagcgagtacaacgacatcgtcttgcattccctcgggcaaaagtgtttgtctttctctcgggctgaaactgttgcacagcttcggagtactgagcctcaattaagtggggtcggcgataggcagtggctttatcaaacctgtaccgagttcgggttttatgtcacctag

SEQ ID NO: 159954 - DNA, 1545 bp, Artificial Sequence
  derived and/or modified sequence
atggctgtgtggctggcccagtggctgggccccctgctgctggtgtccctgtggggcctgctggccccagccagcctgctgcggcggctgggggagcacatccagcagttccaggagagcagcgcccagggcctgggcctgagcctgggccctggagctgctgccctgcccaaggtgggctggctggagcagctgctggaccccttcaacgtgtctgaccggcgctccttcctgcagcgctactgggtgaatgaccagcactgggtgggccaggacggccccatcttcctgcacctgggcggggagggcagcctgggccctggctctgtgatgaggggccaccctgctgccctggccccagcctggggcgccctggtgatcagcctggagcaccgcttctacggcctgagcatcccagctgggggcctggagatggcccagctgcgcttcctgagcagccggctggccctggctgatgtggtgtctgcccggctggccctgagccgcctcttcaacatcagcagcagcagcccctggatctgcttcggcggcagctatgccggcagcctggccgcctgggcccggctgaagttcccccacctgatctttgcctctgtggccagcagcgcccctgtgcgggctgtgctggacttcagcgagtacaatgatgtggtgagccgcagcctgatgagcacagccatcggcggcagcctggagtgcagagctgctgtgtctgtggcctttgctgaggtggagcggcggctgcggtctggaggagctgcccaggccgccctgaggacagagctgagcgcctgtggccccctgggccgggcagagaaccaggccgagctgctgggcgccctgcaggccctggtgggcggcgtggtgcagtatgatggccagacaggagcccccctgtctgtgcggcagctgtgtggcctgctgctgggcggcggcggcaacagaagccacagcaccccctactgcggcctgcggcgggctgtgcagatcgtgctgcacagcctgggccagaagtgcctgtccttcagcagagctgagaccgtggcccagctgcggagcacagagccccagctgagcggcgtgggggaccggcagtggctgtaccagacctgcacagaatttggcttctacgtgacctgtgagaacccccgctgccccttcagccagctgcctgccctgcccagccagctggacctgtgtgagcaggtgtttggcctgagcgccctgtctgtggcccaggccgtggcccagaccaacagctactatggaggccagacccctggggccaacaaggtgctgtttgtgaatggagacacagacccctggcacgtgctgtctgtgacccaggccctgggcagcagcgagagcaccctgctgatcagaacaggcagccactgcctggacatggcccctgagcggcccagcgacagccccagcctgcggctgggccggcagaacatcttccagcagctgcagacctggctgaagctggccaaggagagccagatcaagggggaggtgtag

SEQ ID NO: 159955 - DNA, 822 bp, Artificial Sequence
  derived and/or modified sequence
atggctgtgtggctggcccagtggctgggccccctgctgctggtgtccctgtggggcctgctggccccagccagcctgctgcggcggctgggggagcacatccagcagttccaggagagcagcgcccagggcctgggcctgagcctgggccctggagctgctgccctgcccaaggtgggctggctggagcagctgctggaccccttcaacgtgtctgaccggcgctccttcctgcagcgctactgggtgaatgaccagcactgggtgggccaggacggccccatcttcctgcacctgggcggggagggcagcctgggccctggctctgtgatgaggggccaccctgctgccctggccccagcctggggcgccctggtgatcagcctggagcaccgcttctacggcctgagcatcccagctgggggcctggagatggcccagctgcgcttcctgagcagccggctggccctggctgatgtggtgtctgcccggctggccctgagccgcctcttcaacatcagcagcagcagcccctggatctgcttcggcggcagctatgccggcagcctggccgcctgggcccggctgaagttcccccacctgatctttgcctctgtggccagcagcgcccctgtgcgggctgtgctggacttcagcgagtacaatgacatcgtgctgcacagcctgggccagaagtgcctgtccttcagcagagctgagaccgtggcccagctgcggagcacagagccccagctgtctggagtgggggaccggcagtggctgtaccagacctgcacagaatttggcttctacatcacctag

SEQ ID NO: 159956 - DNA, 501 bp, Artificial Sequence
  derived and/or modified sequence
atggctgtgtggctggcccagtggctgggccccctgctgctggtgtccctgtggggcctgctggccccagccagcctgctgcggcggctgggggagcacatccagcagttccaggagagcagcgcccagggcctgggcctgagcctgggccctggagctgctgccctgcccaaggtgggctggctggagcagctgctggaccccttcaacgtgtctgaccggcgctccttcctgcagcgctactgggtgaatgaccagcactgggtgggccaggacggccccatcttcctgcacctgggcggggagggcagcctgggccctggctctgtgatgaggggccaccctgctgccctggccccagcctggggcgccctggtgatcagcctggagcaccgcttctacggcctgagcatcccagctgggggcctggagatggcccagctgcgcttcctgagcagccggctggccctgagctgcacagcctgggcccggtctgtgtag

SEQ ID NO: 159957 - DNA, 498 bp, Artificial Sequence
  derived and/or modified sequence
tgagtgatgaggggccaccctgctgccctggccccagcctggggcgccctggtgatcagcctggagcaccgcttctacggcctgagcatcccagctgggggcctggagatggcccagctgcgcttcctgagcagccggctggccctggctgatgtggtgtctgcccggctggccctgagccgcctcttcaacatcagcagcagcagcccctggatctgcttcggcggcagctatgccggcagcctggccgcctgggcccggctgaagttcccccacctgatctttgcctctgtggccagcagcgcccctgtgcgggctgtgctggacttcagcgagtacaatgacatcgtgctgcacagcctgggccagaagtgcctgtccttcagcagagctgagaccgtggcccagctgcggagcacagagccccagctgtctggagtgggggaccggcagtggctgtaccagacctgcacagaatttggcttctacgtgacctag

SEQ ID NO: 159958 - DNA, 1545 bp, Artificial Sequence
  derived and/or modified sequence
atggccgtgtggctggcccagtggctgggccccctgctgctggtgagtttatggggccttttggcgcctgcctccctgttgcggaggttgggcgagcacattcagcagttccaggagtcgagtgcccaggggctgggtctcagcctggggcccggtgccgctgcactccccaaagtcggatggctggagcagttgctggatccatttaacgtgagcgaccggcgctcttttctgcagcgctactgggtcaacgatcagcactgggtaggacaggatggcccgatttttttacaccttggaggcgagggatccctaggacccggttccgtgatgaggggacacccggcagcactggcccctgcctggggcgctttggtaataagcctcgaacatcgattttatggcttatccatacctgccggaggcctggagatggcacagttgaggtttttgagcagtcggctggcattggcagacgtggtgtccgcgcgattggccctgtcaagactttttaatatcagcagctcctctccttggatctgctttggcggctcttatgccgggagcctggccgcatgggctagactaaagtttcctcacctgatctttgcctcagtggcgtcctccgccccagttagagccgtactcgacttttctgaatacaatgatgtggtgtcaaggtccctcatgtctacggcaattggcgggagtctggagtgtcgtgccgcagtgtccgtggccttcgctgaggtggagcgacgattacgttcagggggtgccgctcaagccgcactgagaacagagctgagcgcctgtggcccactggggcgggctgagaaccaggccgaattgctgggtgctctccaggctctggtcgggggcgtggtgcagtacgacgggcaaacgggcgctccactctccgtccggcaactgtgcggccttctgctgggaggaggcggcaacaggtcgcacagcaccccttattgtgggctgcggcgggcagtgcagatcgttttgcatagcctcggccagaagtgcctgtcgttctcccgcgctgaaacagttgcccagctccgaagtacagagccgcagctctctggagtgggtgatcggcagtggctctaccagacctgtacggaattcggcttttacgtcacttgtgagaacccgcgttgtcccttctctcagttgcctgctctgccatcacagctcgatctttgtgagcaggtttttgggctgagtgcactgtccgtcgcacaggccgtcgcccagactaactcctattatgggggacagactcctggcgccaataaggtgctgtttgtgaatggtgacaccgacccatggcatgtcttgtcggtgacacaggctctaggttctagtgagagcaccctgctaattcgcaccgggagccactgcctggacatggcccctgagaggccatccgatagccccagcttacggctaggacgacagaatattttccagcagctgcagacctggctcaaattggccaaagagagccaaatcaaaggcgaggtatag

SEQ ID NO: 159959 - DNA, 822 bp, Artificial Sequence
  derived and/or modified sequence
atggccgtgtggctggcccagtggctgggccccctgctgctggtgagtctgtggggactgcttgcgcccgctagtctactgagacgactgggggagcacattcaacagtttcaggaatccagtgcccagggcttaggattgagcttgggccccggggctgctgccctaccaaaagtggggtggttggaacagcttctggatcctttcaatgtgtctgatagaaggtcgttcttacagaggtattgggtaaacgatcagcattgggtgggacaggatggtcctatcttcctccatctgggcggcgaagggtccttggggcccggatccgtcatgcgcgggcatccggctgcgcttgcacccgcctggggtgctctggtcatctctctggaacaccgcttctatgggctcagcatccccgctgggggtctcgaaatggctcaactgaggttcctcagtagtaggctggccttggcagacgtggtgtcggcccggctggcactgtcacgtttatttaacatcagtagttcctccccctggatctgcttcggcggctcctatgcaggctcactcgctgcatgggcccgcctcaagttccctcatctcatctttgcctccgtagccagttctgcccctgtccgtgccgtgctggattttagtgaatataacgatatagtgcttcattcattgggccagaagtgtctcagttttagccgagctgaaacggtcgcccagttgaggtccaccgagccccagttatccggggtgggcgatcgccagtggctctatcagacttgtacagaattcggattttacatcacctag

SEQ ID NO: 159960 - DNA, 501 bp, Artificial Sequence
  derived and/or modified sequence
atggccgtgtggctggcccagtggctgggccccctgctgctggtgagtctgtggggtctgctggctcctgctagcttgttaaggaggctaggcgaacacatccagcagttccaggaaagttcggcccaggggctcggactatccttagggcccggcgctgctgccttgccaaaggttggatggctggagcagctccttgacccctttaatgtctcagatagacgatcttttctgcagaggtactgggtaaatgaccagcactgggtgggccaagacggccccatttttctgcacttgggcggcgagggaagcctgggacctggatcagtgatgcgaggacatcctgcagcactggcacccgcttggggggcgttggtgattagtttagagcatagattttacggcttgtccattcctgcagggggactcgagatggcccagttgcgcttcttgtcaagtcgactggcgctctcctgtaccgcctgggcaaggtcggtgtag

SEQ ID NO: 159961 - DNA, 498 bp, Artificial Sequence
  derived and/or modified sequence
tgagtgatgcggggccaccccgccgccctggcccccgcctggggcgccctggtgatatccttagagcatcggttctacggccttagtattccggcaggcgggcttgaaatggctcagttaagatttctgtccagccgcttggcgctggcagatgtagtgtccgccaggctggccctgagtagacttttcaacatctcaagcagttccccatggatttgtttcggaggttcctatgcagggtccttggctgcatgggccagactcaagttccctcacctgatttttgcctctgtagcttcgagcgctcccgtgagagcagttttggattttagcgagtataacgacattgtgcttcactccttgggtcaaaagtgcctgagtttttcccgagccgaaacagttgcccagctgcgctccaccgaacctcagctctctggggtaggagatcgccaatggctgtaccagacctgcaccgagttcggattttacgtcacctag

SEQ ID NO: 159962 - DNA, 1545 bp, Artificial Sequence
  derived and/or modified sequence
atggccgtctggcttgcccagtggctgggacccctcttgctggtgtctctgtggggcttgctagctccagcatcattactgagacgcctcggagaacacatacaacagttccaggaatcatctgcccaggggttagggctgagcctggggccaggcgcagctgcactgcctaaggtgggatggctggaacaactgctggacccttttaatgtttcagaccggagaagctttctccagcgctactgggtaaacgaccagcattgggtgggacaggatggccctatttttctgcacctgggcggagagggctcactgggcccaggctccgtaatgagggggcaccccgcagcattagccccagcatggggggcacttgtcatctcactcgaacaccgcttctacggcctgagcatccctgccggagggttggaaatggcacaactgcgtttcctgtcgtctcggctcgccttggcagatgtggtatcagctcggctggctctatctagactgttcaatatttcttccagctcgccttggatttgtttcggtggttcctatgccggaagcctggcagcgtgggccagactgaagttccctcacctaattttcgctagtgtggcaagttcagctccagtgcgcgcagtgcttgacttttcagaatataatgacgtcgtgtcgcgaagcttaatgagcactgcgatcgggggatcgctggagtgcagagctgctgtctccgttgctttcgcagaagtcgagcggcgtttaaggtctgggggtgctgcccaggccgctctgcgaaccgaactgagcgcctgcggacctcttggcagggctgaaaaccaggcggaactgctcggtgcccttcaggcactcgttggcggagtggtccagtacgatggccagactggagcacctttatccgttagacagctctgtgggctgctgctcggcggagggggaaacaggtctcattctacaccctattgcggtctgagaagggcggtccaaatcgtactgcatagtctgggccagaagtgtctcagtttttcaagagccgaaactgtggcccagctccgtagtacagaaccccagctctcaggagttggcgacagacagtggctctatcagacgtgtaccgagtttgggttctatgtcacctgtgaaaaccccagatgcccttttagtcagcttcccgcacttccgtctcaattagatctgtgtgagcaggtgttcgggctcagcgccctctcagtagctcaagccgtggctcagacaaatagctactatggtggtcagactcccggtgccaacaaggtgctattcgtcaacggcgacaccgatccttggcacgtgctgtcggtgacccaggctcttgggagctcagagtcaaccctgcttattcgtactggcagccactgtcttgatatggcgcctgagcgtccttcagatagtcccagcctccgactgggcagacagaacatttttcagcagctgcagacttggctgaaactcgcaaaggagtcacagataaagggggaagtgtag

SEQ ID NO: 159963 - DNA, 822 bp, Artificial Sequence
  derived and/or modified sequence
atggcagtgtggttagctcagtggcttggcccactgctcctcgtatcactttgggggctgctggcgccagcatccctattgagaaggctcggagaacacattcagcagttccaggaatcttccgcacagggcttggggctgagtctgggacccggagctgccgctttacctaaggtaggctggctggagcagctcttggacccctttaacgtatcggacaggcggagctttctgcagagatactgggttaacgaccagcattgggtggggcaggacgggccaatcttcctccacctgggcggagagggtagtcttggcccaggcagtgtgatgagagggcaccccgcagcactggcccctgcctggggagctctggttatctctttggagcaccggttttatggcctgtcaataccagcaggaggcctggaaatggcccaactccgattcctatcctcacgactggcgctcgccgacgtggtgtccgccagacttgctctgtctcggctatttaacatatccagttcttcgccttggatctgctttggcggatcatacgccggttcactggctgcatgggctagattgaagtttccccacttaattttcgcttccgtggcaagttctgcacccgtgcgggctgtactggacttctctgaatacaatgatatcgtcctgcactcactcgggcagaagtgcctaagcttttcacgggctgagacggtggcccaactgcggagtactgagccacagcttagcggcgtgggtgacagacagtggctgtaccagacttgcacagaatttggattttacattacttag

SEQ ID NO: 159964 - DNA, 501 bp, Artificial Sequence
  derived and/or modified sequence
atggccgtctggctcgcgcagtggctgggtccgctcttgttagtttctctctggggacttctggcaccggcatctcttctaagacgattaggcgagcatatccagcagttccaggagagcagcgcacagggactgggtctgagtctgggccctggggcagctgcactgcccaaggtaggctggctggaacagctgttggatccttttaacgtcagtgatcggagatctttcttgcagcggtattgggtgaacgaccagcattgggttgggcaggatggacctatctttttgcaccttggcggagaggggtctctggggcctgggtctgttatgagaggccatccagcagcactcgccccagcctggggcgctttagttatctcattggagcaccgcttctatggtctctcaatccccgcagggggtcttgagatggctcaactgcggttcctttctagccgccttgcgctgtcatgcactgcttgggctcgctcagtgtag

SEQ ID NO: 159965 - DNA, 498 bp, Artificial Sequence
  derived and/or modified sequence
tgagtgatgagagggcatcctgccgcactcgcccctgcctggggcgcactagttatatcacttgagcatcggttttacggcctatctattccagcaggcggactggaaatggcacagctgcggttcttgtcttccaggcttgcgcttgccgacgtggtaagcgctcggctggccctgtcacgcctgtttaatatcagtagctcctccccttggatctgctttgggggatcctacgctgggagtttggcagcctgggcaagactgaaattcccccacctcatttttgcttccgtggctagttctgcacctgtgcgtgccgtgctggatttctctgagtataacgacatcgtcctgcattctcttggtcaaaaatgcttatcctttagccgagctgaaactgtggcgcaactgaggagcaccgagccacagctctcaggcgtgggcgaccgacagtggctctaccagacctgtaccgaatttggcttttacgtgacctag

SEQ ID NO: 159966 - DNA, 2716 bp, Artificial Sequence
  derived and/or modified sequence
agagtcccgaacaccatggccgtctggcttgcccagtggctgggccctctgctcttggtttccctctggggactcttggctccagcctcccttcttaggcgcctgggtgagcacattcagcagtttcaggagagctctgcccagggcctgggcctgagcctggggccaggtgctgcagccctcccaaaagtggggtggctggagcaactgctggaccccttcaacgtgtccgacagacgatccttcctacagcgttactgggtgaatgaccaacattgggttggccaggatggacccatattcctgcatctagggggtgagggcagccttgggcctggctcagtgatgagaggccatcccgcagccttggccccagcctggggcgccctggtgataagcctggaacacagattttatggcctgagtatacctgctggaggcctggaaatggcccagctccgcttcttgtccagccgccttgcgctggctgatgtggtctctgcccgcctggcactttcccgcctctttaacatctcctcctccagcccctggatctgcttcggaggctcctatgccggctccttggccgcctgggcccggctgaagttcccccatctcattttcgcgtcggtcgcctcctccgccccggtgcgggccgtgctggatttctccgagtataatgacgtggtatcccgaagcctaatgagcaccgcgatcggcgggtccctggagtgccgggcggcggtgtccgtcgccttcgctgaagtggagcggcggctgcgctcgggtggggcggctcaagcagcattgcggacggagctgagcgcttgcgggcccctgggccgcgctgaaaaccaggcggagctgttgggggcgctgcaggcactggtgggaggtgtagtgcagtatgatgggcagacgggagcgccgctaagcgtgcgacagctctgcggacttctcctcgggggcgggggcaaccgcagccactccacgccctactgcgggcttcgtcgggcggtgcagattgtcttgcacagcctgggccagaagtgtttaagcttttcccgagcagagacagtggcacagctgaggagcacagaacctcaactgtctggtgtgggtgaccggcagtggttgtatcagacatgtaccgagttcggcttctatgtcacctgtgagaatcccagatgtcctttctcccagctcccagcactgccctcccagctagacctatgtgagcaggtgtttgggctctcagccttgtcagtagcccaggctgtggctcagacgaactcctactacggtggccagacccctggggctaacaaagtgctgtttgttaatggggacacagacccctggcatgtgctaagtgtaacacaggctttaggatcctcagaatcaactcttcttatccgcactggctcccactgcttggacatggcacctgagaggccctcagactcccccagcctccgcctagggcgccagaacatcttccagcagctacagacctggctcaagctggcaaaggagagccagattaagggtgaagtctgaatctcataccctttccactccctgcatggtcacctcagtcctggacatacttgttcactgaacaaaagaaagcagcttgttttgaaagaagaaactcccaggaattggaattcagcacctgttccgcacgtaattggcatgtgtctgcaaacatccttattcccaacttaaagtgctttattgcagagagttatggaaatataagtggatgattattctcattgtaaatattggtattttgaatgttaaatgtcaaacaaatgtgacttatgctggtgccctcgccctgctgatcagattctggttcaaattctgccactccagctcctgggttaggggctttgctgtaagtttctttttctggactttagatcctgaacctgtccttgcttctcagtttctctcactgtacccctttccctcagtctcttcctctctctttcccctgtcactatttgtctttctaatctccttctgtttctctgaatatcttcatttctatctctgtgtttctgtctatttctctgtttatctttctgtccttcaatctgtgtttttgtttctggctctccgtcagtgtctttttctctcctctctctcttgctctgccatggctatttccactgctctatttctgactctcatttttggtctctgtgtgtctcctagtcactttctttctcactctgtctctgtctctatttctgtctctcctctgctgtgtcctcaatctctctgtctccctgaggctctatttctgtctctcctctgctgtgtcctcaatctctctgtctccctgaggctctatttctgtctctgatgctcttcttctgtgtctctatttctcttcctgtcacttaatcttttccttctctatctctcttatttagtcttccttccacacccttcactcaccatcttttcccacaatcaaatatcactccctggtacttccagcttccaactctagggattcatgattctggtggagattccttcttccagggcctgggaggatagggctaatcccaagggtgcctgcttaggctatgttagctgtgacaggaacctgccatagatttgcactgttctttcctaaagatcaattattttcagcaataaatacttctcagctttttgtatgtctttgtatgca

SEQ ID NO: 159967 - DNA, 834 bp, Artificial Sequence
  derived and/or modified sequence
agagtcccgaacaccatggccgtctggcttgcccagtggctgggccctctgctcttggtttccctctggggactcttggctccagcctcccttcttaggcgcctgggtgagcacattcagcagtttcaggagagctctgcccagggcctgggcctgagcctggggccaggtgctgcagccctcccaaaagtggggtggctggagcaactgctggaccccttcaacgtgtccgacagacgatccttcctacagcgttactgggtgaatgaccaacattgggttggccaggatggacccatattcctgcatctagggggtgagggcagccttgggcctggctcagtgatgagaggccatcccgcagccttggccccagcctggggcgccctggtgataagcctggaacacagattttatggcctgagtatacctgctggaggcctggaaatggcccagctccgcttcttgtccagccgccttgcgctggctgatgtggtctctgcccgcctggcactttcccgcctctttaacatctcctcctccagcccctggatctgcttcggaggctcctatgccggctccttggccgcctgggcccggctgaagttcccccatctcattttcgcgtcggtcgcctcctccgccccggtgcgggccgtgctggatttctccgagtataatgacattgtcttgcacagcctgggccagaagtgtttaagcttttcccgagcagagacagtggcacagctgaggagcacagaacctcaactgtctggtgtgggtgaccggcagtggttgtatcagacatgtaccgagttcggcttctatataacc

SEQ ID NO: 159968 - DNA, 1019 bp, Artificial Sequence
  derived and/or modified sequence
agagtcccgaacaccatggccgtctggcttgcccagtggctgggccctctgctcttggtttccctctggggactcttggctccagcctcccttcttaggcgcctgggtgagcacattcagcagtttcaggagagctctgcccagggcctgggcctgagcctggggccaggtgctgcagccctcccaaaagtggggtggctggagcaactgctggaccccttcaacgtgtccgacagacgatccttcctacagcgttactgggtgaatgaccaacattgggttggccaggatggacccatattcctgcatctagggggtgagggcagccttgggcctggctcagtgatgagaggccatcccgcagccttggccccagcctggggcgccctggtgataagcctggaacacagattttatggcctgagtatacctgctggaggcctggaaatggcccagctccgcttcttgtccagccgccttgcattgtcttgcacagcctgggccagaagtgtttaagcttttcccgagcagagacagtggcacagctgaggagcacagaacctcaactgtctggtgtgggtgaccggcagtggttgtatcagacatgtaccgagttcggcttctatgtcacctgtgagaatcccagatgtcctttctcccagctcccagcactgccctcccagctagacctatgtgagcaggtgtttgggctctcagccttgtcagtagcccaggctgtggctcagacgaactcctactacggtggccagacccctggggctaacaaagtgctgtttgttaatggggacacagacccctggcatgtgctaagtgtaacacaggctttaggatcctcagaatcaactcttcttatccgcactggctcccactgcttggacatggcacctgagaggccctcagactcccccagcctccgcctagggcgccagaacatcttccagcagctacagacctggctcaagctggcaaaggagagccagattaagggtgaagtctga

SEQ ID NO: 159969 - DNA, 492 bp, Artificial Sequence
  derived and/or modified sequence
agtgatgagaggccatcccgcagccttggccccagcctggggcgccctggtgataagcctggaacacagattttatggcctgagtatacctgctggaggcctggaaatggcccagctccgcttcttgtccagccgccttgcgctggctgatgtggtctctgcccgcctggcactttcccgcctctttaacatctcctcctccagcccctggatctgcttcggaggctcctatgccggctccttggccgcctgggcccggctgaagttcccccatctcattttcgcgtcggtcgcctcctccgccccggtgcgggccgtgctggatttctccgagtataatgacattgtcttgcacagcctgggccagaagtgtttaagcttttcccgagcagagacagtggcacagctgaggagcacagaacctcaactgtctggtgtgggtgaccggcagtggttgtatcagacatgtaccgagttcggcttctatgtcac

SEQ ID NO: 159970 - DNA, 1545 bp, Artificial Sequence
  derived and/or modified sequence
atggccgtgtggctggcccagtggctgggccccctgctgctggtgagcctgtggggcctgctggcccccgccagcctgctgagaagactgggcgagcacatccagcagttccaggagagcagcgcccagggcctgggcctgagcctgggccccggcgccgccgccctgcccaaggtgggctggctggagcagctgctggaccccttcaacgtgagcgacagaagaagcttcctgcagagatactgggtgaacgaccagcactgggtgggccaggacggccccatcttcctgcacctgggcggcgagggcagcctgggccccggcagcgtgatgagaggccaccccgccgccctggcccccgcctggggcgccctggtgatcagcctggagcacagattctacggcctgagcatccccgccggcggcctggagatggcccagctgagattcctgagcagcagactggccctggccgacgtggtgagcgccagactggccctgagcagactgttcaacatcagcagcagcagcccctggatctgcttcggcggcagctacgccggcagcctggccgcctgggccagactgaagttcccccacctgatcttcgccagcgtggccagcagcgcccccgtgagagccgtgctggacttcagcgagtacaacgacgtggtgagcagaagcctgatgagcaccgccatcggcggcagcctggagtgcagagccgccgtgagcgtggccttcgccgaggtggagagaagactgagaagcggcggcgccgcccaggccgccctgagaaccgagctgagcgcctgcggccccctgggcagagccgagaaccaggccgagctgctgggcgccctgcaggccctggtgggcggcgtggtgcagtacgacggccagaccggcgcccccctgagcgtgagacagctgtgcggcctgctgctgggcggcggcggcaacagaagccacagcaccccctactgcggcctgagaagagccgtgcagatcgtgctgcacagcctgggccagaagtgcctgagcttcagcagagccgagaccgtggcccagctgagaagcaccgagccccagctgagcggcgtgggcgacagacagtggctgtaccagacctgcaccgagttcggcttctacgtgacctgcgagaaccccagatgccccttcagccagctgcccgccctgcccagccagctggacctgtgcgagcaggtgttcggcctgagcgccctgagcgtggcccaggccgtggcccagaccaacagctactacggcggccagacccccggcgccaacaaggtgctgttcgtgaacggcgacaccgacccctggcacgtgctgagcgtgacccaggccctgggcagcagcgagagcaccctgctgatcagaaccggcagccactgcctggacatggcccccgagagacccagcgacagccccagcctgagactgggcagacagaacatcttccagcagctgcagacctggctgaagctggccaaggagagccagatcaagggcgaggtgtag

SEQ ID NO: 159971 - DNA, 822 bp, Artificial Sequence
  derived and/or modified sequence
atggccgtgtggctggcccagtggctgggccccctgctgctggtgagcctgtggggcctgctggcccccgccagcctgctgagaagactgggcgagcacatccagcagttccaggagagcagcgcccagggcctgggcctgagcctgggccccggcgccgccgccctgcccaaggtgggctggctggagcagctgctggaccccttcaacgtgagcgacagaagaagcttcctgcagagatactgggtgaacgaccagcactgggtgggccaggacggccccatcttcctgcacctgggcggcgagggcagcctgggccccggcagcgtgatgagaggccaccccgccgccctggcccccgcctggggcgccctggtgatcagcctggagcacagattctacggcctgagcatccccgccggcggcctggagatggcccagctgagattcctgagcagcagactggccctggccgacgtggtgagcgccagactggccctgagcagactgttcaacatcagcagcagcagcccctggatctgcttcggcggcagctacgccggcagcctggccgcctgggccagactgaagttcccccacctgatcttcgccagcgtggccagcagcgcccccgtgagagccgtgctggacttcagcgagtacaacgacatcgtgctgcacagcctgggccagaagtgcctgagcttcagcagagccgagaccgtggcccagctgagaagcaccgagccccagctgagcggcgtgggcgacagacagtggctgtaccagacctgcaccgagttcggcttctacatcacctag

SEQ ID NO: 159972 - DNA, 501 bp, Artificial Sequence
  derived and/or modified sequence
atggccgtgtggctggcccagtggctgggccccctgctgctggtgagcctgtggggcctgctggcccccgccagcctgctgagaagactgggcgagcacatccagcagttccaggagagcagcgcccagggcctgggcctgagcctgggccccggcgccgccgccctgcccaaggtgggctggctggagcagctgctggaccccttcaacgtgagcgacagaagaagcttcctgcagagatactgggtgaacgaccagcactgggtgggccaggacggccccatcttcctgcacctgggcggcgagggcagcctgggccccggcagcgtgatgagaggccaccccgccgccctggcccccgcctggggcgccctggtgatcagcctggagcacagattctacggcctgagcatccccgccggcggcctggagatggcccagctgagattcctgagcagcagactggccctgagctgcaccgcctgggccagaagcgtgtag

SEQ ID NO: 159973 - DNA, 498 bp, Artificial Sequence
  derived and/or modified sequence
tgagtgatgagaggccaccccgccgccctggcccccgcctggggcgccctggtgatcagcctggagcacagattctacggcctgagcatccccgccggcggcctggagatggcccagctgagattcctgagcagcagactggccctggccgacgtggtgagcgccagactggccctgagcagactgttcaacatcagcagcagcagcccctggatctgcttcggcggcagctacgccggcagcctggccgcctgggccagactgaagttcccccacctgatcttcgccagcgtggccagcagcgcccccgtgagagccgtgctggacttcagcgagtacaacgacatcgtgctgcacagcctgggccagaagtgcctgagcttcagcagagccgagaccgtggcccagctgagaagcaccgagccccagctgagcggcgtgggcgacagacagtggctgtaccagacctgcaccgagttcggcttctacgtgacctag

SEQ ID NO: 159974 - protein, 223 aa, Artificial Sequence
  derived and/or modified sequence
MQWAVGRRWAWAALLLAVAAVLTQVVWLWLGTQSFVFQREEIAQLARQYAGLDHELAFSRLIVELRRLHPGHVLPDEELQWVFVNAGGWMGAMCLLHASLSEYVLLFGTALGSRGHSGRYWAEISDTIISGTFHQWREGTTKSEVFYPGETVVHGPGEATAVEWGPNTWMVEYGRGVIPSTLAFALADTVFSTQDFLTLFYTLRSYARGLRLELTTYLFGQDP

SEQ ID NO: 159975 - protein, 134 aa, Artificial Sequence
  derived and/or modified sequence
MGAMCLLHASLSEYVLLFGTALGSRGHSGRYWAEISDTIISGTFHQWREGTTKSEVFYPGETVVHGPGEATAVEWGPNTWMVEYGRGVIPSTLAFALADTVFSTQDFLTLFYTLRSYARGLRLELTTYLFGQDP

SEQ ID NO: 159976 - DNA, 672 bp, Artificial Sequence
  derived and/or modified sequence
atgcagtgggctgtcggacgccgctgggcctgggcggcactgcttttggcagtggcagccgtcctgacacaggtggtctggctctggcttggtacacagtcctttgtgtttcagcgggaagagatcgcccagctagccaggcaatacgcaggcctcgatcacgagctcgctttctcgcgccttatagtggaactgaggcggctacaccccggccatgtattgcctgacgaagagctgcagtgggtgtttgtgaacgccggcggctggatgggagcaatgtgtttgctgcacgcttcgctgtccgagtatgtgttactatttggaactgctttaggttcccgcggacactctgggcggtattgggccgagatatccgacactataatcagcggtacattccatcagtggcgggagggtactacaaaaagtgaggtgttttatcccggggagactgtggtgcatggacctggcgaggctaccgccgtggaatggggaccgaacacctggatggttgagtatggccgtggagtgatcccttctactcttgcctttgctcttgccgacacggtgttttccacccaggactttctcactttgttctacactctgcgttcttacgctagggggttacggctggagctgactacatacctcttcgggcaggatccatag

SEQ ID NO: 159977 - DNA, 672 bp, Artificial Sequence
  derived and/or modified sequence
atgcagtgggccgtgggccgccgctgggcctgggccgccctgctgctggccgtggccgctgtgctgacccaggtggtgtggctgtggctgggcacccagagctttgtgttccagcgggaggagatcgcccagctggcccggcagtatgccggcctggaccacgagctggccttcagccgcctcatcgtggagctgcggcggctgcaccctggccacgtgctgcctgatgaggagctgcagtgggtgtttgtgaatgctgggggctggatgggcgccatgtgcctgctgcacgccagcctgtctgaatatgtgctgctgtttggaacagccctgggcagccggggccacagcggccgctactgggccgagatcagtgacaccatcatcagcggcaccttccaccagtggagggagggcaccaccaagtctgaggtgttctacccaggagaaacagtggtgcacggccctggagaggccacagctgtggagtggggccccaacacctggatggtggagtatggccggggcgtcatccccagcaccctggcctttgccctggccgacacagtgttcagcacccaggacttcctgaccctcttctacaccctgcggagctatgcccggggcctgcggctggagctgaccacctacctgtttggccaggacccctag

SEQ ID NO: 159978 - DNA, 672 bp, Artificial Sequence
  derived and/or modified sequence
atgcagtgggccgtgggccggcggtgggcctgggccgccctgctgttggccgtggccgcagtgttaacacaggtggtgtggttatggctgggaactcaatcctttgtgttccaacgtgaggagatcgctcagctggccaggcagtacgcgggactcgatcacgaacttgcattttcacgtctgatcgtcgagcttaggcggctccacccaggccacgtccttccagacgaagaactacaatgggtgtttgtgaatgcgggcggttggatgggggcaatgtgcttacttcacgcctcactctcggagtatgtcctcctgttcgggacagctctggggtcccggggtcactcaggcagatattgggcagaaatctcagataccattatatcggggaccttccatcagtggcgggagggcacaaccaagtccgaggtgttttaccctggtgaaaccgtggtgcacggacccggggaagctaccgccgtggaatgggggcccaacacatggatggtggagtacggcaggggcgtgatccctagtacactggctttcgccttggcggatactgtcttttcgacgcaggattttctgactctcttctacacactaagaagctacgctagaggcctaaggttagagctgaccacatatctgttcggccaagatccctag

SEQ ID NO: 159979 - DNA, 672 bp, Artificial Sequence
  derived and/or modified sequence
atgcaatgggccgtcggacggagatgggcctgggctgccctgctgctggctgtggctgcagtgctgacgcaggttgtgtggttgtggctaggaacccagagcttcgttttccagcgagaagaaatcgcgcagctggcaaggcaatatgcaggcctggatcatgagctggccttctcccgcctgatcgtggaacttcgcaggctccacccaggacatgtactgccggatgaggagctccaatgggtgttcgtgaacgcaggcggatggatgggcgcaatgtgcttattgcatgcttccctttctgagtacgtgctgctcttcggcacggccctgggttcaaggggccacagcggtcgttattgggctgaaatctccgacactatcatctcaggcactttccaccagtggcgcgaaggaacgacaaagtccgaagttttttaccccggagagaccgtggtgcatggacctggggaggctacggccgtcgagtgggggccaaatacctggatggttgaatacgggaggggagtcattcctagcacgctagcttttgccctcgccgacaccgtgttttcaacccaggactttctgacactgttctacaccctgcggtcctacgctcgcggtttgcggctagagttaactacatatttgttcggccaggatccatag

SEQ ID NO: 159980 - DNA, 1656 bp, Artificial Sequence
  derived and/or modified sequence
ctccgaggccgtgagcgcaaagcctcaggccccggctccctcctgagctgcgccgtgccaggccgcccgccgggatgcagtgggccgtgggccggcggtgggcgtgggccgcgctgctcctggctgtcgcagcggtgctgacccaggtcgtctggctctggctgggtacgcagagcttcgtcttccagcgcgaagagatagcgcagttggcgcggcagtacgctgggctggaccacgagctggccttctctcgtctgatcgtggagctgcggcggctgcacccaggccacgtgctgcccgacgaggagctgcagtgggtgttcgtgaatgcgggtggctggatgggcgccatgtgccttctgcacgcctcgctgtccgagtatgtgctgctcttcggcaccgccttgggctcccgcggccactcggggcgctactgggctgagatctcggataccatcatctctggcaccttccaccagtggagagagggcaccaccaaaagtgaggtcttctacccaggggagacggtagtacacgggcctggtgaggcaacagctgtggagtgggggccaaacacatggatggtggagtacggccggggcgtcatcccatccaccctggccttcgcgctggccgacactgtcttcagcacccaggacttcctcaccctcttctatactcttcgctcctatgctcggggcctccggcttgagctcaccacctacctctttggccaggacccttgaccagccaggcctgaaggaagacctgcggatagacaggagcgggcaggcccgcacatatccacttgctggagcccatgtttacagacagggacatacaccatgcagatcctgagttcctgctgtatgagcagggatatccatgcttatgtatccaaacacagagacccatgggaacaaatgagacacatatagatactgagacctgtgtgtacagtaggaccatgcactcacacccatctggagagggagcccccggtataccaagggagccagttgtgttcagacacacacatcacagcttgactcactaactgaggcctttccatagctccacagcttcccacctcctccccaccaaaccggggttctagagttaaggatgggggagggtattatactgcctcagtctgactcctcaacccagcagcaatttgaggggatgagggggaagaggagctgccttttggaggcccccttcacctgcagctatgatgcccttccccttctcccctgtcctcaccatatgccttatccccattctactcccctgctatgcaagtgcccctgtggcttgtccccaaccccctcagcaacaaagctcagctggggaacgagagtaatttgaagaatgcttgaagtcagcgtcttccattccagaaagacccccattcttcctttgggggtatgatgtggaagctggtttcagcccaggacccaccactgaggagaggatctagacaggtgggcctaattccaaggggcccttcctggcctggagaaggccttttacacacacacaacacatacacacacacacacacacacacatatcacagttttcacacagcccctgctgcattctctgtccatctgtctgtttctattaataaagatttgttgatctgttcca

SEQ ID NO: 159981 - DNA, 1743 bp, Artificial Sequence
  derived and/or modified sequence
ctcctgagctgcgccgtgccaggccgcccgccgggatgcagtgggccgtgggccggcggtgggcgtgggccgcgctgctcctggctgtcgcagcggtgctgacccaggtcgtctggctctggctgggtacgcagagcttcgtcttccagcgcgaagagatagcgcagttggcgcggcagtacgctggtgagcgggcagagggcagggaggggagcggccggcctgggagcggagcctagggttccgaaggcgccatccccggacctaggaccggtgccagccctgactccgccgcccctctgcctccgccagggctggaccacgagctggccttctctcgtctgatcgtggagctgcggcggctgcacccaggccacgtgctgcccgacgaggagctgcagtgggtgttcgtgaatgcgggtggctggatgggcgccatgtgccttctgcacgcctcgctgtccgagtatgtgctgctcttcggcaccgccttgggctcccgcggccactcggggcgctactgggctgagatctcggataccatcatctctggcaccttccaccagtggagagagggcaccaccaaaagtgaggtcttctacccaggggagacggtagtacacgggcctggtgaggcaacagctgtggagtgggggccaaacacatggatggtggagtacggccggggcgtcatcccatccaccctggccttcgcgctggccgacactgtcttcagcacccaggacttcctcaccctcttctatactcttcgctcctatgctcggggcctccggcttgagctcaccacctacctctttggccaggacccttgaccagccaggcctgaaggaagacctgcggatagacaggagcgggcaggcccgcacatatccacttgctggagcccatgtttacagacagggacatacaccatgcagatcctgagttcctgctgtatgagcagggatatccatgcttatgtatccaaacacagagacccatgggaacaaatgagacacatatagatactgagacctgtgtgtacagtaggaccatgcactcacacccatctggagagggagcccccggtataccaagggagccagttgtgttcagacacacacatcacagcttgactcactaactgaggcctttccatagctccacagcttcccacctcctccccaccaaaccggggttctagagttaaggatgggggagggtattatactgcctcagtctgactcctcaacccagcagcaatttgaggggatgagggggaagaggagctgccttttggaggcccccttcacctgcagctatgatgcccttccccttctcccctgtcctcaccatatgccttatccccattctactcccctgctatgcaagtgcccctgtggcttgtccccaaccccctcagcaacaaagctcagctggggaacgagagtaatttgaagaatgcttgaagtcagcgtcttccattccagaaagacccccattcttcctttgggggtatgatgtggaagctggtttcagcccaggacccaccactgaggagaggatctagacaggtgggcctaattccaaggggcccttcctggcctggagaaggccttttacacacacacaacacatacacacacacacacacacacacatatcacagttttcacacagcccctgctgcattctctgtccatctgtctgtttctattaataaagatttgttgatctgttcca

SEQ ID NO: 159982 - DNA, 672 bp, Artificial Sequence
  derived and/or modified sequence
atgcagtgggccgtgggcagaagatgggcctgggccgccctgctgctggccgtggccgccgtgctgacccaggtggtgtggctgtggctgggcacccagagcttcgtgttccagagagaggagatcgcccagctggccagacagtacgccggcctggaccacgagctggccttcagcagactgatcgtggagctgagaagactgcaccccggccacgtgctgcccgacgaggagctgcagtgggtgttcgtgaacgccggcggctggatgggcgccatgtgcctgctgcacgccagcctgagcgagtacgtgctgctgttcggcaccgccctgggcagcagaggccacagcggcagatactgggccgagatcagcgacaccatcatcagcggcaccttccaccagtggagagagggcaccaccaagagcgaggtgttctaccccggcgagaccgtggtgcacggccccggcgaggccaccgccgtggagtggggccccaacacctggatggtggagtacggcagaggcgtgatccccagcaccctggccttcgccctggccgacaccgtgttcagcacccaggacttcctgaccctgttctacaccctgagaagctacgccagaggcctgagactggagctgaccacctacctgttcggccaggacccctag

SEQ ID NO: 159983 - protein, 118 aa, Artificial Sequence
  derived and/or modified sequence
MSLIILTRDDEPRIFTPDSDAASPALHSTSPLPDPASASPLHREEKILPKVCNIVSCLSFSLPASPTDSGLASPTIITREGQQFWAKCLIWKYQLYLHGLHKKSDGRRDKQISASPST

SEQ ID NO: 159984 - DNA, 357 bp, Artificial Sequence
  derived and/or modified sequence
atgtccctgatcattctcacacgggatgatgaacctagaatcttcactccagatagcgacgccgcttcacctgcgctgcattctactagcccattgcccgacccggcatccgcaagcccactgcacagggaagagaaaattttgcccaaggtgtgtaacattgtcagctgcctctccttcagcctgcctgcttctccaacagatagcggcttagcttccccaaccattatcacccgcgaaggacagcagttttgggcaaaatgtttgatttggaagtatcagctctatctgcacggtctgcataaaaagtccgacggacgccgagacaaacagatctcagcaagtccaagcacatag

SEQ ID NO: 159985 - DNA, 357 bp, Artificial Sequence
  derived and/or modified sequence
atgagcctcatcatcctgaccagagatgatgagccccgcatcttcaccccagacagtgatgctgccagccctgccctgcacagcaccagccccctgcctgaccctgccagcgccagccccctgcaccgggaggagaagatcctgcccaaggtgtgcaacatcgtgtcctgcctgtccttcagcctgcctgccagccccacagattctggcctggccagccccaccatcatcacccgggagggccagcagttctgggccaagtgcctgatctggaagtaccagctgtacctgcacggcctgcacaagaagagtgatggaagaagagacaagcagatcagcgccagccccagcacctag

SEQ ID NO: 159986 - DNA, 357 bp, Artificial Sequence
  derived and/or modified sequence
atgagcctgatcatcctgacccgggacgacgagccccggatcttcacccccgactccgatgctgcttcccctgcattgcattctacatcccctctaccagatcctgccagtgcctcgcccctacatcgcgaggagaagatcctcccaaaggtatgtaacatcgtctcctgtctgagcttcagcctgcccgcttcaccaactgacagcggactggccagtcccacaatcattaccagggaaggccagcagttctgggccaaatgcctgatctggaagtatcaactatacttacatggcctgcacaaaaagagcgatggaagaagagacaaacagatctctgcctcccctagcacctag

SEQ ID NO: 159987 - DNA, 357 bp, Artificial Sequence
  derived and/or modified sequence
atgtcgctaattattctaacgcgtgatgacgaaccgcgaatttttacccccgattccgatgcagctagccccgcactacactccacctcccctctgccagatcccgcttcagctagccctctgcaccgcgaggagaagatcctccctaaagtgtgcaacattgtttcatgcctcagtttttctcttcccgcatctccgacagatagcggactggctagtcccactattattactcgggaaggccagcagttctgggccaaatgtctgatctggaagtaccaattatacctgcacggacttcataagaagtctgatggccgtagagacaagcagatcagcgcttccccttccacgtag

SEQ ID NO: 159988 - DNA, 357 bp, Artificial Sequence
  derived and/or modified sequence
atgagcctgatcatcctgaccagagacgacgagcccagaatcttcacccccgacagcgacgccgccagccccgccctgcacagcaccagccccctgcccgaccccgccagcgccagccccctgcacagagaggagaagatcctgcccaaggtgtgcaacatcgtgagctgcctgagcttcagcctgcccgccagccccaccgacagcggcctggccagccccaccatcatcaccagagagggccagcagttctgggccaagtgcctgatctggaagtaccagctgtacctgcacggcctgcacaagaagagcgacggcagaagagacaagcagatcagcgccagccccagcacctag

SEQ ID NO: 159989 - DNA, 1098 bp, Artificial Sequence
  derived and/or modified sequence
cagtcacgggccagcctttcccttaaggatgtctgagagctggtctcctcactcttttcttccgcctattaaactttccgcttcttaactcacccatgtgtgtccatgtcgttaatcatcttgacgagagatgatgaaccccggatatttaccccagacagtgatgccgcttcaccagcattgcactctacttccccgcttcctgatcctgcctcagcttctcctctccacagagaagaaaaaattctgcctaaagtctgcaacatcgtttcctgcctgagtttcagcctgccagcttctcctacggattctggacttgccagccccacaatcataaccagagaggggcagcaattttgggcaaaatgtctgatttggaaataccaactttacctccatgggctccacaagaaatcagatgggagaagggacaagcagataagcgcaagcccatcaacctgaaggcataaaccacatccagccacctccttctgatcagcagcaaagctgacgttttgatctccatctgtctgattcttgtgtctacttctcagtttacaactccagtgggaaagaaagagctttatttacagacccataaaaatcccatcagtgtcgtcccctgctgagaggccatgtgagaccatatggaaaaacaacagccataatggcagcatggcagtggaagggtttgtcttgtgcccaggccttgcggtcatgcaagtttcttgtggatcctgttgggaccagccactcaccaaggctgagtaggtccacaaataatggggactttctaccagactcacagagaactgctgggtttttgggaagggtgtgcgtgtctttggggcatgcaagttggggttatagtggagacccagaggatgagaaaacttctctgcctcagcagaagagtggcagctgagagagaggcaagaaactcgcacccactgtggactggggcagagagattttgaggagaatgaaatccagaaactctgtgtggtattagtttgtatccagagggtgaccctcttctcaaggaaatgggtgtcatcaattttctacactattaaagatataaagttcttggcatta

SEQ ID NO: 159990 - protein, 118 aa, Artificial Sequence
  derived and/or modified sequence
MRRAGLGEGVPPGNYGNYGYANSGYSACEEENERLTESLRSKVTAIKSLSIEIGHEVKTQNKLLAEMDSQFDSTTGFLGKTMGKLKILSRGSQTKLLCYMMLFSLFVFFIIYWIIKLR

SEQ ID NO: 159991 - DNA, 1504 bp, Artificial Sequence
  derived and/or modified sequence
cggcgcggtgtttagactccactgatgtcgtggcgctttaggggaagaagttggtgtttcgctgggccctggtactgaagacgcggtccgggtcgcccctagctgtttcctactcacccaaagccccgcacccgccttttctctctctcctctggcaggatgaggcgtgcaggcctgggtgaaggagtacctcctggcaactatgggaactatggctatgctaatagtgggtatagtgcctgtgaagaagaaaatgagaggctcactgaaagtctgagaagcaaagtaactgctataaaatctctttccattgaaataggccatgaagttaaaacccagaataaattattagctgaaatggattcacaatttgattccacaactggatttctaggtaaaactatgggcaaactgaagattttatccagagggagccaaacaaagctgctgtgctatatgatgctgttttctttatttgtcttttttatcatttattggattattaaactgaggtgatgcatgtaattgtgaatttggaatttgttccaacttaatggcttgcagtaccactttgataaaaatcagcatcaaaacattcctagtgttcaaatactgtggcattttccattgaaaattgctgaattttgcttattttataaatcacattagttaatacagtggtctttgaatactgtttcttaatgactcattttagcccctattttcaggggtagtgagagggtgtggctccactaatttccagtttgtttttctattgtttgccaactgtcagattaaatagcattataatattttgttgtaatcataaatgcaggtttatgtcccatgtaaggaaacttagtgggagagtaacagaatgcctggagagcctgactctgagctcttgaagtagtcagccagtttgtggtaaaatggtaattgaattttcctaactgcatcaactgtaatgatatactcccttctcctcctttatttagttaaaattgtaggctgatttctttttacctacaatcttcctaataatttttgatgataatgacccctcatttctttctgcccaaagacctcattctttaaataaaacttgttattttggcatatttctggtagggcccattgcacatgtgtatcagtatagttattatttcatattaactttatgaattctcttgacttggcttataatagttttatgatttttactacataggtagcacatttatcatttgtgacagaataatgtgaagttaagtaattactgaactttaaatggaaatagtatgcaagaaactcaggcattgaacttgaagataagagtattattgctttaatccagtgtatttgtttatggaaagaaaaacacaaaggcagactgttgagtaaaaaatattaaatattgttaaatattctgtattttggaatttatccatttataggcttcaaaagtaaatttttaaataaaatatattagtcgactgtgtta

SEQ ID NO: 159992 - DNA, 357 bp, Artificial Sequence
  derived and/or modified sequence
atgcgccgagctggcctgggagagggcgtgccccctgggaactacgggaattacggatacgccaatagtggctattccgcctgcgaggaggaaaacgagaggcttactgagtctctgaggagtaaagtgaccgcaatcaagtctctatcaatcgaaatagggcacgaagtcaaaactcagaataaacttctggccgagatggactcacagttcgacagcaccaccggatttctgggcaagaccatgggcaagttaaaaatcctgtctcgcgggagccaaacaaaactcctgtgctacatgatgttgtttagcctgttcgtatttttcatcatctactggataatcaagctgcgttag

SEQ ID NO: 159993 - DNA, 357 bp, Artificial Sequence
  derived and/or modified sequence
atgaggcgggccggcctgggggagggcgtgcccccaggcaactacggcaactacggctacgccaacagcggctacagcgcctgtgaggaggagaatgaaaggctgacagagagcctgcggagcaaggtgacagccatcaagagcctgagcattgaaattggacatgaggtgaagacccagaacaagctgctggccgagatggacagccagtttgacagcaccaccggcttcctgggcaagaccatgggcaagctgaagatcctgagccggggcagccagaccaagctgctgtgctacatgatgctgttcagcctgtttgtgttcttcatcatctactggatcatcaagctgaggtag

SEQ ID NO: 159994 - DNA, 357 bp, Artificial Sequence
  derived and/or modified sequence
atgcggcgggccggcctgggcgagggcgtgccccccggcaactacggcaattacggttacgctaattccggttactctgcctgcgaagaagagaatgagaggctgacggaatccttacgatctaaagtgacggccattaaatccctgagcattgagatcggccacgaagttaaaacacagaacaagctgctcgccgaaatggacagtcagttcgactctaccaccggctttctgggcaaaactatggggaagctcaaaattcttagccgcgggtctcaaactaaactcttatgttatatgatgcttttctctctcttcgtgttctttattatttactggattataaaattacgctag

SEQ ID NO: 159995 - DNA, 357 bp, Artificial Sequence
  derived and/or modified sequence
atgcggcgagcaggccttggagagggcgtcccaccgggtaattatggcaattatggatatgcaaatagtgggtacagcgcttgtgaggaagaaaatgagcgactgacggagtcattgcgaagtaaagtgactgcaattaaatctctgagtattgagataggccatgaagtgaagacacagaacaaactgctggccgaaatggactcacagtttgacagcaccacaggattcctgggcaagaccatgggcaaattaaagattctaagtcgaggctcgcagactaagctgttatgctatatgatgctattttccttattcgtgttcttcataatttactggattattaagctgagatag

SEQ ID NO: 159996 - DNA, 357 bp, Artificial Sequence
  derived and/or modified sequence
atgagaagagccggcctgggcgagggcgtgccccccggcaactacggcaactacggctacgccaacagcggctacagcgcctgcgaggaggagaacgagagactgaccgagagcctgagaagcaaggtgaccgccatcaagagcctgagcatcgagatcggccacgaggtgaagacccagaacaagctgctggccgagatggacagccagttcgacagcaccaccggcttcctgggcaagaccatgggcaagctgaagatcctgagcagaggcagccagaccaagctgctgtgctacatgatgctgttcagcctgttcgtgttcttcatcatctactggatcatcaagctgagatag

SEQ ID NO: 159997 - protein, 472 aa, Artificial Sequence
  derived and/or modified sequence
MSNIYIQEPPTNGKVLLKTTAGDIDIELWSKEAPKACRNFIQLCLEAYYDNTIFHRVVPGFIVQGGDPTGTGSGGESIYGAPFKDEFHSRLRFNRRGLVAMANAGSHDNGSQFFFTLGRADELNNKHTIFGKVTGDTVYNMLRLSEVDIDDDERPHNPHKIKSCEVLFNPFDDIIPREIKRLKKEKPEEEVKKLKPKGTKNFSLLSFGEEAEEEEEEVNRVSQSMKGKSKSSHDLLKDDPHLSSVPVVESEKGDAPDLVDDGEDESAEHDEYIDGDEKNLMRERIAKKLKKDTSANVKSAGEGEVEKKSVSRSEELRKEARQLKRELLAAKQKKVENAAKQAEKRSEEEEAPPDGAVAEYRREKQKYEALRKQQSKKGTSREDQTLALLNQFKSKLTQAIAETPENDIPETEVEDDEGWMSHVLQFEDKSRKVKDASMQDSDTFEIYDPRNPVNKRRREESKKLMREKKERR

SEQ ID NO: 159998 - DNA, 1419 bp, Artificial Sequence
  derived and/or modified sequence
atgagcaatatctacattcaggagccgccaaccaacggcaaggtgttgctgaaaaccaccgccggagacatagacatcgaactgtggagcaaggaggcgcctaaggcatgcaggaactttatccagctgtgccttgaggcgtattacgacaataccatcttccaccgtgtcgttcctggattcatcgtgcagggcggggaccccacagggactggctctggaggcgaatccatatatggtgcaccatttaaagatgaattccacagcaggctgcgtttcaatagacgggggctcgtggcaatggccaacgccgggagccatgataatggatcgcaattctttttcaccctgggcagagcagacgagttgaataataaacacaccatttttggcaaagttaccggcgacaccgtttacaacatgctccgactgagcgaggtcgacatagatgacgacgaaagacctcacaacccccacaagatcaaatcatgtgaggtcctgttcaatccttttgatgatatcataccacgggagattaaaagattaaagaaagaaaaacctgaggaagaagtcaagaaattgaaaccaaagggcaccaaaaacttcagcctcctcagctttggcgaagaagctgaagaagaagaggaggaagtcaacagggtgtctcagtccatgaaggggaagtctaagtcatcacatgacttgcttaaggatgacccccatctttcctccgtgccagtggtggaatcggaaaaaggcgatgccccagatctagtagacgacggagaggatgaaagcgccgagcacgatgagtacattgacggcgacgagaaaaatctgatgagggaacgcatcgctaaaaaactgaagaaagacacctcagccaatgtgaaaagtgcaggagagggggaggtcgaaaaaaagagcgtgtctcgctcagaggagttgcgtaaagaggcgcgtcaacttaaaagggaacttctggctgctaagcagaaaaaggtggagaacgcggctaaacaagccgaaaagaggagtgaggaagaagaggctccccccgatggtgcagtagccgagtaccgtcgagagaagcagaagtacgaagcactccgaaagcagcagtctaagaaaggcacaagcagagaggatcagaccttggctttactgaatcagttcaagtccaagctcactcaggcaatagcggagacccctgaaaacgacattcccgagacagaggtggaggatgatgagggttggatgtcccacgtgctgcagttcgaagacaaaagccggaaggttaaagacgcaagtatgcaggactctgatacttttgaaatttacgaccctagaaaccctgtcaacaaacgcagaagagaggaatctaagaagcttatgcgagagaaaaaggaaagaagatag

SEQ ID NO: 159999 - DNA, 1419 bp, Artificial Sequence
  derived and/or modified sequence
atgagcaacatctacatccaggagccccccaccaacgggaaggtgctgctgaagaccacagctggggacatcgacatcgagctgtggagcaaggaggcccccaaggcctgcaggaacttcatccagctgtgcctggaggcctactatgacaacaccatcttccaccgggtggtgcccggcttcatcgtgcagggcggggaccccactggaactggaagtggaggagagagcatctatggagcccccttcaaggatgagttccacagccggctgcgcttcaacagaagaggcctggtggccatggccaatgccggcagccatgacaatggcagccagttcttcttcaccctgggccgggcagatgagctgaacaacaagcacaccatctttgggaaggtgactggagacacagtgtacaacatgctgcggctgtctgaggtggacattgatgatgatgagcggccccacaacccccacaagatcaagagctgtgaggtgctcttcaacccctttgatgacatcatcccccgggagatcaagaggctgaagaaggagaagccagaggaggaggtgaagaagctgaagcccaagggcaccaagaacttcagcctgctgagctttggagaggaggccgaggaggaggaggaggaggtgaacagagtgtcccagagcatgaagggcaagagcaagagcagccatgacctgctgaaggatgacccccacctgagctctgtgcctgtggtggagagcgagaagggagatgccccagacctggtggatgatggagaagatgagagcgctgagcatgatgagtacattgatggagatgagaagaacctgatgagggagagaattgccaagaagctgaagaaggacaccagcgccaacgtgaagtctgctggggagggggaggtggagaagaagtctgtgagccgctctgaggagctgaggaaggaggcccggcagctgaagcgggagctgctggccgccaagcagaagaaggtggagaatgctgccaagcaggccgagaagaggtctgaggaggaggaggcccccccagatggagctgtggccgagtacagaagagagaagcagaagtatgaggccctgaggaagcagcagagcaagaagggcaccagccgggaggaccagaccctggccctgctgaaccagttcaagagcaagctgacccaggccatcgccgagaccccagaaaatgacatccctgagacagaggtggaggatgatgagggctggatgagccacgtgctgcagtttgaggacaagagcaggaaggtgaaggatgcctccatgcaggacagcgacacctttgagatctatgaccccaggaaccctgtgaacaagagaagaagagaggagagcaagaagctgatgagggagaagaaggagaggaggtag

SEQ ID NO: 160000 - DNA, 1419 bp, Artificial Sequence
  derived and/or modified sequence
atgagcaacatctacatccaggagccccccaccaacggcaaggtgttgctaaaaacaacagcgggcgacatcgacatagaactgtggtccaaggaggcccctaaagcttgccgtaatttcattcaactgtgcttggaggcctactacgacaataccatattccaccgcgtggttcctgggttcatcgttcagggaggcgaccctactggcaccgggagcggaggtgaaagtatctacggggcacccttcaaggacgagtttcattccaggttgcgcttcaaccgcaggggcctcgtggccatggccaacgccggctcccacgacaatgggtcccagttctttttcaccctgggaagagctgatgagcttaacaataaacatactatctttggaaaagtcacgggcgacacagtgtacaacatgcttcggctctctgaagtcgatatcgacgatgacgaaaggcctcacaatccccataagataaaatcctgtgaggtgctttttaaccccttcgacgatattatccctcgagaaatcaagaggctgaaaaaggaaaagccggaagaggaggtgaaaaaattaaagcctaagggcacaaagaatttcagcctccttagcttcggggaggaagccgaagaagaagaggaggaggtaaatcgcgtatcacaatcaatgaagggtaagtctaaatcaagccatgatctgctgaaggatgacccccatctatcttctgttccagtggtggagagtgaaaagggtgacgcgcccgatcttgtcgacgatggggaagatgagagcgccgaacacgatgaatacatcgacggtgacgagaagaacttgatgcgcgagcgaatcgcaaaaaagttgaagaaggataccagcgctaacgtgaagagcgcaggagagggcgaagtcgaaaagaaatccgtgtcccgaagtgaggagctgcgtaaagaagctcggcagctgaaaagagagttgctcgcagccaagcagaaaaaggttgagaacgccgcaaagcaggcggaaaaaagatccgaggaggaggaggcacccccagacggtgcagttgccgaataccgtcgagaaaaacagaaatacgaagccttgcggaaacagcaaagcaagaagggcacttctagggaggaccaaactcttgcactactgaaccaattcaagtcaaaactgacacaagccattgctgaaacccctgagaatgacattcccgaaacagaagtggaggacgatgaaggctggatgtcacatgtactgcagtttgaggacaagtctcggaaggtgaaggacgccagcatgcaagattccgatacttttgagatttatgacccaaggaatcctgtaaacaagcgccgtagggaggagtctaaaaaactcatgagagaaaaaaaggagcggcgctag

SEQ ID NO: 160001 - DNA, 1419 bp, Artificial Sequence
  derived and/or modified sequence
atgtctaacatctacattcaggagccaccaaccaatggtaaagtgttgttgaagactacagcaggggatattgatatcgagttgtggtctaaggaggcgccaaaagcctgcagaaacttcattcagctgtgcctggaggcttattacgataataccatattccacagagttgtgcctggttttattgtgcagggaggagatcccactggaaccggaagcgggggagagagtatttacggggctccgtttaaggacgagttccacagtcggctacgctttaacagacggggtctggtagccatggcaaacgccggatctcacgacaatggatcccagttcttctttactttaggtcgagctgacgagttaaataacaaacacaccattttcggcaaggtgacaggtgacaccgtgtacaatatgctaaggctatctgaggtcgatatcgacgatgacgagcgcccacacaatccgcataaaatcaagagctgcgaagttctgtttaacccatttgacgacattattccgagagagattaagaggctcaaaaaagaaaagcctgaagaggaggtgaagaagttaaagcccaaaggtacaaagaattttagcttgttgtccttcggtgaggaagccgaagaagaagaggaggaggttaaccgcgtctcccagtccatgaaaggcaagagcaaatccagccacgatttgttaaaggatgacccacacctgtcctctgtgcccgtggtcgagagcgagaagggcgatgcacctgacctagttgatgacggggaagatgaatccgctgaacacgacgagtatattgatggggatgaaaagaacctgatgcgggagaggatcgctaagaagctgaagaaggacacgtcagcaaatgtgaaaagcgctggggagggcgaggtagagaaaaaatcagtgtcccgaagcgaggaactgagaaaagaagctcggcagcttaaaagagaacttttggctgcaaagcagaaaaaagtggaaaacgccgcaaagcaagccgagaaaaggtctgaggaggaggaagcacctcccgatggcgctgtcgccgagtaccggagagagaagcagaagtatgaggccctgcgtaaacaacagtctaaaaaaggaacctctagagaagaccagacattagctctgctgaatcaatttaaaagcaaactgacccaggccatcgccgagacccctgagaacgatattcctgagaccgaagtggaagatgatgagggatggatgagtcacgttcttcagtttgaagacaagtctaggaaagtaaaggacgcgtccatgcaggattccgataccttcgaaatttacgaccctcgaaatccggtcaataaaagaagacgtgaggaatcgaaaaaattaatgcgggagaaaaaggagcgcagatag

SEQ ID NO: 160002 - DNA, 1884 bp, Artificial Sequence
  derived and/or modified sequence
agcggtgctcgggtccggtaacaacatggcggcgtccgtgaggggctcctttgggcaggggtagtgtttggtgtccctgtcttgcgtgatattgacaaactgaagctttcctgcaccactggacttaaggaagagtgtactcgtaggcggacagctttagtggccggccggccgctctcatcccccgtaaggagcagagtcctttgtactgaccaagatgagcaacatctacatccaggagcctcccacgaatgggaaggttttattgaaaactacagctggagatattgacatagagttgtggtccaaagaagctcctaaagcttgcagaaattttatccaactttgtttggaagcttattatgacaataccatttttcatagagttgtgcctggtttcatagtccaaggcggagatcctactggcacagggagtggtggagagtctatctatggagcgccattcaaagatgaatttcattcacggttgcgttttaatcggagaggactggttgccatggcaaatgctggttctcatgataatggcagccagtttttcttcacactgggtcgagcagatgaacttaacaataagcataccatctttggaaaggttacaggggatacagtatataacatgttgcgactgtcagaagtagacattgatgatgacgaaagaccacataatccacacaaaataaaaagctgtgaggttttgtttaatccttttgatgacatcattccaagggaaattaaaaggctgaaaaaagagaaaccagaggaggaagtaaagaaattgaaacccaaaggcacaaaaaattttagtttactttcatttggagaggaagctgaggaagaagaggaggaagtaaatcgagttagtcagagcatgaagggcaaaagcaaaagtagtcatgacttgcttaaggatgatccacatctcagttctgttccagttgtagaaagtgaaaaaggtgatgcaccagatttagttgatgatggagaagatgaaagtgcagagcatgatgaatatattgatggtgatgaaaagaacctgatgagagaaagaattgccaaaaaattaaaaaaggacacaagtgcgaatgttaaatcagctggagaaggagaagtggagaagaaatcagtcagccgcagtgaagagctcagaaaagaagcaagacaattaaaacgggaactcttagcagcaaaacaaaaaaaagtagaaaatgcagcaaaacaagcagaaaaaagaagtgaagaggaagaagcccctccagatggtgctgttgccgaatacagaagagaaaagcaaaagtatgaagctttgaggaagcaacagtcaaagaagggaacttcccgggaagatcagacccttgcactgctgaaccagtttaaatctaaactcactcaagcaattgctgaaacgcctgaaaatgacattcctgaaacagaagtagaagatgatgaaggatggatgtcacatgtacttcagtttgaggataaaagcagaaaagtgaaagatgcaagcatgcaagactcagatacatttgaaatctatgatcctcggaatccagtgaataaaagaaggagggaagaaagcaaaaagctgatgagagagaaaaaagaaagaagataaaatgagaataatgataaccagaacttgctggaaatgtgcctacaatggccttgtaacagccattgttcccaacagcatcacttaggggtgtgaaaagaagtatttttgaacctgttgtctggttttgaaaaacaattatcttgttttgcaaattgtggaatgatgtaagcaaatgcttttggttactggtacatgtgttttttcctagctgaccttttatattgctaaatctgaaataaaataacttt

SEQ ID NO: 160003 - DNA, 1419 bp, Artificial Sequence
  derived and/or modified sequence
atgagcaacatctacatccaggagccccccaccaacggcaaggtgctgctgaagaccaccgccggcgacatcgacatcgagctgtggagcaaggaggcccccaaggcctgcagaaacttcatccagctgtgcctggaggcctactacgacaacaccatcttccacagagtggtgcccggcttcatcgtgcagggcggcgaccccaccggcaccggcagcggcggcgagagcatctacggcgcccccttcaaggacgagttccacagcagactgagattcaacagaagaggcctggtggccatggccaacgccggcagccacgacaacggcagccagttcttcttcaccctgggcagagccgacgagctgaacaacaagcacaccatcttcggcaaggtgaccggcgacaccgtgtacaacatgctgagactgagcgaggtggacatcgacgacgacgagagaccccacaacccccacaagatcaagagctgcgaggtgctgttcaaccccttcgacgacatcatccccagagagatcaagagactgaagaaggagaagcccgaggaggaggtgaagaagctgaagcccaagggcaccaagaacttcagcctgctgagcttcggcgaggaggccgaggaggaggaggaggaggtgaacagagtgagccagagcatgaagggcaagagcaagagcagccacgacctgctgaaggacgacccccacctgagcagcgtgcccgtggtggagagcgagaagggcgacgcccccgacctggtggacgacggcgaggacgagagcgccgagcacgacgagtacatcgacggcgacgagaagaacctgatgagagagagaatcgccaagaagctgaagaaggacaccagcgccaacgtgaagagcgccggcgagggcgaggtggagaagaagagcgtgagcagaagcgaggagctgagaaaggaggccagacagctgaagagagagctgctggccgccaagcagaagaaggtggagaacgccgccaagcaggccgagaagagaagcgaggaggaggaggccccccccgacggcgccgtggccgagtacagaagagagaagcagaagtacgaggccctgagaaagcagcagagcaagaagggcaccagcagagaggaccagaccctggccctgctgaaccagttcaagagcaagctgacccaggccatcgccgagacccccgagaacgacatccccgagaccgaggtggaggacgacgagggctggatgagccacgtgctgcagttcgaggacaagagcagaaaggtgaaggacgccagcatgcaggacagcgacaccttcgagatctacgaccccagaaaccccgtgaacaagagaagaagagaggagagcaagaagctgatgagagagaagaaggagagaagatag

SEQ ID NO: 160004 - protein, 3224 aa, Artificial Sequence
  derived and/or modified sequence
MQKARGTRGEDAGTRAPPSPGVPPKRAKVGAGGGAPVAVAGAPVFLRPLKNAAVCAGSDVRLRVVVSGTPQPSLRWFRDGQLLPAPAPEPSCLWLRRCGAQDAGVYSCMAQNERGRASCEAVLTVLEVGDSETAEDDISDVQGTQRLELRDDGAFSTPTGGSDTLVGTSLDTPPTSVTGTSEEQVSWWGSGQTVLEQEAGSGGGTRRLPGSPRQAQATGAGPRHLGVEPLVRASRANLVGASWGSEDSLSVASDLYGSAFSLYRGRALSIHVSVPQSGLRREEPDLQPQLASEAPRRPAQPPPSKSALLPPPSPRVGKRSPPGPPAQPAATPTSPHRRTQEPVLPEDTTTEEKRGKKSKSSGPSLAGTAESRPQTPLSEASGRLSALGRSPRLVRAGSRILDKLQFFEERRRSLERSDSPPAPLRPWVPLRKARSLEQPKSERGAPWGTPGASQEELRAPGSVAERRRLFQQKAASLDERTRQRSPASDLELRFAQELGRIRRSTSREELVRSHESLRATLQRAPSPREPGEPPLFSRPSTPKTSRAVSPAAAQPPSPSSAEKPGDEPGRPRSRGPAGRTEPGEGPQQEVRRRDQFPLTRSRAIQECRSPVPPPAADPPEARTKAPPGRKREPPAQAVRFLPWATPGLEGAAVPQTLEKNRAGPEAEKRLRRGPEEDGPWGPWDRRGARSQGKGRRARPTSPELESSDDSYVSAGEEPLEAPVFEIPLQNVVVAPGADVLLKCIITANPPPQVSWHKDGSALRSEGRLLLRAEGERHTLLLREARAADAGSYMATATNELGQATCAASLTVRPGGSTSPFSSPITSDEEYLSPPEEFPEPGETWPRTPTMKPSPSQNRRSSDTGSKAPPTFKVSLMDQSVREGQDVIMSIRVQGEPKPVVSWLRNRQPVRPDQRRFAEEAEGGLCRLRILAAERGDAGFYTCKAVNEYGARQCEARLEVRAHPESRSLAVLAPLQDVDVGAGEMALFECLVAGPTDVEVDWLCRGRLLQPALLKCKMHFDGRKCKLLLTSVHEDDSGVYTCKLSTAKDELTCSARLTVRPSLAPLFTRLLEDVEVLEGRAARFDCKISGTPPPVVTWTHFGCPMEESENLRLRQDGGLHSLHIAHVGSEDEGLYAVSAVNTHGQAHCSAQLYVEEPRTAASGPSSKLEKMPSIPEEPEQGELERLSIPDFLRPLQDLEVGLAKEAMLECQVTGLPYPTISWFHNGHRIQSSDDRRMTQYRDVHRLVFPAVGPQHAGVYKSVIANKLGKAACYAHLYVTDVVPGPPDGAPQVVAVTGRMVTLTWNPPRSLDMAIDPDSLTYTVQHQVLGSDQWTALVTGLREPGWAATGLRKGVQHIFRVLSTTVKSSSKPSPPSEPVQLLEHGPTLEEAPAMLDKPDIVYVVEGQPASVTVTFNHVEAQVVWRSCRGALLEARAGVYELSQPDDDQYCLRICRVSRRDMGALTCTARNRHGTQTCSVTLELAEAPRFESIMEDVEVGAGETARFAVVVEGKPLPDIMWYKDEVLLTESSHVSFVYEENECSLVVLSTGAQDGGVYTCTAQNLAGEVSCKAELAVHSAQTAMEVEGVGEDEDHRGRRLSDFYDIHQEIGRGAFSYLRRIVERSSGLEFAAKFIPSQAKPKASARREARLLARLQHDCVLYFHEAFERRRGLVIVTELCTEELLERIARKPTVCESEIRAYMRQVLEGIHYLHQSHVLHLDVKPENLLVWDGAAGEQQVRICDFGNAQELTPGEPQYCQYGTPEFVAPEIVNQSPVSGVTDIWPVGVVAFLCLTGISPFVGENDRTTLMNIRNYNVAFEETTFLSLSREARGFLIKVLVQDRLRPTAEETLEHPWFKTQAKGAEVSTDHLKLFLSRRRWQRSQISYKCHLVLRPIPELLRAPPERVWVTMPRRPPPSGGLSSSSDSEEEELEELPSVPRPLQPEFSGSRVSLTDIPTEDEALGTPETGAATPMDWQEQGRAPSQDQEAPSPEALPSPGQEPAAGASPRRGELRRGSSAESALPRAGPRELGRGLHKAASVELPQRRSPSPGATRLARGGLGEGEYAQRLQALRQRLLRGGPEDGKVSGLRGPLLESLGGRARDPRMARAASSEAAPHHQPPLENRGLQKSSSFSQGEAEPRGRHRRAGAPLEIPVARLGARRLQESPSLSALSEAQPSSPARPSAPKPSTPKSAEPSATTPSDAPQPPAPQPAQDKAPEPRPEPVRASKPAPPPQALQTLALPLTPYAQIIQSLQLSGHAQGPSQGPAAPPSEPKPHAAVFARVASPPPGAPEKRVPSAGGPPVLAEKARVPTVPPRPGSSLSSSIENLESEAVFEAKFKRSRESPLSLGLRLLSRSRSEERGPFRGAEEEDGIYRPSPAGTPLELVRRPERSRSVQDLRAVGEPGLVRRLSLSLSQRLRRTPPAQRHPAWEARGGDGESSEGGSSARGSPVLAMRRRLSFTLERLSSRLQRSGSSEDSGGASGRSTPLFGRLRRATSEGESLRRLGLPHNQLAAQAGATTPSAESLGSEASATSGSSAPGESRSRLRWGFSRPRKDKGLSPPNLSASVQEELGHQYVRSESDFPPVFHIKLKDQVLLEGEAATLLCLPAACPAPHISWMKDKKSLRSEPSVIIVSCKDGRQLLSIPRAGKRHAGLYECSATNVLGSITSSCTVAVARVPGKLAPPEVPQTYQDTALVLWKPGDSRAPCTYTLERRVDGESVWHPVSSGIPDCYYNVTHLPVGVTVRFRVACANRAGQGPFSNSSEKVFVRGTQDSSAVPSAAHQEAPVTSRPARARPPDSPTSLAPPLAPAAPTPPSVTVSPSSPPTPPSQALSSLKAVGPPPQTPPRRHRGLQAARPAEPTLPSTHVTPSEPKPFVLDTGTPIPASTPQGVKPVSSSTPVYVVTSFVSAPPAPEPPAPEPPPEPTKVTVQSLSPAKEVVSSPGSSPRSSPRPEGTTLRQGPPQKPYTFLEEKARGRFGVVRACRENATGRTFVAKIVPYAAEGKRRVLQEYEVLRTLHHERIMSLHEAYITPRYLVLIAESCGNRELLCGLSDRFRYSEDDVATYMVQLLQGLDYLHGHHVLHLDIKPDNLLLAPDNALKIVDFGSAQPYNPQALRPLGHRTGTLEFMAPEMVKGEPIGSATDIWGAGVLTYIMLSGRSPFYEPDPQETEARIVGGRFDAFQLYPNTSQSATLFLRKVLSVHPWLSRPSSCLSVCHKEIKMASS

SEQ ID NO: 160005 - protein, 3267 aa, Artificial Sequence
  derived and/or modified sequence
MQKARGTRGEDAGTRAPPSPGVPPKRAKVGAGGGAPVAVAGAPVFLRPLKNAAVCAGSDVRLRVVVSGTPQPSLRWFRDGQLLPAPAPEPSCLWLRRCGAQDAGVYSCMAQNERGRASCEAVLTVLEVGDSETAEDDISDVQGTQRLELRDDGAFSTPTGGSDTLVGTSLDTPPTSVTGTSEEQVSWWGSGQTVLEQEAGSGGGTRRLPGSPRQAQATGAGPRHLGVEPLVRASRANLVGASWGSEDSLSVASDLYGSAFSLYRGRALSIHVSVPQSGLRREEPDLQPQLASEAPRRPAQPPPSKSALLPPPSPRVGKRSPPGPPAQPAATPTSPHRRTQEPVLPEDTTTEEKRGKKSKSSGPSLAGTAESRPQTPLSEASGRLSALGRSPRLVRAGSRILDKLQFFEERRRSLERSDSPPAPLRPWVPLRKARSLEQPKSERGAPWGTPGASQEELRAPGSVAERRRLFQQKAASLDERTRQRSPASDLELRFAQELGRIRRSTSREELVRSHESLRATLQRAPSPREPGEPPLFSRPSTPKTSRAVSPAAAQPPSPSSAEKPGDEPGRPRSRGPAGRTEPGEGPQQEVRRRDQFPLTRSRAIQECRSPVPPPAADPPEARTKAPPGRKREPPAQAVRFLPWATPGLEGAAVPQTLEKNRAGPEAEKRLRRGPEEDGPWGPWDRRGARSQGKGRRARPTSPELESSDDSYVSAGEEPLEAPVFEIPLQNVVVAPGADVLLKCIITANPPPQVSWHKDGSALRSEGRLLLRAEGERHTLLLREARAADAGSYMATATNELGQATCAASLTVRPGGSTSPFSSPITSDEEYLSPPEEFPEPGETWPRTPTMKPSPSQNRRSSDTGSKAPPTFKVSLMDQSVREGQDVIMSIRVQGEPKPVVSWLRNRQPVRPDQRRFAEEAEGGLCRLRILAAERGDAGFYTCKAVNEYGARQCEARLEVRAHPESRSLAVLAPLQDVDVGAGEMALFECLVAGPTDVEVDWLCRGRLLQPALLKCKMHFDGRKCKLLLTSVHEDDSGVYTCKLSTAKDELTCSARLTVRPSLAPLFTRLLEDVEVLEGRAARFDCKISGTPPPVVTWTHFGCPMEESENLRLRQDGGLHSLHIAHVGSEDEGLYAVSAVNTHGQAHCSAQLYVEEPRTAASGPSSKLEKMPSIPEEPEQGELERLSIPDFLRPLQDLEVGLAKEAMLECQVTGLPYPTISWFHNGHRIQSSDDRRMTQYRDVHRLVFPAVGPQHAGVYKSVIANKLGKAACYAHLYVTDVVPGPPDGAPQVVAVTGRMVTLTWNPPRSLDMAIDPDSLTYTVQHQVLGSDQWTALVTGLREPGWAATGLRKGVQHIFRVLSTTVKSSSKPSPPSEPVQLLEHGPTLEEAPAMLDKPDIVYVVEGQPASVTVTFNHVEAQVVWRSCRGALLEARAGVYELSQPDDDQYCLRICRVSRRDMGALTCTARNRHGTQTCSVTLELAEAPRFESIMEDVEVGAGETARFAVVVEGKPLPDIMWYKDEVLLTESSHVSFVYEENECSLVVLSTGAQDGGVYTCTAQNLAGEVSCKAELAVHSAQTAMEVEGVGEDEDHRGRRLSDFYDIHQEIGRGAFSYLRRIVERSSGLEFAAKFIPSQAKPKASARREARLLARLQHDCVLYFHEAFERRRGLVIVTELCTEELLERIARKPTVCESEIRAYMRQVLEGIHYLHQSHVLHLDVKPENLLVWDGAAGEQQVRICDFGNAQELTPGEPQYCQYGTPEFVAPEIVNQSPVSGVTDIWPVGVVAFLCLTGISPFVGENDRTTLMNIRNYNVAFEETTFLSLSREARGFLIKVLVQDRLRPTAEETLEHPWFKTQAKGAEVSTDHLKLFLSRRRWQRSQISYKCHLVLRPIPELLRAPPERVWVTMPRRPPPSGGLSSSSDSEEEELEELPSVPRPLQPEFSGSRVSLTDIPTEDEALGTPETGAATPMDWQEQGRAPSQDQEAPSPEALPSPGQEPAAGASPRRGELRRGSSAESALPRAGPRELGRGLHKAASVELPQRRSPSPGATRLARGGLGEGEYAQRLQALRQRLLRGGPEDGKVSGLRGPLLESLGGRARDPRMARAASSEAAPHHQPPLENRGLQKSSSFSQGEAEPRGRHRRAGAPLEIPVARLGARRLQESPSLSALSEAQPSSPARPSAPKPSTPKSAEPSATTPSDAPQPPAPQPAQDKAPEPRPEPVRASKPAPPPQALQTLALPLTPYAQIIQSLQLSGHAQGPSQGPAAPPSEPKPHAAVFARVASPPPGAPEKRVPSAGGPPVLAEKARVPTVPPRPGSSLSSSIENLESEAVFEAKFKRSRESPLSLGLRLLSRSRSEERGPFRGAEEEDGIYRPSPAGTPLELVRRPERSRSVQDLRAVGEPGLVRRLSLSLSQRLRRTPPAQRHPAWEARGGDGESSEGGSSARGSPVLAMRRRLSFTLERLSSRLQRSGSSEDSGGASGRSTPLFGRLRRATSEGESLRRLGLPHNQLAAQAGATTPSAESLGSEASATSGSSAPGESRSRLRWGFSRPRKDKGLSPPNLSASVQEELGHQYVRSESDFPPVFHIKLKDQVLLEGEAATLLCLPAACPAPHISWMKDKKSLRSEPSVIIVSCKDGRQLLSIPRAGKRHAGLYECSATNVLGSITSSCTVAVARVPGKLAPPEVPQTYQDTALVLWKPGDSRAPCTYTLERRVDGESVWHPVSSGIPDCYYNVTHLPVGVTVRFRVACANRAGQGPFSNSSEKVFVRGTQDSSAVPSAAHQEAPVTSRPARARPPDSPTSLAPPLAPAAPTPPSVTVSPSSPPTPPSQALSSLKAVGPPPQTPPRRHRGLQAARPAEPTLPSTHVTPSEPKPFVLDTGTPIPASTPQGVKPVSSSTPVYVVTSFVSAPPAPEPPAPEPPPEPTKVTVQSLSPAKEVVSSPGSSPRSSPRPEGTTLRQGPPQKPYTFLEEKARGRFGVVRACRENATGRTFVAKIVPYAAEGKRRVLQEYEVLRTLHHERIMSLHEAYITPRYLVLIAESCGNRELLCGLSDRFRYSEDDVATYMVQLLQGLDYLHGHHVLHLDIKPDNLLLAPDNALKIVDFGSAQPYNPQALRPLGHRTGTLEFMAPEMVKGEPIGSATDIWGAGVLTYIMLSGRSPFYEPDPQETEARIVGGRFDAFQLYPNTSQSATLFLRKVLSVHPWSRPSLQDCLAHPWLQDAYLMKLRRQTLTFTTNRLKEFLGEQRRRRAEAATRHKVLLRSYPGGP

SEQ ID NO: 160006 - DNA, 9675 bp, Artificial Sequence
  derived and/or modified sequence
atgcagaaggctagaggcactaggggggaagacgccggaacccgagcaccgccatctccaggggtgcccccaaaaagagccaaggtcggcgcagggggtggggcccctgtggccgtggctggagcgcctgtgtttcttcgcccgttaaaaaatgccgcggtttgtgctggcagcgacgtgcggctccgggtggttgtctccgggacacctcagccaagccttcggtggttcagggacgggcagctgctgccagctcctgctcccgagccatcatgtctgtggttgaggcgctgtggcgcccaggacgccggggtttatagctgcatggctcagaatgaacgtggaagagcgagttgcgaggccgttttaaccgtgctagaggtcggagattcagagaccgccgaagatgacatatccgacgtgcagggtactcaacggcttgagctacgggatgatggcgctttcagcacccccacaggcgggtccgacacgttggtcggtacctctctcgacaccccccccacgagtgtcaccggcacttctgaggaacaggtgtcatggtggggcagtggccagacggtgctcgagcaagaagccgggtccggtggaggaactcggagactgcccgggtctccccggcaggctcaagcaacgggtgccgggccacgccacttgggcgttgagcctctcgtaagggccagtcgagccaaccttgtgggggcttcatggggatccgaggattcgttgtcagtggcgagtgacctctatggaagcgctttttccctgtacaggggacgtgccttgtctatccacgtttctgtcccccaaagcggtctgaggagagaggagcccgatctgcagcctcagctagcgtccgaggctccgcggagaccggctcaaccaccgccctctaagtctgcattactgccccccccatcgcctcgcgttggaaagcggtcacctcccggaccgcccgcgcaaccggcagctacaccgacttcccctcacaggagaacccaagaacccgtgcttcccgaagacactacgactgaagaaaaaagaggaaaaaagagcaagtcaagcggccctagcctcgcagggacagccgagagccgtccacaaacacctctcagcgaggctagcgggcgcctgtcggctctgggaaggtccccgcgattagtgagggctggctccaggatcctggacaagctgcagttcttcgaggagagaaggcggagcctggaaaggagcgatagcccccctgctcccttacggccatgggttcctctgagaaaggctcgtagtctagaacagcctaagagcgagaggggtgctccatggggtactccgggtgcaagccaggaggagctacgggcacctggctccgtggcagaacggcggagattgttccagcaaaaagccgctagcctcgacgaacggactcgtcagcggtcaccagcctccgacttggagttgcgatttgcccaggagcttgggagaatccgacggagtaccagtagggaagaactggtccgtagtcacgagagcttgagggccacacttcagcgggctccatcaccaagagagcctggcgaacctcctttgttcagtcgacctagtactcctaaaacctctcgagctgtttccccagccgccgctcagcctccatctccatctagtgccgagaaacctggtgatgagccagggcgccccaggagtcggggcccagcggggcgcacagagccaggagagggcccccagcaggaagtgagacgcagagatcagtttcccctgacgagaagtagggccatccaggagtgcagatccccagttcccccccctgccgctgacccacctgaggcaaggactaaggcccctccaggacgcaagcgtgagccccccgctcaggcggtgaggttcctgccctgggctacacccggcctggagggcgcagctgtcccacagactctggaaaaaaacagggccggtccggaggctgagaaacgcctgcgacgtggtcctgaggaggatggcccatggggcccatgggatcgacggggcgccagatctcaaggcaaaggccgcagagcccggccaactagcccagagctggagtcgtccgatgatagttatgtgagcgccggagaagaacctctagaggcacctgtttttgaaattccacttcagaacgttgtggtggcacccggcgccgacgtgctcctcaagtgtataattaccgcaaaccctccccctcaggttagttggcacaaagatggctcagcactgcgcagtgagggcagactgctgctgcgcgcggaaggtgaacgacacacacttctgttgcgagaagctagagcagctgatgccgggtcctacatggctaccgccaccaacgaattgggccaagcaacctgcgctgccagtctgactgttagacctggtgggtctacctcaccctttagcagtcctatcacgtccgatgaggaatacttgagcccacccgaggaattccctgagcccggcgaaacatggccgcgcacacctactatgaaaccaagccccagccaaaaccggcgctccagtgacacagggagcaaagcaccacccacattcaaggtgagtctcatggaccagtcagtccgggagggacaggatgttatcatgagtatcagggtacagggggagccaaagccggtggtctcttggctgagaaaccggcagcctgtccggccagaccagagaaggttcgctgaggaagctgaaggcgggctatgccgtctgcggatcttggccgctgagagaggagatgcgggattctacacatgtaaagccgtgaatgagtacggtgctagacagtgtgaagcaaggctcgaggtccgggctcaccccgaaagcagatctcttgctgttctcgcccctcttcaggatgtggatgtgggcgccggggagatggccctcttcgagtgcctcgtagctggaccaaccgatgtggaagtggattggctatgccgcggacggttgctacagcccgcgctgttgaagtgtaaaatgcatttcgatggccgcaagtgtaagctcttattaacaagtgtgcatgaggacgacagcggcgtgtatacatgcaaactgagtacggcaaaggacgagctgacctgttctgcccggcttacggtgcgaccttcattggctccgttgtttactcgtttgctagaggatgtcgaagtcctggaggggcgggctgccagattcgactgtaaaatttccgggacccctcctccagtggtgacgtggacccatttcgggtgtccgatggaagagagcgagaatctgcgattgcgacaggatggcggtctgcacagcctccacatagcccacgttgggagtgaagacgagggcctgtacgcggtaagtgccgtgaatacccacggtcaagcacactgctccgcccagctgtacgtggaggagcccagaacagccgcttccgggccctcatccaagcttgaaaagatgccatcgataccggaggaaccagagcagggtgagctcgagaggttatccatccccgacttcctccgcccactgcaggacctggaggtcggacttgccaaggaagcaatgctcgaatgccaagtgactggactcccgtaccccaccatctcttggtttcacaacgggcaccggattcagtcatctgacgacaggaggatgacccagtaccgggacgtccataggctggtttttccggccgttggcccgcaacacgccggcgtctacaagtctgtgattgccaacaagctgggcaaggcagcttgttatgctcatctttacgtcactgacgtcgttccgggcccgcccgacggcgccccccaggtggttgcagtcacaggacggatggttaccttgacttggaacccaccacggagtctcgacatggccattgatcctgactctctgacctacacagttcaacatcaggtgctgggaagcgaccagtggacagctttagtcactggacttagagagcccggatgggccgctacgggtctccgcaagggcgtgcagcacatatttcgcgtattgagcaccacagttaaatcgagtagtaaaccttcccctccatcagagcccgtgcagctcttggaacatggtcctaccctagaagaggccccagccatgttggacaagccagatattgtctatgtcgtggaggggcaaccagcgtctgtcactgtgaccttcaatcacgtggaggcccaggtggtgtggagatcctgcaggggtgccctgttggaagcaagagccggagtgtatgaactgtcgcaacccgacgatgaccagtattgtcttagaatctgtagagtctcccggcgagacatgggcgctcttacctgtacagcccgcaataggcacgggactcaaacctgtagcgtgacactggaattggccgaagcgccacgcttcgagtccatcatggaggacgtggaagttggagccggtgaaactgcccgattcgcagtggtcgtagaaggaaagcccctccccgacataatgtggtataaagacgaagtcctcctgacagaaagcagccacgtctccttcgtgtacgaggaaaatgaatgctccctggtcgtactgtctaccggggcccaggatggcggggtgtacacatgcactgcacagaacctcgccggagaggtgtcttgcaaagcagagctggccgtccacagcgcccagaccgctatggaagttgaaggcgtaggcgaagatgaggatcatcggggacggcggctgtctgacttctatgacatccatcaagagattgggagaggcgctttctcctaccttagacgcattgtggagcgcagctctggcctggagttcgctgctaagtttatcccttcccaagccaaacccaaagccagtgcaaggcgggaagccagacttcttgctagactgcaacatgattgtgttctctactttcacgaagccttcgagcgacgaaggggcctcgtcattgtcacggagctctgcaccgaagaacttctggagagaatcgcccggaaacctactgtctgcgaatcagagattagggcttacatgagacaggttctggagggtatccattaccttcaccagtcccatgtactgcaccttgatgtgaaacccgagaacctgctcgtctgggacggagcagccggcgaacagcaggtgagaatatgcgacttcggaaacgctcaggagctcactcccggggaaccacagtattgtcagtatggcacacccgagttcgttgcccccgagatcgttaatcagtcccccgtttctggagtgaccgacatctggcccgtgggtgtggtagcctttctttgcctcactggcatcagcccatttgtcggagagaacgacagaaccaccttgatgaacatcagaaactacaacgtggcattcgaggaaacgacattcctctccctttcccgcgaagcgcgagggttcctgattaaggttttagtccaggataggttgagacccacagctgaggaaaccctcgagcatccttggttcaagacccaggcaaagggcgcagaagtgtccaccgaccatctcaaactctttttaagccgtcggaggtggcaacggtctcagattagttacaagtgtcacctggtgcttcgtccaattccggaactgctgagggccccacccgagcgagtgtgggttacaatgcccaggcgcccacctccttcaggaggcctgtcctcctctagcgactccgaggaggaggaactcgaagagctcccttcggtccctcgccccctacagcctgaattcagtggaagcagggtatcacttaccgacattcccactgaggacgaagccttaggtacaccagaaacaggcgccgccacacccatggactggcaggagcaaggacgggcaccttctcaggatcaggaagccccctcgccagaagctctgccttcacccggtcaggaacctgcagccggtgcctcccctagacgaggcgagctgcgtcgcggctcctctgctgagtctgcacttccacgagctggcccccgagagctagggagaggtctccacaaggcagcttcagttgagctccctcaacgccgatctccttctcccggggctacaaggctcgcaagaggagggttgggagagggcgagtacgcacagcgcctccaggcgcttagacagcggctgctccgcgggggtcccgaggatggaaaagtctctggactacgcgggcccctccttgagtcattaggcgggcgcgctcgtgatccaaggatggctagggcggcctcatccgaggccgctccgcatcaccaaccgccgctggaaaatcgtggcctgcaaaaatcatcctcctttagccagggagaggccgagcctaggggaaggcacagaagggcgggggctcctctggagatccctgttgctaggctcggcgcccgcagactgcaagagtctcccagcctctccgccctttcagaggcccagccctcttcccccgcccgcccaagtgccccaaaaccatctacacccaagtcagccgagccctctgctactacaccatctgacgctccacagccgccagcccctcaacccgctcaagataaggcaccagaaccccgacctgaaccagttcgcgcctccaagcccgccccgcccccgcaggccctccagacgctcgccttaccccttaccccttacgcccagattatacaatcgctgcagttaagcgggcacgcccaggggccctcacagggccccgcagcaccgccctcggagcccaaaccgcacgcagcagtcttcgctagggtggcatctccgccgccgggagcccccgagaaacgggttccatctgccgggggaccccctgttctggctgagaaagctagggtgcccactgttccccccaggcctggcagtagtcttagttccagcattgagaatctggaatctgaagccgtttttgaggccaagtttaagcgttctagggagtctcccctgagcctcggccttcggctgctgtctagaagcagatctgaggaacgagggcctttcaggggcgccgaggaagaagacggcatctaccggccatctccggcaggtaccccattggagctggttcggcggcccgagcgcagtagaagcgtgcaggacctccgagctgtgggcgagccaggcctggtgagacgactgagcctctccttaagtcagcgcctgcgtagaaccccccctgcccagaggcatcctgcctgggaggctcggggcggcgacggtgaatcttcagaaggggggtcctctgcgagggggtccccagtacttgccatgcggagacgtctcagcttcactcttgagaggctttcaagccggctccagaggtccggcagctccgaagacagcggcggcgcctcgggccgttcaaccccacttttcggtagactcaggcgtgctacgagcgaaggagagtcactgcggcggctcggtctacctcacaaccagcttgcggcccaggccggcgcgacgaccccatcagctgagtctcttggttctgaagcttctgccacttctggcagctcagctccaggagagtccaggagcagactgcgctgggggttttccagacctagaaaagacaagggcttatccccgcccaacctgagcgcatcagtgcaggaagagctgggacaccagtatgtccgatccgagtcggacttccctccagtgttccatataaaattgaaggatcaagttctgctcgaaggggaagccgcaacgctgttatgtttgccagcggcttgtcccgcaccccacataagttggatgaaggataaaaagtctctgcgctcggaacccagtgtgatcatcgtctcctgcaaggatgggcgacagctgctctctattcccagagctgggaaaagacatgctggtctgtacgaatgcagcgccactaatgtactgggatcgatcactagctcctgtacggtggcagtagcccgggtgcccggaaagctggcacccccagaggtgccacagacctaccaagacacagctttggtgttgtggaagccgggcgattctcgtgccccctgtacctatacgctcgaaaggagggttgacggggaatcagtttggcaccctgtgtccagtggcatccctgactgttattacaacgttactcatctcccagtgggggttaccgttcgctttcgtgtggcgtgcgctaatcgggctggccaaggccctttcagtaactcctcggagaaggtgttcgtgcgtgggactcaggactcttcggctgtgccgtcagccgctcaccaggaagctcctgtcacttcacgaccagcccgtgcgcgacccccagactcgcccacctctctggctccccccctcgctcctgccgctcccaccccccccagtgtgactgtgagcccttcatctcctcctacccctccttcccaagctctaagcagcttgaaggccgtgggacccccaccacagacaccgccgagacgccatcgggggcttcaagctgcccgcccagccgagcccaccctgccgagcactcacgtgaccccaagtgagccaaagccatttgtgctggatacaggtacaccaatccccgcctcaacgccacagggggttaagcctgtgtcttctagcaccccggtgtatgtggtcaccagttttgtttctgccccaccggcaccggaacctccggccccagaaccacctccggaacccaccaaagtgaccgttcaaagcctctctcctgcgaaggaagtggtgagcagcccgggctctagccctaggagcagtccaagaccagagggtaccacactccgtcagggaccaccccagaaaccctacacctttctggaagaaaaagcgcgtggtcggttcggtgtggtgcgcgcctgtcgcgagaatgctactggccggacttttgtggccaagatcgtcccatatgcagcagaaggcaaaaggagggtcctgcaggaatacgaggtcttgcgcaccctccaccacgagcgaatcatgtccttgcacgaggcttacatcaccccacgctacctggtgctaatcgcggagagctgtggcaaccgggaactcctttgtggattatccgaccgcttccgttatagtgaagacgacgtcgccacctacatggttcaattgctgcagggcctggactatctacatggtcatcacgtcctgcacttggatattaagcccgacaatttactgctggcccccgataatgcattgaagatcgtggattttgggtctgcacagccgtataacccacaggccctccgcccgcttggccaccggactggaactttggaattcatggcgccggagatggtgaagggtgaaccgatcggtagtgccacagacatctggggagcaggtgtcctcacgtatattatgctgagcggccgctcccctttttacgagcccgatccacaggagaccgaggcgaggatcgttggcggtcgtttcgatgcttttcagctgtatcctaatacttctcaaagcgcgacactatttctgcgcaaggttctctccgtacacccatggctaagcagaccctcgagttgtctgtccgtgtgtcacaaagagatcaagatggcctccagctag

SEQ ID NO: 160007 - DNA, 9804 bp, Artificial Sequence
  derived and/or modified sequence
atgcagaaggctcgcggaacaagaggagaggatgcgggcacgcgcgcaccaccaagtccgggggttccgccaaagcgagccaaggtaggcgcaggaggcggagcccccgtggctgttgcaggggcccctgtgtttctgaggccactgaagaacgcagccgtctgcgctggcagcgatgtccgcctgagggtggtggtttccggtacccctcagccgtcactccgctggttccgcgacggacagcttctgccggcccctgcacccgaaccttcctgcctatggttgcgccgttgtggcgctcaagacgctggtgtgtattcctgcatggcccagaatgagcgggggagagccagctgcgaagctgtgttaacagtgctggaggtgggggactctgagaccgcggaagacgatattagtgatgttcaaggcacacaacgcctggaactgagggacgatggcgccttttccacgccaaccggaggaagtgacaccctggtcggtacctctctcgacacaccaccaacatctgttacagggacctccgaggaacaggtatcatggtgggggtccggccaaacagtactcgaacaagaagccggctcagggggaggcacccggagacttcccggttcaccccgtcaggcacaggcgacaggtgccggtccaaggcacctcggagtggagcccctcgtaagggccagccgagctaacttggttggtgctagctggggctcggaagactctctaagcgtggcatccgatctttacgggtctgctttctccctctaccggggtagagcactctccatccacgtatcggttccacagtctggtctgagacgggaagagcccgatctgcagcctcagctggcctcagaagcacccaggaggccagcgcagccacccccctctaagtccgctctcctcccacctccaagccctcgggtgggcaaaaggtctccacccggccccccagcccaacctgctgctactccaactagcccgcatcggcgcacgcaggagcctgtgctaccagaggataccacaaccgaagaaaaacgcgggaagaagtctaagagctcaggtccttctctggcgggaaccgcagaatccagaccccaaactcctctctccgaagcaagcggcagactctcggccctgggacggtctccccgcctggtacgagcaggctctagaattctggacaagcttcaattcttcgaagaacgaaggaggagcctagagcggtctgacagccccccagctcctctcagaccatgggttcccttgcgaaaggccagatccttggagcagcctaaaagcgagcgaggtgcaccgtggggtacccctggagcatctcaggaagagctccgggctcccgggagtgtggcagagcgccgaaggttgtttcaacagaaagcagcttctctcgatgaacggacacggcaacggagtccggcgtctgacctggagctgaggttcgcccaggagctcgggcgaattagacgatccacatccagagaggagctggtaaggtctcatgagtcattaagggcaaccttgcagcgcgcgcctagtcctcgcgaaccaggggagccacctttattctcacggccttccacacctaagacatcccgcgccgtttctcccgcagcggcccagcccccaagcccttcctcagctgagaagcccggcgacgagcccggccgtccaaggtcccggggacccgccgggcgcaccgaacccggagagggcccccagcaagaagtcaggagacgggaccagttcccactaacgaggagtcgggcaatccaggagtgccggtctccagtgcccccccccgcggccgacccccccgaagccaggacaaaggcaccaccaggccggaagcgtgaacctcccgcacaggccgtaaggttcctgccttgggccacacccggcctggagggtgccgctgttccacagacgctggagaagaatagagccggtcctgaagcagagaaacgccttagacgcggcccagaggaggacggaccctggggtccctgggatcgccggggtgctcgctctcagggcaaaggccgcagggctcgcccgacgagcccagaactggagagttctgatgacagttacgtttctgctggtgaagaaccactcgaggctccagtcttcgaaattcccctgcaaaatgtggtggtagcacccggagcagacgtgcttttaaaatgcattatcaccgcgaaccctcctcctcaggtatcctggcataaagatggctccgccttgaggtctgagggcaggctgttacttagggcagaaggcgagcggcacacactgctgcttcgggaggcacgggcggccgatgcaggatcttacatggctacagccacaaatgaacttggccaggctacctgcgcggcttctctgactgttcggcccgggggatcaacgtctcctttctcctcgcccatcacttctgacgaggagtatctctcgcctcctgaggagtttcctgagcctggagaaacttggcctcggactcccacaatgaaaccttctccttctcagaatagaaggagctccgatacaggaagcaaagcccctccaacttttaaagtgagtcttatggaccaatccgtgagagaagggcaggatgtcataatgtcaattcgggtgcagggggaaccaaaacctgtggtgagctggctgcgcaatcgccagcccgttaggccggaccagcgcaggtttgccgaggaggccgagggcggcttgtgtaggctccgcatactggccgccgaacggggcgatgctggtttctacacatgcaaagctgtaaacgagtacggtgctcggcagtgcgaggcacgcctcgaggttcgcgctcatccagagtcccggagcctagccgtgcttgccccactgcaggatgtggacgtaggcgccggggagatggccctcttcgaatgccttgtggctggacccacggacgtagaagtggactggctctgccgcggcagacttctgcagccggctcttcttaagtgtaagatgcattttgacggacggaagtgcaagctgttactgacatcagtccatgaggacgattcaggcgtttatacgtgcaagctgtcaactgccaaagacgagctgacatgctccgcacggctgaccgttagaccatcacttgcaccacttttcacacgactgctagaagacgtcgaggtgctcgaggggcgcgcagccagattcgattgcaagatttctgggacgccccctcctgtcgtgacctggactcacttcggctgtccaatggaagagtctgagaacctgaggctgagacaggatggtggcctgcatagtcttcacatagcacatgtcggatcagaggacgagggactgtatgcggtatccgccgtgaatacgcacgggcaggcccactgtagcgctcagctatacgtggaggagccaaggaccgctgcttctggaccatccagtaagctcgaaaagatgccttctattccggaagaacccgagcagggggaactggagcgtctgagcatccccgattttctgcggcctctgcaggacttggaagtcggtttggcaaaagaggctatgttggagtgccaggtgaccggattaccgtatcccacgatttcctggtttcataacgggcaccggattcagtctagcgacgatagacggatgacacagtatcgggatgtgcatcggctggtgtttcctgcagtaggcccacaacatgccggcgtgtacaagtcagtcattgcgaataaactgggcaaagctgcgtgctatgctcacctttatgtcacagatgtagtccctgggcctcctgacggggccccccaggtggtagctgtaaccggcaggatggtcacgctaacctggaacccgcctaggtctttggatatggcaattgaccccgactctctcacctataccgttcagcaccaggtattggggtcagaccaatggactgcgttagtgactggcctccgcgagccgggctgggcagcaacaggactaaggaagggtgttcagcatatttttagggtgctcagcaccactgtaaagagctcctctaaaccatcgccaccgtccgagcccgtgcaattactcgagcatggccccacactggaagaagccccagcaatgctggacaagcctgacatcgtgtacgtggtggaaggtcaaccggcctcggtgaccgttacgttcaatcacgtcgaggcccaggttgtgtggcggagctgtcggggggctctgctggaggcccgcgccggagtgtatgaactatcccagccagatgatgatcagtactgtctgagaatttgccgcgtgtcccgtcgcgatatgggtgccctgacttgtaccgcccgcaacaggcacgggacacagacatgtagcgtgacactcgaactagctgaggcccctcgattcgaatccatcatggaggatgtagaagtcggggcaggggagacagcccgtttcgccgtcgtggtggagggaaagcctctcccggacataatgtggtataaagacgaggttctgctcactgagagcagccacgtatctttcgtctacgaagagaatgaatgctctctggtggttttatccaccggcgctcaggacgggggcgtctatacatgtacagcacaaaatctcgcaggggaggtgtcatgtaaggccgagctcgctgtacactcagctcagaccgccatggaggtagagggagtaggcgaggacgaggaccatcgcggccggaggcttagtgacttttatgatatccaccaagagatcggccggggcgcattctcgtatctcagacgaatagttgaaaggtcgagcggcctcgaatttgctgccaagttcatcccaagccaggcaaagccaaaagcgagcgcacgccgagaggcgagacttctcgccaggctccagcacgattgcgtcctttactttcatgaggccttcgaaagacggagaggcttagtaattgtgacagagctgtgtactgaggagctgctggagagaatcgctcgcaaacctacagtatgtgaaagcgagatacgcgcctatatgcgccaggtgctagagggcattcactacctccaccagtcccacgtcctgcatctggatgtaaaaccggaaaacctgctggtttgggatggcgcagccggggagcagcaggtccgaatctgtgattttggcaacgcccaggagctgacccccggtgagccccagtattgtcagtacggcacgcctgaatttgtggccccggagatagttaatcagagtccggtgtctggggttactgatatctggcccgtgggggtggttgcgtttctatgcctcactggcattagtcctttcgtgggcgagaacgaccggacaacgttaatgaatatccgaaattacaatgtcgcgttcgaggaaaccacgtttctgtctctctcgagagaggcacgcggcttcctcattaaagttctggttcaggatcgcctacggcccaccgcagaggagaccttggagcatccctggttcaaaacacaagctaagggtgccgaggtatcgacagatcacctgaagctgttcctgtctcggcgtcgctggcaacgaagtcaaatcagttacaagtgccaccttgtcctccgaccaatacccgaactcctgcgagccccgccagagcgagtgtgggtgacgatgccacggaggccaccaccgtcgggtggcctctcttccagctctgatagcgaggaggaggaacttgaggaactcccatccgtaccccggccactccagcccgaattctctggcagccgggtttcgctgaccgacatccctactgaggatgaggccctgggcacaccggagacaggcgccgctacccctatggattggcaagaacaggggagggcgcccagtcaagatcaagaagctccgagtcctgaggctctgccctccccaggacaggaacccgctgccggcgcatctcctagacggggggagctgaggcggggtagttccgcagagagtgctctgcctcgcgctggacccagagagttaggccggggccttcataaggcggcttcagtagagttaccccagagacggagtccttcccctggcgccacccgcctggctcgggggggcctaggcgagggcgaatacgcgcagcgtcttcaggctcttcgccaaagactcctgagaggtggaccagaagatgggaaagtgagtggcctgcgcgggccgttgctcgaatctctaggcgggagagctagagatccccggatggccagagcggcaagctcagaagccgctcctcaccaccagccaccactcgagaaccgaggacttcagaaatcttcgtctttttcccagggcgaagccgagcctaggggccggcaccgaagagcgggtgcccccctggaaatacctgtcgctcgcctgggcgcaaggcgcctccaagaatcaccttccctgagtgccttgtcggaggctcagccctcctcaccagcccggccctcagcccctaagccctctactcccaaaagcgcagaaccaagcgccactacaccctctgacgccccccaaccaccggctccccaaccagctcaggacaaggctcccgaaccccggcccgaacccgtcagggcttctaagcctgcgccacctccacaggcactgcagactctggcccttccactaaccccttacgcccagatcatacagagcttacagctgagcggccacgcccaaggaccttctcagggaccagccgccccgccctctgagcctaaaccacatgcagccgtgtttgccagagtcgcgagcccgccacccggcgcccctgaaaagcgcgtcccatcggccggtggaccaccggtcctcgctgagaaagctagggtgccgacagtcccacctagaccgggatcctccttgagcagcagcattgagaacctggagtccgaagcagtgtttgaagctaagtttaaacgctcgagagaatctccactttcactggggctccgtttgttgtcccgttctagaagcgaggagcggggaccgttccgcggtgctgaggaagaggacggcatctatcgaccttcccctgccggcacgcctcttgaactggtccggcggcctgaaagatccaggtccgtccaagatttgagagcagtaggagaacccggcctggtacgccggctcagtctgagcctcagccaaaggctgcgcaggaccccccccgcgcaaagacatccggcatgggaggctcgagggggtgatggcgaatcaagcgagggagggagcagcgcgaggggaagtcctgtgctggccatgagaaggagactctctttcacactggaacgactttcctcccggctgcagcggagcggctcttctgaggactctggaggggcttctggaagatcgaccccgctctttggtaggttacgccgtgcaacttccgaaggcgagtctctgcgccggctgggcctcccccacaaccaattagccgctcaggcaggcgccacaaccccctccgccgaaagcctcgggtcggaggcaagtgccacttcaggttccagcgctcctggagagtctcgctctcggctccggtggggtttctcaaggccacgaaaagataagggactgtcccctcccaacctgtccgccagcgtgcaagaagaactgggccaccagtacgtcagatcagagtctgattttccacctgttttccacatcaaattgaaagaccaggttctgttggagggggaagctgcgactctgctctgtcttccagcagcctgccccgcccctcacatcagctggatgaaggataagaaatctttgaggtccgagccgtctgtaatcatcgtgtcttgtaaggatggccgacagctcctctctattccgcgtgctggcaaaaggcacgcaggactttatgaatgctcagctacaaatgtgctaggcagcataaccagctcttgtacggtggcagttgcccgggtccctgggaagctcgcaccccctgaggtgccccagacctatcaggataccgccctcgtgctgtggaaacctggggacagcagagctccttgtacctacacacttgagagaagagtggacggagagtctgtgtggcacccggtatccagcggcatccccgactgttattataatgttacacacctgccagtcggcgtcaccgtcaggtttagagttgcctgcgctaatagagcagggcaggggccattcagcaattccagcgaaaaggtttttgtgcgcgggacacaggattccagcgcagtgccctccgcagctcatcaggaggcccccgtaacctcgcgtcctgctagagccagaccacctgattctcccacaagcctggcccctcccctggcacccgctgcccctacaccaccaagtgtgacagtctctccatcaagcccccccaccccacctagccaggctctgtcttcactgaaagcggtcggtcctccgccccagacacccccacggcgccacaggggcctccaggcagcccggccggccgaacccaccctcccgagcacacacgtaactccgtccgagccgaaacccttcgtgttggacactggaacacccatcccggctagcacaccccagggagtgaaaccagtgagctccagcacgcctgtctacgtggtgacctcttttgtctccgcaccccccgctccggagccacccgcgccggagccgcctccagaaccaactaaagtgaccgtccagagcctctccccagccaaagaagtggtgtcctccccgggaagctctcctagatccagtccaaggcctgagggtacaacattgcgccagggccctcctcagaagccttacactttcctcgaggagaaggcacgggggcggttcggggtcgtgcgtgcttgtagggagaacgctacaggccgcacttttgtggccaagatcgtgccttatgccgccgaggggaaacgccgcgtactacaagagtacgaggtcctccggacattacatcatgaaaggattatgtcgctccatgaagcgtacatcaccccccgttatttggtcctcatagccgagtcttgcgggaatcgagaactcctttgtggtctgagcgatcgattcaggtatagcgaggacgacgtcgcgacgtatatggttcagctcttacaaggtctcgactacttgcatggccaccatgtgctccacctagacatcaagcctgataatctgttactggcccctgataatgccttgaaaatcgtggatttcggcagtgctcagccatacaacccgcaagccctacggcccctcggccacagaacgggcaccctcgagtttatggctcctgagatggtgaagggagagcctattggatcggctactgatatctggggcgccggagtgttaacctacatcatgttgtctggcaggtccccattttatgaacctgatcctcaggaaactgaagcaaggatagtgggaggccgcttcgatgctttccaattgtacccaaacaccagccagtccgcgacgctgtttctgcgtaaggtgctctccgtccatccatggtccagaccttctctgcaagattgtctggcccatccatggttgcaagatgcatacttgatgaagctgagacggcagactcttacgtttacaactaacagactgaaggaattcctaggggaacagagacgacgacgcgcagaagcggcaacccgccataaggttttgctcaggtcataccctggcggtccctag

SEQ ID NO: 160008 - DNA, 9675 bp, Artificial Sequence
  derived and/or modified sequence
atgcagaaggcccggggcaccagaggagaagatgctggcacccgggccccacccagccctggggtgccccccaagagggccaaggtgggcgccggcggcggggcccctgtggccgtggccggggcccctgtgttcctgcggcccctgaagaatgctgctgtgtgtgccggcagtgatgtgcggctgcgggtggtggtgtctggcaccccccagcccagcctgcgctggttcagagatggccagctgctgcctgccccagcccctgagcccagctgcctgtggctgcggcgctgtggggcccaggatgctggggtgtacagctgcatggcccagaatgaaagaggccgggccagctgtgaggccgtgctgactgtgctggaggtgggggacagcgagacagcagaagatgacatcagtgatgtgcagggcacccagaggctggagctgagagatgatggagccttcagcacccccactggaggcagtgacaccctggtgggcaccagcctggacaccccacccacctctgtgacaggcaccagcgaggagcaggtgtcctggtggggcagcggccagacagtgctggagcaggaggccggcagcggcggcggcacccggcggctgcccggcagcccccggcaggcccaggccaccggggccggccccaggcacctgggcgtggagcccctggtgcgggccagccgggccaacctggtgggcgcctcctggggcagcgaggacagcctgtctgtggccagtgacctgtatggcagcgccttcagcctgtaccggggccgggccctgagcatccacgtgtctgtgccccagagcggcctgcggcgggaggagccagacctgcagccccagctggccagcgaggccccccggcggcctgcccagcccccacccagcaagagcgccctgctgcccccacccagcccccgggtgggcaagaggagccccccaggccccccagcccagcctgctgccacccccaccagcccccacaggaggacccaggagcctgtgctgcctgaggacaccaccacagaggagaagaggggcaagaagagcaagagcagcggccccagcctggccggcacagctgagagccggccccagacccccctgtctgaggccagcggccgcctgagcgccctgggccgcagcccccggctggtgcgggccggcagccgcatcctggacaagctgcagttctttgaggagaggagaagaagcctggagaggagtgacagccccccagcccccctgcggccctgggtgcccctgaggaaggcccggagcctggagcagcccaagtctgagcggggggccccctggggcacccctggggccagccaggaggagctgcgggcccctggctctgtggccgagaggagaagactcttccagcagaaggccgccagcctggatgagaggacccggcagaggagccctgccagtgacctggagctgcgctttgcccaggagctgggccgcatccgccgcagcaccagccgggaggagctggtgcgcagccatgagagcctgcgggccaccctgcagagggcccccagcccccgggagcccggggagcccccactcttcagccggcccagcacccccaagaccagcagagctgtgtccccagctgctgcccagccccccagccccagcagcgctgagaagccaggagatgagcccggccggcccaggagccggggccctgctggccgcacagagcccggggagggcccccagcaggaggtgagaagaagagaccagttccccctgaccaggagccgggccatccaggagtgccgcagccctgtgcccccacctgctgctgaccccccagaggcccggaccaaggcccctcctggcaggaagcgggagcccccagcccaggccgtgcgcttcctgccctgggccaccccaggcctggagggcgctgctgtgccccagaccctggagaagaacagagctggccctgaggccgagaagaggctgcggcggggccctgaggaggatggcccctggggcccctgggacagaagaggagcccggagccagggcaaaggaagaagagcccggcccaccagccctgagctggagagcagtgatgacagctatgtgtctgctggggaggagcccctggaggcccctgtgtttgagatccccctgcagaatgtggtggtggcccctggagcagatgtgctgctgaagtgcatcatcacagccaaccccccaccccaggtgtcctggcacaaggatggcagcgccctgcggtctgagggccgcctgctgctgcgggcagagggggagcggcacaccctgctgctgcgggaggcccgggctgctgatgctggcagctacatggccacagccaccaatgagctgggccaggccacctgtgccgccagcctgactgtgcggcctgggggcagcaccagccccttcagcagccccatcaccagtgatgaggagtacctgagccccccagaggagttccctgagcccggggagacctggcccaggacccccaccatgaagcccagccccagccagaacagaagaagcagtgacaccggcagcaaggccccacccaccttcaaggtgtccctgatggaccagagcgtgcgggagggccaggatgtgatcatgagcatccgggtgcagggcgagcccaagcctgtggtgtcctggctgaggaaccggcagcctgtgcggccagaccagaggagatttgctgaggaggccgagggcggcctgtgccgcctgcgcatcctggccgctgagagaggagatgctggcttctacacctgcaaggctgtgaatgaatatggagcccggcagtgtgaggcccggctggaggtgcgggcccaccctgagagccgcagcctggccgtgctggcccccctgcaggatgtggatgtgggcgctggggagatggccctgtttgagtgcctggtggccggccccacagatgtggaggtggactggctgtgccggggccgcctgctgcagcctgccctgctgaagtgcaagatgcactttgatggcaggaagtgcaagctgctgctgacctctgtgcatgaagatgacagcggcgtgtacacctgcaagctgagcacagccaaggatgagctgacctgcagcgcccggctgactgtgcggcccagcctggcccccctcttcacccggctgctggaggatgtggaggtgctggagggccgggccgccaggtttgactgcaagatcagcggcaccccacctcctgtggtgacctggacccacttcggctgccccatggaggagagcgagaacctgcggctgcggcaggacggcggcctgcacagcctgcacatcgcccacgtgggctctgaagatgagggcctgtatgctgtgtctgctgtgaacacccacggccaggcccactgcagcgcccagctgtatgtggaggagcccaggacagctgccagcggccccagcagcaagctggagaagatgcccagcatccctgaggagcctgagcagggcgagctggagcggctgagcatcccagacttcctgcggcccctgcaggacctggaggtgggcctggccaaggaggccatgctggagtgccaggtgacaggcctgccctaccccaccatctcctggttccacaacggccaccgcatccagagcagtgatgacaggaggatgacccagtacagagatgtgcaccggctggtgtttcctgctgtgggcccccagcacgccggcgtgtacaagagcgtcatcgccaacaagctgggcaaggccgcctgctacgcccacctgtatgtgacagatgtggtgcccggccccccagatggagccccccaggtggtggccgtgactggaaggatggtgaccctgacctggaaccccccaagaagcctggacatggccattgatcctgacagcctgacctacacagtgcagcaccaggtgctgggcagtgaccagtggacagccctggtgacaggcctgcgggagcccggctgggccgccaccggcctgaggaaaggagtgcagcacatcttccgggtgctgagcaccaccgtgaagagcagcagcaagcccagcccccccagcgagcctgtgcagctgctggagcacggccccaccctggaggaggccccagccatgctggacaagccagacatcgtgtatgtggtggagggccagcctgcctctgtgacagtgaccttcaaccacgtggaggcccaggtggtgtggaggagctgccgcggggccctgctggaggcccgggccggcgtgtatgagctgagccagccagatgatgaccagtactgcctgcgcatctgccgggtgtcccggcgggacatgggcgccctgacctgcacagccaggaacagacatggcacccagacctgcagcgtgaccctggagctggccgaggcccccaggtttgagagcatcatggaggatgtggaggtgggcgctggggagacagccaggtttgctgtggtggtggagggcaagcccctgcctgacatcatgtggtacaaggatgaggtgctgctgacagagagcagccacgtgtcctttgtgtatgaagaaaatgaatgttccctggtggtgctgagcactggagcccaggatggaggagtgtacacctgcacagcccagaacctggccggggaggtgtcctgcaaggccgagctggccgtgcacagcgcccagacagccatggaggtggagggcgtgggggaggatgaggaccaccggggccgccgcctgagtgacttctatgacatccaccaggagatcggccgcggggccttctcctacctgcggcgcatcgtggagaggagcagcggcctggagtttgctgccaagttcatccccagccaggccaagcccaaggccagcgcccggcgggaggcccggctgctggcccggctgcagcacgactgtgtgctgtacttccacgaggcctttgagaggagaagaggcctggtgattgtgacagagctgtgcacagaggagctgctggagagaattgccaggaagcccaccgtgtgtgagagcgagatccgggcctacatgaggcaggtgctggagggcatccactacctgcaccagagccacgtgctgcacctggatgtgaagccagagaacctgctggtgtgggatggagctgctggggagcagcaggtgcgcatctgtgactttggaaatgcccaggagctgaccccaggagagccccagtactgccagtatggcaccccagagtttgtggcccctgagatcgtgaaccagagccctgtgtctggagtgacagacatctggcctgtgggcgtggtggccttcctgtgcctgaccggcatcagcccctttgtgggggagaatgacaggaccaccctgatgaacatccggaactacaacgtggcctttgaggagaccaccttcctgagcctgagccgggaggcccggggcttcctgatcaaggtgctggtgcaggaccggctgcggcccacagctgaggagaccctggagcacccctggttcaagacccaggccaagggagctgaggtgtccacagaccacctgaagctgttcctgagcagaagacgctggcagaggagccagatctcctacaagtgccacctggtgctgcggcccatccctgagctgctgcgggcccctcctgagcgggtgtgggtgaccatgccccggcggcccccaccttctgggggcctgagcagcagcagtgacagcgaggaggaggagctggaggagctgcccagcgtgccccggcccctgcagcctgagttcagcggcagccgggtgtccctgacagacatccccacagaagatgaggccctgggcaccccagagactggagctgccacccccatggactggcaggagcagggccgggcccccagccaggaccaggaggcccccagccctgaggccctgcccagccctggccaggagcctgctgctggggccagcccccggcggggggagctgcggcggggcagcagcgctgagagcgccctgcccagggctggcccccgggagctgggccggggcctgcacaaggccgcctctgtggagctgccccagaggaggagccccagccctggggccacccggctggcccggggcggcctgggggagggggagtatgcccagaggctgcaggccctgcggcagaggctgctgcggggcggcccagaagatggcaaggtgtctggcctgcggggccccctgctggagagcctgggcggccgggcccgggaccccaggatggcccgggccgccagcagcgaggccgccccccaccaccagccccccctggagaacagaggcctgcagaagagcagcagcttcagccagggcgaggccgagccccggggccgccacagaagagctggggcccccctggagatccctgtggcccggctgggcgcccggcggctgcaggagagccccagcctgagcgccctgtctgaggcccagcccagcagccctgcccggcccagcgcccccaagcccagcacccccaagtctgctgagcccagcgccaccacccccagtgatgccccccagcccccagccccccagcctgcccaggacaaggcccctgagcccaggcctgagcctgtgcgggccagcaagccagcccccccaccccaggccctgcagaccctggccctgcccctgaccccctatgcccagatcatccagagcctgcagctgagcggccacgcccagggccccagccagggccctgctgccccacccagcgagcccaagccccacgccgctgtgtttgcccgggtggccagccccccacctggggcccctgagaagagggtgcccagcgctgggggcccccctgtgctggccgagaaggcccgggtgcccaccgtgcccccccggcccggcagcagcctgagcagcagcattgagaacctggagagcgaggccgtgtttgaggccaagttcaagaggagccgggagagccccctgagcctgggcctgcggctgctgagccgcagccgctctgaggagcggggccccttcagaggagctgaggaggaggatggcatctaccggcccagccctgctggcacccccctggagctggtgcggcggcctgagaggagccgctctgtgcaggacctgcgggctgtgggggagcccggcctggtgcggcggctgagcctgagcctgagccagaggctgcggaggaccccaccagcccagaggcacccagcctgggaggcccggggaggagatggagagagcagcgagggcggcagcagcgcccggggcagccctgtgctggccatgagaagaaggctgtccttcaccctggagcggctgagcagccggctgcagaggagcggcagcagtgaagattctggaggagccagcggccgcagcacccccctgtttggccgcctgcggcgggccaccagcgagggggagagcctgcggcggctgggcctgccccacaaccagctggccgcccaggccggggccaccaccccatctgctgagagcctgggcagcgaggccagcgccaccagcggcagcagcgcccctggagagagccgcagccggctgcgctggggcttcagccggcccaggaaggacaagggcctgagcccccccaacctgagcgcctctgtgcaggaggagctgggccaccagtatgtgcgctctgagagtgacttcccccctgtgttccacatcaagctgaaggaccaggtgctgctggagggggaggccgccaccctgctgtgcctgcctgctgcctgcccagccccccacatctcctggatgaaggacaagaagagcctgcggtctgagcccagcgtcatcatcgtgtcctgcaaggatggccggcagctgctgagcatccccagggctgggaagagacatgctggcctgtatgagtgcagcgccaccaacgtgctgggcagcatcaccagcagctgcaccgtggccgtggcccgggtgcctgggaagctggcccctcctgaggtgccccagacctaccaggacacagccctggtgctgtggaagccaggggacagccgggccccctgcacctacaccctggagaggagagtggatggagagagcgtgtggcaccctgtgagcagcggcatcccagactgctactacaacgtgacccacctgcctgtgggcgtgacagtgcgcttccgggtggcctgtgccaacagagctggccagggccccttcagcaacagcagcgagaaggtgtttgtgcggggcacccaggacagcagcgctgtgcccagcgctgcccaccaggaggcccctgtgaccagcaggcctgcccgggcccggcccccagacagccccaccagcctggccccacccctggccccagctgcccccaccccacccagcgtgacagtgagccccagcagcccccccaccccacccagccaggccctgagcagcctgaaggctgtgggccccccaccccagaccccaccaagaagacaccggggcctgcaggccgcccggcctgctgagcccaccctgcccagcacccacgtgacccccagcgagcccaagccctttgtgctggacaccggcacccccatcccagccagcaccccccagggcgtgaagcctgtgagcagcagcacccctgtgtatgtggtgaccagctttgtgtctgcccccccagcccctgagcccccagcccctgagcccccacctgagcccaccaaggtgacagtgcagagcctgagccctgccaaggaggtggtgagcagccctggcagcagccccaggagcagccccaggcctgagggcaccaccctgcggcagggccccccccagaagccctacaccttcctggaggagaaggcccggggccgctttggagtggtgcgggcctgcagagaaaatgccaccggccgcacctttgtggccaagatcgtgccctatgctgctgagggcaagagaagagtgctgcaggagtatgaggtgctgcggaccctgcaccacgagcgcatcatgagcctgcacgaggcctacatcaccccccgctacctggtgctgattgctgagagctgtggcaaccgggagctgctgtgtggcctgagtgaccgcttccgctacagtgaagatgatgtggccacctacatggtgcagctgctgcagggcctggactacctgcacggccaccacgtgctgcacctggacatcaagccagacaacctgctgctggccccagacaatgccctgaagatcgtggactttggcagcgcccagccctacaacccccaggccctgcggcccctgggccacaggacaggcaccctggagttcatggcccctgagatggtgaagggggagcccatcggcagcgccacagacatctggggcgccggcgtgctgacctacatcatgctgagcggccgcagccccttctatgagccagacccccaggagacagaggccagaattgtgggcggccgctttgatgccttccagctgtaccccaacaccagccagagcgccaccctcttcctgaggaaggtgctgtctgtgcacccctggctgagccggcccagcagctgcctgtctgtgtgccacaaggagatcaagatggccagcagctag

SEQ ID NO: 160009 - DNA, 9804 bp, Artificial Sequence
  derived and/or modified sequence
atgcagaaggcccggggcaccagaggagaagatgctggcacccgggccccacccagccctggggtgccccccaagagggccaaggtgggcgccggcggcggggcccctgtggccgtggccggggcccctgtgttcctgcggcccctgaagaatgctgctgtgtgtgccggcagtgatgtgcggctgcgggtggtggtgtctggcaccccccagcccagcctgcgctggttcagagatggccagctgctgcctgccccagcccctgagcccagctgcctgtggctgcggcgctgtggggcccaggatgctggggtgtacagctgcatggcccagaatgaaagaggccgggccagctgtgaggccgtgctgactgtgctggaggtgggggacagcgagacagcagaagatgacatcagtgatgtgcagggcacccagaggctggagctgagagatgatggagccttcagcacccccactggaggcagtgacaccctggtgggcaccagcctggacaccccacccacctctgtgacaggcaccagcgaggagcaggtgtcctggtggggcagcggccagacagtgctggagcaggaggccggcagcggcggcggcacccggcggctgcccggcagcccccggcaggcccaggccaccggggccggccccaggcacctgggcgtggagcccctggtgcgggccagccgggccaacctggtgggcgcctcctggggcagcgaggacagcctgtctgtggccagtgacctgtatggcagcgccttcagcctgtaccggggccgggccctgagcatccacgtgtctgtgccccagagcggcctgcggcgggaggagccagacctgcagccccagctggccagcgaggccccccggcggcctgcccagcccccacccagcaagagcgccctgctgcccccacccagcccccgggtgggcaagaggagccccccaggccccccagcccagcctgctgccacccccaccagcccccacaggaggacccaggagcctgtgctgcctgaggacaccaccacagaggagaagaggggcaagaagagcaagagcagcggccccagcctggccggcacagctgagagccggccccagacccccctgtctgaggccagcggccgcctgagcgccctgggccgcagcccccggctggtgcgggccggcagccgcatcctggacaagctgcagttctttgaggagaggagaagaagcctggagaggagtgacagccccccagcccccctgcggccctgggtgcccctgaggaaggcccggagcctggagcagcccaagtctgagcggggggccccctggggcacccctggggccagccaggaggagctgcgggcccctggctctgtggccgagaggagaagactcttccagcagaaggccgccagcctggatgagaggacccggcagaggagccctgccagtgacctggagctgcgctttgcccaggagctgggccgcatccgccgcagcaccagccgggaggagctggtgcgcagccatgagagcctgcgggccaccctgcagagggcccccagcccccgggagcccggggagcccccactcttcagccggcccagcacccccaagaccagcagagctgtgtccccagctgctgcccagccccccagccccagcagcgctgagaagccaggagatgagcccggccggcccaggagccggggccctgctggccgcacagagcccggggagggcccccagcaggaggtgagaagaagagaccagttccccctgaccaggagccgggccatccaggagtgccgcagccctgtgcccccacctgctgctgaccccccagaggcccggaccaaggcccctcctggcaggaagcgggagcccccagcccaggccgtgcgcttcctgccctgggccaccccaggcctggagggcgctgctgtgccccagaccctggagaagaacagagctggccctgaggccgagaagaggctgcggcggggccctgaggaggatggcccctggggcccctgggacagaagaggagcccggagccagggcaaaggaagaagagcccggcccaccagccctgagctggagagcagtgatgacagctatgtgtctgctggggaggagcccctggaggcccctgtgtttgagatccccctgcagaatgtggtggtggcccctggagcagatgtgctgctgaagtgcatcatcacagccaaccccccaccccaggtgtcctggcacaaggatggcagcgccctgcggtctgagggccgcctgctgctgcgggcagagggggagcggcacaccctgctgctgcgggaggcccgggctgctgatgctggcagctacatggccacagccaccaatgagctgggccaggccacctgtgccgccagcctgactgtgcggcctgggggcagcaccagccccttcagcagccccatcaccagtgatgaggagtacctgagccccccagaggagttccctgagcccggggagacctggcccaggacccccaccatgaagcccagccccagccagaacagaagaagcagtgacaccggcagcaaggccccacccaccttcaaggtgtccctgatggaccagagcgtgcgggagggccaggatgtgatcatgagcatccgggtgcagggcgagcccaagcctgtggtgtcctggctgaggaaccggcagcctgtgcggccagaccagaggagatttgctgaggaggccgagggcggcctgtgccgcctgcgcatcctggccgctgagagaggagatgctggcttctacacctgcaaggctgtgaatgaatatggagcccggcagtgtgaggcccggctggaggtgcgggcccaccctgagagccgcagcctggccgtgctggcccccctgcaggatgtggatgtgggcgctggggagatggccctgtttgagtgcctggtggccggccccacagatgtggaggtggactggctgtgccggggccgcctgctgcagcctgccctgctgaagtgcaagatgcactttgatggcaggaagtgcaagctgctgctgacctctgtgcatgaagatgacagcggcgtgtacacctgcaagctgagcacagccaaggatgagctgacctgcagcgcccggctgactgtgcggcccagcctggcccccctcttcacccggctgctggaggatgtggaggtgctggagggccgggccgccaggtttgactgcaagatcagcggcaccccacctcctgtggtgacctggacccacttcggctgccccatggaggagagcgagaacctgcggctgcggcaggacggcggcctgcacagcctgcacatcgcccacgtgggctctgaagatgagggcctgtatgctgtgtctgctgtgaacacccacggccaggcccactgcagcgcccagctgtatgtggaggagcccaggacagctgccagcggccccagcagcaagctggagaagatgcccagcatccctgaggagcctgagcagggcgagctggagcggctgagcatcccagacttcctgcggcccctgcaggacctggaggtgggcctggccaaggaggccatgctggagtgccaggtgacaggcctgccctaccccaccatctcctggttccacaacggccaccgcatccagagcagtgatgacaggaggatgacccagtacagagatgtgcaccggctggtgtttcctgctgtgggcccccagcacgccggcgtgtacaagagcgtcatcgccaacaagctgggcaaggccgcctgctacgcccacctgtatgtgacagatgtggtgcccggccccccagatggagccccccaggtggtggccgtgactggaaggatggtgaccctgacctggaaccccccaagaagcctggacatggccattgatcctgacagcctgacctacacagtgcagcaccaggtgctgggcagtgaccagtggacagccctggtgacaggcctgcgggagcccggctgggccgccaccggcctgaggaaaggagtgcagcacatcttccgggtgctgagcaccaccgtgaagagcagcagcaagcccagcccccccagcgagcctgtgcagctgctggagcacggccccaccctggaggaggccccagccatgctggacaagccagacatcgtgtatgtggtggagggccagcctgcctctgtgacagtgaccttcaaccacgtggaggcccaggtggtgtggaggagctgccgcggggccctgctggaggcccgggccggcgtgtatgagctgagccagccagatgatgaccagtactgcctgcgcatctgccgggtgtcccggcgggacatgggcgccctgacctgcacagccaggaacagacatggcacccagacctgcagcgtgaccctggagctggccgaggcccccaggtttgagagcatcatggaggatgtggaggtgggcgctggggagacagccaggtttgctgtggtggtggagggcaagcccctgcctgacatcatgtggtacaaggatgaggtgctgctgacagagagcagccacgtgtcctttgtgtatgaagaaaatgaatgttccctggtggtgctgagcactggagcccaggatggaggagtgtacacctgcacagcccagaacctggccggggaggtgtcctgcaaggccgagctggccgtgcacagcgcccagacagccatggaggtggagggcgtgggggaggatgaggaccaccggggccgccgcctgagtgacttctatgacatccaccaggagatcggccgcggggccttctcctacctgcggcgcatcgtggagaggagcagcggcctggagtttgctgccaagttcatccccagccaggccaagcccaaggccagcgcccggcgggaggcccggctgctggcccggctgcagcacgactgtgtgctgtacttccacgaggcctttgagaggagaagaggcctggtgattgtgacagagctgtgcacagaggagctgctggagagaattgccaggaagcccaccgtgtgtgagagcgagatccgggcctacatgaggcaggtgctggagggcatccactacctgcaccagagccacgtgctgcacctggatgtgaagccagagaacctgctggtgtgggatggagctgctggggagcagcaggtgcgcatctgtgactttggaaatgcccaggagctgaccccaggagagccccagtactgccagtatggcaccccagagtttgtggcccctgagatcgtgaaccagagccctgtgtctggagtgacagacatctggcctgtgggcgtggtggccttcctgtgcctgaccggcatcagcccctttgtgggggagaatgacaggaccaccctgatgaacatccggaactacaacgtggcctttgaggagaccaccttcctgagcctgagccgggaggcccggggcttcctgatcaaggtgctggtgcaggaccggctgcggcccacagctgaggagaccctggagcacccctggttcaagacccaggccaagggagctgaggtgtccacagaccacctgaagctgttcctgagcagaagacgctggcagaggagccagatctcctacaagtgccacctggtgctgcggcccatccctgagctgctgcgggcccctcctgagcgggtgtgggtgaccatgccccggcggcccccaccttctgggggcctgagcagcagcagtgacagcgaggaggaggagctggaggagctgcccagcgtgccccggcccctgcagcctgagttcagcggcagccgggtgtccctgacagacatccccacagaagatgaggccctgggcaccccagagactggagctgccacccccatggactggcaggagcagggccgggcccccagccaggaccaggaggcccccagccctgaggccctgcccagccctggccaggagcctgctgctggggccagcccccggcggggggagctgcggcggggcagcagcgctgagagcgccctgcccagggctggcccccgggagctgggccggggcctgcacaaggccgcctctgtggagctgccccagaggaggagccccagccctggggccacccggctggcccggggcggcctgggggagggggagtatgcccagaggctgcaggccctgcggcagaggctgctgcggggcggcccagaagatggcaaggtgtctggcctgcggggccccctgctggagagcctgggcggccgggcccgggaccccaggatggcccgggccgccagcagcgaggccgccccccaccaccagccccccctggagaacagaggcctgcagaagagcagcagcttcagccagggcgaggccgagccccggggccgccacagaagagctggggcccccctggagatccctgtggcccggctgggcgcccggcggctgcaggagagccccagcctgagcgccctgtctgaggcccagcccagcagccctgcccggcccagcgcccccaagcccagcacccccaagtctgctgagcccagcgccaccacccccagtgatgccccccagcccccagccccccagcctgcccaggacaaggcccctgagcccaggcctgagcctgtgcgggccagcaagccagcccccccaccccaggccctgcagaccctggccctgcccctgaccccctatgcccagatcatccagagcctgcagctgagcggccacgcccagggccccagccagggccctgctgccccacccagcgagcccaagccccacgccgctgtgtttgcccgggtggccagccccccacctggggcccctgagaagagggtgcccagcgctgggggcccccctgtgctggccgagaaggcccgggtgcccaccgtgcccccccggcccggcagcagcctgagcagcagcattgagaacctggagagcgaggccgtgtttgaggccaagttcaagaggagccgggagagccccctgagcctgggcctgcggctgctgagccgcagccgctctgaggagcggggccccttcagaggagctgaggaggaggatggcatctaccggcccagccctgctggcacccccctggagctggtgcggcggcctgagaggagccgctctgtgcaggacctgcgggctgtgggggagcccggcctggtgcggcggctgagcctgagcctgagccagaggctgcggaggaccccaccagcccagaggcacccagcctgggaggcccggggaggagatggagagagcagcgagggcggcagcagcgcccggggcagccctgtgctggccatgagaagaaggctgtccttcaccctggagcggctgagcagccggctgcagaggagcggcagcagtgaagattctggaggagccagcggccgcagcacccccctgtttggccgcctgcggcgggccaccagcgagggggagagcctgcggcggctgggcctgccccacaaccagctggccgcccaggccggggccaccaccccatctgctgagagcctgggcagcgaggccagcgccaccagcggcagcagcgcccctggagagagccgcagccggctgcgctggggcttcagccggcccaggaaggacaagggcctgagcccccccaacctgagcgcctctgtgcaggaggagctgggccaccagtatgtgcgctctgagagtgacttcccccctgtgttccacatcaagctgaaggaccaggtgctgctggagggggaggccgccaccctgctgtgcctgcctgctgcctgcccagccccccacatctcctggatgaaggacaagaagagcctgcggtctgagcccagcgtcatcatcgtgtcctgcaaggatggccggcagctgctgagcatccccagggctgggaagagacatgctggcctgtatgagtgcagcgccaccaacgtgctgggcagcatcaccagcagctgcaccgtggccgtggcccgggtgcctgggaagctggcccctcctgaggtgccccagacctaccaggacacagccctggtgctgtggaagccaggggacagccgggccccctgcacctacaccctggagaggagagtggatggagagagcgtgtggcaccctgtgagcagcggcatcccagactgctactacaacgtgacccacctgcctgtgggcgtgacagtgcgcttccgggtggcctgtgccaacagagctggccagggccccttcagcaacagcagcgagaaggtgtttgtgcggggcacccaggacagcagcgctgtgcccagcgctgcccaccaggaggcccctgtgaccagcaggcctgcccgggcccggcccccagacagccccaccagcctggccccacccctggccccagctgcccccaccccacccagcgtgacagtgagccccagcagcccccccaccccacccagccaggccctgagcagcctgaaggctgtgggccccccaccccagaccccaccaagaagacaccggggcctgcaggccgcccggcctgctgagcccaccctgcccagcacccacgtgacccccagcgagcccaagccctttgtgctggacaccggcacccccatcccagccagcaccccccagggcgtgaagcctgtgagcagcagcacccctgtgtatgtggtgaccagctttgtgtctgcccccccagcccctgagcccccagcccctgagcccccacctgagcccaccaaggtgacagtgcagagcctgagccctgccaaggaggtggtgagcagccctggcagcagccccaggagcagccccaggcctgagggcaccaccctgcggcagggccccccccagaagccctacaccttcctggaggagaaggcccggggccgctttggagtggtgcgggcctgcagagaaaatgccaccggccgcacctttgtggccaagatcgtgccctatgctgctgagggcaagagaagagtgctgcaggagtatgaggtgctgcggaccctgcaccacgagcgcatcatgagcctgcacgaggcctacatcaccccccgctacctggtgctgattgctgagagctgtggcaaccgggagctgctgtgtggcctgagtgaccgcttccgctacagtgaagatgatgtggccacctacatggtgcagctgctgcagggcctggactacctgcacggccaccacgtgctgcacctggacatcaagccagacaacctgctgctggccccagacaatgccctgaagatcgtggactttggcagcgcccagccctacaacccccaggccctgcggcccctgggccacaggacaggcaccctggagttcatggcccctgagatggtgaagggggagcccatcggcagcgccacagacatctggggcgccggcgtgctgacctacatcatgctgagcggccgcagccccttctatgagccagacccccaggagacagaggccagaattgtgggcggccgctttgatgccttccagctgtaccccaacaccagccagagcgccaccctcttcctgaggaaggtgctgtctgtgcacccctggagccggcccagcctgcaggactgcctggcccacccctggctgcaggatgcctacctgatgaagctgcggcggcagaccctgaccttcaccaccaaccggctgaaggagttcctgggggagcagaggagaagaagagctgaggccgccaccaggcacaaggtgctgctgcggagctacccaggcggcccctag

SEQ ID NO: 160010 - DNA, 9675 bp, Artificial Sequence
  derived and/or modified sequence
atgcagaaggcccggggcacccggggcgaggacgccggcacccgggccccgccgtctcccggcgtgccccctaaaagggcgaaagtcggagctggcggcggagcccccgtggcggtagcaggggcgcccgtcttcttaagaccactcaagaacgccgccgtctgtgccggaagtgacgtgcgtctgagagtggtggtctccggcacaccacagccatcactgagatggttcagagacgggcagctcctgccagcacccgcgcctgagccgtcgtgcctgtggttgcgaaggtgcggcgcacaggacgccggagtttactcatgcatggcccagaatgaacggggacgcgcctcatgtgaagctgtcttgacagtactcgaagtgggggactcagaaactgcagaagacgacatttcagatgtccaaggaactcagaggctggagctcagggacgatggcgcattttccactcctacagggggcagtgataccctggtgggcaccagcttagatactccgcctacctctgtaactggtacatcagaggaacaggtgtcttggtgggggagtggccagactgttctcgagcaggaagccgggagcggcggcggaactcggcgcctgccagggtcacctagacaagcccaggctaccggcgcaggtccacgtcatctgggggtggagcccctggtgcgcgccagcagggctaatttagtaggcgcctcgtggggcagtgaagacagcttgtccgtggcttccgacctatatggcagtgcttttagtctgtataggggaagggctcttagcattcacgtatcagtgccacaatccggattgcgacgagaggagcccgacctccaaccacagctggctagtgaagcaccaaggcgccctgcgcaacctcctccaagcaagtctgccttgctcccacccccgtctcccagggttggaaaaagatcaccccctggaccacccgcccaacccgctgccacccctactagtccgcatcgccggacgcaggagccagttctgcctgaggacacgactactgaagagaagagggggaagaagagcaagtctagcggcccctccttggcaggcacggccgagagtaggccccaaacgccgctgagtgaggctagcggacgtctgagcgcactcgggagatctccccggctagtgcgggccggaagccgcattctagacaaattgcagtttttcgaggagcgccgccgaagcctagaacgctctgatagtcctcccgcaccgttaagaccatgggtccctttaagaaaagctcgctcgctggaacagcctaagtctgagcggggagccccatggggaacgccaggggcctctcaggaggagttaagggcccccgggagcgtcgccgaaaggcggcgtctgttccaacagaaggccgctagtttagacgagcggactaggcagcgttcgccagcctcagatcttgagcttcggtttgcacaggagttgggaaggatacggcgtagcacttctagggaggagctcgttcgcagccacgaatctctgcgagccacactgcaaagggccccatcccctcgggaacctggtgagcctcccctcttttcccggccaagtacaccaaaaacctctagggccgtgagtccagcagccgcccagccaccttcccccagcagcgctgaaaagcctggggatgaacctggaaggcctagatctaggggcccagccgggaggaccgaacccggggaaggtccacagcaagaagtacgcaggcgtgatcaattccctcttacaagatctcgggctatccaagagtgtcggagccccgtgccaccccctgcggccgacccgccagaggccaggacaaaagctccgccgggccgcaaacgagaaccaccagctcaggccgtcagattcctcccttgggctactccgggccttgagggcgcggccgtgccccaaaccctggaaaaaaatcgtgcgggacccgaggccgaaaaacggctccgaaggggtcccgaagaagacggaccgtggggaccctgggatagacgcggcgctcgatcccagggaaagggaaggagagcccggccaacaagtcctgagctggaaagttccgacgatagttatgtcagtgccggcgaggagcccctcgaagcccctgtgttcgagattcctctgcagaatgttgtggttgctcctggagccgacgtgctcctaaagtgcatcattacagcgaatccccctccccaggtgagttggcacaaagatggaagtgccttgaggtcagaagggcgactcctcctgcgtgccgagggtgagcggcacaccctgctgttgcgcgaggctcgtgcagcagacgccggcagctacatggcaacagcaacaaacgagctcggacaagcgacctgcgctgccagcctcacagtgcgaccaggcgggagtacctcgccattttcctcccctatcacctctgatgaggaatatctctctcctccagaagagtttccagagccaggcgagacatggcctcggaccccaaccatgaagcccagccccagccaaaatcgtcgtagctcagacaccggttccaaagcccctcccaccttcaaggtgtcactcatggatcagtccgtcagagagggccaagatgtgatcatgtcaattagagtccagggtgaacccaaacctgtggtttcatggctacggaacagacagccagtgaggcctgaccagcggaggtttgccgaagaagcggaggggggactgtgccggctccgaatcctagcagccgagcgcggcgatgcaggtttctatacctgcaaggcagtgaatgagtacggcgctcgacagtgcgaggcgaggttggaggtgagggctcacccagagtctcgatcgctggctgtgctcgcccctttacaggacgtcgacgtcggggccggagaaatggcactgtttgagtgcctggtggccggaccaaccgatgtggaagtggattggctgtgcagggggcgcttacttcaacctgccctgctgaagtgtaaaatgcacttcgacgggaggaaatgcaaactgttgcttacctctgtccatgaagacgattccggcgtgtatacatgcaaattaagcactgctaaggatgagcttacctgcagcgcccgactgaccgtgcggccctctttagcaccactgtttacccgcctcctcgaggatgttgaggtgctcgaaggtcgcgctgccagattcgactgtaagatctccggtaccccgcctccagtggtgacgtggactcatttcggttgcccgatggaagaatctgagaatctaagactgcggcaagatggtgggctacactcattacacatcgcccacgtcggcagcgaagatgaaggactctatgcagttagtgcagtcaacacgcacgggcaggcccactgtagcgcccaactgtacgttgaggagccgcgcacggccgcatcaggcccctcctctaaactggagaagatgccctctatccccgaagagccggagcagggggagcttgaaagactatcaatcccggattttctgagacccctgcaagacctggaggtgggcctggccaaggaggccatgttggagtgccaagttaccggcctgccttatcccaccatctcatggtttcacaacgggcacagaatccagtcgagtgatgatcggcggatgacccaatacagagatgtacatcgcctggtgttccctgctgtcggcccacaacatgccggggtgtataagtcggtgatcgccaacaaactgggaaaggctgcgtgctatgcacacctctatgttacagatgtcgtgcccggcccccctgatggtgctccccaggttgtggccgtgaccggcagaatggtgacactcacatggaaccctcctaggtccttggatatggcgattgaccctgacagcctcacctacaccgtacagcatcaggtgctgggaagcgaccaatggactgccttagttacagggctacgcgagcctggatgggccgccactgggttgagaaagggggtgcagcatatctttagggttttgagtacgacagtcaaatcctccagcaagccctcgcccccaagtgagccggtgcagctgctggaacacggtccaacgctggaggaagctccagccatgttggataagcccgacattgtgtacgtggtcgaagggcagccagcatctgtgacagtgaccttcaaccacgtggaagcacaggtcgtttggcgctcttgcagaggagcgctgttggaggctcgggcgggcgtgtatgaattgagtcagccagatgacgaccagtattgtctgcggatttgcagagtgagtaggcgtgatatgggcgccctgacatgcaccgcccgaaataggcacggcactcagacttgttccgttactctagagctagcagaggctccaaggtttgaatccatcatggaagatgtagaggtaggtgctggcgagactgctagatttgcagtagttgtcgagggcaagccattgcccgatatcatgtggtacaaagatgaggtgctgctgactgagagctcccacgtatctttcgtctacgaagaaaacgagtgtagcctcgtagttctcagtaccggagctcaggacggtggcgtgtacacatgcactgcgcagaacctggcgggagaggtgtcttgcaaggccgaactcgccgtgcattctgctcagaccgcaatggaggtggaaggtgtgggtgaagacgaggaccatcggggtaggcggctctcagatttctacgacatccaccaggagataggccggggcgcattctcctatctcagaagaatcgtggaaaggtcttcaggcctcgagttcgcggccaaatttatcccaagccaagccaaacccaaagcctccgcgagacgggaggcccgactgctcgcccggttgcagcatgattgtgttctgtattttcacgaggccttcgagaggcggagaggcttggtgattgtgaccgagctctgtacagaagaactcctagagcggattgcccgaaagcccactgtatgtgaatctgaaatcagggcatatatgcgccaagtgctcgaggggatacactacctccaccagtcccatgtactccaccttgacgttaagcccgaaaatctactcgtttgggacggcgccgctggagaacaacaggtgcgcatctgtgattttgggaatgctcaggaactgacgccaggtgagcctcagtattgccaatacgggacccccgagtttgtggcacccgaaatcgtgaaccagagccctgtgtcaggggtcaccgacatctggcctgtcggcgtggtggccttcctctgcttaacaggtataagtccatttgtcggcgaaaacgaccggacgacattaatgaacataaggaactataatgtcgcgtttgaggaaaccaccttcctgtctctttctcgcgaggccaggggattcttaatcaaggtgcttgtgcaggatcgtctgaggccgaccgcagaggaaactctggaacacccctggttcaagacccaggctaaaggcgccgaagtctccaccgaccaccttaagttattcttgtcccggcgccggtggcaacgatctcagatttcttacaagtgtcatcttgttctgaggcccattcccgagttgctgcgagcacctcctgagcgcgtgtgggtcaccatgccccgccgcccgccccccagcgggggcctgagtagtagctcagactccgaagaggaggagttggaagaattgccatcagtcccacggcccttacagcccgaattctccggcagtcgggttagtcttactgatatcccgaccgaggatgaggcactgggaactccagaaacaggcgccgccactcccatggattggcaagaacaaggccgcgccccctcacaggaccaagaggcaccgtctccagaagcattacctagccccggccaggagccggctgctggggcctcaccccggcggggagaactaaggcggggttctagcgccgaatcagcactaccgagagctggccctcgcgagctcggtcgaggcttacataaggctgcctctgtggaactgcctcagcgcagaagtccaagcccgggagctaccagattggcccgcggcggcctgggagagggagagtatgcgcagaggctgcaggccctgcgacagcgattactgcgaggaggccctgaggatggaaaggtctctggcctgcgcggcccactcttggagtctcttggagggcgggctagggatcctaggatggctcgcgccgccagctccgaggctgccccccatcaccagccccctctggagaatcgtggcctccagaaatctagcagcttttcacagggcgaggctgaacctcgcgggcgacaccgcagggccggagctcccctcgagattcccgtggcacgactgggtgccaggcggttacaagaatccccgtcactgagtgctctttctgaggcccagccgtctagtcctgccaggccctctgcaccgaaaccctcaacccccaagtccgcagagccgtctgccaccacaccatctgatgccccccagcctcccgcaccacaacccgcccaggacaaagcacctgaacctagacctgagccggtgcgggcgtcaaagcccgctccacctcctcaggctttgcaaactctggctctaccgctgaccccctacgcccagataatacagagccttcagctgtcgggtcatgcccagggcccatctcaggggcccgcagctcctccctccgagccaaagcctcatgctgctgtttttgccagagttgcatcccccccacctggtgctcctgaaaaacgggtcccatcagcgggggggccgcctgtgctcgctgaaaaggcgcgggtgccaacagtgcccccacgacccggatcttctttgtcaagtagtatcgaaaatctcgagtccgaggctgtcttcgaagctaaattcaaacgctcgcgcgagagtcctctgagtctgggcctccgcctcctctctcgctcacggtccgaggaacggggaccttttagaggcgcggaagaggaggatggaatataccgccctagccccgccggaactcccctcgagctggtgcgccgaccggagcggagcagaagcgttcaggatttaagagccgtgggggagccaggcctggttcggcggctgagcctctctctttctcagagacttagacggacccctccagcccagcggcaccctgcctgggaggctcgaggtggtgatggggaatctagtgaaggaggctcctccgctaggggatccccagtgctggctatgcgtagacgccttagctttactttagaacgattgagctccaggctgcagcggtcaggcagctcggaggactccgggggcgccagcggaagaagtacccccctctttgggcgcctgcgacgcgcgactagcgagggagaatctctgagaaggttggggctcccacataaccagctggccgctcaggcaggtgccacgaccccaagtgcagaaagccttggatctgaggcatccgccacgagcgggtccagcgcccctggtgagtcccgatcaagattgaggtggggtttctcaagaccccggaaggataagggactctcccctcccaatctctctgccagcgtccaggaggaacttggccatcagtatgttcggtccgagagtgattttccccctgtttttcatatcaaactcaaggaccaggtgttacttgagggtgaagctgctaccctgctctgtctgccagcagcatgcccagccccgcatattagctggatgaaagacaagaagtctttgcggtcggaacccagtgtgataatcgtcagctgtaaggacggccggcagctgctgtctatcccccgggcaggaaagcggcacgcaggtctttacgagtgctctgcaacaaacgtacttggatcaattacttcaagctgtacagttgccgtagcgcgcgtgccgggcaaactggctcctccagaagtgccacaaacatatcaggatacagccttagtgctgtggaagcccggcgactcaagagcaccttgtacatacacactggagaggcgtgtggatggagaatctgtctggcatcccgtgtccagcggaatccccgattgctactacaatgtgacccaccttccagtgggggtgaccgtgaggtttcgggtggcctgcgccaaccgggcaggccaggggcctttcagcaacagctccgagaaggtgtttgtgcgaggcacacaggactcatccgccgtgcccagtgccgctcaccaggaggctcctgtgacgtcccgacccgctagagcacggcccccggactccccaacatccctagcaccaccactggcccctgccgccccgactccaccttccgtaaccgttagccctagttctccacccaccccaccctcccaggcactgtcttctttgaaggccgtcggccctcctccacagacacccccccgtaggcataggggactccaggccgcaagaccagcagaacccaccctcccgtctacccacgtgactccttctgagccaaagccattcgtcctggatacaggtactccgatacccgcaagcactcctcagggcgtgaaaccagtgtcgtccagtacccccgtgtatgtggtcacatcctttgtttctgctcccccggctcccgaacccccagcacccgagccccccccagagcctaccaaggtgaccgttcagtccctcagccctgctaaggaagtcgtgagctctcccggctcgtcaccacgcagctcaccacggcccgagggtactaccctccgccagggcccaccccaaaagccttacacctttctggaggagaaagccagaggaagattcggggtggtgcgggcttgtcgggaaaacgcaaccggaaggacgttcgtcgcaaaaatcgtcccctatgctgctgagggaaaacggcgtgtcctccaggagtacgaggtgctgcggacccttcaccacgagaggattatgagcttgcacgaggcatacattaccccccgatatctggttcttatcgcagaatcttgcggaaatagggaactcctttgcggactgtctgaccgcttccgttacagcgaggacgacgtagctacatacatggtccagcttctgcagggacttgactatctccacggtcaccacgtgttgcacctcgatatcaagcccgataatttactcttggcaccagataacgcgctgaaaatcgtggattttgggtccgcacagccttataacccgcaggctttacgtccgctgggccaccgcacaggtacgctggaattcatggcaccggagatggtgaaaggagagccaatcggctctgccacagacatctggggcgctggcgtgctcacctacattatgctttccgggcgtagccctttctacgagcctgacccgcaggaaaccgaagctagaatcgtcggtggtcggtttgacgccttccagctgtacccaaatacttctcagagcgctaccctgttcctgaggaaggtgctctctgtgcatccatggctgagtcggccatcttcctgtctcagtgtgtgccataaagagatcaagatggcttcttcctag

SEQ ID NO: 160011 - DNA, 9804 bp, Artificial Sequence
  derived and/or modified sequence
atgcagaaggcccggggcacccggggcgaggacgccggcacccgggcgcccccatcaccgggggtgccacccaagagggcaaaagtgggagcaggtggtggtgcacccgttgcagtcgcaggcgcccccgtctttctgagacccctgaaaaatgcggctgtttgtgcagggtccgacgtgagactgcgggtggtggtgtctggaaccccacagccaagcttgcgctggtttcgagatggccaacttctgcctgctcccgctccagagccaagctgtctgtggttgcgccggtgtggtgcccaagatgctggagtgtactcctgcatggcccagaacgagcgcgggagggccagctgtgaagctgtcctcacagtgctagaagttggcgactcagaaacagcagaggatgacatcagtgacgtgcaggggacccagaggctggagcttagggacgacggcgcattttctacacctacaggcggctcagacacgcttgtggggacatccctggacaccccgcctacctccgtgaccgggacatctgaagagcaggtgagctggtggggctcaggccagaccgtcctggagcaggaagcaggctccggcggcgggacacgcaggctgcctggctcccccagacaggcccaggcaaccggggccggacctcgccacctgggggtggaacctctcgttagagcgtctagggcaaaccttgtcggagcttcatggggctccgaagacagtttatccgtagcgtctgatctgtacggcagcgccttttcactgtatagagggagggcactgagtatccacgtctcagttcctcagtctgggctcaggagggaggagcctgacctccagcctcaattagctagcgaagcgccccggcgccctgcccagccaccacccagtaaatctgccctgttgcctccgccgtctccccgggttggaaagaggtcgccccctggaccacccgcgcaaccagcagctaccccaactagtcctcaccggaggacccaggaacccgttttgccagaggatactacaactgaagagaaacggggtaaaaagagcaaaagttccggcccctcgctcgccggcacagcagagtctagaccacagacgccgctgtccgaggccagtgggcggctgtctgctctcgggagaagcccacgcctggtgcgggccggcagcagaatcttagataagctgcaatttttcgaagagaggcggagatccctggaaagaagcgatagccccccagcgcccttacgaccatgggtccccctgcggaaggctcgctcactggagcagcccaagtcagagcgcggagcaccttggggaactcccggcgcctctcaggaggagctcagggcaccaggcagcgtggccgagcggagaaggctgtttcagcagaaggcagcctcccttgatgagcgcacgcggcagcgctcgcctgcgtccgatcttgagctaagatttgctcaggaacttgggaggattagacgttcaacaagtcgagaagagttggtccgcagccatgagagtttacgggcaaccctgcagagagctccgagtcctcgcgagccaggggagcccccacttttttccagaccctcaacaccaaagacgagcagggcagtctcacctgccgcagcccagcccccctcaccatcttcagccgagaaaccaggtgacgagccgggccgccctagatccagagggccagccggtcggacagaacctggcgaaggaccccagcaggaagtccgcagacgcgaccagttcccattgacacggtctcgagccatacaggaatgtcgaagcccagtgccacccccagccgccgatccccctgaagcccggacaaaagccccccccggcagaaaaagggagccgcccgcccaagcggtcaggttcctcccatgggccacacctggtctcgagggcgccgcggtgccacaaacattagaaaagaaccgggccggacccgaggccgaaaagcgcctccggcgtggacctgaggaggatggaccatggggaccgtgggaccggaggggggctaggtcccagggaaaaggacgcagagccagacctaccagccccgagctggaatcctctgacgacagctacgtttcagcaggcgaggagccccttgaggctcccgtattcgaaattccgctgcaaaacgtcgtagtcgccccaggcgccgatgtccttctgaagtgtattattaccgctaacccccccccccaggtctcttggcacaaggacggatccgccctacgcagtgagggacgactgttgctccgggcagagggagaaagacataccctcttgttgagagaggcccgggctgcagatgcaggttcttacatggcaactgctaccaacgagctcggccaggcgacatgtgccgccagcttaaccgtgcgtccaggaggctcgacttcgcccttctcttcacccattacgtcagacgaggaatatctgtctcctccggaggagtttcctgaacctggggaaacttggcctcgcactcccaccatgaagccttcgccatcacagaaccggcgctcttcagatacaggtagtaaggcccctcccacgtttaaggtctccctcatggatcaaagcgtgcgggagggacaagatgtgatcatgagtatcagggtgcagggtgaaccaaagcccgtggtctcatggctgcggaaccggcagccggtgagacccgaccagcggcgcttcgcggaggaagccgagggcggtttgtgcaggctgcgcattttggccgctgagaggggggatgcgggattctacacctgcaaggccgtgaacgagtacggagcaaggcagtgcgaagcgaggctcgaggtgagagcccatccggaatctaggagcctggctgtgctcgcccccttacaggatgtagatgtcggagccggcgagatggctctctttgaatgtctggtggcaggccctaccgacgttgaagtggactggctgtgtagggggaggctcttacagcctgccctcttaaaatgtaaaatgcatttcgacggcaggaaatgtaaactgttgttgacctcagtacacgaggacgacagtggggtttacacctgcaagctgtcaaccgctaaagatgagctgacctgctcagcccgcctgactgttcgcccgtcgttagcaccgttattcacccggctgcttgaggatgtggaggtgctggagggaagagcagctagattcgactgcaagatcagtggaacaccaccaccagtggtcacgtggactcattttggctgccccatggaagaaagtgagaatctgaggttaagacaggacgggggcttgcacagtctgcatatagcacacgttggcagcgaagacgaagggctttatgccgtctcagccgtaaacacccacggccaggctcattgttccgcccagttatacgtggaggagccacggaccgccgctagcgggcctagtagtaaactcgagaagatgccttccattccagaggaacctgaacagggcgagctggaacgtctcagcattccagatttcctgcgaccgctgcaggacttggaagtaggcctcgccaaagaggctatgctagagtgccaggtcacgggcctcccatatccaaccatttcatggtttcataatggccaccgcatacagagctccgatgaccgccgcatgacccagtatagggacgtgcacaggttggttttccctgcagtgggaccacagcatgcaggagtttacaagtcggttatcgccaacaagctcgggaaggcggcatgttatgcccatctctacgtcacagatgtggttccagggcctccagatggcgcccctcaggtcgtggcagttacgggacgcatggtcaccctaacatggaaccccccgcggagcctggatatggctattgaccctgactctctgacatacactgtacaacatcaagttctcggctcagaccagtggacagccctggttaccggcctgcgggagcctggttgggccgctactggtcttaggaagggtgtccaacatatttttcgagtattatctaccacggttaagtcctcttctaaacccagcccaccgtctgagcctgtgcagttgttggagcacgggcctactctggaggaggcacccgcaatgctggacaagcctgatatcgtatacgtggtggagggacagccggcctccgtgaccgtcaccttcaatcatgtggaagcacaggtggtttggcgctcatgtcggggcgccctgcttgaggcaagagcaggagtttacgagctgtcgcaaccagacgacgatcaatactgcctccggatctgtcgggtttcacggagggacatgggcgccctgacatgcacggctcgaaatcgccatggaacccagacttgcagtgttactcttgagttggccgaagcccctcgttttgagtccataatggaggatgtggaggttggggctggcgagacagccaggtttgccgtggtggtggagggcaaaccgctgcctgatattatgtggtataaagacgaggtgctcctcactgaatccagtcacgtgtcatttgtgtatgaggaaaatgagtgctcccttgtggtactcagcaccggagcccaggacggcggagtgtatacctgcacagcccaaaacttagccggcgaggtgtcatgtaaggccgagttggctgtgcattctgcacagaccgccatggaagtcgaaggcgtcggagaagacgaggatcatagaggcaggcgtctgtccgacttttatgatatacatcaggagataggtaggggcgcttttagctatttgcggaggattgtcgaaagaagctctggattggagttcgccgccaagtttatccccagccaggcaaagccaaaggcgtccgcccggcgagaggccaggttgctggctagactccagcacgattgtgtgttgtactttcatgaggcgtttgaacgcaggcgagggctggtgatagtcactgagttgtgcactgaggagctgcttgagcgcatagcacggaagcccaccgtctgtgagtcagagatccgcgcctacatgcgccaggtgttagagggtattcactacctccaccagagtcatgtgctgcacctagatgtaaagcctgaaaatctactggtatgggatggcgcggcaggggagcaacaggtgagaatatgtgatttcggaaatgcccaggaactgacaccaggagagcctcagtactgtcagtacggtacacccgagttcgtggcacccgagatcgtcaaccagtcgcccgtgtccggcgtgaccgacatctggcctgtgggcgtcgtagccttcttgtgcttaaccggtatatctccgttcgtaggcgagaatgatcggactacactcatgaatatccgcaactacaacgtcgccttcgaagaaaccacttttctgagtctgagcagagaggcaagaggatttctgatcaaagtgctggtccaggacagactgagaccaaccgcagaagaaactcttgagcacccatggttcaagacccaggcaaaaggggctgaggtctctacggaccatctgaaactttttcttagccgtcgcagatggcagagaagtcaaatcagctataagtgccacctggtgcttcggcccatccctgagctgctgagggccccacctgagcgcgtttgggtgacgatgccgcgacgaccaccgcctagcggaggactgagctcttccagtgacagcgaggaggaagaacttgaggagttgccaagcgtgcctagacccttgcagcctgaattttcgggatcccgggtctcgttgacagatataccgactgaggatgaggcgttaggaactccagagaccggagccgcaacccctatggattggcaagaacagggaagagccccttcacaagatcaagaagcgccgtctcccgaagccttaccaagcccagggcaggaacccgccgctggcgcatcaccacgacgtggagaactccgcagggggtcgtctgcagagagtgccctgcctcgggctggaccacgggagctcggtcgcgggctgcacaaggctgcgagtgtggagcttccccagcgtcggtcaccctcaccaggggccacacggttggcccgcggaggcctcggagaaggcgagtatgcccaacgactgcaggctctgaggcagcggctgctgcgcgggggtccggaggacggcaaggtgagtgggctgcgggggccattactggagagtctcggcggcagagcacgggatcctcgcatggcacgtgccgcgagcagcgaagcagcacctcaccatcagcctcccttggaaaatcgtggtcttcagaaatcttcctcgttttctcagggggaggccgagcctagaggccgtcatcgacgtgcaggagcccccctggaaatcccggtcgcccggttgggagccaggagacttcaagaaagtccatccctgagtgccttatccgaggcccagccgtccagccctgccagaccctctgctcccaagccctctactcccaagagtgccgagccttcagcaacaactccttccgacgcgccacagcctcctgcaccccaaccagctcaggacaaggcaccagaacccaggcccgaacctgtgcgggcctcaaaacccgccccacctccacaggctctgcagacactcgcactgcccttgaccccctatgcccaaattattcaaagcctccaacttagcggtcatgctcaggggccttcccagggtcctgcggcacctccaagtgagccaaagccacacgccgccgtgtttgccagggttgcttcaccccctccaggcgcacccgagaagagagtgccctcagccggcggacctcctgtgctggcagaaaaagcgcgggttccaaccgtgccccccagaccaggaagtagtctttctagtagtatagagaatctcgagagtgaggccgtatttgaggccaagttcaaacgctctcgcgaatcacccctcagtctggggcttcggctactgtccagaagccggtctgaggagaggggcccttttaggggagctgaggaagaggatggaatctaccgaccatctcctgctggcacacctctcgagcttgttaggcggcccgagaggtcacggtctgttcaggacctgcgagccgtgggcgagccagggctcgtcaggcgtttatccctcagtctaagtcagcgcttgaggcgaacccccccagctcagagacacccagcctgggaggcgagagggggtgacggtgaaagctcagagggtggttcgtccgcacgaggcagtcctgttctggcaatgagaagacggctatctttcacactagaacgcctcagcagtcgtctacagcgctctggctcatccgaggacagcgggggcgcttctggccgatcaacgcctcttttcggccgattaaggcgcgccactagtgaaggcgagagccttagacgactcggtttgcctcacaatcagctggccgcccaagccggtgccacaaccccttcagctgagtcccttggctccgaggcttccgctacatccggctcctcagctcccggggagtcacggagtcgcctccgatggggcttcagcaggccgcgaaaagacaagggactgtccccccctaatctaagcgcctccgtgcaggaagagctgggtcaccagtacgtaaggtctgagtccgacttcccacccgtgttccatataaaacttaaggaccaggtactgctcgagggagaggctgctactctgctgtgcctgccagcagcctgtcccgctccgcacataagttggatgaaggacaaaaaatccctgaggtcggaaccctccgtaatcatcgttagctgcaaggacggtcgacaattactgagcattccgagagctgggaaacgccacgccggactgtacgagtgcagtgcgactaacgtcttggggtctatcaccagcagctgcaccgtggcggtagcaagggtgcctggtaaattagcccctccagaggttcctcagacatatcaggacaccgctctggtactatggaaacctggagatagcagggcgccatgcacctatacacttgaacgccgcgttgatggcgagagcgtatggcaccccgtttcaagcgggattcctgattgctattacaatgtgacccacctgcctgtaggcgtcaccgttagatttcgcgtcgcttgcgccaaccgggcaggccaaggcccattttccaactcctcggaaaaggtcttcgtaaggggcacccaggacagctctgctgtgccatcagcagcccatcaagaagctccagtcacgagtcgccctgctcgagctagaccacccgattcccccacgtccctggcgcctcctctcgccccagcggctccaacccccccatcagtcaccgttagtcccagtagccctccaacccctcccagccaggcactaagttctcttaaagcggtcggacctccgccccagacccctcctaggcgtcaccggggcttgcaggcggcccgtcccgcagagcccacactgccttctacacacgtcacgccgtcggaacccaagccttttgtcttggacaccggcactcccattcccgccagcactccgcaaggcgtgaaacctgtgagtagtagcactcctgtgtatgtggttacttcattcgtgtcggcaccacccgctccagaacctcctgcacctgagccacctcctgagcccaccaaggtgacagtccaaagccttagtcccgccaaagaagtcgtgagctcacctgggagctcaccgagatcctctcctaggcccgaaggaaccacccttagacaagggccaccgcagaagccgtataccttcttggaggagaaagcccgggggaggttcggagtggtgagagcatgccgcgagaacgcaacaggtcgcactttcgtggccaagattgttccgtatgccgcagaaggcaaacggcgggtccttcaagagtacgaggtgctccgcacactccaccatgagaggattatgtccctgcatgaggcttacattacccctcggtatcttgtccttattgctgagtcctgcggcaatagagagctcttgtgcgggctgtccgatcgcttccgctattctgaagacgatgttgctacctacatggtgcagctcctgcaaggcctggactatctgcacggacaccacgtgctgcatctggatattaaacccgacaatctactgctggccccagataatgctttaaagattgtcgactttggaagcgcccaaccttacaacccacaggctttgcgcccactgggccatcgcactggcaccctcgagtttatggcaccagagatggtgaaaggggaacctattggctctgccactgatatctggggggccggagtcttaacctacattatgttatcgggacggtcacccttctatgagcccgaccctcaggaaacagaagcgcggattgtcggcgggcgcttcgacgcttttcagctgtatcccaacacttcccaaagtgcaacattgttcctgcgcaaggtactttcggttcatccatggagcagaccatccctgcaggactgcctagcgcacccctggcttcaagacgcttatctcatgaaactgagaaggcagactctcacatttacaacaaacaggctcaaggaatttttgggggaacagcgccggcgacgcgcagaggcggctacacgccacaaggtacttctgcggtcttaccccggagggccctag

SEQ ID NO: 160012 - DNA, 9672 bp, Artificial Sequence
  derived and/or modified sequence
atgcagaaagcccggggcacgcgaggcgaggatgcgggcacgagggcaccccccagccccggagtgcccccgaaaagggccaaggtgggggccggcggcggggctcctgtggccgtggccggggcgccagtcttcctgcggcccctgaagaacgcggcggtgtgcgcgggcagcgacgtgcggctgcgggtggtggtgagcgggacgccccagcccagcctccgctggttccgggatgggcagctcctgcccgcgccggcccccgagcccagctgcctgtggctgcggcgctgcggggcgcaggacgccggcgtgtacagctgcatggcccagaacgagcggggccgggcctcctgcgaggcggtgctcacagtgctggaggtcggagactcagagacggctgaggatgacatcagcgatgtgcagggaacccagcgcctggagcttcgggatgacggggccttcagcacccccacggggggttctgacaccctggtgggcacctccctggacacacccccgacctccgtgacaggcacctcagaggagcaagtgagctggtggggcagcgggcagacggtcctggagcaggaagcgggcagtgggggtggcacccgccgcctcccgggcagcccaaggcaagcacaggcaaccggggccgggccacggcacctgggggtggagccgctggtgcgggcatctcgagctaatctggtgggcgcaagctgggggtcagaggatagcctttccgtggccagtgacctgtacggcagcgcattcagcctgtacagaggacgggcgctctctatccacgtcagcgtccctcagagcgggttgcgcagggaggagcccgaccttcagcctcaactggccagcgaagccccacgccgccctgcccagccgcctccttccaaatccgcgctgctccccccaccgtcccctcgggtcgggaagcggtccccgccgggacccccggcccagcccgcggccacccccacgtcgccccaccgtcgcactcaggagcctgtgctgcccgaggacaccaccaccgaagagaagcgagggaagaagtccaagtcgtccgggccctccctggcgggcaccgcggaatcccgaccccagacgccactgagcgaggcctcaggccgcctgtcggcgttgggccgatcgcctaggctggtgcgcgccggctcccgcatcctggacaagctgcagttcttcgaggagcgacggcgcagcctggagcgcagcgactcgccgccggcgcccctgcggccctgggtgcccctgcgcaaggcccgctctctggagcagcccaagtcggagcgcggcgcaccgtggggcacccccggggcctcgcaggaagaactgcgggcgccaggcagcgtggccgagcggcgccgcctgttccagcagaaagcggcctcgctggacgagcgcacgcgtcagcgcagcccggcctcagacctcgagctgcgcttcgcccaggagctgggccgcatccgccgctccacgtcgcgggaggagctggtgcgctcgcacgagtccctgcgcgccacgctgcagcgtgccccatcccctcgagagcccggcgagcccccgctcttctctcggccctccacccccaagacatcgcgggccgtgagccccgccgccgcccagccgccctctccgagcagcgcggagaagccgggggacgagcctgggaggcccaggagccgcgggccggcgggcaggacagagccgggggaaggcccgcagcaggaggttaggcgtcgggaccaattcccgctgacccggagcagagccatccaggagtgcaggagccctgtgccgccccccgccgccgatcccccagaggccaggacgaaagcaccccccggtcggaagcgggagcccccggcgcaggccgtgcgcttcctgccctgggccacgccgggcctggagggcgctgctgtaccccagaccttggagaagaacagggcggggcctgaggcagagaagaggcttcgcagagggccggaggaggacggtccctgggggccctgggaccgccgaggggcccgcagccagggcaaaggtcgccgggcccggcccacctcccctgagctcgagtcttcggatgactcctacgtgtccgctggagaagagcccctagaggcccctgtgtttgagatccccctgcagaatgtggtggtggcaccaggggcagatgtgctgctcaagtgtatcatcactgccaaccccccgccccaagtgtcctggcacaaggatgggtcagcgctgcgcagcgagggccgcctcctcctccgggctgagggtgagcggcacaccctgctgctcagggaggccagggcagcagatgccgggagctatatggccaccgccaccaacgagctgggccaggccacctgtgccgcctcactgaccgtgagacccggtgggtctacatcccctttcagcagccccatcacctccgacgaggaatacctgagccccccagaggagttcccagagcctggggagacctggccgcgaacccccaccatgaagcccagtcccagccagaaccgccgttcttctgacactggctccaaggcaccccccaccttcaaggtctcacttatggaccagtcagtaagagaaggccaagatgtcatcatgagcatccgcgtgcagggggagcccaagcctgtggtctcctggctgagaaaccgccagcccgtgcgcccagaccagcggcgctttgcggaggaggctgagggtgggctgtgccggctgcggatcctggctgcagagcgtggcgatgctggtttctacacttgcaaagcggtcaatgagtatggtgctcggcagtgcgaggcccgcttggaggtccgagcacaccctgaaagccggtccctggccgtgctggcccccctgcaggacgtggacgtgggggccggggagatggcgctgtttgagtgcctggtggcggggcccactgacgtggaggtggattggctgtgccgtggccgcctgctgcagcctgcactgctcaaatgcaagatgcatttcgatggccgcaaatgcaagctgctacttacatctgtacatgaggacgacagtggcgtctacacctgcaagctcagcacggccaaagatgagctgacctgcagtgcccggctgaccgtgcggccctcgttggcacccctgttcacacggctgctggaagatgtggaggtgttggagggccgagctgcccgtttcgactgcaagatcagtggcaccccgccccctgttgttacctggactcattttggctgccccatggaggagagtgagaacttgcggctgcggcaggacgggggtctgcactcactgcacattgcccatgtgggcagcgaggacgaggggctctatgcggtcagtgctgttaacacccatggccaggcccactgctcagcccagctgtatgtagaagagccccggacagccgcctcaggccccagctcgaagctggagaagatgccatccattcccgaggagccagagcagggtgagctggagcggctgtccattcctgacttcctgcggccactgcaggacctggaggtgggactggccaaggaggccatgctagagtgccaggtgaccggcctgccctaccccaccatcagctggttccacaatggccaccgcatccagagcagcgacgaccggcgcatgacacagtacagggatgtccatcgcttggtgttccctgccgtggggcctcagcacgccggtgtctacaagagcgtcattgccaacaagctgggcaaagctgcctgctatgcccacctgtatgtcacagatgtggtcccaggccctccagatggcgccccgcaggtggtggctgtgacggggaggatggtcacactcacatggaacccccccaggagtctggacatggccatcgacccggactccctgacgtacacagtgcagcaccaggtgctgggctcggaccagtggacggcactggtcacaggcctgcgggagccagggtgggcagccacagggctgcgtaagggggtccagcacatcttccgggtcctcagcaccactgtcaagagcagcagcaagccctcacccccttctgagcctgtgcagctgctggagcacggcccaaccctggaggaggcccctgccatgctggacaaaccagacatcgtgtatgtggtggagggacagcctgccagcgtcaccgtcacattcaaccatgtggaggcccaggtcgtctggaggagctgccgaggggccctcctagaggcacgggccggtgtgtacgagctgagccagccagatgatgaccagtactgtcttcggatctgccgggtgagccgccgggacatgggggccctcacctgcaccgcccgaaaccgtcacggcacacagacctgctcggtcacattggagctggcagaggcccctcggtttgagtccatcatggaggacgtggaggtgggggctggggaaactgctcgctttgcggtggtggtcgagggaaaaccactgccggacatcatgtggtacaaggacgaggtgctgctgaccgagagcagccatgtgagcttcgtgtacgaggagaatgagtgctccctggtggtgctcagcacgggggcccaggatggaggcgtctacacctgcaccgcccagaacctggcgggtgaggtctcctgcaaagcagagttggctgtgcattcagctcagacagctatggaggtcgagggggtcggggaggatgaggaccatcgaggaaggagactcagcgacttttatgacatccaccaggagatcggcaggggtgctttctcctacttgcggcgcatagtggagcgtagctccggcctggagtttgcggccaagttcatccccagccaggccaagccaaaggcatcagcgcgtcgggaggcccggctgctggccaggctccagcacgactgtgtcctctacttccatgaggccttcgagaggcgccggggactggtcattgtcaccgagctctgcacagaggagctgctggagcgaatcgccaggaaacccaccgtgtgtgagtctgagatccgggcctatatgcggcaggtgctagagggaatacactacctgcaccagagccacgtgctgcacctcgatgtcaagcctgagaacctgctggtgtgggatggtgctgcgggcgagcagcaggtgcggatctgtgactttgggaatgcccaggagctgactccaggagagccccagtactgccagtatggcacacctgagtttgtagcacccgagattgtcaatcagagccccgtgtctggagtcactgacatctggcctgtgggtgttgttgccttcctctgtctgacaggaatctccccgtttgttggggaaaatgaccggacaacattgatgaacatccgaaactacaacgtggccttcgaggagaccacattcctgagcctgagcagggaggcccggggcttcctcatcaaagtgttggtgcaggaccggctgagacctaccgcagaagagaccctagaacatccttggttcaaaactcaggcaaagggcgcagaggtgagcacggatcacctgaagctattcctctcccggcggaggtggcagcgctcccagatcagctacaaatgccacctggtgctgcgccccatccccgagctgctgcgggcccccccagagcgggtgtgggtgaccatgcccagaaggccaccccccagtggggggctctcatcctcctcggattctgaagaggaagagctggaagagctgccctcagtgccccgcccactgcagcccgagttctctggctcccgggtgtccctcacagacattcccactgaggatgaggccctggggaccccagagactggggctgccacccccatggactggcaggagcagggaagggctccctctcaggaccaggaggctcccagcccagaggccctcccctccccaggccaggagcccgcagctggggctagccccaggcggggagagctccgcaggggcagctcggctgagagcgccctgccccgggccgggccgcgggagctgggccggggcctgcacaaggcggcgtctgtggagctgccgcagcgccggagccccagcccgggagccacccgcctggcccggggaggcctgggtgagggcgagtatgcccagaggctgcaggccctgcgccagcggctgctgcggggaggccccgaggatggcaaggtcagcggcctcaggggtcccctgctggagagcctggggggccgtgctcgggacccccggatggcacgagctgcctccagcgaggcagcgccccaccaccagcccccactcgagaaccggggcctgcaaaagagcagcagcttctcccagggtgaggcggagccccggggccggcaccgccgagcgggggcgcccctcgagatccccgtggccaggcttggggcccgtaggctacaggagtctccttccctgtctgccctcagcgaggcccagccatccagccctgcacggcccagcgcccccaaacccagtacccctaagtctgcagaaccttctgccaccacacctagtgatgctccgcagccccccgcaccccagcctgcccaagacaaggctccagagcccaggccagaaccagtccgagcctccaagcctgcaccacccccccaggccctgcaaaccctagcgctgcccctcacaccctatgctcagatcattcagtccctccagctgtcaggccacgcccagggcccctcgcagggccctgccgcgccgccttcagagcccaagccccacgctgctgtctttgccagggtggcctccccacctccgggagcccccgagaagcgcgtgccctcagccgggggtcccccggtgctagccgagaaagcccgagttcccacggtgccccccaggccaggcagcagtctcagtagcagcatcgaaaacttggagtcggaggccgtgttcgaggccaagttcaagcgcagccgcgagtcgcccctgtcgctggggctgcggctgctgagccgttcgcgctcggaggagcgcggccccttccgtggggccgaggaggaggatggcatataccggcccagcccggcggggaccccgctggagctggtgcgacggcctgagcgctcacgctcggtgcaggacctcagggctgtcggagagcctggcctcgtccgccgcctctcgctgtcactgtcccagcggctgcggcggacccctcccgcgcagcgccacccggcctgggaggcccgcggcggggacggagagagctcggagggcgggagctcggcgcggggctccccggtgctggcgatgcgcaggcggctgagcttcaccctggagcggctgtccagccgattgcagcgcagtggcagcagcgaggactcggggggcgcgtcgggccgcagcacgccgctgttcggacggcttcgcagggccacgtccgagggcgagagtctgcggcgccttggccttccgcacaaccagttggccgcccaggccggcgccaccacgccttccgccgagtccctgggctccgaggccagcgccacgtcgggctcctcagccccaggggaaagccgaagccggctccgctggggcttctctcggccgcggaaggacaaggggttatcgccaccaaacctctctgccagcgtccaggaggagttgggtcaccagtacgtgcgcagtgagtcagacttccccccagtcttccacatcaaactcaaggaccaggtgctgctggagggggaggcagccaccctgctctgcctgccagcggcctgccctgcaccgcacatctcctggatgaaagacaagaagtccttgaggtcagagccctcagtgatcatcgtgtcctgcaaagatgggcggcagctgctcagcatcccccgggcgggcaagcggcacgccggtctctatgagtgctcggccaccaacgtactgggcagcatcaccagctcctgtaccgtggctgtggcccgagtcccaggaaagctagctcctccagaggtaccccagacctaccaggacacggcgctggtgctgtggaagccgggagacagccgggcaccttgcacgtatacgctggagcggcgagtggatggggagtctgtgtggcaccctgtgagctcaggcatccccgactgttactacaacgtgacccacctgccagttggcgtgactgtgaggttccgtgtggcctgtgccaaccgtgctgggcaggggcccttcagcaactcttctgagaaggtctttgtcaggggtactcaagattcttcagctgtgccatctgctgcccaccaagaggcccctgtcacctcaaggccagccagggcccggcctcctgactctcctacctcactggccccacccctagctcctgctgcccccacacccccgtcagtcactgtcagcccctcatctccccccacacctcctagccaggccttgtcctcgctcaaggctgtgggtccaccaccccaaacccctccacgaagacacaggggcctgcaggctgcccggccagcggagcccaccctacccagtacccacgtcaccccaagtgagcccaagcctttcgtccttgacactgggaccccgatcccagcctccactcctcaaggggttaaaccagtgtcttcctctactcctgtgtatgtggtgacttcctttgtgtctgcaccaccagcccctgagcccccagcccctgagccccctcctgagcctaccaaggtgactgtgcagagcctcagcccggccaaggaggtggtcagctcccctgggagcagtccccgaagctctcccaggcctgagggtaccactcttcgacagggtccccctcagaaaccctacaccttcctggaggagaaagccaggggccgctttggtgttgtgcgagcgtgccgggagaatgccacggggcgaacgttcgtggccaagatcgtgccctatgctgccgagggcaagcggcgggtcctgcaggagtacgaggtgctgcggaccctgcaccacgagcggatcatgtccctgcacgaggcctacatcacccctcggtacctcgtgctcattgctgagagctgtggcaaccgggaactcctctgtgggctcagtgacaggttccggtattctgaggatgacgtggccacttacatggtgcagctgctacaaggcctggactacctccacggccaccacgtgctccacctagacatcaagccagacaacctgctgctggcccctgacaatgccctcaagattgtggactttggcagtgcccagccctacaacccccaggcccttaggccccttggccaccgcacgggcacgctggagttcatggctccggagatggtgaagggagaacccatcggctctgccacggacatctggggagcgggtgtgctcacttacattatgctcagtggacgctccccgttctatgagccagacccccaggaaacggaggctcggattgtggggggccgctttgatgccttccagctgtaccccaatacatcccagagcgccaccctcttcttgcgaaaggttctctctgtacatccctggctcagcaggccatccagctgtctgtctgtctgccacaaggaaataaaaatggcaagcagc

SEQ ID NO: 160013 - DNA, 10782 bp, Artificial Sequence
  derived and/or modified sequence
acaggccgaaggcgggcgggcagcaggaaggcaggccgccggccccccagacttgtctcctagggcaccgtcccgcgggtgcccccgtggccgcccagttccggcgtccccccagcccagctctcagtggccatgcagaaagcccggggcacgcgaggcgaggatgcgggcacgagggcaccccccagccccggagtgcccccgaaaagggccaaggtgggggccggcggcggggctcctgtggccgtggccggggcgccagtcttcctgcggcccctgaagaacgcggcggtgtgcgcgggcagcgacgtgcggctgcgggtggtggtgagcgggacgccccagcccagcctccgctggttccgggatgggcagctcctgcccgcgccggcccccgagcccagctgcctgtggctgcggcgctgcggggcgcaggacgccggcgtgtacagctgcatggcccagaacgagcggggccgggcctcctgcgaggcggtgctcacagtgctggaggtcggagactcagagacggctgaggatgacatcagcgatgtgcagggaacccagcgcctggagcttcgggatgacggggccttcagcacccccacggggggttctgacaccctggtgggcacctccctggacacacccccgacctccgtgacaggcacctcagaggagcaagtgagctggtggggcagcgggcagacggtcctggagcaggaagcgggcagtgggggtggcacccgccgcctcccgggcagcccaaggcaagcacaggcaaccggggccgggccacggcacctgggggtggagccgctggtgcgggcatctcgagctaatctggtgggcgcaagctgggggtcagaggatagcctttccgtggccagtgacctgtacggcagcgcattcagcctgtacagaggacgggcgctctctatccacgtcagcgtccctcagagcgggttgcgcagggaggagcccgaccttcagcctcaactggccagcgaagccccacgccgccctgcccagccgcctccttccaaatccgcgctgctccccccaccgtcccctcgggtcgggaagcggtccccgccgggacccccggcccagcccgcggccacccccacgtcgccccaccgtcgcactcaggagcctgtgctgcccgaggacaccaccaccgaagagaagcgagggaagaagtccaagtcgtccgggccctccctggcgggcaccgcggaatcccgaccccagacgccactgagcgaggcctcaggccgcctgtcggcgttgggccgatcgcctaggctggtgcgcgccggctcccgcatcctggacaagctgcagttcttcgaggagcgacggcgcagcctggagcgcagcgactcgccgccggcgcccctgcggccctgggtgcccctgcgcaaggcccgctctctggagcagcccaagtcggagcgcggcgcaccgtggggcacccccggggcctcgcaggaagaactgcgggcgccaggcagcgtggccgagcggcgccgcctgttccagcagaaagcggcctcgctggacgagcgcacgcgtcagcgcagcccggcctcagacctcgagctgcgcttcgcccaggagctgggccgcatccgccgctccacgtcgcgggaggagctggtgcgctcgcacgagtccctgcgcgccacgctgcagcgtgccccatcccctcgagagcccggcgagcccccgctcttctctcggccctccacccccaagacatcgcgggccgtgagccccgccgccgcccagccgccctctccgagcagcgcggagaagccgggggacgagcctgggaggcccaggagccgcgggccggcgggcaggacagagccgggggaaggcccgcagcaggaggttaggcgtcgggaccaattcccgctgacccggagcagagccatccaggagtgcaggagccctgtgccgccccccgccgccgatcccccagaggccaggacgaaagcaccccccggtcggaagcgggagcccccggcgcaggccgtgcgcttcctgccctgggccacgccgggcctggagggcgctgctgtaccccagaccttggagaagaacagggcggggcctgaggcagagaagaggcttcgcagagggccggaggaggacggtccctgggggccctgggaccgccgaggggcccgcagccagggcaaaggtcgccgggcccggcccacctcccctgagctcgagtcttcggatgactcctacgtgtccgctggagaagagcccctagaggcccctgtgtttgagatccccctgcagaatgtggtggtggcaccaggggcagatgtgctgctcaagtgtatcatcactgccaaccccccgccccaagtgtcctggcacaaggatgggtcagcgctgcgcagcgagggccgcctcctcctccgggctgagggtgagcggcacaccctgctgctcagggaggccagggcagcagatgccgggagctatatggccaccgccaccaacgagctgggccaggccacctgtgccgcctcactgaccgtgagacccggtgggtctacatcccctttcagcagccccatcacctccgacgaggaatacctgagccccccagaggagttcccagagcctggggagacctggccgcgaacccccaccatgaagcccagtcccagccagaaccgccgttcttctgacactggctccaaggcaccccccaccttcaaggtctcacttatggaccagtcagtaagagaaggccaagatgtcatcatgagcatccgcgtgcagggggagcccaagcctgtggtctcctggctgagaaaccgccagcccgtgcgcccagaccagcggcgctttgcggaggaggctgagggtgggctgtgccggctgcggatcctggctgcagagcgtggcgatgctggtttctacacttgcaaagcggtcaatgagtatggtgctcggcagtgcgaggcccgcttggaggtccgagcacaccctgaaagccggtccctggccgtgctggcccccctgcaggacgtggacgtgggggccggggagatggcgctgtttgagtgcctggtggcggggcccactgacgtggaggtggattggctgtgccgtggccgcctgctgcagcctgcactgctcaaatgcaagatgcatttcgatggccgcaaatgcaagctgctacttacatctgtacatgaggacgacagtggcgtctacacctgcaagctcagcacggccaaagatgagctgacctgcagtgcccggctgaccgtgcggccctcgttggcacccctgttcacacggctgctggaagatgtggaggtgttggagggccgagctgcccgtttcgactgcaagatcagtggcaccccgccccctgttgttacctggactcattttggctgccccatggaggagagtgagaacttgcggctgcggcaggacgggggtctgcactcactgcacattgcccatgtgggcagcgaggacgaggggctctatgcggtcagtgctgttaacacccatggccaggcccactgctcagcccagctgtatgtagaagagccccggacagccgcctcaggccccagctcgaagctggagaagatgccatccattcccgaggagccagagcagggtgagctggagcggctgtccattcctgacttcctgcggccactgcaggacctggaggtgggactggccaaggaggccatgctagagtgccaggtgaccggcctgccctaccccaccatcagctggttccacaatggccaccgcatccagagcagcgacgaccggcgcatgacacagtacagggatgtccatcgcttggtgttccctgccgtggggcctcagcacgccggtgtctacaagagcgtcattgccaacaagctgggcaaagctgcctgctatgcccacctgtatgtcacagatgtggtcccaggccctccagatggcgccccgcaggtggtggctgtgacggggaggatggtcacactcacatggaacccccccaggagtctggacatggccatcgacccggactccctgacgtacacagtgcagcaccaggtgctgggctcggaccagtggacggcactggtcacaggcctgcgggagccagggtgggcagccacagggctgcgtaagggggtccagcacatcttccgggtcctcagcaccactgtcaagagcagcagcaagccctcacccccttctgagcctgtgcagctgctggagcacggcccaaccctggaggaggcccctgccatgctggacaaaccagacatcgtgtatgtggtggagggacagcctgccagcgtcaccgtcacattcaaccatgtggaggcccaggtcgtctggaggagctgccgaggggccctcctagaggcacgggccggtgtgtacgagctgagccagccagatgatgaccagtactgtcttcggatctgccgggtgagccgccgggacatgggggccctcacctgcaccgcccgaaaccgtcacggcacacagacctgctcggtcacattggagctggcagaggcccctcggtttgagtccatcatggaggacgtggaggtgggggctggggaaactgctcgctttgcggtggtggtcgagggaaaaccactgccggacatcatgtggtacaaggacgaggtgctgctgaccgagagcagccatgtgagcttcgtgtacgaggagaatgagtgctccctggtggtgctcagcacgggggcccaggatggaggcgtctacacctgcaccgcccagaacctggcgggtgaggtctcctgcaaagcagagttggctgtgcattcagctcagacagctatggaggtcgagggggtcggggaggatgaggaccatcgaggaaggagactcagcgacttttatgacatccaccaggagatcggcaggggtgctttctcctacttgcggcgcatagtggagcgtagctccggcctggagtttgcggccaagttcatccccagccaggccaagccaaaggcatcagcgcgtcgggaggcccggctgctggccaggctccagcacgactgtgtcctctacttccatgaggccttcgagaggcgccggggactggtcattgtcaccgagctctgcacagaggagctgctggagcgaatcgccaggaaacccaccgtgtgtgagtctgagatccgggcctatatgcggcaggtgctagagggaatacactacctgcaccagagccacgtgctgcacctcgatgtcaagcctgagaacctgctggtgtgggatggtgctgcgggcgagcagcaggtgcggatctgtgactttgggaatgcccaggagctgactccaggagagccccagtactgccagtatggcacacctgagtttgtagcacccgagattgtcaatcagagccccgtgtctggagtcactgacatctggcctgtgggtgttgttgccttcctctgtctgacaggaatctccccgtttgttggggaaaatgaccggacaacattgatgaacatccgaaactacaacgtggccttcgaggagaccacattcctgagcctgagcagggaggcccggggcttcctcatcaaagtgttggtgcaggaccggctgagacctaccgcagaagagaccctagaacatccttggttcaaaactcaggcaaagggcgcagaggtgagcacggatcacctgaagctattcctctcccggcggaggtggcagcgctcccagatcagctacaaatgccacctggtgctgcgccccatccccgagctgctgcgggcccccccagagcgggtgtgggtgaccatgcccagaaggccaccccccagtggggggctctcatcctcctcggattctgaagaggaagagctggaagagctgccctcagtgccccgcccactgcagcccgagttctctggctcccgggtgtccctcacagacattcccactgaggatgaggccctggggaccccagagactggggctgccacccccatggactggcaggagcagggaagggctccctctcaggaccaggaggctcccagcccagaggccctcccctccccaggccaggagcccgcagctggggctagccccaggcggggagagctccgcaggggcagctcggctgagagcgccctgccccgggccgggccgcgggagctgggccggggcctgcacaaggcggcgtctgtggagctgccgcagcgccggagccccagcccgggagccacccgcctggcccggggaggcctgggtgagggcgagtatgcccagaggctgcaggccctgcgccagcggctgctgcggggaggccccgaggatggcaaggtcagcggcctcaggggtcccctgctggagagcctggggggccgtgctcgggacccccggatggcacgagctgcctccagcgaggcagcgccccaccaccagcccccactcgagaaccggggcctgcaaaagagcagcagcttctcccagggtgaggcggagccccggggccggcaccgccgagcgggggcgcccctcgagatccccgtggccaggcttggggcccgtaggctacaggagtctccttccctgtctgccctcagcgaggcccagccatccagccctgcacggcccagcgcccccaaacccagtacccctaagtctgcagaaccttctgccaccacacctagtgatgctccgcagccccccgcaccccagcctgcccaagacaaggctccagagcccaggccagaaccagtccgagcctccaagcctgcaccacccccccaggccctgcaaaccctagcgctgcccctcacaccctatgctcagatcattcagtccctccagctgtcaggccacgcccagggcccctcgcagggccctgccgcgccgccttcagagcccaagccccacgctgctgtctttgccagggtggcctccccacctccgggagcccccgagaagcgcgtgccctcagccgggggtcccccggtgctagccgagaaagcccgagttcccacggtgccccccaggccaggcagcagtctcagtagcagcatcgaaaacttggagtcggaggccgtgttcgaggccaagttcaagcgcagccgcgagtcgcccctgtcgctggggctgcggctgctgagccgttcgcgctcggaggagcgcggccccttccgtggggccgaggaggaggatggcatataccggcccagcccggcggggaccccgctggagctggtgcgacggcctgagcgctcacgctcggtgcaggacctcagggctgtcggagagcctggcctcgtccgccgcctctcgctgtcactgtcccagcggctgcggcggacccctcccgcgcagcgccacccggcctgggaggcccgcggcggggacggagagagctcggagggcgggagctcggcgcggggctccccggtgctggcgatgcgcaggcggctgagcttcaccctggagcggctgtccagccgattgcagcgcagtggcagcagcgaggactcggggggcgcgtcgggccgcagcacgccgctgttcggacggcttcgcagggccacgtccgagggcgagagtctgcggcgccttggccttccgcacaaccagttggccgcccaggccggcgccaccacgccttccgccgagtccctgggctccgaggccagcgccacgtcgggctcctcagccccaggggaaagccgaagccggctccgctggggcttctctcggccgcggaaggacaaggggttatcgccaccaaacctctctgccagcgtccaggaggagttgggtcaccagtacgtgcgcagtgagtcagacttccccccagtcttccacatcaaactcaaggaccaggtgctgctggagggggaggcagccaccctgctctgcctgccagcggcctgccctgcaccgcacatctcctggatgaaagacaagaagtccttgaggtcagagccctcagtgatcatcgtgtcctgcaaagatgggcggcagctgctcagcatcccccgggcgggcaagcggcacgccggtctctatgagtgctcggccaccaacgtactgggcagcatcaccagctcctgtaccgtggctgtggcccgagtcccaggaaagctagctcctccagaggtaccccagacctaccaggacacggcgctggtgctgtggaagccgggagacagccgggcaccttgcacgtatacgctggagcggcgagtggatggggagtctgtgtggcaccctgtgagctcaggcatccccgactgttactacaacgtgacccacctgccagttggcgtgactgtgaggttccgtgtggcctgtgccaaccgtgctgggcaggggcccttcagcaactcttctgagaaggtctttgtcaggggtactcaagattcttcagctgtgccatctgctgcccaccaagaggcccctgtcacctcaaggccagccagggcccggcctcctgactctcctacctcactggccccacccctagctcctgctgcccccacacccccgtcagtcactgtcagcccctcatctccccccacacctcctagccaggccttgtcctcgctcaaggctgtgggtccaccaccccaaacccctccacgaagacacaggggcctgcaggctgcccggccagcggagcccaccctacccagtacccacgtcaccccaagtgagcccaagcctttcgtccttgacactgggaccccgatcccagcctccactcctcaaggggttaaaccagtgtcttcctctactcctgtgtatgtggtgacttcctttgtgtctgcaccaccagcccctgagcccccagcccctgagccccctcctgagcctaccaaggtgactgtgcagagcctcagcccggccaaggaggtggtcagctcccctgggagcagtccccgaagctctcccaggcctgagggtaccactcttcgacagggtccccctcagaaaccctacaccttcctggaggagaaagccaggggccgctttggtgttgtgcgagcgtgccgggagaatgccacggggcgaacgttcgtggccaagatcgtgccctatgctgccgagggcaagcggcgggtcctgcaggagtacgaggtgctgcggaccctgcaccacgagcggatcatgtccctgcacgaggcctacatcacccctcggtacctcgtgctcattgctgagagctgtggcaaccgggaactcctctgtgggctcagtgacaggttccggtattctgaggatgacgtggccacttacatggtgcagctgctacaaggcctggactacctccacggccaccacgtgctccacctagacatcaagccagacaacctgctgctggcccctgacaatgccctcaagattgtggactttggcagtgcccagccctacaacccccaggcccttaggccccttggccaccgcacgggcacgctggagttcatggctccggagatggtgaagggagaacccatcggctctgccacggacatctggggagcgggtgtgctcacttacattatgctcagtggacgctccccgttctatgagccagacccccaggaaacggaggctcggattgtggggggccgctttgatgccttccagctgtaccccaatacatcccagagcgccaccctcttcttgcgaaaggttctctctgtacatccctggagccggccctccctgcaggactgcctggcccacccatggttgcaggacgcctacctgatgaagctgcgccgccagacgctcaccttcaccaccaaccggctcaaggagttcctgggcgagcagcggcggcgccgggctgaggctgccacccgccacaaggtgctgctgcgctcctaccctggcggcccctagaggcacggaccacagccaggcctcgggcttcaactggggttcccaccaatgccacgggacattccagggcccacgctgagccaggcgggcctggggcttcggttaccaccagcagcaacatctggctgggctcttacctcatagaccttcaaggacagagaccccagggcctggacctgatgccaccccaggccaaagccagagtgggagacccattggtcaggctcagcagggtgggaacaggcagagggacaagaggggaatggagaagtggagaggaaaaggaatcgagggacaggaagggggaggctctaggaaggttctgggttgggggtcagtgcatctcagggagaaccaaggaaggtgggcatggctggagaggaggaaaaggaaggagccccaggtgtcagggcagtaggctgggagtcagtgtggcaaagcgggggcaggacacagatacagtggcaggggcccagggctgggacatgagagaaggcagcgaggcggcagagggagaagagaggactcaggtggaggtggggtgggtcagctgtcagcatccctcagaggagaaatgtggagagctggaggccagcagtcactcacactcgctctgtcctcctgtccagtggatacagccctgggcgctctgctggcccaaggatgtccccactgcccctccatggcctctggccttcttcccattcatatttatttatttattgacttttatgaagtttccccttccatccgatccctactgcccatgttgtcctgaccatccctcccagccatccagctgtctgtctgtctgccacaaggaaataaaaatggcaagcagcataa

SEQ ID NO: 160014 - DNA, 9675 bp, Artificial Sequence
  derived and/or modified sequence
atgcagaaagcccgaggaacacgtggcgaggatgctggaaccagggcacctccctctcccggagttccgcctaagcgggctaaagtgggagcagggggaggagctccggtcgccgtcgctggtgcacccgtttttcttcgtcccctgaaaaacgccgcagtgtgcgcaggttctgatgtacgtctgcgggtcgtggtgtcagggactccccagccctcgttgcgctggtttcgcgatggccagctgcttcccgcacccgcaccagagccttcttgtctgtggcttagacgttgtggagctcaggatgccggagtctattcgtgcatggcccagaacgaaaggggccgagcttcatgcgaggccgtgctgacagttttggaggtgggggactctgaaacggctgaagatgatataagcgacgtgcaggggacccagaggttggaactgcgcgatgacggtgctttctctacaccgaccggcggttctgacaccttggtggggacatctctggacacgccacctacctcagtgacaggtacctctgaagaacaggtgtcttggtggggttccggccagaccgtgctggaacaggaagcagggtcagggggaggcacaaggagactccctggatctcctagacaagcccaggccaccggtgccggacctcgccatcttggagtggagccgctggtgagggcttcacgggcaaacctcgtcggagcctcttgggggagcgaagactcactgagcgtggccagtgacctgtatggtagcgccttttctctctaccggggtcgggcactttcaatccacgtgtctgttccacagagcggtctgcgtagagaggaacctgatttgcagccacagctcgcttccgaggctcccaggcgaccagcacaacctcccccatctaagagcgcattgctgcctcccccatcaccgcgagttgggaaaagaagtcctcctggtccaccagctcagcccgcagccacacctacctcacctcaccgccgtactcaagaaccagtgctgcccgaggatactactacagaggaaaaacgtggtaagaaaagtaaaagctccggaccctcgcttgcgggaacggctgagagcagaccacaaacacccctttcagaggcctccggacggctctctgccctgggcaggagtcccaggctggtgcgcgctgggagcagaattctggataagctgcagttctttgaggaacgcagacgatccctcgagagatcagatagtccacccgctcctttgagaccctgggtgcccctgcgaaaagcacgctctctagaacagcctaaatcagagagaggagctccatgggggacccccggagcaagccaggaggaactccgcgcacctgggagtgtggctgaacggcgtagactcttccagcaaaaagcagcttcactcgatgagagaacccgccagaggtcccctgcctcagacttggagctcagattcgcccaagagctaggacggattaggcggagtacatcacgtgaagaacttgttcgctctcacgagtctcttcgtgcgaccctgcaaagggccccttccccaagggagccaggtgagccacctctgttctcacgacccagcaccccgaaaacctctcgcgcagtgtcccccgcagctgcccagcctccctctccctcttccgccgaaaaaccgggtgatgagcctggtcgcccaaggtccagaggacccgcaggtagaaccgagccgggtgaagggcctcagcaggaagtgcgtcgtagggaccagtttccgctgactcgtagccgggcaattcaagaatgccggagcccggttcccccacccgcagccgatccccctgaggctagaaccaaggctccaccaggacggaaaagagaacctcctgctcaggctgtgcgttttctcccttgggccacccctggactggaaggcgctgccgttccccagactcttgaaaagaatagagccggtccagaagccgaaaaaaggctgcggcgtggacccgaggaagatgggccatggggcccatgggaccggagaggagcaaggagccagggcaaggggagaagagctaggcctacatctcccgagctggaaagttccgatgactcatatgtctccgccggagaggaaccgctggaggcccctgtcttcgagatccctctgcagaacgtggtcgtggccccaggcgctgacgttctcctcaagtgcatcattacagcaaacccgccacctcaagtttcctggcataaggatgggagtgcactgcggtccgagggcagactgctactgagggctgaaggagagagacatacccttctcctgcgcgaagctagagcagccgatgctgggtcttatatggctacggctacaaatgagttgggacaagctacctgcgctgccagtttgacagtgcgacccggtggcagcacttctcctttcagttccccgatcactagcgatgaagagtatctgagccccccagaggagtttcctgagccgggtgaaacctggccccgtactcctaccatgaagccttcccctagccagaatcgcaggtcttcagatactggtagcaaggcccctccgacttttaaagtgagtctcatggatcaaagcgtaagggagggtcaagacgttatcatgtctattagagtccagggcgaaccaaaaccagttgtaagttggctgcgtaatcgtcagcctgtgagaccagatcagagaaggtttgccgaggaagcagaaggcggactgtgtcggctgaggatcctggctgctgagcgcggtgatgcgggtttctacacctgtaaggctgttaatgagtatggcgcaaggcaatgtgaagctcggctggaggtgcgggctcacccagagagccgctctttggccgtgctggcaccccttcaggacgtagacgtgggcgcaggtgaaatggctctgttcgaatgtctggtcgccggacccactgatgtagaggtcgattggctgtgtagggggaggctgctccagcctgctctgttaaagtgtaagatgcactttgacgggaggaaatgtaagcttctgctaactagtgtccacgaggacgatagtggtgtgtacacctgcaagctcagtactgctaaagatgagctgacatgctcagcaagactgacagtgcggcctagccttgcaccacttttcacaagattgctggaggacgtggaagttctagagggacgcgcagccaggtttgattgcaagattagcggtacacctcccccagtggtaacttggactcactttggttgtcccatggaggagtctgaaaacctacgcctaagacaggacggaggactacacagcctccatatcgcacatgtagggtctgaggacgagggactgtatgcagtctccgccgtgaacacccacgggcaggctcactgttccgctcaactctacgtcgaggagccacgcactgccgcaagtggccctagctctaagttagagaaaatgcctagcatccctgaagaacctgaacagggcgaactggaaaggctctcaatacccgacttcttgagacctcttcaggacctcgaagtgggcttagctaaggaagctatgctggaatgccaagtcactggactcccttaccctaccatatcttggtttcacaatggccacaggatccagtccagcgacgacagacgtatgacgcaataccgggacgtgcacagattagtgttcccagccgtgggcccacaacacgcgggtgtgtataagtccgtgatcgctaataagctgggcaaggcagcatgttatgctcatctttacgtgaccgatgtggttcctgggcctcccgacggtgcccctcaggttgtggctgtgactggcagaatggtcacattgacttggaacccccctagatccttggatatggccatcgatccagatagcctcacttacaccgttcagcaccaggttctgggatctgatcagtggactgccctcgtgacggggctgcgagagcctggctgggccgcaaccggcctgcggaagggcgttcaacatatattccgcgtgctgagcaccacagttaagagttcctcaaaaccctccccaccctcagagccagtgcagctcctagaacacggtcctacgctggaggaggcccctgcaatgctggataaaccagatatagtttacgtcgtggaaggccaacccgcttctgtgacggtcacatttaaccacgtcgaggcacaagtggtctggaggtcctgtcggggagctctcttggaggccagagccggtgtctatgaactatctcagccagacgacgatcaatattgtctcagaatttgtagggtgagcagaagggatatgggagccctgacttgcactgctcgcaacagacacggcactcagacctgctcagtaaccctggaactggccgaggcgcctagatttgaatcaatcatggaggatgtggaggttggcgctggagaaaccgccagattcgccgtagttgttgaaggcaagccactgccggatattatgtggtataaagatgaggttctgttaacagagtcttctcatgtaagctttgtgtacgaagaaaacgagtgtagtctggtggtcctttccaccggtgctcaggacggtggagtatacacttgcaccgcccagaatctggccggtgaagtaagctgtaaagctgagctggccgtgcacagtgctcaaaccgctatggaagttgaaggcgtgggggaggatgaggatcacagaggtaggaggctaagcgacttctatgacatccaccaggaaattggacgcggagcctttagctacctgcgtagaatcgtcgagcgctcctccggactcgagtttgcagctaagtttataccctctcaggctaagccaaaggcctcagcaaggagggaggcacggctgctggcacggctgcagcacgattgtgtgctttattttcatgaggccttcgagcgcaggagggggctagtgatagttacagagttgtgcaccgaggagctgctcgagaggatcgcccgaaaaccaaccgtatgcgaatcggagatcagggcctacatgagacaagtcctcgagggcatccattatttacaccagagccacgtactgcaccttgatgtcaaaccagaaaatctcctagtctgggatggcgctgcgggtgagcaacaggtccgcatctgcgactttgggaacgcacaggagctcactccaggggagccacaatattgtcagtatggaacccctgagttcgtcgctcctgaaattgtaaaccaatctcctgtgagcggcgtgaccgatatttggcccgtcggagtagtggcattcttatgcctaactggaataagtcctttcgtaggcgaaaacgaccggacaactctgatgaacatcagaaactacaatgtagcttttgaagagaccacctttctgtctctctctcgggaagccagaggattcctgattaaagttttagtgcaggatagactccggcctactgcagaagaaaccctggagcacccgtggttcaaaacgcaggcaaagggagccgaggtttcaacagaccatttaaagctatttttaagccgcagaagatggcagagaagtcaaatatcttacaagtgccacttggttttgcggccaatccccgagcttctgcgagctccgccagagcgagtttgggtgactatgcccaggagaccaccgcctagcggcggtctgagctcctcgagcgacagcgaggaggaagaactcgaggaacttcccagtgtgccgcgacccctgcaacctgaattcagcggatctagggtttctctgacggatatccccaccgaggatgaggcgcttggaacccctgagactggggcagccaccccaatggactggcaagaacagggacgtgcccctagtcaggaccaggaggccccaagtccagaggccctcccctccccagggcaggagcccgctgccggtgcctcccctcgaagaggagagctgcgaagaggaagctctgcagagtcagcgttgccacgtgctgggcctcgtgagctggggagggggcttcataaagcagccagcgtggagctgccccagcggcgatcccccagccccggtgcaacccgactcgctcgaggaggcttaggcgaaggcgagtacgctcagagattgcaggcccttcggcagcgccttctccgcggaggcccagaagatggaaaggtgtccgggttgaggggaccgcttctagaatccctagggggtcgcgctagggatcctcgcatggcacgcgcagcttccagtgaagcggcaccccaccaccaacctcctcttgaaaaccggggactccagaaatcatcctctttctcccaaggagaagcagagccaagggggagacaccgcagggccggagctcctcttgagattcccgtggccagactgggtgcaagaaggttgcaggaatcgcctagtctgtctgccctctccgaagcacaaccttcatccccagccagaccctcggcacctaaaccgagcacgcccaagtcggccgagccctctgctactacaccaagcgacgccccacagccccctgcgcctcagcccgctcaggacaaggctcccgaaccacgacccgagcctgtgcgtgcctccaagcccgctccaccaccacaggccttacagaccctcgccctcccactgaccccctatgctcagattatacagtccctccaactcagcggccatgcgcaaggcccttctcagggccctgctgcacctcctagtgaacccaagccccatgcagcggtgtttgccagagttgcaagccctcctcccggtgcacccgagaagagggtgccttcagctggtggccctcccgtgctcgccgaaaaggctcgagtgccaaccgtccctcctcggcctgggtcaagcctttcaagctccattgagaacctggagagtgaggctgttttcgaggcaaaatttaaaaggtctagagagtctccactgtcactagggttacgacttttgagtcggtccagaagtgaggagagagggcctttcaggggagctgaggaagaggacggaatctatcgcccatccccggctgggaccccacttgagttggtgcgaaggccagaaaggtcccgtagcgtacaagacctccgggctgtcggggagcctgggctggtcaggaggttgagcctgtccttatcccagcgcttacggagaaccccacctgcccagaggcaccccgcatgggaggcacgcggtggtgacggggaatcaagcgagggcggatctagcgcaaggggatctccggtgctggctatgagacgcaggttatcttttactttggagaggttgtcttctcgcttgcagaggtctgggtccagcgaagactctggaggcgcttccgggaggagcacccccctgtttggtcgactccgacgagccactagtgagggagagagtctcaggagactgggcctgccccataatcagctggccgctcaagcgggagctacaacccctagtgccgagagcctgggttctgaggcctccgccacgtcgggttcctccgcgcctggcgaatcacgatcccggctacggtggggtttcagtcgtcccaggaaggataaaggtttgtccccaccaaatctgagcgcaagcgtgcaggaggagctcgggcaccagtacgttcgcagtgaatcagactttccccctgtgttccatattaagctgaaagaccaagtcttactggagggggaagctgccaccctcctctgtttgcctgcagcctgccccgcaccccacataagctggatgaaagacaaaaaatccttgcggtctgagccaagcgtgatcattgtgagttgcaaagacgggagacagctcctctcgatacccagggccggaaagcggcacgccggtctctacgaatgtagtgcgaccaatgttctgggctctatcacatcaagctgtaccgttgctgtggcacgggttccgggtaagcttgctcctccagaagttccacagacataccaggacacagctttggttctatggaagcccggagattcgagagccccttgcacttatacgctggaacgtcgggtggacggcgaatccgtgtggcacccagtgtcctccggcatcccagactgctactacaatgtgacgcacttgccggtgggtgtaactgtgaggttcagagtggcctgcgctaacagagcaggccagggtcccttctcaaactcttccgaaaaggtctttgtgcggggaacccaagactcttctgctgtgccgagcgccgctcatcaggaagctcctgtgaccagccgaccagcacgcgcacggcctccggattccccaacttctcttgccccaccactagcacccgctgctcctacccccccatccgtaacagtctcgccgtcttctcctcccacccccccatcccaggctctgtcctccctgaaggccgtgggaccaccgcctcagactccacctagacgacacaggggcctgcaggctgcgcgtcccgctgaaccgaccctgcctagcactcacgtgacaccctcggaaccaaaacccttcgttctagatacaggaaccccaatcccggctagtacaccccagggtgtgaagcctgtgagcagcagcacaccagtctacgtggtgacctcctttgtgtcagcccctcccgctccagaacccccagcacctgaaccccctcctgaacccacaaaagtgaccgtacaatccttgtccccggcaaaagaagtggtgagcagccctggatcaagtcctcgtagtagtccccgtccggagggcaccacactcagacaagggcctccccagaaaccgtacacatttttggaagagaaagctagaggcagattcggcgtggtgcgtgcgtgccgagagaatgccaccggcaggacatttgtcgccaaaatcgtgccttacgcagctgaaggcaaacgacgcgttctgcaggagtatgaagtgctccgtaccctacaccacgagcgtattatgtccctgcacgaagcttacatcacgccaaggtatctggtattgattgctgagtcctgtgggaacagggaattactttgcggtctgagcgatcggtttaggtacagcgaagatgacgtcgccacatacatggttcaattactccagggtctagactatctccatggccaccatgtactacatctggatatcaaaccggacaacttgctccttgcgccagataatgcgctcaaaattgtggactttgggtccgcacagccctacaacccacaggctctgcgtccactgggacaccgaactggtaccctagaatttatggctcctgagatggttaagggagaacccatcgggtcggccacggatatctggggtgcaggcgtactcacctacatcatgctcagtggccgtagccccttttatgagccagaccctcaagagaccgaggcacgcatagtgggcggacgtttcgacgcattccagttgtaccccaatacttctcaatctgccacactgttcctccggaaggtgctgtctgtgcacccgtggctgagtagacccagctcttgcctgagcgtttgtcacaaggagattaagatggccagctcatag

SEQ ID NO: 160015 - DNA, 9804 bp, Artificial Sequence
  derived and/or modified sequence
atgcaaaaggctcggggaaccagaggtgaggacgcaggcacaagagcccctccatctcccggagtcccacccaaacgcgcaaaggtcggagctgggggaggtgccccagtcgccgtggccggagccccagtttttttgcggcctttaaagaacgccgctgtgtgtgcaggatctgatgtgaggttgagggtagtagtgagcgggactccgcagccatctttacggtggtttcgagatggacagttgttgcctgccccagcacccgagccaagttgcctgtggctgcggaggtgtggggcacaggatgcaggcgtctactcgtgtatggcccagaatgagaggggaagagcctcttgcgaggctgttttgacagtgttagaggtgggggacagtgaaacagccgaagacgacattagcgatgttcagggtacccagagactcgagctaagggatgacggcgctttttctacacccactgggggttctgataccttggtggggacgtccctggacacccctcccaccagcgtgactggcacatcggaggaacaagtgagttggtggggtagcgggcagacagtgctagaacaggaggcagggagcggagggggaacccgcagactacccggatcccccaggcaggcccaggctacaggagctgggcctagacacctcggcgtggagccgctggtacgcgcaagccgagcaaatctggtgggggcatcctggggaagcgaggactctctgagcgttgcctcggatctctacggaagtgcattctcactgtataggggaagggctctgagcattcatgtgtcagttccgcagtccggattgcgccgagaagaaccagacctgcaaccacaactggcttcggaagccccacgccgtcccgctcaaccgccaccttctaagagcgcccttcttccgcctcccagccccagagtggggaagcgaagcccgccaggccctccagcacagcctgctgctacacctaccagccctcatcggcgaactcaggaacccgtgctacccgaggataccaccaccgaagagaagagaggtaagaaatcaaagtcgtctggcccttcgctcgctgggactgctgagtctagaccccagaccccgcttagtgaggctagtgggcgactatcagccctcggaaggtcccctaggctcgtcagagccggatcccggattttagataaactccagttctttgaggagcggagaagaagcctggagcgatcggatagcccacccgcaccactgcggccatgggttcccctgcggaaggcccgatcactggagcagcccaagtcggagcgaggtgcaccttgggggactccaggcgcttcacaagaggaactgagagcccctggatccgtggctgagcggaggcgcctgtttcagcaaaaggccgctagtttggacgaacgtactaggcaacggagccctgcttcagatctggagctgcggttcgcacaggaacttggcagaattcgacgctctacaagtcgggaggaactcgtgcgttctcacgagagcctgcgcgcaactcttcagagggctccatcacccagagagccaggagaacctccattattcagtcgccctagcacaccaaagacatccagagcagtgtcccctgccgcagcccagccaccaagccccagctcagcggaaaaacctggtgatgaacctgggaggccacgtagccggggtcccgcagggagaacggagcctggcgagggccctcagcaagaagtgaggaggcgcgatcaatttcctctgactaggagtagggcaatacaggagtgtaggtcccccgtgccgcctccagcagcagacccccctgaggctagaacaaaagcacccccaggacgtaagcgcgaacctccagcacaggcggtacgtttcctcccctgggccactccaggactcgagggggctgccgttcctcaaacgctggagaaaaaccgagccggaccagaggctgagaaaagactgcgaaggggtcctgaggaggatggtccatggggaccttgggatcggagaggagccaggagccaggggaagggacggagggccagaccaacttcccccgaattggaaagttctgatgattcgtatgtgtccgctggggaagagcctctcgaagctcctgtcttcgaaatccccctgcaaaatgtggtcgttgcgcctggagctgatgttctgctgaagtgtatcatcacagctaatccccctccgcaggtgagctggcacaaagatggatccgcgctgaggagtgaaggtcgccttctattaagggccgagggtgagcgtcatacactgctgctgcgtgaggctcgagcagcggatgctggaagctatatggccaccgctacaaacgagctgggacaggccacatgcgcagcaagccttactgttagacccggtggctcgacatcccctttttcatccccaataacttcagacgaagagtacttgagcccccctgaggaatttccagaacccggtgagacgtggccaaggaccccgaccatgaagccaagtcccagccaaaaccggaggagtagcgatactggttccaaagctccccctacctttaaagtgtcgctgatggaccagagcgtgcgggagggacaggatgtgattatgtcaattcgcgtccagggggaacctaaacctgtggtgagctggcttcgcaatcggcagccagtgaggcccgaccagagaagatttgctgaggaggccgagggcggtctgtgtaggctgcgcattcttgccgcagagagaggagacgccggtttctatacatgcaaggccgttaacgagtacggggcacggcagtgtgaagccagactagaagtgcgagcccaccccgaatctagaagcctggcagtgctggccccactgcaggacgtggacgttggcgcaggagagatggccctgttcgagtgtcttgttgctgggcctactgatgtcgaggtagattggctctgcagggggaggctgttacaaccagccctgttaaagtgcaaaatgcactttgacggcaggaagtgtaagttgctcctcacttctgtccacgaggacgattccggcgtgtatacttgcaagctaagcaccgctaaggacgaactgacatgcagtgcccgactgaccgtgcggccatccctggcccctcttttcacccggttacttgaagatgtggaagttctggaagggagggctgccaggttcgattgtaagatatctggcacccccccacctgtcgtgacctggactcatttcggatgccctatggaggaatccgagaatctccgtttacggcaagacggcggtctacattcgctgcatatcgcccatgtgggcagcgaggacgaagggctgtatgcagtgagcgctgtgaatactcatggtcaggcgcattgtagtgctcagttatatgttgaggagcctagaactgccgcttccggcccttcctcaaaacttgagaagatgccaagcatacctgaagaaccagaacaaggcgagttggagcgactatccatacctgatttccttagacctctccaggacttggaagtcggactggcgaaagaagccatgctggagtgtcaggtcacaggactcccttatcccactatctcctggttccataacggccatcgcatccagagtagtgatgatcgcaggatgacacagtacagagacgtccaccggctcgtcttccctgccgtgggtccacagcatgcaggtgtgtataagagcgtgatcgcgaataaattaggaaaggcagcctgttacgctcatctgtacgtcaccgatgtggtccctggtccaccagacggggcaccccaggtggtcgccgtgacagggaggatggttacactgacatggaatccaccgcgttctttggatatggctatcgaccctgatagcttgacgtacaccgtccaacaccaagtattgggctccgaccagtggaccgctctggtgactggcctgcgggagccaggctgggcggcaacaggactccggaagggcgtgcaacacatctttcgcgttctttccaccacagtcaaatccagcagcaaaccttcgcctccctctgaaccggtgcagctgttggagcatgggcctaccctggaggaggcgcctgcgatgctcgataagccggatatcgtgtatgtggttgaggggcaacctgcctcagtgaccgtcacgttcaatcacgttgaagcacaggtcgtatggcgctcttgtagaggggctctgttagaagccagggctggcgtgtacgaactttcccagcccgatgacgaccaatattgccttaggatttgtagagtttcaaggagggatatgggcgctcttacttgtacggcccgtaatcgacatgggacccaaacatgtagtgtgacactagaactggccgaggcccctcggttcgaatcaattatggaggatgttgaagtgggggcaggcgagacagccaggttcgcagtagtcgtggagggcaaacccctgccagatatcatgtggtacaaggacgaagtgctcctgactgagagctcacacgttagcttcgtgtatgaagagaacgaatgttctctggttgttctgagcactggtgcgcaagacggcggagtgtacacatgtaccgctcaaaatctggctggagaggtttcttgtaaggccgagctggccgtccatagcgctcaaacagccatggaggtcgaaggcgtgggtgaggacgaggaccatcggggtcgcagactgtcggacttctacgacattcaccaagagattgggcgtggcgcatttagctatctccgacggattgtggagcggagttctggactggagtttgccgcaaaatttatcccatctcaagctaaacctaaagccagcgcaagacgtgaagccaggttactggctaggctccaacatgattgcgtattgtatttccacgaagccttcgaaaggcggaggggcctggtgatcgtcaccgagctctgtacagaggagctattggaacgcatcgcaagaaagcccactgtgtgtgaaagcgagatccgcgcatacatgcggcaggtgttggaagggatccattacctccatcagtcccatgtgctgcacctggatgtgaagcctgagaacctgctggtatgggatggagccgctggtgaacagcaagtgcgcatctgtgacttcgggaacgctcaagaattaaccccgggtgaacctcagtattgccagtacggcacacctgagttcgttgcacctgaaatcgttaatcagagccccgtgagcggagtcacagatatctggcccgtcggtgtcgtggcttttttgtgcctaactggcatatcaccgtttgtcggggaaaacgaccgcacaacactaatgaacattagaaactacaacgtggctttcgaggagacaacgtttctgtcgttgagccgcgaggccagggggttcctgatcaaggtgctggttcaggaccgcctgcgcccaactgcagaggagactcttgaacacccttggttcaagacgcaggctaaaggagccgaggttagcaccgatcatctgaaactgtttttatcgagaaggcgatggcaacggtcacagataagctacaagtgtcacctggttctcaggcccatccccgagctgctgagagcccctccagagcgcgtgtgggtaaccatgcccaggagaccgccaccttccgggggactctcctcctcatcggatagcgaagaggaagagctggaagagcttccatctgtgcctagacccctccagcctgagttcagcggatctagagtttctttaacagatatacccacggaggacgaagctttaggcacccccgagactggcgcagcaacgcctatggactggcaggaacagggccgtgccccttcccaagatcaggaggccccttcaccagaagcgctgccctctcctggtcaggagccagcagcaggcgcttcccccaggcgtggggagcttagacggggatccagcgcggaaagcgcactccccagggcgggacccagagagcttggccgagggctacacaaagccgctagcgtggaattgccacagcgcagatctccaagtcccggagcaacccgactggccagaggcggactgggagagggggaatacgcccagaggcttcaggcactgaggcagagactacttcggggaggaccagaggatggcaaagtgtctgggctgaggggacccttactcgagtccctaggtggacgggcaagggatccaaggatggcccgagccgctagttcagaggcagccccacaccatcaaccaccgctggaaaacaggggtctacagaaaagtagttcattcagccagggcgaagcagaacctcgtgggaggcacagaagggccggagctccactcgagatcccagtggcccgattgggtgccagaagactccaggagtcacccagcctgtccgcactgtctgaggctcagccttcttctccagctcgaccatctgccccaaagcctagcacacctaagagcgccgaaccatctgcgacgacccccagcgacgctccgcagccccctgccccacagcccgctcaagataaggctcccgaacctaggcctgaacctgtgagggcctctaaacctgcccctcccccacaggcactgcagaccctggcgttgccgctaacaccctacgcgcagatcattcagagccttcaactgagcggccatgcccaaggaccttcgcaggggcctgccgctccgccaagcgaacctaagcctcacgccgctgtctttgcgcgtgtggcgagccccccaccgggagctcctgagaagagggttccctccgctggaggtccgccagtgctggccgaaaaggctagagtgcccacagtgccccctagacctggatccagtctgtcttcatcaatcgagaatcttgagtcagaggctgtcttcgaggccaaattcaagcggtcgcgggaatcacctctctctctgggcctgcgcttactgtcacggtctaggtctgaggaacgaggaccctttagaggggctgaggaagaagatggtatctatcggccatcccctgcaggcactcctctggagctcgtcaggcggccagaaagatccagatcagtccaggacttgagagcagtgggcgagccaggactcgtccgcagactctctctgagcttgtcacagcggttgcggcgtacccctcccgcacagcgccatccagcatgggaagcacgcggtggtgatggggaaagcagcgagggtggatcttctgctagaggatcaccagtgctggctatgagacgcaggctgagtttcaccctcgagcggctttcttcacgcttgcagaggagcgggagctcagaggactctgggggagcttccggtcgatcgaccccgctgttcggacgactgagacgggctacctctgaaggagagtccttacggagactgggactgcctcacaatcagctcgccgcacaggccggagccaccacgccatccgctgagtcacttggttctgaggcgtccgctacctctggctcgagcgccccaggagaaagtcggagcaggctccgatgggggttctcacgccctaggaaggacaagggattatcgcctcccaatctgtctgcctctgtccaagaggaattaggtcaccaatacgtgaggtccgaatcagactttcctcctgtgtttcacatcaagcttaaggatcaggtactactggaaggtgaggctgccacactcctgtgccttcctgctgcctgccctgcccctcacatcagttggatgaaggacaagaagtctctgaggtcggagccgtcagtgattattgtgtcttgtaaagacggacgccagctgttatccatccctagggcgggtaaacgccacgctggtctgtatgagtgctccgcaactaacgtgctaggaagcattacctcttcatgcacagttgccgtggccagagtacccggaaagctggcgcctccggaggtgccgcagacgtaccaggacacagccctggtcctttggaagcctggtgattccagagctccctgcacatatacactcgagcggagggtggatggggagtccgtctggcatccagtgtccagcgggatccctgactgttactacaacgtgactcacctgcctgtaggggtcacagtgaggtttagggtagcttgtgccaacagagctgggcagggcccattctctaattctagtgagaaggtattcgttcgcggtacccaagactcttctgcagtgccaagtgcagcacaccaggaggcccctgtcacatcaagaccggcacgcgcacgcccaccagattccccgaccagtctggcccctcctctggcacccgcagcccctacaccaccctctgtgacagtcagtccgtcgtctccccctacccctccgtcccaggctcttagctcactaaaggccgtagggcctcctccccagactccaccacgccgacatagaggtctgcaggccgcacgccctgcagagcctacactcccttccacccatgtaactccaagcgagccaaagccatttgttctcgataccggtactcctattccagcaagcacccctcaaggcgttaagccagtatcatccagcactccagtgtatgtagtgacctcattcgtgtccgctcccccagcaccagagccacctgctccagagcccccaccagaacccacgaaggtgacagtgcagtccttgagcccagcaaaggaggttgtcagtagccctggctccagcccgagaagcagtccaaggcccgagggaacaaccctgcgacaggggcctccccagaagccatatacatttctggaagaaaaggctagggggagattcggcgtggtccgagcctgtcgggaaaatgcaactgggaggactttcgtggccaaaatagtgccctacgccgctgagggaaagaggcgtgtgctccaggagtatgaggtgttgaggactttacatcacgaacgcatcatgtctctgcatgaagcttatattacaccaaggtacctggtactcatcgctgagagttgtggtaaccgggagctcctttgtggcctctccgaccgctttcgttactccgaggatgatgtcgcaacgtacatggtacagcttctccagggattggattacttgcacggtcaccacgttttacatcttgatatcaaaccagataatctactgctggccccagataacgcattaaagatcgtggatttcggcagtgcacagccctacaatccccaggccctgcggcctctcggccaccgtacaggcacgctggagtttatggctcctgagatggtcaagggcgagcccatcggctccgcaacagacatctggggggcaggagtgctgacatatattatgttgtctggccgttctcccttctatgagcccgatcctcaggagacggaagcgagaatcgtgggcggacgtttcgacgcttttcaactgtacccaaacacaagccagagcgctacgctgttcctcagaaaggtcctgagtgtgcacccctggagtcggccaagccttcaggactgtctggcacatccatggctgcaggatgcatacttgatgaagctgcgacggcagacgctcacctttacgacaaatcggcttaaggagtttcttggcgaacagcgcagacggagggcagaagccgctacacggcacaaggttttgctgaggtcttatccaggaggaccctaa

SEQ ID NO: 160016 - DNA, 9675 bp, Artificial Sequence
  derived and/or modified sequence
atgcagaaggccagaggcaccagaggcgaggacgccggcaccagagccccccccagccccggcgtgccccccaagagagccaaggtgggcgccggcggcggcgcccccgtggccgtggccggcgcccccgtgttcctgagacccctgaagaacgccgccgtgtgcgccggcagcgacgtgagactgagagtggtggtgagcggcaccccccagcccagcctgagatggttcagagacggccagctgctgcccgcccccgcccccgagcccagctgcctgtggctgagaagatgcggcgcccaggacgccggcgtgtacagctgcatggcccagaacgagagaggcagagccagctgcgaggccgtgctgaccgtgctggaggtgggcgacagcgagaccgccgaggacgacatcagcgacgtgcagggcacccagagactggagctgagagacgacggcgccttcagcacccccaccggcggcagcgacaccctggtgggcaccagcctggacaccccccccaccagcgtgaccggcaccagcgaggagcaggtgagctggtggggcagcggccagaccgtgctggagcaggaggccggcagcggcggcggcaccagaagactgcccggcagccccagacaggcccaggccaccggcgccggccccagacacctgggcgtggagcccctggtgagagccagcagagccaacctggtgggcgccagctggggcagcgaggacagcctgagcgtggccagcgacctgtacggcagcgccttcagcctgtacagaggcagagccctgagcatccacgtgagcgtgccccagagcggcctgagaagagaggagcccgacctgcagccccagctggccagcgaggcccccagaagacccgcccagcccccccccagcaagagcgccctgctgcccccccccagccccagagtgggcaagagaagcccccccggcccccccgcccagcccgccgccacccccaccagcccccacagaagaacccaggagcccgtgctgcccgaggacaccaccaccgaggagaagagaggcaagaagagcaagagcagcggccccagcctggccggcaccgccgagagcagaccccagacccccctgagcgaggccagcggcagactgagcgccctgggcagaagccccagactggtgagagccggcagcagaatcctggacaagctgcagttcttcgaggagagaagaagaagcctggagagaagcgacagcccccccgcccccctgagaccctgggtgcccctgagaaaggccagaagcctggagcagcccaagagcgagagaggcgccccctggggcacccccggcgccagccaggaggagctgagagcccccggcagcgtggccgagagaagaagactgttccagcagaaggccgccagcctggacgagagaaccagacagagaagccccgccagcgacctggagctgagattcgcccaggagctgggcagaatcagaagaagcaccagcagagaggagctggtgagaagccacgagagcctgagagccaccctgcagagagcccccagccccagagagcccggcgagccccccctgttcagcagacccagcacccccaagaccagcagagccgtgagccccgccgccgcccagccccccagccccagcagcgccgagaagcccggcgacgagcccggcagacccagaagcagaggccccgccggcagaaccgagcccggcgagggcccccagcaggaggtgagaagaagagaccagttccccctgaccagaagcagagccatccaggagtgcagaagccccgtgcccccccccgccgccgacccccccgaggccagaaccaaggccccccccggcagaaagagagagccccccgcccaggccgtgagattcctgccctgggccacccccggcctggagggcgccgccgtgccccagaccctggagaagaacagagccggccccgaggccgagaagagactgagaagaggccccgaggaggacggcccctggggcccctgggacagaagaggcgccagaagccagggcaagggcagaagagccagacccaccagccccgagctggagagcagcgacgacagctacgtgagcgccggcgaggagcccctggaggcccccgtgttcgagatccccctgcagaacgtggtggtggcccccggcgccgacgtgctgctgaagtgcatcatcaccgccaacccccccccccaggtgagctggcacaaggacggcagcgccctgagaagcgagggcagactgctgctgagagccgagggcgagagacacaccctgctgctgagagaggccagagccgccgacgccggcagctacatggccaccgccaccaacgagctgggccaggccacctgcgccgccagcctgaccgtgagacccggcggcagcaccagccccttcagcagccccatcaccagcgacgaggagtacctgagcccccccgaggagttccccgagcccggcgagacctggcccagaacccccaccatgaagcccagccccagccagaacagaagaagcagcgacaccggcagcaaggccccccccaccttcaaggtgagcctgatggaccagagcgtgagagagggccaggacgtgatcatgagcatcagagtgcagggcgagcccaagcccgtggtgagctggctgagaaacagacagcccgtgagacccgaccagagaagattcgccgaggaggccgagggcggcctgtgcagactgagaatcctggccgccgagagaggcgacgccggcttctacacctgcaaggccgtgaacgagtacggcgccagacagtgcgaggccagactggaggtgagagcccaccccgagagcagaagcctggccgtgctggcccccctgcaggacgtggacgtgggcgccggcgagatggccctgttcgagtgcctggtggccggccccaccgacgtggaggtggactggctgtgcagaggcagactgctgcagcccgccctgctgaagtgcaagatgcacttcgacggcagaaagtgcaagctgctgctgaccagcgtgcacgaggacgacagcggcgtgtacacctgcaagctgagcaccgccaaggacgagctgacctgcagcgccagactgaccgtgagacccagcctggcccccctgttcaccagactgctggaggacgtggaggtgctggagggcagagccgccagattcgactgcaagatcagcggcacccccccccccgtggtgacctggacccacttcggctgccccatggaggagagcgagaacctgagactgagacaggacggcggcctgcacagcctgcacatcgcccacgtgggcagcgaggacgagggcctgtacgccgtgagcgccgtgaacacccacggccaggcccactgcagcgcccagctgtacgtggaggagcccagaaccgccgccagcggccccagcagcaagctggagaagatgcccagcatccccgaggagcccgagcagggcgagctggagagactgagcatccccgacttcctgagacccctgcaggacctggaggtgggcctggccaaggaggccatgctggagtgccaggtgaccggcctgccctaccccaccatcagctggttccacaacggccacagaatccagagcagcgacgacagaagaatgacccagtacagagacgtgcacagactggtgttccccgccgtgggcccccagcacgccggcgtgtacaagagcgtgatcgccaacaagctgggcaaggccgcctgctacgcccacctgtacgtgaccgacgtggtgcccggcccccccgacggcgccccccaggtggtggccgtgaccggcagaatggtgaccctgacctggaacccccccagaagcctggacatggccatcgaccccgacagcctgacctacaccgtgcagcaccaggtgctgggcagcgaccagtggaccgccctggtgaccggcctgagagagcccggctgggccgccaccggcctgagaaagggcgtgcagcacatcttcagagtgctgagcaccaccgtgaagagcagcagcaagcccagcccccccagcgagcccgtgcagctgctggagcacggccccaccctggaggaggcccccgccatgctggacaagcccgacatcgtgtacgtggtggagggccagcccgccagcgtgaccgtgaccttcaaccacgtggaggcccaggtggtgtggagaagctgcagaggcgccctgctggaggccagagccggcgtgtacgagctgagccagcccgacgacgaccagtactgcctgagaatctgcagagtgagcagaagagacatgggcgccctgacctgcaccgccagaaacagacacggcacccagacctgcagcgtgaccctggagctggccgaggcccccagattcgagagcatcatggaggacgtggaggtgggcgccggcgagaccgccagattcgccgtggtggtggagggcaagcccctgcccgacatcatgtggtacaaggacgaggtgctgctgaccgagagcagccacgtgagcttcgtgtacgaggagaacgagtgcagcctggtggtgctgagcaccggcgcccaggacggcggcgtgtacacctgcaccgcccagaacctggccggcgaggtgagctgcaaggccgagctggccgtgcacagcgcccagaccgccatggaggtggagggcgtgggcgaggacgaggaccacagaggcagaagactgagcgacttctacgacatccaccaggagatcggcagaggcgccttcagctacctgagaagaatcgtggagagaagcagcggcctggagttcgccgccaagttcatccccagccaggccaagcccaaggccagcgccagaagagaggccagactgctggccagactgcagcacgactgcgtgctgtacttccacgaggccttcgagagaagaagaggcctggtgatcgtgaccgagctgtgcaccgaggagctgctggagagaatcgccagaaagcccaccgtgtgcgagagcgagatcagagcctacatgagacaggtgctggagggcatccactacctgcaccagagccacgtgctgcacctggacgtgaagcccgagaacctgctggtgtgggacggcgccgccggcgagcagcaggtgagaatctgcgacttcggcaacgcccaggagctgacccccggcgagccccagtactgccagtacggcacccccgagttcgtggcccccgagatcgtgaaccagagccccgtgagcggcgtgaccgacatctggcccgtgggcgtggtggccttcctgtgcctgaccggcatcagccccttcgtgggcgagaacgacagaaccaccctgatgaacatcagaaactacaacgtggccttcgaggagaccaccttcctgagcctgagcagagaggccagaggcttcctgatcaaggtgctggtgcaggacagactgagacccaccgccgaggagaccctggagcacccctggttcaagacccaggccaagggcgccgaggtgagcaccgaccacctgaagctgttcctgagcagaagaagatggcagagaagccagatcagctacaagtgccacctggtgctgagacccatccccgagctgctgagagccccccccgagagagtgtgggtgaccatgcccagaagacccccccccagcggcggcctgagcagcagcagcgacagcgaggaggaggagctggaggagctgcccagcgtgcccagacccctgcagcccgagttcagcggcagcagagtgagcctgaccgacatccccaccgaggacgaggccctgggcacccccgagaccggcgccgccacccccatggactggcaggagcagggcagagcccccagccaggaccaggaggcccccagccccgaggccctgcccagccccggccaggagcccgccgccggcgccagccccagaagaggcgagctgagaagaggcagcagcgccgagagcgccctgcccagagccggccccagagagctgggcagaggcctgcacaaggccgccagcgtggagctgccccagagaagaagccccagccccggcgccaccagactggccagaggcggcctgggcgagggcgagtacgcccagagactgcaggccctgagacagagactgctgagaggcggccccgaggacggcaaggtgagcggcctgagaggccccctgctggagagcctgggcggcagagccagagaccccagaatggccagagccgccagcagcgaggccgccccccaccaccagccccccctggagaacagaggcctgcagaagagcagcagcttcagccagggcgaggccgagcccagaggcagacacagaagagccggcgcccccctggagatccccgtggccagactgggcgccagaagactgcaggagagccccagcctgagcgccctgagcgaggcccagcccagcagccccgccagacccagcgcccccaagcccagcacccccaagagcgccgagcccagcgccaccacccccagcgacgccccccagccccccgccccccagcccgcccaggacaaggcccccgagcccagacccgagcccgtgagagccagcaagcccgccccccccccccaggccctgcagaccctggccctgcccctgaccccctacgcccagatcatccagagcctgcagctgagcggccacgcccagggccccagccagggccccgccgccccccccagcgagcccaagccccacgccgccgtgttcgccagagtggccagccccccccccggcgcccccgagaagagagtgcccagcgccggcggcccccccgtgctggccgagaaggccagagtgcccaccgtgccccccagacccggcagcagcctgagcagcagcatcgagaacctggagagcgaggccgtgttcgaggccaagttcaagagaagcagagagagccccctgagcctgggcctgagactgctgagcagaagcagaagcgaggagagaggccccttcagaggcgccgaggaggaggacggcatctacagacccagccccgccggcacccccctggagctggtgagaagacccgagagaagcagaagcgtgcaggacctgagagccgtgggcgagcccggcctggtgagaagactgagcctgagcctgagccagagactgagaagaaccccccccgcccagagacaccccgcctgggaggccagaggcggcgacggcgagagcagcgagggcggcagcagcgccagaggcagccccgtgctggccatgagaagaagactgagcttcaccctggagagactgagcagcagactgcagagaagcggcagcagcgaggacagcggcggcgccagcggcagaagcacccccctgttcggcagactgagaagagccaccagcgagggcgagagcctgagaagactgggcctgccccacaaccagctggccgcccaggccggcgccaccacccccagcgccgagagcctgggcagcgaggccagcgccaccagcggcagcagcgcccccggcgagagcagaagcagactgagatggggcttcagcagacccagaaaggacaagggcctgagcccccccaacctgagcgccagcgtgcaggaggagctgggccaccagtacgtgagaagcgagagcgacttcccccccgtgttccacatcaagctgaaggaccaggtgctgctggagggcgaggccgccaccctgctgtgcctgcccgccgcctgccccgccccccacatcagctggatgaaggacaagaagagcctgagaagcgagcccagcgtgatcatcgtgagctgcaaggacggcagacagctgctgagcatccccagagccggcaagagacacgccggcctgtacgagtgcagcgccaccaacgtgctgggcagcatcaccagcagctgcaccgtggccgtggccagagtgcccggcaagctggccccccccgaggtgccccagacctaccaggacaccgccctggtgctgtggaagcccggcgacagcagagccccctgcacctacaccctggagagaagagtggacggcgagagcgtgtggcaccccgtgagcagcggcatccccgactgctactacaacgtgacccacctgcccgtgggcgtgaccgtgagattcagagtggcctgcgccaacagagccggccagggccccttcagcaacagcagcgagaaggtgttcgtgagaggcacccaggacagcagcgccgtgcccagcgccgcccaccaggaggcccccgtgaccagcagacccgccagagccagaccccccgacagccccaccagcctggccccccccctggcccccgccgcccccaccccccccagcgtgaccgtgagccccagcagcccccccaccccccccagccaggccctgagcagcctgaaggccgtgggcccccccccccagaccccccccagaagacacagaggcctgcaggccgccagacccgccgagcccaccctgcccagcacccacgtgacccccagcgagcccaagcccttcgtgctggacaccggcacccccatccccgccagcaccccccagggcgtgaagcccgtgagcagcagcacccccgtgtacgtggtgaccagcttcgtgagcgccccccccgcccccgagccccccgcccccgagcccccccccgagcccaccaaggtgaccgtgcagagcctgagccccgccaaggaggtggtgagcagccccggcagcagccccagaagcagccccagacccgagggcaccaccctgagacagggccccccccagaagccctacaccttcctggaggagaaggccagaggcagattcggcgtggtgagagcctgcagagagaacgccaccggcagaaccttcgtggccaagatcgtgccctacgccgccgagggcaagagaagagtgctgcaggagtacgaggtgctgagaaccctgcaccacgagagaatcatgagcctgcacgaggcctacatcacccccagatacctggtgctgatcgccgagagctgcggcaacagagagctgctgtgcggcctgagcgacagattcagatacagcgaggacgacgtggccacctacatggtgcagctgctgcagggcctggactacctgcacggccaccacgtgctgcacctggacatcaagcccgacaacctgctgctggcccccgacaacgccctgaagatcgtggacttcggcagcgcccagccctacaacccccaggccctgagacccctgggccacagaaccggcaccctggagttcatggcccccgagatggtgaagggcgagcccatcggcagcgccaccgacatctggggcgccggcgtgctgacctacatcatgctgagcggcagaagccccttctacgagcccgacccccaggagaccgaggccagaatcgtgggcggcagattcgacgccttccagctgtaccccaacaccagccagagcgccaccctgttcctgagaaaggtgctgagcgtgcacccctggctgagcagacccagcagctgcctgagcgtgtgccacaaggagatcaagatggccagcagctag

SEQ ID NO: 160017 - DNA, 9804 bp, Artificial Sequence
  derived and/or modified sequence
atgcagaaggccagaggcaccagaggcgaggacgccggcaccagagccccccccagccccggcgtgccccccaagagagccaaggtgggcgccggcggcggcgcccccgtggccgtggccggcgcccccgtgttcctgagacccctgaagaacgccgccgtgtgcgccggcagcgacgtgagactgagagtggtggtgagcggcaccccccagcccagcctgagatggttcagagacggccagctgctgcccgcccccgcccccgagcccagctgcctgtggctgagaagatgcggcgcccaggacgccggcgtgtacagctgcatggcccagaacgagagaggcagagccagctgcgaggccgtgctgaccgtgctggaggtgggcgacagcgagaccgccgaggacgacatcagcgacgtgcagggcacccagagactggagctgagagacgacggcgccttcagcacccccaccggcggcagcgacaccctggtgggcaccagcctggacaccccccccaccagcgtgaccggcaccagcgaggagcaggtgagctggtggggcagcggccagaccgtgctggagcaggaggccggcagcggcggcggcaccagaagactgcccggcagccccagacaggcccaggccaccggcgccggccccagacacctgggcgtggagcccctggtgagagccagcagagccaacctggtgggcgccagctggggcagcgaggacagcctgagcgtggccagcgacctgtacggcagcgccttcagcctgtacagaggcagagccctgagcatccacgtgagcgtgccccagagcggcctgagaagagaggagcccgacctgcagccccagctggccagcgaggcccccagaagacccgcccagcccccccccagcaagagcgccctgctgcccccccccagccccagagtgggcaagagaagcccccccggcccccccgcccagcccgccgccacccccaccagcccccacagaagaacccaggagcccgtgctgcccgaggacaccaccaccgaggagaagagaggcaagaagagcaagagcagcggccccagcctggccggcaccgccgagagcagaccccagacccccctgagcgaggccagcggcagactgagcgccctgggcagaagccccagactggtgagagccggcagcagaatcctggacaagctgcagttcttcgaggagagaagaagaagcctggagagaagcgacagcccccccgcccccctgagaccctgggtgcccctgagaaaggccagaagcctggagcagcccaagagcgagagaggcgccccctggggcacccccggcgccagccaggaggagctgagagcccccggcagcgtggccgagagaagaagactgttccagcagaaggccgccagcctggacgagagaaccagacagagaagccccgccagcgacctggagctgagattcgcccaggagctgggcagaatcagaagaagcaccagcagagaggagctggtgagaagccacgagagcctgagagccaccctgcagagagcccccagccccagagagcccggcgagccccccctgttcagcagacccagcacccccaagaccagcagagccgtgagccccgccgccgcccagccccccagccccagcagcgccgagaagcccggcgacgagcccggcagacccagaagcagaggccccgccggcagaaccgagcccggcgagggcccccagcaggaggtgagaagaagagaccagttccccctgaccagaagcagagccatccaggagtgcagaagccccgtgcccccccccgccgccgacccccccgaggccagaaccaaggccccccccggcagaaagagagagccccccgcccaggccgtgagattcctgccctgggccacccccggcctggagggcgccgccgtgccccagaccctggagaagaacagagccggccccgaggccgagaagagactgagaagaggccccgaggaggacggcccctggggcccctgggacagaagaggcgccagaagccagggcaagggcagaagagccagacccaccagccccgagctggagagcagcgacgacagctacgtgagcgccggcgaggagcccctggaggcccccgtgttcgagatccccctgcagaacgtggtggtggcccccggcgccgacgtgctgctgaagtgcatcatcaccgccaacccccccccccaggtgagctggcacaaggacggcagcgccctgagaagcgagggcagactgctgctgagagccgagggcgagagacacaccctgctgctgagagaggccagagccgccgacgccggcagctacatggccaccgccaccaacgagctgggccaggccacctgcgccgccagcctgaccgtgagacccggcggcagcaccagccccttcagcagccccatcaccagcgacgaggagtacctgagcccccccgaggagttccccgagcccggcgagacctggcccagaacccccaccatgaagcccagccccagccagaacagaagaagcagcgacaccggcagcaaggccccccccaccttcaaggtgagcctgatggaccagagcgtgagagagggccaggacgtgatcatgagcatcagagtgcagggcgagcccaagcccgtggtgagctggctgagaaacagacagcccgtgagacccgaccagagaagattcgccgaggaggccgagggcggcctgtgcagactgagaatcctggccgccgagagaggcgacgccggcttctacacctgcaaggccgtgaacgagtacggcgccagacagtgcgaggccagactggaggtgagagcccaccccgagagcagaagcctggccgtgctggcccccctgcaggacgtggacgtgggcgccggcgagatggccctgttcgagtgcctggtggccggccccaccgacgtggaggtggactggctgtgcagaggcagactgctgcagcccgccctgctgaagtgcaagatgcacttcgacggcagaaagtgcaagctgctgctgaccagcgtgcacgaggacgacagcggcgtgtacacctgcaagctgagcaccgccaaggacgagctgacctgcagcgccagactgaccgtgagacccagcctggcccccctgttcaccagactgctggaggacgtggaggtgctggagggcagagccgccagattcgactgcaagatcagcggcacccccccccccgtggtgacctggacccacttcggctgccccatggaggagagcgagaacctgagactgagacaggacggcggcctgcacagcctgcacatcgcccacgtgggcagcgaggacgagggcctgtacgccgtgagcgccgtgaacacccacggccaggcccactgcagcgcccagctgtacgtggaggagcccagaaccgccgccagcggccccagcagcaagctggagaagatgcccagcatccccgaggagcccgagcagggcgagctggagagactgagcatccccgacttcctgagacccctgcaggacctggaggtgggcctggccaaggaggccatgctggagtgccaggtgaccggcctgccctaccccaccatcagctggttccacaacggccacagaatccagagcagcgacgacagaagaatgacccagtacagagacgtgcacagactggtgttccccgccgtgggcccccagcacgccggcgtgtacaagagcgtgatcgccaacaagctgggcaaggccgcctgctacgcccacctgtacgtgaccgacgtggtgcccggcccccccgacggcgccccccaggtggtggccgtgaccggcagaatggtgaccctgacctggaacccccccagaagcctggacatggccatcgaccccgacagcctgacctacaccgtgcagcaccaggtgctgggcagcgaccagtggaccgccctggtgaccggcctgagagagcccggctgggccgccaccggcctgagaaagggcgtgcagcacatcttcagagtgctgagcaccaccgtgaagagcagcagcaagcccagcccccccagcgagcccgtgcagctgctggagcacggccccaccctggaggaggcccccgccatgctggacaagcccgacatcgtgtacgtggtggagggccagcccgccagcgtgaccgtgaccttcaaccacgtggaggcccaggtggtgtggagaagctgcagaggcgccctgctggaggccagagccggcgtgtacgagctgagccagcccgacgacgaccagtactgcctgagaatctgcagagtgagcagaagagacatgggcgccctgacctgcaccgccagaaacagacacggcacccagacctgcagcgtgaccctggagctggccgaggcccccagattcgagagcatcatggaggacgtggaggtgggcgccggcgagaccgccagattcgccgtggtggtggagggcaagcccctgcccgacatcatgtggtacaaggacgaggtgctgctgaccgagagcagccacgtgagcttcgtgtacgaggagaacgagtgcagcctggtggtgctgagcaccggcgcccaggacggcggcgtgtacacctgcaccgcccagaacctggccggcgaggtgagctgcaaggccgagctggccgtgcacagcgcccagaccgccatggaggtggagggcgtgggcgaggacgaggaccacagaggcagaagactgagcgacttctacgacatccaccaggagatcggcagaggcgccttcagctacctgagaagaatcgtggagagaagcagcggcctggagttcgccgccaagttcatccccagccaggccaagcccaaggccagcgccagaagagaggccagactgctggccagactgcagcacgactgcgtgctgtacttccacgaggccttcgagagaagaagaggcctggtgatcgtgaccgagctgtgcaccgaggagctgctggagagaatcgccagaaagcccaccgtgtgcgagagcgagatcagagcctacatgagacaggtgctggagggcatccactacctgcaccagagccacgtgctgcacctggacgtgaagcccgagaacctgctggtgtgggacggcgccgccggcgagcagcaggtgagaatctgcgacttcggcaacgcccaggagctgacccccggcgagccccagtactgccagtacggcacccccgagttcgtggcccccgagatcgtgaaccagagccccgtgagcggcgtgaccgacatctggcccgtgggcgtggtggccttcctgtgcctgaccggcatcagccccttcgtgggcgagaacgacagaaccaccctgatgaacatcagaaactacaacgtggccttcgaggagaccaccttcctgagcctgagcagagaggccagaggcttcctgatcaaggtgctggtgcaggacagactgagacccaccgccgaggagaccctggagcacccctggttcaagacccaggccaagggcgccgaggtgagcaccgaccacctgaagctgttcctgagcagaagaagatggcagagaagccagatcagctacaagtgccacctggtgctgagacccatccccgagctgctgagagccccccccgagagagtgtgggtgaccatgcccagaagacccccccccagcggcggcctgagcagcagcagcgacagcgaggaggaggagctggaggagctgcccagcgtgcccagacccctgcagcccgagttcagcggcagcagagtgagcctgaccgacatccccaccgaggacgaggccctgggcacccccgagaccggcgccgccacccccatggactggcaggagcagggcagagcccccagccaggaccaggaggcccccagccccgaggccctgcccagccccggccaggagcccgccgccggcgccagccccagaagaggcgagctgagaagaggcagcagcgccgagagcgccctgcccagagccggccccagagagctgggcagaggcctgcacaaggccgccagcgtggagctgccccagagaagaagccccagccccggcgccaccagactggccagaggcggcctgggcgagggcgagtacgcccagagactgcaggccctgagacagagactgctgagaggcggccccgaggacggcaaggtgagcggcctgagaggccccctgctggagagcctgggcggcagagccagagaccccagaatggccagagccgccagcagcgaggccgccccccaccaccagccccccctggagaacagaggcctgcagaagagcagcagcttcagccagggcgaggccgagcccagaggcagacacagaagagccggcgcccccctggagatccccgtggccagactgggcgccagaagactgcaggagagccccagcctgagcgccctgagcgaggcccagcccagcagccccgccagacccagcgcccccaagcccagcacccccaagagcgccgagcccagcgccaccacccccagcgacgccccccagccccccgccccccagcccgcccaggacaaggcccccgagcccagacccgagcccgtgagagccagcaagcccgccccccccccccaggccctgcagaccctggccctgcccctgaccccctacgcccagatcatccagagcctgcagctgagcggccacgcccagggccccagccagggccccgccgccccccccagcgagcccaagccccacgccgccgtgttcgccagagtggccagccccccccccggcgcccccgagaagagagtgcccagcgccggcggcccccccgtgctggccgagaaggccagagtgcccaccgtgccccccagacccggcagcagcctgagcagcagcatcgagaacctggagagcgaggccgtgttcgaggccaagttcaagagaagcagagagagccccctgagcctgggcctgagactgctgagcagaagcagaagcgaggagagaggccccttcagaggcgccgaggaggaggacggcatctacagacccagccccgccggcacccccctggagctggtgagaagacccgagagaagcagaagcgtgcaggacctgagagccgtgggcgagcccggcctggtgagaagactgagcctgagcctgagccagagactgagaagaaccccccccgcccagagacaccccgcctgggaggccagaggcggcgacggcgagagcagcgagggcggcagcagcgccagaggcagccccgtgctggccatgagaagaagactgagcttcaccctggagagactgagcagcagactgcagagaagcggcagcagcgaggacagcggcggcgccagcggcagaagcacccccctgttcggcagactgagaagagccaccagcgagggcgagagcctgagaagactgggcctgccccacaaccagctggccgcccaggccggcgccaccacccccagcgccgagagcctgggcagcgaggccagcgccaccagcggcagcagcgcccccggcgagagcagaagcagactgagatggggcttcagcagacccagaaaggacaagggcctgagcccccccaacctgagcgccagcgtgcaggaggagctgggccaccagtacgtgagaagcgagagcgacttcccccccgtgttccacatcaagctgaaggaccaggtgctgctggagggcgaggccgccaccctgctgtgcctgcccgccgcctgccccgccccccacatcagctggatgaaggacaagaagagcctgagaagcgagcccagcgtgatcatcgtgagctgcaaggacggcagacagctgctgagcatccccagagccggcaagagacacgccggcctgtacgagtgcagcgccaccaacgtgctgggcagcatcaccagcagctgcaccgtggccgtggccagagtgcccggcaagctggccccccccgaggtgccccagacctaccaggacaccgccctggtgctgtggaagcccggcgacagcagagccccctgcacctacaccctggagagaagagtggacggcgagagcgtgtggcaccccgtgagcagcggcatccccgactgctactacaacgtgacccacctgcccgtgggcgtgaccgtgagattcagagtggcctgcgccaacagagccggccagggccccttcagcaacagcagcgagaaggtgttcgtgagaggcacccaggacagcagcgccgtgcccagcgccgcccaccaggaggcccccgtgaccagcagacccgccagagccagaccccccgacagccccaccagcctggccccccccctggcccccgccgcccccaccccccccagcgtgaccgtgagccccagcagcccccccaccccccccagccaggccctgagcagcctgaaggccgtgggcccccccccccagaccccccccagaagacacagaggcctgcaggccgccagacccgccgagcccaccctgcccagcacccacgtgacccccagcgagcccaagcccttcgtgctggacaccggcacccccatccccgccagcaccccccagggcgtgaagcccgtgagcagcagcacccccgtgtacgtggtgaccagcttcgtgagcgccccccccgcccccgagccccccgcccccgagcccccccccgagcccaccaaggtgaccgtgcagagcctgagccccgccaaggaggtggtgagcagccccggcagcagccccagaagcagccccagacccgagggcaccaccctgagacagggccccccccagaagccctacaccttcctggaggagaaggccagaggcagattcggcgtggtgagagcctgcagagagaacgccaccggcagaaccttcgtggccaagatcgtgccctacgccgccgagggcaagagaagagtgctgcaggagtacgaggtgctgagaaccctgcaccacgagagaatcatgagcctgcacgaggcctacatcacccccagatacctggtgctgatcgccgagagctgcggcaacagagagctgctgtgcggcctgagcgacagattcagatacagcgaggacgacgtggccacctacatggtgcagctgctgcagggcctggactacctgcacggccaccacgtgctgcacctggacatcaagcccgacaacctgctgctggcccccgacaacgccctgaagatcgtggacttcggcagcgcccagccctacaacccccaggccctgagacccctgggccacagaaccggcaccctggagttcatggcccccgagatggtgaagggcgagcccatcggcagcgccaccgacatctggggcgccggcgtgctgacctacatcatgctgagcggcagaagccccttctacgagcccgacccccaggagaccgaggccagaatcgtgggcggcagattcgacgccttccagctgtaccccaacaccagccagagcgccaccctgttcctgagaaaggtgctgagcgtgcacccctggagcagacccagcctgcaggactgcctggcccacccctggctgcaggacgcctacctgatgaagctgagaagacagaccctgaccttcaccaccaacagactgaaggagttcctgggcgagcagagaagaagaagagccgaggccgccaccagacacaaggtgctgctgagaagctaccccggcggcccctag

SEQ ID NO: 160018 - protein, 793 aa, Artificial Sequence
  derived and/or modified sequence
MPAGPVQAVPPPPPVPTEPKQPTEEEASSKEDSAPSKPVVGIIYPPPEVRNIVDKTASFVARNGPEFEARIRQNEINNPKFNFLNPNDPYHAYYRHKVSEFKEGKAQEPSAAIPKVMQQQQQTTQQQLPQKVQAQVIQETIVPKEPPPEFEFIADPPSISAFDLDVVKLTAQFVARNGRQFLTQLMQKEQRNYQFDFLRPQHSLFNYFTKLVEQYTKILIPPKGLFSKLKKEAENPREVLDQVCYRVEWAKFQERERKKEEEEKEKERVAYAQIDWHDFVVVETVDFQPNEQGNFPPPTTPEELGARILIQERYEKFGESEEVEMEVESDEEDDKQEKAEEPPSQLDQDTQVQDMDEGSDDEEEGQKVPPPPETPMPPPLPPTPDQVIVRKDYDPKASKPLPPAPAPDEYLVSPITGEKIPASKMQEHMRIGLLDPRWLEQRDRSIREKQSDDEVYAPGLDIESSLKQLAERRTDIFGVEETAIGKKIGEEEIQKPEEKVTWDGHSGSMARTQQAAQANITLQEQIEAIHKAKGLVPEDDTKEKIGPSKPNEIPQQPPPPSSATNIPSSAPPITSVPRPPTMPPPVRTTVVSAVPVMPRPPMASVVRLPPGSVIAPMPPIIHAPRINVVPMPPSAPPIMAPRPPPMIVPTAFVPAPPVAPVPAPAPMPPVHPPPPMEDEPTSKKLKTEDSLMPEEEFLRRNKGPVSIKVQVPNMQDKTEWKLNGQVLVFTLPLTDQVSVIKVKIHEATGMPAGKQKLQYEGIFIKDSNSLAYYNMANGAVIHLALKERGGRKK

SEQ ID NO: 160019 - protein, 728 aa, Artificial Sequence
  derived and/or modified sequence
MPAGPVQAVPPPPPVPTEPKQPTEEEASSKEDSAPSKPVVGIIYPPPEVRNIVDKTASFVARNGPEFEARIRQNEINNPKFNFLNPNDPYHAYYRHKVSEFKEGKAQFVARNGRQFLTQLMQKEQRNYQFDFLRPQHSLFNYFTKLVEQYTKILIPPKGLFSKLKKEAENPREVLDQVCYRVEWAKFQERERKKEEEEKEKERVAYAQIDWHDFVVVETVDFQPNEQGNFPPPTTPEELGARILIQERYEKFGESEEVEMEVESDEEDDKQEKAEEPPSQLDQDTQVQDMDEGSDDEEEGQKVPPPPETPMPPPLPPTPDQVIVRKDYDPKASKPLPPAPAPDEYLVSPITGEKIPASKMQEHMRIGLLDPRWLEQRDRSIREKQSDDEVYAPGLDIESSLKQLAERRTDIFGVEETAIGKKIGEEEIQKPEEKVTWDGHSGSMARTQQAAQANITLQEQIEAIHKAKGLVPEDDTKEKIGPSKPNEIPQQPPPPSSATNIPSSAPPITSVPRPPTMPPPVRTTVVSAVPVMPRPPMASVVRLPPGSVIAPMPPIIHAPRINVVPMPPSAPPIMAPRPPPMIVPTAFVPAPPVAPVPAPAPMPPVHPPPPMEDEPTSKKLKTEDSLMPEEEFLRRNKGPVSIKVQVPNMQDKTEWKLNGQVLVFTLPLTDQVSVIKVKIHEATGMPAGKQKLQYEGIFIKDSNSLAYYNMANGAVIHLALKERGGRKK

SEQ ID NO: 160020 - protein, 690 aa, Artificial Sequence
  derived and/or modified sequence
MTLTMPTTAIPKVMQQQQQTTQQQLPQKVQAQVIQETIVPKEPPPEFEFIADPPSISAFDLDVVKLTAQFVARNGRQFLTQLMQKEQRNYQFDFLRPQHSLFNYFTKLVEQYTKILIPPKGLFSKLKKEAENPREVLDQVCYRVEWAKFQERERKKEEEEKEKERVAYAQIDWHDFVVVETVDFQPNEQGNFPPPTTPEELGARILIQERYEKFGESEEVEMEVESDEEDDKQEKAEEPPSQLDQDTQVQDMDEGSDDEEEGQKVPPPPETPMPPPLPPTPDQVIVRKDYDPKASKPLPPAPAPDEYLVSPITGEKIPASKMQEHMRIGLLDPRWLEQRDRSIREKQSDDEVYAPGLDIESSLKQLAERRTDIFGVEETAIGKKIGEEEIQKPEEKVTWDGHSGSMARTQQAAQANITLQEQIEAIHKAKGLVPEDDTKEKIGPSKPNEIPQQPPPPSSATNIPSSAPPITSVPRPPTMPPPVRTTVVSAVPVMPRPPMASVVRLPPGSVIAPMPPIIHAPRINVVPMPPSAPPIMAPRPPPMIVPTAFVPAPPVAPVPAPAPMPPVHPPPPMEDEPTSKKLKTEDSLMPEEEFLRRNKGPVSIKVQVPNMQDKTEWKLNGQVLVFTLPLTDQVSVIKVKIHEATGMPAGKQKLQYEGIFIKDSNSLAYYNMANGAVIHLALKERGGRKK

SEQ ID NO: 160021 - DNA, 2187 bp, Artificial Sequence
  derived and/or modified sequence
atgcccgccggccccgtgcaggccgtgcccccccccccccccgtgcccaccgagcccaagcagcccaccgaggaggaggccagcagcaaggaggacagcgcccccagcaagcccgtggtgggcatcatctaccccccccccgaggtgagaaacatcgtggacaagaccgccagcttcgtggccagaaacggccccgagttcgaggccagaatcagacagaacgagatcaacaaccccaagttcaacttcctgaaccccaacgacccctaccacgcctactacagacacaaggtgagcgagttcaaggagggcaaggcccagttcgtggccagaaacggcagacagttcctgacccagctgatgcagaaggagcagagaaactaccagttcgacttcctgagaccccagcacagcctgttcaactacttcaccaagctggtggagcagtacaccaagatcctgatcccccccaagggcctgttcagcaagctgaagaaggaggccgagaaccccagagaggtgctggaccaggtgtgctacagagtggagtgggccaagttccaggagagagagagaaagaaggaggaggaggagaaggagaaggagagagtggcctacgcccagatcgactggcacgacttcgtggtggtggagaccgtggacttccagcccaacgagcagggcaacttccccccccccaccacccccgaggagctgggcgccagaatcctgatccaggagagatacgagaagttcggcgagagcgaggaggtggagatggaggtggagagcgacgaggaggacgacaagcaggagaaggccgaggagccccccagccagctggaccaggacacccaggtgcaggacatggacgagggcagcgacgacgaggaggagggccagaaggtgccccccccccccgagacccccatgcccccccccctgccccccacccccgaccaggtgatcgtgagaaaggactacgaccccaaggccagcaagcccctgccccccgcccccgcccccgacgagtacctggtgagccccatcaccggcgagaagatccccgccagcaagatgcaggagcacatgagaatcggcctgctggaccccagatggctggagcagagagacagaagcatcagagagaagcagagcgacgacgaggtgtacgcccccggcctggacatcgagagcagcctgaagcagctggccgagagaagaaccgacatcttcggcgtggaggagaccgccatcggcaagaagatcggcgaggaggagatccagaagcccgaggagaaggtgacctgggacggccacagcggcagcatggccagaacccagcaggccgcccaggccaacatcaccctgcaggagcagatcgaggccatccacaaggccaagggcctggtgcccgaggacgacaccaaggagaagatcggccccagcaagcccaacgagatcccccagcagccccccccccccagcagcgccaccaacatccccagcagcgccccccccatcaccagcgtgcccagaccccccaccatgcccccccccgtgagaaccaccgtggtgagcgccgtgcccgtgatgcccagaccccccatggccagcgtggtgagactgccccccggcagcgtgatcgcccccatgccccccatcatccacgcccccagaatcaacgtggtgcccatgccccccagcgccccccccatcatggcccccagacccccccccatgatcgtgcccaccgccttcgtgcccgccccccccgtggcccccgtgcccgcccccgcccccatgccccccgtgcacccccccccccccatggaggacgagcccaccagcaagaagctgaagaccgaggacagcctgatgcccgaggaggagttcctgagaagaaacaagggccccgtgagcatcaaggtgcaggtgcccaacatgcaggacaagaccgagtggaagctgaacggccaggtgctggtgttcaccctgcccctgaccgaccaggtgagcgtgatcaaggtgaagatccacgaggccaccggcatgcccgccggcaagcagaagctgcagtacgagggcatcttcatcaaggacagcaacagcctggcctactacaacatggccaacggcgccgtgatccacctggccctgaaggagagaggcggcagaaagaagtag

SEQ ID NO: 160022 - DNA, 2073 bp, Artificial Sequence
  derived and/or modified sequence
atgaccctgaccatgcccaccaccgccatccccaaggtgatgcagcagcagcagcagaccacccagcagcagctgccccagaaggtgcaggcccaggtgatccaggagaccatcgtgcccaaggagcccccccccgagttcgagttcatcgccgacccccccagcatcagcgccttcgacctggacgtggtgaagctgaccgcccagttcgtggccagaaacggcagacagttcctgacccagctgatgcagaaggagcagagaaactaccagttcgacttcctgagaccccagcacagcctgttcaactacttcaccaagctggtggagcagtacaccaagatcctgatcccccccaagggcctgttcagcaagctgaagaaggaggccgagaaccccagagaggtgctggaccaggtgtgctacagagtggagtgggccaagttccaggagagagagagaaagaaggaggaggaggagaaggagaaggagagagtggcctacgcccagatcgactggcacgacttcgtggtggtggagaccgtggacttccagcccaacgagcagggcaacttccccccccccaccacccccgaggagctgggcgccagaatcctgatccaggagagatacgagaagttcggcgagagcgaggaggtggagatggaggtggagagcgacgaggaggacgacaagcaggagaaggccgaggagccccccagccagctggaccaggacacccaggtgcaggacatggacgagggcagcgacgacgaggaggagggccagaaggtgccccccccccccgagacccccatgcccccccccctgccccccacccccgaccaggtgatcgtgagaaaggactacgaccccaaggccagcaagcccctgccccccgcccccgcccccgacgagtacctggtgagccccatcaccggcgagaagatccccgccagcaagatgcaggagcacatgagaatcggcctgctggaccccagatggctggagcagagagacagaagcatcagagagaagcagagcgacgacgaggtgtacgcccccggcctggacatcgagagcagcctgaagcagctggccgagagaagaaccgacatcttcggcgtggaggagaccgccatcggcaagaagatcggcgaggaggagatccagaagcccgaggagaaggtgacctgggacggccacagcggcagcatggccagaacccagcaggccgcccaggccaacatcaccctgcaggagcagatcgaggccatccacaaggccaagggcctggtgcccgaggacgacaccaaggagaagatcggccccagcaagcccaacgagatcccccagcagccccccccccccagcagcgccaccaacatccccagcagcgccccccccatcaccagcgtgcccagaccccccaccatgcccccccccgtgagaaccaccgtggtgagcgccgtgcccgtgatgcccagaccccccatggccagcgtggtgagactgccccccggcagcgtgatcgcccccatgccccccatcatccacgcccccagaatcaacgtggtgcccatgccccccagcgccccccccatcatggcccccagacccccccccatgatcgtgcccaccgccttcgtgcccgccccccccgtggcccccgtgcccgcccccgcccccatgccccccgtgcacccccccccccccatggaggacgagcccaccagcaagaagctgaagaccgaggacagcctgatgcccgaggaggagttcctgagaagaaacaagggccccgtgagcatcaaggtgcaggtgcccaacatgcaggacaagaccgagtggaagctgaacggccaggtgctggtgttcaccctgcccctgaccgaccaggtgagcgtgatcaaggtgaagatccacgaggccaccggcatgcccgccggcaagcagaagctgcagtacgagggcatcttcatcaaggacagcaacagcctggcctactacaacatggccaacggcgccgtgatccacctggccctgaaggagagaggcggcagaaagaagtag

SEQ ID NO: 160023 - DNA, 2382 bp, Artificial Sequence
  derived and/or modified sequence
atgcccgccggccccgtgcaggccgtgcccccccccccccccgtgcccaccgagcccaagcagcccaccgaggaggaggccagcagcaaggaggacagcgcccccagcaagcccgtggtgggcatcatctaccccccccccgaggtgagaaacatcgtggacaagaccgccagcttcgtggccagaaacggccccgagttcgaggccagaatcagacagaacgagatcaacaaccccaagttcaacttcctgaaccccaacgacccctaccacgcctactacagacacaaggtgagcgagttcaaggagggcaaggcccaggagcccagcgccgccatccccaaggtgatgcagcagcagcagcagaccacccagcagcagctgccccagaaggtgcaggcccaggtgatccaggagaccatcgtgcccaaggagcccccccccgagttcgagttcatcgccgacccccccagcatcagcgccttcgacctggacgtggtgaagctgaccgcccagttcgtggccagaaacggcagacagttcctgacccagctgatgcagaaggagcagagaaactaccagttcgacttcctgagaccccagcacagcctgttcaactacttcaccaagctggtggagcagtacaccaagatcctgatcccccccaagggcctgttcagcaagctgaagaaggaggccgagaaccccagagaggtgctggaccaggtgtgctacagagtggagtgggccaagttccaggagagagagagaaagaaggaggaggaggagaaggagaaggagagagtggcctacgcccagatcgactggcacgacttcgtggtggtggagaccgtggacttccagcccaacgagcagggcaacttccccccccccaccacccccgaggagctgggcgccagaatcctgatccaggagagatacgagaagttcggcgagagcgaggaggtggagatggaggtggagagcgacgaggaggacgacaagcaggagaaggccgaggagccccccagccagctggaccaggacacccaggtgcaggacatggacgagggcagcgacgacgaggaggagggccagaaggtgccccccccccccgagacccccatgcccccccccctgccccccacccccgaccaggtgatcgtgagaaaggactacgaccccaaggccagcaagcccctgccccccgcccccgcccccgacgagtacctggtgagccccatcaccggcgagaagatccccgccagcaagatgcaggagcacatgagaatcggcctgctggaccccagatggctggagcagagagacagaagcatcagagagaagcagagcgacgacgaggtgtacgcccccggcctggacatcgagagcagcctgaagcagctggccgagagaagaaccgacatcttcggcgtggaggagaccgccatcggcaagaagatcggcgaggaggagatccagaagcccgaggagaaggtgacctgggacggccacagcggcagcatggccagaacccagcaggccgcccaggccaacatcaccctgcaggagcagatcgaggccatccacaaggccaagggcctggtgcccgaggacgacaccaaggagaagatcggccccagcaagcccaacgagatcccccagcagccccccccccccagcagcgccaccaacatccccagcagcgccccccccatcaccagcgtgcccagaccccccaccatgcccccccccgtgagaaccaccgtggtgagcgccgtgcccgtgatgcccagaccccccatggccagcgtggtgagactgccccccggcagcgtgatcgcccccatgccccccatcatccacgcccccagaatcaacgtggtgcccatgccccccagcgccccccccatcatggcccccagacccccccccatgatcgtgcccaccgccttcgtgcccgccccccccgtggcccccgtgcccgcccccgcccccatgccccccgtgcacccccccccccccatggaggacgagcccaccagcaagaagctgaagaccgaggacagcctgatgcccgaggaggagttcctgagaagaaacaagggccccgtgagcatcaaggtgcaggtgcccaacatgcaggacaagaccgagtggaagctgaacggccaggtgctggtgttcaccctgcccctgaccgaccaggtgagcgtgatcaaggtgaagatccacgaggccaccggcatgcccgccggcaagcagaagctgcagtacgagggcatcttcatcaaggacagcaacagcctggcctactacaacatggccaacggcgccgtgatccacctggccctgaaggagagaggcggcagaaagaagtag

SEQ ID NO: 160024 - DNA, 2187 bp, Artificial Sequence
  derived and/or modified sequence
atgcctgcagggcctgtacaggcagtgccccccccaccccccgtaccgactgaacccaaacagcctacagaagaagaagctagctcgaaggaggactctgccccgagtaagccagtggtcggaatcatatatcctccccccgaagtgcgtaacattgtcgataaaaccgctagcttcgtcgcccgcaatgggcctgagtttgaggcccgcatcagacagaatgagatcaataacccgaaatttaacttcctaaaccctaacgacccataccatgcttactaccgacacaaggtctcagagtttaaggaaggcaaggcgcagtttgtcgcacgcaatggccggcaatttcttactcaactaatgcaaaaagagcagcgaaactaccaattcgacttcctgcgcccccagcacagtctgtttaactactttactaagctggtggagcagtacacaaagatactaataccacccaaggggctgttttccaagttaaagaaggaagccgagaacccacgcgaagtgctggaccaggtgtgttaccgagtggaatgggctaagttccaggaacgggagaggaaaaaggaggaggaagagaaagaaaaggaaagagtggcctacgcccagatcgactggcacgatttcgtggtagttgagaccgttgatttccaaccaaacgagcaggggaatttcccgcctcccaccacgccagaagagctgggagcacgcattctaattcaggagagatacgagaagtttggggagtccgaggaagttgagatggaggtggaaagtgacgaggaagatgataaacaggagaaagccgaagaacctccttcccagctcgatcaagatacgcaagtccaggacatggacgaaggctctgatgacgaagaagagggccagaaagtacctccacccccagaaacaccaatgccgccaccactaccccctacaccagatcaggtaatcgtaagaaaggactacgacccaaaggccagtaaaccactcccacctgcccccgcgcctgatgagtacctcgtcagcccaattaccggcgaaaaaataccagcatcaaaaatgcaagaacatatgcgtataggccttctggacccacgatggctggagcagcgcgacagaagtatcagagagaaacagtccgatgatgaggtctatgctccgggcctggacatcgagtctagtcttaagcagttagcagagaggagaacagacattttcggtgtcgaagagaccgccatcggcaagaagatcggcgaggaggagatccagaaacccgaagagaaagtgacatgggatggtcactccggctccatggcccggactcagcaggcagcacaagcaaatatcactctacaggaacagatagaggccatacacaaggccaaggggttagtacctgaggatgacactaaggagaagatcggtccgtccaaacccaacgagatcccccagcaacctccacctccatcaagcgcgacgaacatcccttcctctgctccacccatcaccagtgtgccacgccctcccaccatgccccctccagtccgcaccacagtggtctctgctgtcccagtgatgcccaggccccccatggccagtgttgtgcgattgccacctgggtctgtgattgctcccatgccaccaatcatccacgcgccgcgaatcaacgtcgttccaatgccccctagcgcacctccaataatggctcctcggcctccacccatgattgtgccaacagcgttcgttccagcacccccagtggccccggtgcccgctccagctcctatgcccccggtgcatcctcccccgcccatggaggatgagcccacctcaaaaaagctcaaaaccgaggactccttgatgccagaggaggagtttctcagacgcaacaagggtcctgtcagcatcaaagtgcaagttcccaacatgcaagacaaaacagaatggaagctgaatggacaggtgttggtgtttaccctccccctcaccgatcaggtgtctgtcatcaaagtaaaaatccacgaggcaacaggcatgcctgccggtaaacagaaattgcagtacgaagggatcttcatcaaagacagcaatagcctggcctattataacatggctaacggagcagtgattcatttagcacttaaggaaagaggtgggcgaaaaaagtag

SEQ ID NO: 160025 - DNA, 2073 bp, Artificial Sequence
  derived and/or modified sequence
atgacactcacgatgccgaccacagcaatccccaaggtcatgcaacagcaacagcagacaacccaacagcagctgccccagaaagtgcaggcacaggtaattcaggagaccatagtgcccaaagaaccacccccggagtttgaattcattgctgaccctccgtccatttccgcattcgaccttgatgtggtaaagctgactgcccagtttgtcgcccgcaatggacggcaattccttacccagctgatgcagaaggagcagcgaaattaccaattcgatttccttaggccccagcacagtctcttcaactactttactaaattagtcgagcaatataccaagatactcattcccccgaaaggactattcagtaaacttaaaaaggaggctgaaaacccacgagaggtcctcgaccaggtctgttacagggtggagtgggcgaagtttcaggagcgggagcgaaaaaaagaggaggaagaaaaggagaaggaacgtgtcgcctatgcacagatcgactggcatgactttgtcgttgtggagacagttgactttcaacctaacgagcaggggaacttcccacctcccactaccccggaggagctgggcgcccgcatactgatacaggagcgctacgagaagttcggagaatccgaagaagtggagatggaggtagaatctgatgaagaggatgataagcaggaaaaggctgaagagccaccatcccagttggatcaggacacccaggtccaggatatggacgaaggtagcgatgacgaggaggaggggcagaaggtgccaccaccacctgagacccctatgccgccccctttgccccccacaccagaccaggtgatcgttagaaaggactatgatcccaaggcctccaaaccactcccccctgcacctgcccccgatgaatatctggtctcgccgataacaggcgaaaagatacccgcgtctaaaatgcaagagcatatgagaatcggcctgctggaccccaggtggctcgaacagcgtgaccggagcatcagggaaaaacagtcggatgatgaagtatacgcgccgggcctcgatatcgagtccagcctgaagcagctcgccgaaagaaggacggatatttttggtgttgaggagacggccattggaaagaaaattggcgaggaggagatccagaaaccagaagagaaggtaacctgggacggccacagcgggtccatggccaggacccaacaggccgctcaagctaacattactttacaagagcaaattgaagccatccacaaggctaaaggcttggtacctgaagacgatacaaaggaaaaaatcggaccctctaagccaaacgagattccacagcagcctcccccgcctagtagcgctactaacattcccagttcagctcctccaatcacaagcgttcctcggccccctacgatgccgcccccagtgcgaaccacagtggtttctgctgtgccggttatgccacgcccgccaatggcctccgtcgttaggctgccccctggttccgtaatagccccaatgccaccgattattcacgcaccgaggatcaatgtggtgcccatgcccccatctgccccaccgattatggcccccaggccccccccgatgatcgtgcccaccgcttttgtgcccgctccgcctgtcgcccctgtgcctgccccggctcccatgcctcccgtacaccctccacccccaatggaggatgaaccaacatctaaaaagctaaaaacagaagatagcctgatgccggaggaggaattcttgagacggaataaagggcctgtttccatcaaagttcaagtgcctaacatgcaagacaagactgaatggaagctgaatggtcaggtcctggtgttcacgcttcctctgactgatcaggtctctgtgattaaggtgaaaatccatgaggccaccggcatgcctgcaggcaagcagaaactgcagtatgagggaatattcattaaggatagtaattcgcttgcttattacaatatggccaatggcgccgttattcacctagcactgaaggaacgcggaggacggaagaagtag

SEQ ID NO: 160026 - DNA, 2382 bp, Artificial Sequence
  derived and/or modified sequence
atgccagccggacctgttcaagccgttccacccccacctcccgtgccgactgagcctaagcaaccaacggaggaagaggcctcaagcaaagaggatagcgccccttcaaagcctgttgttgggattatttatcctccacctgaggtgagaaacatcgtcgacaaaacagcctcgtttgttgccaggaacggaccagaattcgaggcgaggattaggcagaacgaaatcaacaaccctaaattcaatttcctgaaccctaacgacccctaccatgcatattatcgacacaaggttagtgagtttaaggagggaaaggcccaggaaccaagcgccgcaataccaaaggtcatgcagcagcagcaacagactacccaacaacaactgcctcaaaaagtgcaggcacaggtgatacaagagacaatcgtgccaaaagagcccccgccagaatttgagttcattgcagacccaccgtccatcagcgctttcgacctggacgttgttaagctaaccgcacagttcgtggctcggaacggccgacagtttctgacacagttaatgcagaaagaacagcgtaattatcagtttgacttcctgcgccctcagcactctttgtttaattactttacaaaactagtagagcagtatacaaagatattgatacccccgaaagggctcttctccaagctgaagaaggaagctgaaaatccccgcgaagttttagaccaggtctgttatcgcgtggagtgggccaaatttcaggaaagagagcgcaagaaggaggaagaggaaaaagagaaagagcgggttgcctacgcacagatcgactggcatgacttcgtagtagtcgaaactgtcgattttcaaccgaatgagcaagggaacttcccaccacctactaccccggaggagctgggggctcgaatcctcattcaggagagatacgaaaaatttggagaatctgaagaagtggagatggaagttgaatccgatgaagaggatgacaaacaggagaaagcagaggaaccgcctagccaactcgaccaggatacccaggttcaggacatggatgaaggttcagacgatgaggaggagggtcagaaagtacccccccccccagagactcccatgcccccaccacttccaccaacccctgatcaggtaatagtgagaaaggactacgaccccaaagccagtaagcccctgccacccgctccagcccctgacgagtatctcgtctcacctatcaccggtgagaagatacctgcaagcaaaatgcaggagcacatgcgtatcgggctgctcgaccctaggtggttggagcagcgggatagaagcatacgggagaagcaaagtgacgacgaagtctacgccccaggcttggatatcgagtcttccctgaaacagctagcagaacgccgcaccgacatttttggtgttgaagaaaccgctatcgggaagaaaatcggggaggaggaaattcagaaaccagaagagaaagtaacctgggacggtcacagcggatcgatggccagaacacagcaggccgcacaggccaatattactctgcaagaacaaattgaggctatccacaaggccaaaggcctcgtccccgaagatgacactaaagaaaaaatcggacctagcaagcccaacgagataccacagcagcctcctcctccttcaagcgccacaaatattccgtcctccgctccacctattacatccgtccctcgtccacctacaatgcctccaccagtaaggactacggtggtgtcagcagtgcccgtgatgcctagacctcccatggcctccgtggtgagactgccccctggttccgtaatagctccgatgccacccatcattcacgctccgaggatcaacgttgtccctatgcctccatccgcccctcccatcatggctccacggccacctcctatgattgtgccaaccgcatttgtgccagctccccccgtcgcaccggtgccggcccccgcgcccatgcctccagttcatcccccaccgccaatggaagacgagccaaccagcaagaaacttaagactgaggattctctcatgcctgaagaagagttcttgcgccgaaataagggacccgtgtctatcaaagtacaggtgcctaacatgcaagataaaactgaatggaagctaaacggtcaagtactcgtgtttacactgcctcttactgatcaggtgagcgtaatcaaagtcaaaatccacgaggctaccggaatgcccgcaggcaaacagaagttacagtatgaaggcattttcatcaaagacagtaatagtcttgcttattacaacatggcaaatggggccgtcatccatctggctctcaaggaacgcggtggccggaaaaagtag

SEQ ID NO: 160027 - DNA, 2187 bp, Artificial Sequence
  derived and/or modified sequence
atgcctgctggccctgtgcaggccgtgcccccacctcctcctgtgcccacagagcccaagcagcccacagaggaggaggccagcagcaaagaagattctgcccccagcaagcctgtggtgggcatcatctacccacctcctgaggtgaggaacatcgtggacaagacagccagctttgtggccagaaatggacctgagtttgaggcccgcatccggcagaatgagatcaacaaccccaagttcaacttcctgaaccccaatgacccctaccacgcctactaccgccacaaggtgtctgagttcaaggagggcaaggcccagtttgtggccagaaatggccggcagttcctgacccagctgatgcagaaggagcagaggaactaccagtttgacttcctgcggccccagcacagcctcttcaactacttcaccaagctggtggagcagtacaccaagatcctgatcccccccaagggcctcttcagcaagctgaagaaggaggccgagaacccccgggaggtgctggaccaggtgtgctacagagtggagtgggccaagttccaggagcgggagaggaagaaggaggaggaggagaaggagaaggagcgggtggcctatgcccagattgactggcatgactttgtggtggtggagaccgtggacttccagcccaatgagcagggcaacttccccccacccaccaccccagaggagctgggcgcccgcatcctgatccaggagagatatgagaagtttggagagagcgaggaggtggagatggaggtggagagtgatgaagaagatgacaagcaggagaaggccgaggagccccccagccagctggaccaggacacccaggtgcaggacatggatgagggcagtgatgatgaggaggagggccagaaggtgcccccacctcctgagacccccatgcccccacccctgccccccaccccagaccaggtgattgtgaggaaggactatgaccccaaggccagcaagcccctgcccccagccccagccccagatgagtacctggtgagccccatcactggagagaagatcccagccagcaagatgcaggagcacatgagaattggcctgctggacccccgctggctggagcagagggacaggagcatccgggagaagcagagtgatgatgaggtgtatgcccctggcctggacatcgagagcagcctgaagcagctggccgagaggagaacagacatcttcggcgtggaggagacagccatcggcaagaagattggagaggaggagatccagaagccagaggagaaggtgacctgggatggccacagcggctccatggcccggacccagcaggccgcccaggccaacatcaccctgcaggagcagatcgaggccatccacaaggccaagggcctggtgcctgaagatgacaccaaggagaagattggccccagcaagcccaatgagatcccccagcagcccccaccacccagcagcgccaccaacatccccagcagcgccccacccatcacctctgtgccccggccccccaccatgcctcctcctgtgaggaccaccgtggtgtctgctgtgcctgtgatgcccaggcctcccatggcctctgtggtgcggctgcccccaggctctgtgattgcccccatgccacccatcatccacgccccccgcatcaacgtggtgcccatgcctccttctgccccacccatcatggccccccggcccccacccatgattgtgcccacagcctttgtgcctgcccctcctgtggcccctgtgcctgccccagcccccatgcctcctgtgcaccccccaccacccatggaggatgagcccaccagcaagaagctgaagacagaggacagcctgatgcctgaggaggagttcctgcggagaaataaaggacctgtgtccatcaaggtgcaggtgcccaacatgcaggacaagacagagtggaagctgaatggccaggtgctggtgttcaccctgcccctgacagaccaggtgtctgtcatcaaggtgaagatccacgaggccaccggcatgcctgctgggaagcagaagctgcagtatgagggcatcttcatcaaggacagcaacagcctggcctactacaacatggccaacggggccgtcatccacctggccctgaaggagcggggcggcaggaagaagtag

SEQ ID NO: 160028 - DNA, 2073 bp, Artificial Sequence
  derived and/or modified sequence
atgaccctgaccatgcccaccacagccatccccaaggtgatgcagcagcagcagcagaccacccagcagcagctgccccagaaggtgcaggcccaggtgatccaggagaccatcgtgcccaaggagcccccacctgagtttgagttcatcgctgaccccccatccatcagcgcctttgacctggatgtggtgaagctgacagcccagtttgtggccagaaatggccggcagttcctgacccagctgatgcagaaggagcagaggaactaccagtttgacttcctgcggccccagcacagcctcttcaactacttcaccaagctggtggagcagtacaccaagatcctgatcccccccaagggcctcttcagcaagctgaagaaggaggccgagaacccccgggaggtgctggaccaggtgtgctacagagtggagtgggccaagttccaggagcgggagaggaagaaggaggaggaggagaaggagaaggagcgggtggcctatgcccagattgactggcatgactttgtggtggtggagaccgtggacttccagcccaatgagcagggcaacttccccccacccaccaccccagaggagctgggcgcccgcatcctgatccaggagagatatgagaagtttggagagagcgaggaggtggagatggaggtggagagtgatgaagaagatgacaagcaggagaaggccgaggagccccccagccagctggaccaggacacccaggtgcaggacatggatgagggcagtgatgatgaggaggagggccagaaggtgcccccacctcctgagacccccatgcccccacccctgccccccaccccagaccaggtgattgtgaggaaggactatgaccccaaggccagcaagcccctgcccccagccccagccccagatgagtacctggtgagccccatcactggagagaagatcccagccagcaagatgcaggagcacatgagaattggcctgctggacccccgctggctggagcagagggacaggagcatccgggagaagcagagtgatgatgaggtgtatgcccctggcctggacatcgagagcagcctgaagcagctggccgagaggagaacagacatcttcggcgtggaggagacagccatcggcaagaagattggagaggaggagatccagaagccagaggagaaggtgacctgggatggccacagcggctccatggcccggacccagcaggccgcccaggccaacatcaccctgcaggagcagatcgaggccatccacaaggccaagggcctggtgcctgaagatgacaccaaggagaagattggccccagcaagcccaatgagatcccccagcagcccccaccacccagcagcgccaccaacatccccagcagcgccccacccatcacctctgtgccccggccccccaccatgcctcctcctgtgaggaccaccgtggtgtctgctgtgcctgtgatgcccaggcctcccatggcctctgtggtgcggctgcccccaggctctgtgattgcccccatgccacccatcatccacgccccccgcatcaacgtggtgcccatgcctccttctgccccacccatcatggccccccggcccccacccatgattgtgcccacagcctttgtgcctgcccctcctgtggcccctgtgcctgccccagcccccatgcctcctgtgcaccccccaccacccatggaggatgagcccaccagcaagaagctgaagacagaggacagcctgatgcctgaggaggagttcctgcggagaaataaaggacctgtgtccatcaaggtgcaggtgcccaacatgcaggacaagacagagtggaagctgaatggccaggtgctggtgttcaccctgcccctgacagaccaggtgtctgtcatcaaggtgaagatccacgaggccaccggcatgcctgctgggaagcagaagctgcagtatgagggcatcttcatcaaggacagcaacagcctggcctactacaacatggccaacggggccgtcatccacctggccctgaaggagcggggcggcaggaagaagtag

SEQ ID NO: 160029 - DNA, 2382 bp, Artificial Sequence
  derived and/or modified sequence
atgcctgctggccctgtgcaggccgtgcccccacctcctcctgtgcccacagagcccaagcagcccacagaggaggaggccagcagcaaagaagattctgcccccagcaagcctgtggtgggcatcatctacccacctcctgaggtgaggaacatcgtggacaagacagccagctttgtggccagaaatggacctgagtttgaggcccgcatccggcagaatgagatcaacaaccccaagttcaacttcctgaaccccaatgacccctaccacgcctactaccgccacaaggtgtctgagttcaaggagggcaaggcccaggagcccagcgctgccatccccaaggtgatgcagcagcagcagcagaccacccagcagcagctgccccagaaggtgcaggcccaggtgatccaggagaccatcgtgcccaaggagcccccacctgagtttgagttcatcgctgacccccccagcatcagcgcctttgacctggatgtggtgaagctgacagcccagtttgtggccagaaatggccggcagttcctgacccagctgatgcagaaggagcagaggaactaccagtttgacttcctgcggccccagcacagcctcttcaactacttcaccaagctggtggagcagtacaccaagatcctgatcccccccaagggcctcttcagcaagctgaagaaggaggccgagaacccccgggaggtgctggaccaggtgtgctacagagtggagtgggccaagttccaggagcgggagaggaagaaggaggaggaggagaaggagaaggagcgggtggcctatgcccagattgactggcatgactttgtggtggtggagaccgtggacttccagcccaatgagcagggcaacttccccccacccaccaccccagaggagctgggcgcccgcatcctgatccaggagagatatgagaagtttggagagagcgaggaggtggagatggaggtggagagtgatgaggaggatgacaagcaggagaaggccgaggagccccccagccagctggaccaggacacccaggtgcaggacatggatgagggcagtgatgatgaggaggagggccagaaggtgcccccacctcctgagacccccatgcccccacccctgccccccaccccagaccaggtgattgtgaggaaggactatgaccccaaggccagcaagcccctgcccccagccccagccccagatgagtacctggtgagccccatcaccggggagaagatcccagccagcaagatgcaggagcacatgagaattggcctgctggacccccgctggctggagcagagggacaggagcatccgggagaagcagagtgatgatgaggtgtatgcccctggcctggacatcgagagcagcctgaagcagctggccgagaggagaacagacatctttggagtggaggagacagccatcggcaagaagatcggggaggaggagatccagaagccagaggagaaggtgacctgggatggccacagcggctccatggcccggacccagcaggccgcccaggccaacatcaccctgcaggagcagatcgaggccatccacaaggccaagggcctggtgcctgaagatgacaccaaggagaagattggccccagcaagcccaatgagatcccccagcagcccccaccacccagcagcgccaccaacatccccagcagcgccccacccatcacctctgtgcccaggcctcccaccatgcctcctcctgtgaggaccaccgtggtgtctgctgtgcctgtgatgccccggccccccatggcctctgtggtgcggctgcccccaggcagcgtcatcgcccccatgccacccatcatccacgccccccgcatcaacgtggtgcccatgccacccagcgccccacccatcatggccccccggcccccacccatgattgtgcccacagcctttgtgcctgcccctcctgtggcccctgtgcctgccccagcccccatgcctcctgtgcaccccccaccacccatggaggatgagcccaccagcaagaagctgaagacagaggacagcctgatgcctgaggaggagttcctgcggaggaacaagggccctgtgtccatcaaggtgcaggtgcccaacatgcaggacaagacagagtggaagctgaatggccaggtgctggtgttcaccctgcccctgacagaccaggtgtctgtcatcaaggtgaagatccacgaggccaccggcatgcctgctgggaagcagaagctgcagtatgagggcatcttcatcaaggacagcaacagcctggcctactacaacatggccaatggagctgtgatccacctggccctgaaggagcggggcggcaggaagaagtag

SEQ ID NO: 160030 - DNA, 2187 bp, Artificial Sequence
  derived and/or modified sequence
atgcccgccggccccgtgcaggccgtgcccccccccccccccgtgccaaccgaacctaaacaacccaccgaggaggaggctagttccaaggaggattcagcaccatcaaagcccgtggtcggaattatttaccccccacccgaagtgcggaatatcgtggacaagaccgcatcgttcgttgcacgcaatggtcccgagtttgaagcgagaattagacagaacgaaattaacaatcctaagttcaattttctgaatccaaatgatccatatcacgcatactatcggcataaggtgtccgagtttaaggaaggcaaagctcagtttgtagctagaaatggccgccagtttttaacccaactgatgcagaaggagcagcgaaattaccagttcgattttctgcgcccacaacattccttgttcaattactttaccaagctggtggaacaatacaccaaaattctgatccccccaaagggcctgttcagtaagttgaagaaggaggccgagaacccaagagaagtcctcgaccaggtatgctaccgagtggagtgggctaaatttcaagaacgcgaaaggaagaaggaagaggaggaaaaggaaaaagaaagagtggcctacgcacaaattgactggcacgatttcgtggtcgtcgagacagttgacttccagcctaatgagcagggcaactttccgcccccaaccacgcctgaggagctaggcgcaagaatcctgattcaggagcgttatgaaaagtttggggagtccgaggaagtggaaatggaggtggaatccgacgaggaggatgacaaacaagaaaaagctgaggaacccccctcgcagttggaccaggatactcaggtgcaggacatggatgagggaagtgatgacgaagaggaagggcaaaaagttccgccacccccagaaacgcccatgcctcctccgttgccccctacccctgatcaagtgatcgtgcgcaaagattacgatcctaaggcatcaaagccattgcccccagcaccagctccagatgagtacttagtgtcgcccatcactggggagaaaattcccgcaagcaagatgcaggagcatatgagaatcggactgctggacccacggtggctggagcagcgagataggtcaatccgtgagaagcagtccgacgacgaggtatacgccccagggctggacattgagtcctctctgaagcagctggccgaacggaggactgacatctttggagtggaggagaccgcaatcggaaagaagatcggggaagaagagattcagaagccagaggaaaaagttacatgggacggacattccggtagcatggctaggacccagcaagccgctcaggccaatatcacgctgcaggagcagattgaggccatccataaagccaagggtctcgttcccgaggatgatactaaagaaaagatcggccccagtaaaccaaatgaaatcccccagcagcctcccccaccaagctcggccaccaacatcccatccagtgcccctcccatcacttccgtgcccagacccccgactatgcctcctcccgtgaggacaactgtggtgagtgctgttccagtgatgcctagaccaccgatggccagcgtggtcaggctgcccccaggatctgtaattgcacctatgcctccaatcattcacgcccccaggatcaacgttgtgccaatgcctccaagcgcgcctccaatcatggcccctcgccctccgccaatgatcgtgccaacagcgtttgttccggccccccctgtcgcccctgttcctgcacccgctcccatgccaccagtgcacccaccccccccgatggaggatgaaccaactagtaaaaagttgaaaactgaggactcgctgatgccagaggaggagtttcttagacgcaacaagggccctgtttccattaaagtccaggttccaaatatgcaagacaaaacggagtggaagttgaacggccaggtgctggtgttcacactgcccctgacggatcaggtgtccgtgattaaggtgaagattcatgaagctaccgggatgccagccggcaagcagaagcttcagtacgaaggaatcttcattaaagatagcaattcacttgcttactacaatatggctaatggagctgtaattcacctggcattgaaggaaagaggaggccggaagaagtag

SEQ ID NO: 160031 - DNA, 2073 bp, Artificial Sequence
  derived and/or modified sequence
atgaccctgaccatgcccaccaccgccatccccaaggtgatgcagcagcagcagcagactacccagcaacagctgcctcagaaagtgcaagctcaggtgatccaggagacgatcgtgcccaaagaacctccaccagagtttgaatttattgccgacccgccttcaatatcagcattcgacctagatgtcgtgaaactcaccgcacagttcgtggcccggaacggcaggcaattcctcactcagcttatgcagaaagagcagcggaactatcagtttgatttccttcgtcctcaacacagcctcttcaattactttactaagttggttgaacagtacactaagattcttattcctccaaaaggattattttctaaacttaagaaagaggccgagaatccccgagaggttcttgatcaggtttgttatcgcgtggaatgggctaagttccaggagcgagaaagaaagaaggaggaggaagagaaggagaaagaacgggttgcttatgctcaaatagattggcacgattttgtcgtggtagaaaccgtggattttcagcctaatgaacagggtaatttcccgcccccaacaacgcctgaagagctgggggctcgcatcctgattcaagagagatacgagaagtttggagagtcagaggaggtcgagatggaagtggagtcagatgaagaagacgataaacaggaaaaggctgaggaaccgccctcacagttagaccaagacacccaagtgcaggacatggacgaaggttccgacgatgaagaggagggtcaaaaagtgcctcctccaccagagactcccatgcctcctcctctcccacctacaccagaccaggtcattgtgagaaaggactacgacccgaaggcttccaaaccactcccccccgcaccagcccccgacgagtacctggtgtcacccataacaggtgaaaaaatccctgcttctaaaatgcaggagcacatgaggattggtctcctggatccgcggtggctggaacaacgtgacaggagcattcgggaaaaacagtctgacgatgaggtgtatgcaccaggactggatattgaatcatccctgaagcagcttgcggaacgccgcacagacattttcggggttgaggagacggctatcgggaagaagattggtgaggaagagatccagaaacccgaagagaaagtcacgtgggatgggcattcgggctcgatggcacggacccagcaagcggcccaggccaacattacacttcaggaacaaattgaagctatccacaaggccaagggactggttcctgaagacgatacaaaggagaagattggccctagtaaacccaatgaaatcccccagcaacccccccctcccagttctgccacgaacatcccatcttctgctcctcctattacttcggtccctaggcctcctactatgccacctccggtcagaacaaccgttgtgagcgcagtaccagtgatgccacgaccgcctatggccagtgtcgtcaggctgccgcccggatcagtgatcgccccgatgccccccataattcacgccccaaggatcaatgtggtacctatgcccccttccgctccccccatcatggcacctaggccccctcctatgatcgtccccaccgctttcgtccccgcacctcctgtggcaccagtgcccgcccccgctcccatgcctcctgtgcatcccccaccaccaatggaagatgagccaacctccaagaagctgaaaacagaagatagcctgatgcctgaagaagaattcctcagacggaataaaggcccagtgtcgattaaggttcaggtgccgaatatgcaggacaagaccgaatggaagctgaacggacaagtgctggtcttcacactacctttgactgaccaggtttccgtcatcaaggttaaaattcatgaagccacagggatgccggctggcaaacagaagctccagtatgagggaatctttatcaaagactccaactcgttggcttactataatatggccaacggtgctgtcatccacttggctctgaaagaaagaggcggccgaaaaaagtag

SEQ ID NO: 160032 - DNA, 2382 bp, Artificial Sequence
  derived and/or modified sequence
atgcccgccggccccgtgcaggccgtgcccccccccccccccgtgcctaccgaaccaaagcagcctaccgaagaagaggcttcttcgaaagaggatagtgccccatctaaacctgtggttggaattatctatcccccccccgaagtgcgcaacatcgtcgacaaaactgctagttttgtggctcggaatggcccagagtttgaagctcgcattaggcagaacgagatcaacaatccaaaattcaacttcctgaatcccaatgacccatatcacgcttactatcgccacaaagttagcgagttcaaagagggcaaggctcaggaaccaagtgccgcgataccaaaagtgatgcagcagcagcagcagaccacccagcagcagctgccacagaaggtgcaggcccaagtgatccaggagaccatcgtgccaaaggagcctccccctgagttcgaattcatcgccgatcctcctagcatcagcgcttttgacttggatgttgtcaaactgacggcccaattcgtagctcgcaacggcagacaattcctcacgcagcttatgcagaaggagcagagaaactatcagtttgacttccttaggcctcagcattcgctgtttaactatttcactaaactggtcgagcagtataccaagatattaatccctcctaaaggtctcttttcaaaactgaagaaggaggctgagaatcctagggaggtcctggaccaggtttgctacagggttgaatgggcgaagttccaagaaagagagcgtaaaaaggaagaagaagagaaggaaaaagagcgcgtggcatacgcccagatcgactggcatgacttcgtggtggttgaaacagttgacttccaacctaacgagcaggggaattttccccctccaactactcctgaggagctgggcgctcggatccttatccaggagaggtacgagaaattcggcgagtccgaggaggtagaaatggaggttgagagcgacgaggaggatgataagcaggagaaagccgaggaacctcccagccaactggatcaagatactcaggtgcaagatatggatgaagggagcgacgacgaagaagaaggacagaaagtcccaccgcctcccgaaacaccaatgccaccgcccctgccccccactccggaccaagtgattgtgaggaaagactacgacccaaaggcctcaaagcctctgcctccggcacccgctcccgatgaatacttggtgagcccgattaccggagaaaagatccctgccagtaagatgcaggagcacatgagaattgggctgttggaccctagatggctggagcaacgggaccgctccattcgagaaaaacagagtgatgacgaggtttacgcccctggcctggacattgagtcctcattaaaacagcttgccgaacggcgcaccgacatttttggagtggaggagaccgcgatcgggaaaaagattggcgaagaggagatacaaaaacccgaggagaaagttacttgggacggacacagtggatctatggcccggacccagcaagctgcccaggctaatatcacattacaggagcagatcgaagctatccacaaggctaaaggccttgttcctgaagacgatacaaaagagaagattggacccagtaagcccaacgaaatacctcaacagcccccacctcccagcagcgctaccaatatcccttcttccgcacctccaataacatccgtcccacgtcctcctacaatgccaccccctgtacgaactaccgtggtatcagccgtcccagtcatgccaaggccacccatggcctctgtggtgcggctcccaccaggatcagtgattgctcccatgccccctatcatccacgccccccgtattaatgtcgtacccatgcctccttctgcccctcctattatggcgcctagacctcctccaatgatcgtgccaaccgcatttgtccctgccccgccagtggcgccggtgcccgctccagccccaatgccccccgtgcaccccccaccacctatggaggatgaaccaaccagtaagaagctcaagaccgaagacagtctgatgcctgaagaggaatttctgagacggaataagggccccgtgagcattaaagtacaggtcccaaacatgcaagataaaaccgaatggaaacttaacggccaagtgctcgtgttcactctgcccctgacggaccaggttagcgtgatcaaggttaagattcacgaggcgaccggcatgcccgcaggaaaacagaaactccagtacgaaggcatctttatcaaagatagcaactcgctcgcctattataacatggcaaatggcgctgtgattcaccttgcactcaaggaaagaggggggcgcaagaagtag

SEQ ID NO: 160033 - DNA, 2187 bp, Artificial Sequence
  derived and/or modified sequence
atgcccgctggaccggtgcaagccgtgcctcctcccccacccgtgcccactgaacccaagcaaccaaccgaagaagaagccagctcaaaagaggactccgccccttctaagcctgtagtaggcattatctatcctccccctgaggtgcgaaatatagtggacaagactgcttcttttgtggccagaaacgggccagaatttgaggcacgcattcggcaaaatgaaataaataatcctaagttcaatttcttaaacccaaatgacccctaccatgcttactatagacataaggtaagcgaattcaaggagggaaaagcccagtttgtggccaggaatggcaggcaatttctgacccaattaatgcagaaagagcagcggaattaccagttcgatttcttgcgccctcagcatagcctctttaattattttactaagctagttgagcagtatactaagattctcattccacctaagggactgtttagcaaactcaaaaaggaagctgagaaccccagagaggttctggaccaggtttgctacagagtcgagtgggctaaattccaggaacgggagcgaaagaaggaggaagaagagaaggagaaggaaagagtcgcctatgcgcagatagattggcatgactttgtggtggtagagactgtggactttcaaccgaacgagcaaggcaattttcctccacctacaacccccgaagaactgggcgctaggatcctaatccaggagcgatatgagaaatttggtgaaagtgaggaagttgaaatggaggtcgagtcggacgaagaagacgataaacaagaaaaagctgaagaaccaccatcacagttagaccaggacacgcaggtgcaggatatggacgaaggctcagacgatgaggaggaaggccagaaggtcccccctcccccagaaacccccatgccaccaccgctccctcctactccggaccaggtgattgttagaaaggattacgaccccaaggcttccaagccactgccacccgctcccgcacctgatgagtatctcgtttcacctatcactggagagaaaatccccgcatcgaaaatgcaggagcatatgcgaatcgggctgcttgaccccaggtggctggagcagagagaccgctccattagagaaaaacagtcggacgacgaggtgtatgctcctggactggacatcgaaagttcgctgaagcaactagctgagagaagaactgacatcttcggggttgaggaaaccgccataggcaagaaaataggggaggaggagatccagaaacccgaagaaaaagtaacttgggatggccactctgggagcatggctagaacccagcaggctgcccaggcaaacataacactgcaggaacagatcgaggcgatccataaggccaagggtctggtcccagaggacgacaccaaggagaaaataggcccatctaagcctaacgagatcccccagcaaccacctccaccctcatccgcaacaaatataccttctagtgccccaccaatcaccagcgtaccccgtcccccaacaatgcccccacccgttagaacaaccgttgtctcggcagtgccagtaatgccacggcctccaatggcctccgtggtcagattgcctcccggatcagtgatcgccccaatgccgcctataattcatgcaccgaggataaatgtcgtgcctatgccaccttctgccccacccatcatggccccacgcccacctcctatgatcgtgcctaccgctttcgtgcctgccccacctgtcgccccagtgccagctccagcacctatgcctcctgttcaccccccaccccctatggaggacgagccaacctctaaaaaattgaagactgaggactcactgatgcccgaagaagagtttcttcgccgaaacaagggtcctgtaagcattaaagtgcaagtgcctaatatgcaggacaagacagagtggaagctgaacgggcaagtgttggtgttcaccctgcctctgaccgaccaggtatctgttatcaaggtcaaaatccatgaagctactggtatgcccgcaggaaagcagaagctccagtatgagggaatttttatcaaagactctaattcactagcttattacaatatggcaaacggagccgtgatacatctcgccctcaaggagcgaggaggccgaaaaaaatag

SEQ ID NO: 160034 - DNA, 2073 bp, Artificial Sequence
  derived and/or modified sequence
atgactctgactatgcccactacagctattcctaaagtgatgcagcaacagcagcagacaacccaacagcagctccctcagaaagtgcaggcacaagtcattcaggaaacaattgtgccaaaggaaccccctcccgagtttgagttcatcgccgaccctccttctatatctgcgttcgatcttgatgtggttaaacttaccgcacagtttgttgctagaaacggcaggcaatttttgactcagttaatgcaaaaggagcagaggaactatcagtttgactttttgcgaccacagcactcactcttcaattactttaccaagctggtggaacaatacaccaagatactaatccctcccaagggtctgttttccaagttgaaaaaggaggccgagaacccccgagaggtgctagaccaggtgtgctaccgggtggagtgggctaagttccaggagcgagagcgcaagaaagaagaagaagagaaggagaaggagagagtagcatatgcccagattgactggcacgactttgtggtcgtggaaactgtcgattttcagccaaacgaacagggaaactttccaccacctaccacgcctgaggaattgggcgctcgcattctaattcaagagcggtatgagaagtttggggaaagcgaggaagtggagatggaggtggagagcgacgaggaagacgacaagcaagagaaagcagaagaacccccttctcaattggatcaggacacacaggtgcaggacatggatgaaggttctgatgacgaggaagaaggacagaaggtacctccaccacccgagaccccaatgcctccccctttgccacctactcccgatcaggtaattgtcaggaaggattacgatcccaaggcatcgaaacccctgcctcccgctcctgccccagacgagtacctagtttcccctattacgggggagaaaatacccgcttccaagatgcaggagcacatgcgcatcggcctgttggacccgagatggctggagcaaagagacaggagcattagggagaagcagagtgatgacgaagtttacgccccagggctcgacatcgagagttcacttaagcagctggccgagaggcgcacagatatctttggggtcgaagagactgcaattgggaagaagattggagaggaggagattcagaagcctgaggagaaggtgacttgggatggacactcaggcagcatggccaggacccagcaagcagcccaggcgaatattactttgcaggagcaaatcgaggcaatccataaggccaaagggcttgtgcccgaggatgataccaaggagaagattggcccttctaagccaaatgaaattcctcagcagccacctcccccatcttccgctactaatatcccatcatctgcccctcctattacgagcgtgccacgtcctcctactatgcctccgccagtaaggacaacagtcgtgtctgcagtgcccgtgatgcccagacctccaatggcaagtgtcgtgaggctgcccccaggctccgtcatcgctccaatgcctcctatcatacacgctcctcgcatcaatgtggttcccatgcccccttctgcgccacctatcatggccccaaggccacctccaatgattgtgccaaccgcattcgtgcctgctcccccagtagcacccgtccctgccccagcacccatgcctcctgtgcatccccctccccctatggaggatgagcctacaagtaagaagttgaagacagaagactctctgatgcccgaggaagagtttttgcgtcggaacaaaggcccagttagcatcaaggtgcaagtccccaatatgcaggataagacagaatggaagctcaatggacaggtactggtgttcactctgccacttactgaccaggtctcagtgataaaagtgaagatacacgaggccactggaatgcccgcagggaaacagaagctccagtatgaagggatttttattaaggattctaatagcctcgcctactataacatggctaacggggctgtgatacaccttgcgctcaaggagcgcggaggccgtaaaaagtag

SEQ ID NO: 160035 - DNA, 2382 bp, Artificial Sequence
  derived and/or modified sequence
atgcctgccggacctgttcaggccgttccccctccccctccagtcccaacggagcccaaacagcctactgaagaggaggcttcatctaaggaggactccgccccaagcaaacccgtcgtggggatcatttacccccctccagaagtgcgcaacatcgtggataagaccgcatcgtttgttgcccgtaatgggcctgagttcgaagccagaattagacaaaatgaaatcaacaacccaaagttcaactttttgaacccaaacgatccgtaccatgcctactaccggcacaaagtgtcagagttcaaggaggggaaagctcaggagccgtcagccgctattcctaaagtgatgcaacagcagcagcagaccactcaacagcagctgccgcagaaagttcaagcccaagtcattcaggagaccatcgttcccaaagaaccacctcccgagtttgagtttattgctgatccaccatctatctctgcgttcgatctcgacgtggtcaaactgaccgcccagttcgttgctaggaacgggcgtcaatttctcacccaactgatgcagaaagagcagcgtaactaccagtttgattttctgcggcctcagcactcactgttcaactactttaccaagttggtcgaacagtatactaaaattcttattccaccaaagggtctgttctcaaagctcaaaaaggaggcagagaacccccgagaagtcctggaccaggtgtgttatagggtggagtgggcaaagttccaagagcgagaacggaaaaaggaggaagaagagaaggagaaggagcgcgttgcttacgctcagatcgattggcacgatttcgtagttgtcgaaaccgtggattttcagccaaatgagcagggcaactttccccctccaacaacacccgaagagcttggggctcgtatccttatccaggaacgatatgaaaaatttggggagagtgaggaggtggagatggaggtggaatccgatgaagaagatgacaagcaggagaaggccgaggaacctccttctcagcttgaccaagacacccaagtgcaggacatggatgaagggtccgacgacgaggaggaaggccagaaggtgcccccaccaccagaaaccccaatgcccccacctcttcctccaacgcctgaccaagttattgtcaggaaggattatgatccgaaggcctccaaacccctgcctcctgcgcctgctcccgacgaatatttggttagtcctatcactggcgaaaagatccctgcaagcaagatgcaggaacacatgagaatcggacttttggacccgaggtggctggaacagagggaccggtcaatccgcgaaaagcaatccgatgacgaagtatacgcacccggactggacattgagtcctcattaaagcaactggccgaacggcgtactgatatctttggcgtcgaggagacagcaatcggtaaaaaaattggcgaagaggagatccagaagccagaggagaaagtgacctgggacggccacagcgggtctatggcaagaacgcagcaggccgctcaggccaatattacgctgcaggagcaaatcgaggccattcacaaggccaagggccttgtacctgaagacgacacaaaggagaaaattgggccaagtaaaccgaatgaaattccgcagcagccaccccctccatccagcgcgactaacatcccctcatcagccccaccaatcaccagtgtgccaagacccccaaccatgccacctcccgtgcggactaccgttgtatctgcagtgcccgttatgccaaggccgcctatggcaagcgtggtcagactgccacctggttcggtaatagccccaatgcctcctatcattcatgctcctcgtattaacgtcgtgccaatgcccccaagtgcacctcctattatggcccctagaccgcctcccatgattgttcctaccgcctttgttccggctcctcctgtcgccccagtgcctgctcccgctcccatgccacctgtgcacccgccacctcccatggaggatgagccaacctcaaagaaattgaagactgaagactccttgatgcccgaggaagagttcttacgcagaaacaaagggcctgtgagtatcaaagtacaggtgcccaacatgcaagataagacagaatggaagctcaatgggcaggtgcttgtgttcaccctgcccctgaccgaccaagtctccgtgatcaaagtgaaaatacacgaggcaacaggcatgcctgccggaaagcagaagctccagtacgaaggcatcttcatcaaggacagcaacagccttgcctactacaacatggccaacggagcagtcatccatctggccctgaaggagagaggtgggagaaagaaatag

SEQ ID NO: 160036 - DNA, 3510 bp, Artificial Sequence
  derived and/or modified sequence
ggtcccggaagtgcgccagtcgtaccttcgcggccgcaactcgctcggccgccgccatcttgcgagctcgtcgtactgaccgagcggggaggctgtcttgaggcggcaccgctcaccgacaccgaggcggactggcagccctgagcgtcgcagtcatgccggccggacccgtgcaggcggtgcccccgccgccgcccgtgcccacggagcccaaacagcccacagaagaagaagcatcttcaaaggaggattctgcaccttctaagccagttgtggggattatttaccctcctccagaggtcagaaatattgttgacaagactgccagctttgtggccagaaacgggcctgaatttgaagctaggatccgacagaacgagatcaacaaccccaagttcaactttctgaaccccaatgacccttaccatgcctactaccgccacaaggtcagcgagttcaaggaagggaaggctcaggagccgtccgccgccatccccaaggtcatgcagcagcagcagcagaccacccagcagcagctgccccagaaggtccaagcccaagtaatccaagagaccatcgtgcccaaagagcctcctcctgagtttgagttcattgctgatcctccctctatctcagccttcgacttggatgtggtgaagctgacggctcagtttgtggccaggaatgggcgccagtttctgacccagctgatgcagaaagagcagcgcaactaccagtttgactttctccgcccacagcacagcctcttcaactacttcacgaagctagtggaacagtacaccaagatcttgattccacccaaaggtttattttcaaagctcaagaaagaggctgaaaacccccgagaagttttggatcaggtgtgttaccgagtggaatgggccaaattccaggaacgtgagaggaagaaggaagaagaggagaaggagaaggagcgggtggcctatgctcagatcgactggcatgattttgtggtggtggaaacagtggacttccaacccaatgagcaagggaacttccctccccccaccacgccagaggagctgggggcccgaatcctcattcaggagcgctatgaaaagtttggggagagtgaggaagttgagatggaggtcgagtctgatgaggaggatgacaaacaggagaaggcggaggagcctccttcccagctggaccaggacacccaagtacaagatatggatgagggttcagatgatgaagaagaagggcagaaagtgcccccacccccagagacacccatgcctccacctctgcccccaactccagaccaagtcattgtccgcaaggattatgatcccaaagcctccaagcccttgcctccagcccctgctccagatgagtatcttgtgtcccccattactggggagaagatccccgccagcaaaatgcaggaacacatgcgcattggacttcttgaccctcgctggctggagcagcgggatcgctccatccgtgagaagcagagcgatgatgaggtgtacgcaccaggtctggatattgagagcagcttgaagcagttggctgagcggcgtactgacatcttcggtgtagaggaaacagccattggtaagaagatcggtgaggaggagatccagaagccagaggaaaaggtgacctgggatggccactcaggcagcatggcccggacccagcaggctgcccaggccaacatcaccctccaggagcagattgaggccattcacaaggccaaaggcctggtgccagaggatgacactaaagagaagattggccccagcaagcccaatgaaatccctcaacagccaccgccaccatcttcagccaccaacatccccagctcggctccacccatcacttcagtgccccgaccacccacaatgccacctccagttcgtactacagttgtctccgcagtacccgtcatgccccggcccccaatggcatctgtggtccggctgcccccaggctcagtgatcgcccccatgccgcccatcatccacgcgcccagaatcaacgtggtgcccatgcctccctcggcccctcctattatggccccccgcccaccccccatgattgtgccaacagcctttgtgcctgctccacctgtggcacctgtcccagctccagccccaatgccccctgtgcatcccccacctcccatggaagatgagcccacctccaaaaaactgaagacagaggacagcctcatgccagaggaggagttcctgcgcagaaacaagggtccagtgtccatcaaagtccaggtgcccaacatgcaggataagacggaatggaaactgaatgggcaggtgctggtcttcaccctcccactcacggaccaggtctctgtcattaaggtgaagattcatgaagccacaggcatgcctgcagggaaacagaagctacagtatgagggtatcttcatcaaagattccaactcactggcttactacaacatggccaatggcgcagtcatccacctggccctcaaggagagaggcgggaggaagaagtagacaagaggaacctgctgtcaagtccctgccattttgcctctcctgtctcccaccccctgccccagacccaggagcccccctgaggctttgccttgcctgcatatttgtttcgctcttactcagtttgggaattcaaattgtcctgcagaggttcattcccctgaccctttccccacattggtaagagtagctgggttttctaagccactctctggaatctctttgtgttagggtctcgatttgaggacattcatttcttcagcagcccattagcaactgagagcccagggatgtcctacaggatagtttcatagtgacaggtggcacttggctaatagaatatggctgatattgtcattaatcattttgtaccttgacatgggttgtctaataaaactcggacccttcttgtgaaatcagttaaataagacttgtctcggtcacctgtgccctgtccagactcgaggcagtggtaacactgcacagtgctatgtggcttctctttgaggatttttgggttttgtaactaaattcttgctgccctcatactttttatgtattagaatcatattcgtattgcccttttaaaacattgggatcctccaaaggcctgccccatgtatttaacagtaatacaggaagcatggcaggcaccatgcaaaccaaggatggatggtgcagtccctgtgtcagtgggcggtggtttcctgctggcctggaatcactcatcacctgattgattggctctgtggtcctgggcaggtgcctcataggtgtgtggatatgatgacgtttctttaaaatgtatgtatttaacaaatacttaattgtattaaggtcatgtaccaaggatttgataaagtttaaataatttactctctacttttatccattttatccattttaactcatgtaatcctcatgtgagtattcctgtttaacacttgagtaaactgaggcacagagaacataa

SEQ ID NO: 160037 - DNA, 4923 bp, Artificial Sequence
  derived and/or modified sequence
accttcgcggccgcaactcgctcggccgccgccatcttgcgagctcgtcgtactgaccgagcggggaggctgtcttgaggcggcaccgctcaccgacaccgaggcggactggcagccctgagcgtcgcagtcatgccggccggacccgtgcaggcggtgcccccgccgccgcccgtgcccacggagcccaaacagcccacagaagaagaagcatcttcaaaggaggattctgcaccttctaagccagttgtggggattatttaccctcctccagaggtcagaaatattgttgacaagactgccagctttgtggccagaaacgggcctgaatttgaagctaggatccgacagaacgagatcaacaaccccaagttcaactttctgaaccccaatgacccttaccatgcctactaccgccacaaggtcagcgagttcaaggaagggaaggctcagtttgtggccaggaatgggcgccagtttctgacccagctgatgcagaaagagcagcgcaactaccagtttgactttctccgcccacagcacagcctcttcaactacttcacgaagctagtggaacagtacaccaagatcttgattccacccaaaggtttattttcaaagctcaagaaagaggctgaaaacccccgagaagttttggatcaggtgtgttaccgagtggaatgggccaaattccaggaacgtgagaggaagaaggaagaagaggagaaggagaaggagcgggtggcctatgctcagatcgactggcatgattttgtggtggtggaaacagtggacttccaacccaatgagcaagggaacttccctccccccaccacgccagaggagctgggggcccgaatcctcattcaggagcgctatgaaaagtttggggagagtgaggaagttgagatggaggtcgagtctgatgaggaggatgacaaacaggagaaggcggaggagcctccttcccagctggaccaggacacccaagtacaagatatggatgagggttcagatgatgaagaagaagggcagaaagtgcccccacccccagagacacccatgcctccacctctgcccccaactccagaccaagtcattgtccgcaaggattatgatcccaaagcctccaagcccttgcctccagcccctgctccagatgagtatcttgtgtcccccattactggggagaagatccccgccagcaaaatgcaggaacacatgcgcattggacttcttgaccctcgctggctggagcagcgggatcgctccatccgtgagaagcagagcgatgatgaggtgtacgcaccaggtctggatattgagagcagcttgaagcagttggctgagcggcgtactgacatcttcggtgtagaggaaacagccattggtaagaagatcggtgaggaggagatccagaagccagaggaaaaggtgacctgggatggccactcaggcagcatggcccggacccagcaggctgcccaggccaacatcaccctccaggagcagattgaggccattcacaaggccaaaggcctggtgccagaggatgacactaaagagaagattggccccagcaagcccaatgaaatccctcaacagccaccgccaccatcttcagccaccaacatccccagctcggctccacccatcacttcagtgccccgaccacccacaatgccacctccagttcgtactacagttgtctccgcagtacccgtcatgccccggcccccaatggcatctgtggtccggctgcccccaggctcagtgatcgcccccatgccgcccatcatccacgcgcccagaatcaacgtggtgcccatgcctccctcggcccctcctattatggccccccgcccaccccccatgattgtgccaacagcctttgtgcctgctccacctgtggcacctgtcccagctccagccccaatgccccctgtgcatcccccacctcccatggaagatgagcccacctccaaaaaactgaagacagaggacagcctcatgccagaggaggagttcctgcgcagaaacaagggtccagtgtccatcaaagtccaggtgcccaacatgcaggataagacggaatggaaactgaatgggcaggtgctggtcttcaccctcccactcacggaccaggtctctgtcattaaggtgaagattcatgaagccacaggcatgcctgcagggaaacagaagctacagtatgagggtatcttcatcaaagattccaactcactggcttactacaacatggccaatggcgcagtcatccacctggccctcaaggagagaggcgggaggaagaagtagacaagaggaacctgctgtcaagtccctgccattttgcctctcctgtctcccaccccctgccccagacccaggagcccccctgaggctttgccttgcctgcatatttgtttcgctcttactcagtttgggaattcaaattgtcctgcagaggttcattcccctgaccctttccccacattggtaagagtagctgggttttctaagccactctctggaatctctttgtgttagggtctcgatttgaggacattcatttcttcagcagcccattagcaactgagagcccagggatgtcctacaggatagtttcatagtgacaggtggcacttggctaatagaatatggctgatattgtcattaatcattttgtaccttgacatgggttgtctaataaaactcggacccttcttgtgaaatcagttaaataagacttgtctcggtcacctgtgccctgtccagactcgaggcagtggtaacactgcacagtgctatgtggcttctctttgaggatttttgggttttgtaactaaattcttgctgccctcatactttttatgtattagaatcatattcgtattgcccttttaaaacattgggatcctccaaaggcctgccccatgtatttaacagtaatacaggaagcatggcaggcaccatgcaaaccaaggatggatggtgcagtccctgtgtcagtgggcggtggtttcctgctggcctggaatcactcatcacctgattgattggctctgtggtcctgggcaggtgcctcataggtgtgtggatatgatgacgtttctttaaaatgtatgtatttaacaaatacttaattgtattaaggtcatgtaccaaggatttgataaagtttaaataatttactctctacttttatccattttatccattttaactcatgtaatcctcatgtgagtattcctgtttaacacttgagtaaactgaggcacagagaacataagttgcatgccatagtcacacactgtgaaagtgaaaagagaatgtgtgcaaaacacgtcacagtcctggtttctgagtaaaggcaggctgttatctttagaatcaagctatcacagggagataggcaatgctgtgggtgttggaggaaggtgagagcctgttgctaacaatttcctggttttaaagctaaggctgattttattgggaagatctcacatgtgtgtggcccctgagagttcccagtgccttttatttgcagtccttccatttggacctcctagctgccccatcaggtcatctccagggctcagaggggtgagaccatttcccaaggtcacagaaccagctctctagtcaccaccctgcctctccctctcacccagagtcagtaccagttttatggctttattacaaactgctgggtccctcccattttcaacttgattgatgggatgtcatcccttatcctgtctgacatttgcctctggcctggttgctagaagtttgccccaggggcaagagttgaaatttggcttcctgaggtgggctttgtggtttgcgtccctaaagtgagcccactactggttgcttgtccatggccaacaccagaaatcccctgagcactacctgggtctcattccaagaaggaagagggtcaggagacctggggagtctcatattccaagttcttctttctttctgggagcagtgggcagttcatggtgttagggcactcacccccacagactggcaaaccctgcaggacttccgtggctgaggctgtgaccggaggccaggaatgccgttgggtggattgtgagtgaatgggccctttgagctgccctctagagagcaaatccagtttcctggagctcctgaatgaatatctgtactggctcgctcagatgcagaagctccattgaccatgaggccttgtgaacatcagtggccacaggcccagtgtgctgcttggcactgcactagtttaggacctgcagcatgtaggtagcgtcctagtgtttataatacaaagctgctctgcacagcttttctgattcttcttgcaatctcctgaggattatctgccccatttttaaaacgaggtggaatacccaaggtcatgtagccagtgagtgctctggaaagccaaagcagctcatcccttcctggggaccacactgctctgctccaccagaccacactatgaaataggaataagtgctcctgttgcaggactgctgggaaaacaggtggtgtgggacttaagtcaccataattttgaagacttgcatgcagagggctccaggaattgtagacattaaggaatttcactttcagttctacccactacttaagtacttgtcatgtactcttagaggaggccagtaatgatcagaaccattttactttaaaattaataatattgtattagagaatatattaaatggttatattgggttatgttaggatatatacttgaatggaaatacatgtactattagcaatcatatttcatttatccctgtaattagacaagaaagcataatatagctctactcatgggtacacataccagtgtataagatttttagaagtttactttttaaaaataaaagcaaaatgtaagatctt

SEQ ID NO: 160038 - DNA, 2920 bp, Artificial Sequence
  derived and/or modified sequence
cttcgcggccgcaactcgctcggccgccgccatcttgcgagctcgtcgtactgaccgagcggggaggctgtcttgaggcggcaccgctcaccgacaccgaggcggactggcagccctgagcgtcgcagtcatgccggccggacccgtgcaggcggtgcccccgccgccgcccgtgcccacggagcccaaacagcccacagaagaagaagcatcttcaaaggaggattctgcaccttctaagccagttgtggggattatttaccctcctccagaggtcagaaatattgttgacaagactgccagctttgtggccagaaacgggcctgaatttgaagctaggatccgacagaacgagatcaacaaccccaagttcaactttctgaaccccaatgacccttaccatgcctactaccgccatccccaaggtcatgcagcagcagcagcagaccacccagcagcagctgccccagaaggtccaagcccaagtaatccaagagaccatcgtgcccaaagagcctcctcctgagtttgagttcattgctgatcctccctctatctcagccttcgacttggatgtggtgaagctgacggctcagtttgtggccaggaatgggcgccagtttctgacccagctgatgcagaaagagcagcgcaactaccagtttgactttctccgcccacagcacagcctcttcaactacttcacgaagctagtggaacagtacaccaagatcttgattccacccaaaggtttattttcaaagctcaagaaagaggctgaaaacccccgagaagttttggatcaggtgtgttaccgagtggaatgggccaaattccaggaacgtgagaggaagaaggaagaagaggagaaggagaaggagcgggtggcctatgctcagatcgactggcatgattttgtggtggtggaaacagtggacttccaacccaatgagcaagggaacttccctccccccaccacgccagaggagctgggggcccgaatcctcattcaggagcgctatgaaaagtttggggagagtgaggaagttgagatggaggtcgagtctgatgaggaggatgacaaacaggagaaggcggaggagcctccttcccagctggaccaggacacccaagtacaagatatggatgagggttcagatgatgaagaagaagggcagaaagtgcccccacccccagagacacccatgcctccacctctgcccccaactccagaccaagtcattgtccgcaaggattatgatcccaaagcctccaagcccttgcctccagcccctgctccagatgagtatcttgtgtcccccattactggggagaagatccccgccagcaaaatgcaggaacacatgcgcattggacttcttgaccctcgctggctggagcagcgggatcgctccatccgtgagaagcagagcgatgatgaggtgtacgcaccaggtctggatattgagagcagcttgaagcagttggctgagcggcgtactgacatcttcggtgtagaggaaacagccattggtaagaagatcggtgaggaggagatccagaagccagaggaaaaggtgacctgggatggccactcaggcagcatggcccggacccagcaggctgcccaggccaacatcaccctccaggagcagattgaggccattcacaaggccaaaggcctggtgccagaggatgacactaaagagaagattggccccagcaagcccaatgaaatccctcaacagccaccgccaccatcttcagccaccaacatccccagctcggctccacccatcacttcagtgccccgaccacccacaatgccacctccagttcgtactacagttgtctccgcagtacccgtcatgccccggcccccaatggcatctgtggtccggctgcccccaggctcagtgatcgcccccatgccgcccatcatccacgcgcccagaatcaacgtggtgcccatgcctccctcggcccctcctattatggccccccgcccaccccccatgattgtgccaacagcctttgtgcctgctccacctgtggcacctgtcccagctccagccccaatgccccctgtgcatcccccacctcccatggaagatgagcccacctccaaaaaactgaagacagaggacagcctcatgccagaggaggagttcctgcgcagaaacaagggtccagtgtccatcaaagtccaggtgcccaacatgcaggataagacggaatggaaactgaatgggcaggtgctggtcttcaccctcccactcacggaccaggtctctgtcattaaggtgaagattcatgaagccacaggcatgcctgcagggaaacagaagctacagtatgagggtatcttcatcaaagattccaactcactggcttactacaacatggccaatggcgcagtcatccacctggccctcaaggagagaggcgggaggaagaagtagacaagaggaacctgctgtcaagtccctgccattttgcctctcctgtctcccaccccctgccccagacccaggagcccccctgaggctttgccttgcctgcatatttgtttcgctcttactcagtttgggaattcaaattgtcctgcagaggttcattcccctgaccctttccccacattggtaagagtagctgggttttctaagccactctctggaatctctttgtgttagggtctcgatttgaggacattcatttcttcagcagcccattagcaactgagagcccagggatgtcctacaggatagtttcatagtgacaggtggcacttggctaatagaatatggctgatattgtcattaatcattttgtaccttgacatgggttgtctaataaaactcggacccttcttgtgaaatcagttaaataagacttgtctcggtcacctgtgccctgtcca

SEQ ID NO: 160039 - protein, 412 aa, Artificial Sequence
  derived and/or modified sequence
MANVADTKLYDILGVPPGASENELKKAYRKLAKEYHPDKNPNAGDKFKEISFAYEVLSNPEKRELYDRYGEQGLREGSGGGGGMDDIFSHIFGGGLFGFMGNQSRSRNGRRRGEDMMHPLKVSLEDLYNGKTTKLQLSKNVLCSACSGQGGKSGAVQKCSACRGRGVRIMIRQLAPGMVQQMQSVCSDCNGEGEVINEKDRCKKCEGKKVIKEVKILEVHVDKGMKHGQRITFTGEADQAPGVEPGDIVLLLQEKEHEVFQRDGNDLHMTYKIGLVEALCGFQFTFKHLDGRQIVVKYPPGKVIEPGCVRVVRGEGMPQYRNPFEKGDLYIKFDVQFPENNWINPDKLSELEDLLPSRPEVPNIIGETEEVELQEFDSTRGSGGGQRREAYNDSSDEESSSHHGPGVQCAHQ

SEQ ID NO: 160040 - DNA, 1239 bp, Artificial Sequence
  derived and/or modified sequence
atggcaaatgtggcagacaccaagctgtacgacatcttaggagttcctcccggagcctcagagaacgagctgaaaaaagcatacaggaagttggcaaaagaatatcatcctgataagaaccctaacgcaggtgacaagttcaaggagatcagctttgcctatgaagtgctgagtaaccctgagaaacgagagctgtacgatagatatggcgagcagggcctgagagagggatccggcggtggaggtggcatggacgatattttctcgcatattttcggcggaggactcttcggttttatgggtaaccaaagcaggtcccgcaacggacgccggcggggagaggacatgatgcacccgctgaaggtttccctcgaggatctgtataatggaaaaactaccaagctgcagttgagcaagaacgtcctgtgttctgcttgtagcggtcaggggggcaagtctggtgcggtacagaagtgctcggcatgtagagggcgaggtgtacggataatgattcgccagttagccccaggcatggtgcagcagatgcaaagtgtttgcagtgattgtaacggagagggcgaagtgattaatgagaaggatagatgcaagaagtgtgagggcaagaaggttataaaggaagtgaaaattttggaggtccatgtggataaagggatgaaacacggacaaaggattactttcaccggggaagccgaccaggcccccggagtagaacccggggacatagtccttctgcttcaagaaaaggaacacgaggtctttcagagggacggaaatgaccttcatatgacttacaaaataggccttgttgaagccctgtgtggattccagttcacattcaaacatttagacggcagacagatcgtcgtgaaatacccgcccggcaaagtgatcgaaccaggttgtgtgagagtggtgagaggtgaggggatgccacagtaccgtaaccccttcgaaaagggcgacctgtatataaaattcgacgtacagtttcctgaaaataattggatcaacccagacaagctgtccgagttggaagatctactgccttcccgcccagaggtgcccaatattataggtgagaccgaagaagttgagctgcaggagttcgactctacacgggggagcggcggcggacagcggcgcgaggcttataatgactcctcagacgaggagtcaagcagccatcacggacctggggttcagtgcgctcatcagtag

SEQ ID NO: 160041 - DNA, 1239 bp, Artificial Sequence
  derived and/or modified sequence
atggccaacgtggccgacaccaagctgtatgacatcctgggcgtgcccccaggggcctctgaaaatgagctgaagaaggcctacaggaagctggccaaggagtaccacccagacaagaaccccaatgctggggacaagttcaaggagatcagctttgcctatgaggtgctgagcaaccctgagaagcgggagctgtatgacagatatggagagcagggcctgcgggagggcagcggcggcggcggcggcatggatgacatcttcagccacatctttggaggcggcctgtttggcttcatgggcaaccagagccgcagcagaaatggaagaagaagaggagaggacatgatgcaccccctgaaggtgtccctggaggacctgtacaacgggaagaccaccaagctgcagctgagcaagaatgtgctgtgcagcgcctgcagcggccagggcggcaagtctggagctgtgcagaagtgcagcgcctgccggggccggggcgtgcgcatcatgatccggcagctggcccctggcatggtgcagcagatgcagagcgtgtgcagcgactgcaatggagagggggaggtgatcaatgagaaggaccgctgcaagaagtgtgagggcaagaaggtgatcaaggaggtgaagatcctggaggtgcacgtggacaagggcatgaagcacggccagaggatcaccttcaccggggaggccgaccaggcccctggggtggagcccggggacatcgtgctgctgctgcaggagaaggagcacgaggtgttccagagagatggaaatgacctgcacatgacctacaagattggcctggtggaggccctgtgtggcttccagttcaccttcaagcacctggatggccggcagatcgtggtgaagtacccacctgggaaggtgattgagcccggctgtgtgcgggtggtgcggggggagggcatgccccagtacagaaacccctttgagaagggggacctgtacatcaagtttgatgtgcagtttcctgagaacaactggatcaacccagacaagctgtctgagctggaggacctgctgcccagcaggcctgaggtgcccaacatcattggagaaacagaggaggtggagctgcaggagtttgacagcacccggggcagcggcggcggccagaggcgggaggcctacaatgacagcagtgatgaggagagcagcagccaccacggccctggggtgcagtgtgcccaccagtag

SEQ ID NO: 160042 - DNA, 1239 bp, Artificial Sequence
  derived and/or modified sequence
atggccaacgtggccgacaccaagctgtacgacatcctgggcgtgcctcctggtgcgtcagagaatgaacttaaaaaggcgtatagaaagctggctaaagaataccatccagataaaaatccaaatgccggagacaagtttaaagagatctctttcgcctacgaagtgctttcgaacccagaaaaaagggagctttatgatagatacggtgagcaagggttaagagaggggagcggaggcgggggagggatggacgatattttctctcacatcttcggcggcggcttatttggattcatggggaaccagtcacgcagcaggaatgggaggcgcagaggcgaggatatgatgcatcccctaaaagtctccctggaggatctgtataatggcaagactacaaagttacagttgtccaaaaatgttttgtgttccgcgtgcagtggccaggggggtaagtccggcgccgtgcagaagtgcagcgcatgcaggggaagaggcgtaaggataatgatccggcagctagcccccggcatggtccaacagatgcagagcgtctgctccgattgcaacggagagggcgaggtgattaatgagaaagacaggtgtaaaaagtgtgaggggaagaaagtaatcaaggaggtgaagatactcgaagttcacgtggacaaggggatgaaacatggtcagcggatcacttttactggcgaagcggaccaagcacccggagtagaaccaggcgatattgtgctgctgctccaggaaaaggaacacgaagtattccagcgggatggcaacgacttgcacatgacgtataaaatcgggcttgtagaagcactgtgtgggtttcaattcacattcaagcacctggacggcagacaaatcgtggtgaagtaccctccaggcaaagtgatcgagccaggctgcgtgagggtggttcgtggagagggtatgcctcaataccggaacccgttcgaaaagggcgatctttacatcaaattcgatgtacagtttcctgagaacaactggatcaatcctgataaactctccgaattagaagatcttcttccatctcgacctgaagtgcccaatattatcggggagacagaagaggttgaactccaggaattcgactctacccggggctccgggggtggccagcgccgagaagcctacaacgattcctctgacgaagaatcctcctcccaccacggccccggcgtccagtgcgctcaccagtag

SEQ ID NO: 160043 - DNA, 1239 bp, Artificial Sequence
  derived and/or modified sequence
atggctaatgtcgcagacaccaagctgtatgacattctgggagtcccacccggtgcatctgaaaacgagctcaagaaggcatataggaaactggccaaggagtatcaccctgataagaacccaaacgcaggcgacaagtttaaagagatcagtttcgcgtacgaagtcctcagtaaccccgagaaacgtgagctttacgatcgctacggcgaacaaggtctgcgcgaggggagcgggggtggcggtggaatggatgatatcttctcacacattttcgggggtggcctgtttggctttatgggcaaccaaagtcggtcccgaaatggccgaagacgaggagaggacatgatgcaccccctgaaggtgtctttggaggacctgtacaacggcaaaacgacaaaactccagctttccaagaacgtgctatgttccgcctgtagcgggcagggtggaaaaagtggtgccgtccagaagtgttcagcatgtcgcggtcgcggtgtacggatcatgattcggcagttagctcctggcatggtacagcaaatgcagtctgtctgctctgattgtaatggtgaaggtgaagtgataaacgagaaggacaggtgtaaaaaatgtgagggcaaaaaggtgataaaggaggtcaagatactggaggttcatgttgacaagggtatgaagcacggccagcgcatcacatttacaggcgaagccgaccaagccccaggcgtagagcccggagacattgttctcttgctccaggagaaggagcacgaggtttttcagcgcgatggaaacgacttacatatgacctacaagatcgggctggtggaggccctgtgcgggttccagttcacattcaagcatttggatggacggcaaattgtggtgaagtatcccccaggcaaggtgattgagcctggctgtgtgcgagtggttcgtggagagggtatgcctcagtacaggaatccctttgagaaaggggacctttatattaaatttgacgtccagtttccagaaaataattggattaaccccgacaaacttagcgagcttgaggatcttcttccctcaagacctgaagtgcctaacataataggagagactgaggaggtagagcttcaggagtttgactctacacgtggcagtgggggtgggcagcggagagaggcatacaatgattcctccgatgaagagagcagcagtcaccacggaccaggcgttcagtgtgcccatcaatag

SEQ ID NO: 160044 - DNA, 1239 bp, Artificial Sequence
  derived and/or modified sequence
atggccaacgtggccgacaccaagctgtacgacatcctgggcgtgccccccggcgccagcgagaacgagctgaagaaggcctacagaaagctggccaaggagtaccaccccgacaagaaccccaacgccggcgacaagttcaaggagatcagcttcgcctacgaggtgctgagcaaccccgagaagagagagctgtacgacagatacggcgagcagggcctgagagagggcagcggcggcggcggcggcatggacgacatcttcagccacatcttcggcggcggcctgttcggcttcatgggcaaccagagcagaagcagaaacggcagaagaagaggcgaggacatgatgcaccccctgaaggtgagcctggaggacctgtacaacggcaagaccaccaagctgcagctgagcaagaacgtgctgtgcagcgcctgcagcggccagggcggcaagagcggcgccgtgcagaagtgcagcgcctgcagaggcagaggcgtgagaatcatgatcagacagctggcccccggcatggtgcagcagatgcagagcgtgtgcagcgactgcaacggcgagggcgaggtgatcaacgagaaggacagatgcaagaagtgcgagggcaagaaggtgatcaaggaggtgaagatcctggaggtgcacgtggacaagggcatgaagcacggccagagaatcaccttcaccggcgaggccgaccaggcccccggcgtggagcccggcgacatcgtgctgctgctgcaggagaaggagcacgaggtgttccagagagacggcaacgacctgcacatgacctacaagatcggcctggtggaggccctgtgcggcttccagttcaccttcaagcacctggacggcagacagatcgtggtgaagtacccccccggcaaggtgatcgagcccggctgcgtgagagtggtgagaggcgagggcatgccccagtacagaaaccccttcgagaagggcgacctgtacatcaagttcgacgtgcagttccccgagaacaactggatcaaccccgacaagctgagcgagctggaggacctgctgcccagcagacccgaggtgcccaacatcatcggcgagaccgaggaggtggagctgcaggagttcgacagcaccagaggcagcggcggcggccagagaagagaggcctacaacgacagcagcgacgaggagagcagcagccaccacggccccggcgtgcagtgcgcccaccagtag

SEQ ID NO: 160045 - DNA, 3048 bp, Artificial Sequence
  derived and/or modified sequence
gcgctgggtcaaagttcagccccgcccccgcttccccctcgctgtctccctcggcctgtgccgccgccgacgccgcttgtgggcccgactccgctctgtctgcttcgccaccttctccccgagcactgcccggccggccgccatggctaacgtggctgacacgaagctgtacgacatcctgggcgtcccgcccggcgccagcgagaacgagctgaagaaggcatacagaaagttagccaaggaatatcatcctgataagaatccaaatgcaggagacaaatttaaagaaataagttttgcatatgaagtactatcaaatcctgagaagcgtgagttatatgacagatacggagagcaaggtcttcgggaaggcagcggcggaggtggtggcatggatgatattttctctcacatttttggtgggggattgttcggcttcatgggcaatcagagtagaagtcgaaatggcagaagaagaggagaggacatgatgcatccactcaaagtatctttagaagatctgtataatggcaagacaaccaaactacaacttagcaagaatgtgctctgtagtgcatgcagtggccaaggcggaaagtctggagctgtccaaaagtgtagtgcttgtcgaggtcgaggtgtgcgcatcatgatcagacagctggctccagggatggtacaacagatgcagtctgtgtgctctgattgtaatggagaaggagaggtaattaatgaaaaagaccgctgtaaaaaatgtgaagggaagaaggtgattaaagaagtcaagattcttgaagtccacgtagacaaaggcatgaaacatggacagagaattacattcactggggaagcagaccaggccccaggagtggaacccggagacattgttcttttgctacaggagaaagaacatgaggtatttcagagagatgggaatgatttgcacatgacatataaaataggacttgttgaagctctatgtggatttcagttcacatttaagcaccttgatggacgtcagattgtggtgaaatacccccctggcaaagtaattgaaccagggtgtgttcgtgtagttcgaggtgaagggatgccgcagtatcgtaatccctttgaaaaaggtgatctttacataaagtttgatgtgcagtttcctgaaaacaactggatcaacccagacaagctttctgaactagaagatcttctgccatctagaccggaagttcctaacataattggagaaacagaggaggtagagcttcaggaatttgatagcactcgaggctcaggaggtggtcagaggcgtgaagcctataatgatagctctgatgaagaaagcagcagccatcatggacctggagtgcagtgtgcccatcagtaaactctgcaaacaaattgcacaggtggattttctttccacatttgcctgatttgttctcagcaatccagctggagtgtcttatcaatccagatgaactgagggacatctgttggtctatgtataacttttaaaattggtatagtatctacagagtgtataatttaaactaaccacaaagctttacatcttcattttgactgttccatagcagaataaagcacttgaaaggaaacaagactccctttcacacatggattattataagtttcaatcctggtatctgtgcttgatttttatcagttttgtgtagatttttatgtttcatattttaaatttaaatcccacattgtaaagtttgtacaatttgtcctgaagctttgtgtttggctgcacctgcataagctgctacaaatagaataaagaatttcatagcctgtatctatcatttagatgcatggaaaaaaatgggctttgcacacaatgggtttggagctgactgggaacaatggaaaaaattacattagctgtggttgtaaagtttttttgtttttggttttgttttttttttcttttttctttttttttttttttaccatcttgtgaaaggtttctgaaactcgataataaaaagcggttggtgtaaattattcttttgtgtcacatttttagaaggaaaaacataaaagaatgtatccttagtactggttcttaaacagcccataaaaacccattggcctgaagcttatatctcaggcctatgcccatcttatagtcttggaagacaaaaggctggtagagacagtcttcagtggcttcagtgatgctctgtagaggccagggtgtcttgagtgctgtaactcccaagcactgggctagcctgacttctgtatctccctaccaccacccccttaaaaaaataaggtaacagcaaatctatagtaaaaccatgtctgcatagaacgtgttcaaatcctctgttttcattaaatgtaaaagatgctgtctccattaagttgaatatttggaattggagaagccattgattattattttgagtttctgtaatgttttatagaaaagtaagatgcttattcagaatttaagaatgaaggcaactgaaatatgcattgttgtagttatttatatttcaaactaaaaataagcaaaaaaaaaaggctggtttgagaaaaatcaggtaaaattgatgaaacggatgttgtgtttctctttccatcatctggtttttaccatttcactcagtaggtatttttagaacacacttatttgaggaaagagacatcagatgcacaattttacatttataaaggaacaaatggggaaaactgaaaactaaaaattttaaatgtattaaatgccatccctgagcctaaatctagtatttgtagtttatttctaggtctgctagaacctgaaaacctgaatgaaaaaaggtgtgctgacactaatcaagtcctgtgaggtttaaattattgacctatccactctacctccattgtacaaaaaatattttacaacaagcctgggtaagattcaacagcatagtagttttgtatccaaggttacttccccacaaccactttaaacataagaaatgtggtggcaatataaagtttgtagcctttccaataaaggtttataaaacagtt

SEQ ID NO: 160046 - protein, 412 aa, Artificial Sequence
  derived and/or modified sequence
MILASVLRSGPGGGLPLRPLLGPALALRARSTSATDTHHVEMARERSKTVTSFYNQSAIDAAAEKPSVRLTPTMMLYAGRSQDGSHLLKSARYLQQELPVRIAHRIKGFRCLPFIIGCNPTILHVHELYIRAFQKLTDFPPIKDQADEAQYCQLVRQLLDDHKDVVTLLAEGLRESRKHIEDEKLVRYFLDKTLTSRLGIRMLATHHLALHEDKPDFVGIICTRLSPKKIIEKWVDFARRLCEHKYGNAPRVRINGHVAARFPFIPMPLDYILPELLKNAMRATMESHLDTPYNVPDVVITIANNDVDLIIRISDRGGGIAHKDLDRVMDYHFTTAEASTQDPRISPLFGHLDMHSGAQSGPMHGFGFGLPTSRAYAEYLGGSLQLQSLQGIGTDVYLRLRHIDGREESFRI

SEQ ID NO: 160047 - protein, 365 aa, Artificial Sequence
  derived and/or modified sequence
MILASVLRSGPGGGLPLRPLLGPALALRARSTSATDTHHVEMARERSKTVTSFYNQSAIDAAAEKPSVRLTPTMMLYAGRSQDGSHLLKSARYLQQELPVRIAHRIKGFRCLPFIIGCNPTILHVHELYIRAFQKLTDFPPIKDQADEAQYCQLVRQLLDDHKDVVTLLAEGLRESRKHIEDEKLVRYFLDKTLTSRLGIRMLATHHLALHEDKPDFVGIICTRLSPKKIIEKWVDFARRLCEHKYGNAPRVRINGHVAARFPFIPMPLDYILPELLKNAMRATMESHLDTPYNVPDVVITIANNDVDLIIRISDRGGGIAHKDLDRVMDYHFTTAEASTQDPRISPLFGHLDMHSGAQSGPMHG

SEQ ID NO: 160048 - DNA, 1239 bp, Artificial Sequence
  derived and/or modified sequence
atgatcctggccagcgtgctgagaagcggccccggcggcggcctgcccctgagacccctgctgggccccgccctggccctgagagccagaagcaccagcgccaccgacacccaccacgtggagatggccagagagagaagcaagaccgtgaccagcttctacaaccagagcgccatcgacgccgccgccgagaagcccagcgtgagactgacccccaccatgatgctgtacgccggcagaagccaggacggcagccacctgctgaagagcgccagatacctgcagcaggagctgcccgtgagaatcgcccacagaatcaagggcttcagatgcctgcccttcatcatcggctgcaaccccaccatcctgcacgtgcacgagctgtacatcagagccttccagaagctgaccgacttcccccccatcaaggaccaggccgacgaggcccagtactgccagctggtgagacagctgctggacgaccacaaggacgtggtgaccctgctggccgagggcctgagagagagcagaaagcacatcgaggacgagaagctggtgagatacttcctggacaagaccctgaccagcagactgggcatcagaatgctggccacccaccacctggccctgcacgaggacaagcccgacttcgtgggcatcatctgcaccagactgagccccaagaagatcatcgagaagtgggtggacttcgccagaagactgtgcgagcacaagtacggcaacgcccccagagtgagaatcaacggccacgtggccgccagattccccttcatccccatgcccctggactacatcctgcccgagctgctgaagaacgccatgagagccaccatggagagccacctggacaccccctacaacgtgcccgacgtggtgatcaccatcgccaacaacgacgtggacctgatcatcagaatcagcgacagaggcggcggcatcgcccacaaggacctggacagagtgatggactaccacttcaccaccgccgaggccagcacccaggaccccagaatcagccccctgttcggccacctggacatgcacagcggcgcccagagcggccccatgcacggcttcggcttcggcctgcccaccagcagagcctacgccgagtacctgggcggcagcctgcagctgcagagcctgcagggcatcggcaccgacgtgtacctgagactgagacacatcgacggcagagaggagagcttcagaatctag

SEQ ID NO: 160049 - DNA, 1239 bp, Artificial Sequence
  derived and/or modified sequence
atgatactggcctcagtgctgcggagcgggcccggaggggggttgcctctgagaccgctcctaggacctgcccttgccctgagagccaggtcaacgtctgctacagatacgcaccacgtcgagatggcccgggagcgctccaaaaccgttaccagcttttataaccagagcgctattgatgccgccgctgaaaaaccatccgtccgcctgactcccacgatgatgttgtatgcaggcaggagccaggatggaagccacctgcttaaaagcgcacggtacctgcagcaggaactccccgttaggatcgcccatcgaattaagggatttcggtgcctgcccttcataattgggtgcaaccccactatactccatgttcatgagctgtacataagagccttccaaaagcttacagatttcccgcctattaaggatcaggccgacgaggcgcagtactgtcagctggtacggcaactcctcgacgaccacaaggatgtggtgactctgcttgcggaaggccttcgcgagtcacgtaagcatattgaggatgagaagttggtgagatatttcctcgacaaaactctgacaagtaggctcggcattcgaatgctggcgacacaccatttagcactgcacgaagacaaacccgactttgtcggtattatttgtacacgcctaagtcccaagaaaattatcgagaagtgggtcgattttgcccgtagattgtgtgagcacaagtatggtaacgctcctagggttcgaataaacggacacgtggccgcccgcttcccattcatcccgatgcctcttgattacatccttcccgaattactgaagaatgcaatgagggccacgatggaatcccacctcgacacaccatacaacgtgccagacgtggttattaccatagctaataacgacgtggatctaattatccgcatttccgaccgcggaggcggcatagcccataaggacttggatagagtaatggattatcactttaccacggcggaggcatctacgcaggacccaaggatttctcccctctttggacatctagacatgcatagcggggctcaatcgggccccatgcacggtttcggattcggcttgccaacaagtcgcgcatacgcagagtacttgggaggctctttgcagctacagagcctgcagggtatcgggacagacgtgtatctgagactccggcatattgacgggcgtgaggaaagcttcagaatttag

SEQ ID NO: 160050 - DNA, 1239 bp, Artificial Sequence
  derived and/or modified sequence
atgatcctggcctctgtgctgcggagcggccctgggggcggcctgcccctgcggcccctgctgggccctgccctggccctgcgggcccggagcaccagcgccacagacacccaccacgtggagatggcccgggagaggagcaagacagtgaccagcttctacaaccagagcgccattgatgctgctgctgagaagcccagcgtgcggctgacccccaccatgatgctgtatgccggccgcagccaggacggcagccacctgctgaagagcgcccgctacctgcagcaggagctgcctgtgcgcatcgcccaccgcatcaagggcttccgctgcctgcccttcatcatcggctgcaaccccaccatcctgcacgtgcatgagctgtacatccgggccttccagaagctgacagacttcccccccatcaaggaccaggctgatgaggcccagtactgccagctggtgcggcagctgctggatgaccacaaggatgtggtgaccctgctggccgagggcctgcgggagagcaggaagcacattgaagatgagaagctggtgcgctacttcctggacaagaccctgaccagccggctgggcatccgcatgctggccacccaccacctggccctgcacgaggacaagccagactttgtgggcatcatctgcacccggctgagccccaagaagatcatcgagaagtgggtggactttgcccggcggctgtgtgagcacaagtatggaaatgccccccgggtgcgcatcaatggacatgtggccgcccgcttccccttcatccccatgcccctggactacatcctgcctgagctgctgaagaatgccatgagggccaccatggagagccacctggacaccccctacaacgtgcctgatgtggtgatcaccatcgccaacaatgatgtggacctgatcatccgcatcagtgacagaggaggcggcatcgcccacaaggacctggacagagtgatggactaccacttcaccacagctgaggccagcacccaggacccccgcatcagccccctgtttggccacctggacatgcacagcggggcccagagcggccccatgcacggcttcggcttcggcctgcccaccagccgggcctatgcagagtacctgggcggcagcctgcagctgcagagcctgcagggcatcggcacagatgtgtacctgcggctgcggcacattgatggccgggaggagagcttccgcatctag

SEQ ID NO: 160051 - DNA, 1239 bp, Artificial Sequence
  derived and/or modified sequence
atgatcctggccagcgtgctgcggagcggccccggcggcggcctgccactccgccctctgttaggcccagcgcttgccctccgggctaggagcacatccgctactgatacccaccacgttgagatggccagggagcggtccaaaaccgttacttctttctacaatcagtcagccatcgatgctgccgcagaaaagccctctgtaagactgactcctaccatgatgctgtacgcagggaggtcccaggatggaagtcacctgctcaagtctgcgagatatctgcagcaggagctgcccgtccgaatcgcccaccggataaagggcttccgctgcttaccttttataattggctgtaatcctacgatactccatgtgcatgagctatacataagggcattccagaaactcacagacttccccccaataaaggaccaggctgacgaggctcaatattgtcagctggtgcgacagctccttgatgaccacaaggacgtcgttaccctgctggctgaggggctgcgtgaatcccggaagcacattgaggatgaaaagttagtacggtactttttagacaagacccttacctccagactcgggatcaggatgttggccacccatcacctggccctgcacgaggacaagcccgattttgtcggaatcatctgcacccggctatcccccaagaagatcatagaaaaatgggtggacttcgcacggcgactctgcgagcacaaatacgggaacgccccgcgtgtgagaatcaacggacatgtcgcagcccgcttcccatttatcccaatgcctcttgattacatccttccagaactcttgaaaaatgccatgcgcgctaccatggaatcacacctggacacaccttataacgtgcctgacgtcgtgattactattgcaaacaatgatgtcgatttgatcatccgtatatcagaccgggggggcggcatcgcccataaagatctcgatcgcgtgatggattatcatttcaccaccgccgaagcaagcacacaggatccgcgtatcagcccactcttcgggcaccttgacatgcacagcggtgctcagtccggccctatgcacggatttggtttcggccttcccacaagccgagcctacgccgaatatctgggagggagtctccagttacaatcgctgcaagggattgggaccgacgtttatctgcggcttaggcatattgatggtcgagaggaatcctttaggatatag

SEQ ID NO: 160052 - DNA, 1239 bp, Artificial Sequence
  derived and/or modified sequence
atgatcctggccagcgttctccggagcgggcctggagggggactcccattgcgccctctcctcggccctgccttagccctcagggccaggtctacctccgcgacagatactcaccacgtggagatggccagggagcgtagcaagactgtaacctccttctacaaccagagcgcaattgatgctgcggctgaaaagccatccgtgagattaacacctacaatgatgctgtatgctggccgaagccaggatgggagtcatttgctgaagtccgcgaggtacctgcagcaggagttgcccgtgagaatagcgcacagaatcaagggtttccgatgtctgccgttcatcatcggatgtaaccctacaatcctgcatgttcatgaattgtacatcagggcattccagaaacttaccgatttcccccctatcaaggaccaagctgacgaggcacagtattgccagctcgtgcgacaactcttagacgatcataaggatgtggttacactgctagcggagggcttgagagagagcagaaagcacatcgaggacgagaagctcgttcgctactttctcgacaaaacattgacgtcgaggctgggaattagaatgttggccactcatcatctggctcttcacgaggacaaaccggatttcgtcggcataatttgtacacgactctctcccaagaagattattgagaaatgggtagatttcgccagaagactctgcgagcacaagtacgggaacgctccacgagttcgcattaatggacacgtagctgcaagattcccgtttatcccaatgccgctggactacattctgcctgagctgctcaagaatgccatgcgtgcaaccatggaatcccacctggacactccatacaatgttccagatgttgtgattacaatagcgaataacgatgtggatctcattatcaggataagcgaccgaggaggcggaatcgcccacaaggatttagaccgggttatggactaccattttactacggcagaggcgagtacacaggatccccgtatctcccccctgttcggtcacttggatatgcactccggagctcagagcggaccgatgcacggcttcgggtttggacttcctacttcccgggcttatgctgagtacctgggtggtagtctgcagttgcagtccttacaaggcattggaacagatgtgtacttaagattgcgacatatcgatgggagggaggagagcttccggatctag

SEQ ID NO: 160053 - DNA, 1904 bp, Artificial Sequence
  derived and/or modified sequence
ggcgtggcctggatgcgcgggcgcccgggacggcacgtcctcagaccaaactacaactcccaggacccagcgggcgctgccgcccacgcgacgtcacggcggcggagggcgcaggcggctgggcgcctggcgagtggactgttcgagcccttccgctgggacccgggccctggctccggccccgcgatgggagctgctctccgcgggctgagcctgtcagcatcctcgacgcaccctggtccctgaagtcggagaagagcccctacccacccacacccccttgccccattttgggtcgcctgggtcctcagtcctagcggatcctcagtcctagcggccaccgggtctgaaaggagcaagacgatgatcctggcgtcggtgctgaggagcggtcccgggggcgggcttccgctccggcccctcctgggacccgcactcgcgctccgggcccgctcgacgtcggccaccgacacacaccacgtggagatggctcgggagcgctccaagaccgtcacctccttttacaaccagtcggccatcgacgcggcagcggagaagccctcagtccgcctaacgcccaccatgatgctctacgctggccgctctcaggacggcagccaccttctgaaaagtgctcggtacctgcagcaagaacttccagtgaggattgctcaccgcatcaagggcttccgctgccttcctttcatcattggctgcaaccccaccatactgcacgtgcatgagctatatatccgtgccttccagaagctgacagacttccctccgatcaaggaccaggcggacgaggcccagtactgccagctggtgcgacagctgctggatgaccacaaggatgtggtgaccctcttggcagagggcctacgtgagagccggaagcacatagaggatgaaaagctcgtccgctacttcttggacaagacgctgacttcgaggcttggaatccgcatgttggccacgcatcacctggcgctgcatgaggacaagcctgactttgtcggcatcatctgtactcgtctctcaccaaagaagattattgagaagtgggtggactttgccagacgcctgtgtgagcacaagtatggcaatgcgccccgtgtccgcatcaatggccatgtggctgcccggttccccttcatccctatgccactggactacatcctgccggagctgctcaagaatgccatgagagccacaatggagagtcacctagacactccctacaatgtcccagatgtggtcatcaccatcgccaacaatgatgtcgatctgatcatcaggatctcagaccgtggtggaggaatcgctcacaaagatctggaccgggtcatggactaccacttcactactgctgaggccagcacacaggacccccggatcagccccctctttggccatctggacatgcatagtggcgcccagtcaggacccatgcacggctttggcttcgggttgcccacgtcacgggcctacgcggagtacctcggtgggtctctgcagctgcagtccctgcagggcattggcacggacgtctacctgcggctccgccacatcgatggccgggaggaaagcttccggatctgaccccacagcctttggcctgctcacccgaccagcctgggccgcattccctgcaggacctcccgggtcaggcagggcggccccctgctccacacactgctgcatcttgggtctcagggacccagacagatggacttacatggagctgggcactgccctgcctcaacagggtccattgcctcctcgcctccagaacttggagcagggaagtgggcaccctgaggcctccagcaccagttccgtcattctcgttcctggggaacccccactctgacctgttattaaagttcacattttgaatgccc

SEQ ID NO: 160054 - DNA, 1907 bp, Artificial Sequence
  derived and/or modified sequence
ggcgtggcctggatgcgcgggcgcccgggacggcacgtcctcagaccaaactacaactcccaggacccagcgggcgctgccgcccacgcgacgtcacggcggcggagggcgcaggcggctgggcgcctggcgagtggactgttcgagcccttccgctgggacccgggccctggctccggccccgcgatgggagctgctctccgcgggctgagcctgtcagcatcctcgacgcaccctggtccctgaagtcggagaagagcccctacccacccacacccccttgccccattttgggtcgcctgggtcctcagtcctagcggatcctcagtcctagcggccaccgggtctgaaaggagcaagacgatgatcctggcgtcggtgctgaggagcggtcccgggggcgggcttccgctccggcccctcctgggacccgcactcgcgctccgggcccgctcgacgtcggccaccgacacacaccacgtggagatggctcgggagcgctccaagaccgtcacctccttttacaaccagtcggccatcgacgcggcagcggagaagccctcagtccgcctaacgcccaccatgatgctctacgctggccgctctcaggacggcagccaccttctgaaaagtgctcggtacctgcagcaagaacttccagtgaggattgctcaccgcatcaagggcttccgctgccttcctttcatcattggctgcaaccccaccatactgcacgtgcatgagctatatatccgtgccttccagaagctgacagacttccctccgatcaaggaccaggcggacgaggcccagtactgccagctggtgcgacagctgctggatgaccacaaggatgtggtgaccctcttggcagagggcctacgtgagagccggaagcacatagaggatgaaaagctcgtccgctacttcttggacaagacgctgacttcgaggcttggaatccgcatgttggccacgcatcacctggcgctgcatgaggacaagcctgactttgtcggcatcatctgtactcgtctctcaccaaagaagattattgagaagtgggtggactttgccagacgcctgtgtgagcacaagtatggcaatgcgccccgtgtccgcatcaatggccatgtggctgcccggttccccttcatccctatgccactggactacatcctgccggagctgctcaagaatgccatgaggatctcagaccgtggtggaggaatcgctcacaaagatctggaccgggtcatggactaccacttcactactgctgaggccagcacacaggacccccggatcagccccctctttggccatctggacatgcatagtggcgcccagtcaggacccatgcacgggtgagaccctgccaggccaggatggaggggtgggggaccccaggagactcaagcctctgaagcctcctgtcctgtccccctgcccacccccagctttggcttcgggttgcccacgtcacgggcctacgcggagtacctcggtgggtctctgcagctgcagtccctgcagggcattggcacggacgtctacctgcggctccgccacatcgatggccgggaggaaagcttccggatctgaccccacagcctttggcctgctcacccgaccagcctgggccgcattccctgcaggacctcccgggtcaggcagggcggccccctgctccacacactgctgcatcttgggtctcagggacccagacagatggacttacatggagctgggcactgccctgcctcaacagggtccattgcctcctcgcctccagaacttggagcagggaagtgggcaccctgaggcctccagcaccagttccgtcattctcgttcctggggaacccccactctgacctgttattaaagttcacattttgaatgccc

SEQ ID NO: 160055 - DNA, 1997 bp, Artificial Sequence
  derived and/or modified sequence
ggcgtggcctggatgcgcgggcgcccgggacggcacgtcctcagaccaaactacaactcccaggacccagcgggcgctgccgcccacgcgacgtcacggcggcggagggcgcaggcggctgggcgcctggcgagtggactgttcgagcccttccgctgggacccgggccctggctccggccccgcgatgggagctgctctccgcgggctgagcctgtcagcatcctcgacgcaccctggtccctgaagtcggagaagagcccctacccacccacacccccttgccccattttgggtcgcctgggtcctcagtcctagcggatcctcagtcctagcggccaccgggtctgaaaggagcaagacgatgatcctggcgtcggtgctgaggagcggtcccgggggcgggcttccgctccggcccctcctgggacccgcactcgcgctccgggcccgctcgacgtcggccaccgacacacaccacgtggagatggctcgggagcgctccaagaccgtcacctccttttacaaccagtcggccatcgacgcggcagcggagaagccctcagtccgcctaacgcccaccatgatgctctacgctggccgctctcaggacggcagccaccttctgaaaagtgctcggtacctgcagcaagaacttccagtgaggattgctcaccgcatcaagggcttccgctgccttcctttcatcattggctgcaaccccaccatactgcacgtgcatgagctatatatccgtgccttccagaagctgacagacttccctccgatcaaggaccaggcggacgaggcccagtactgccagctggtgcgacagctgctggatgaccacaaggatgtggtgaccctcttggcagagggcctacgtgagagccggaagcacatagaggatgaaaagctcgtccgctacttcttggacaagacgctgacttcgaggcttggaatccgcatgttggccacgcatcacctggcgctgcatgaggacaagcctgactttgtcggcatcatctgtactcgtctctcaccaaagaagattattgagaagtgggtggactttgccagacgcctgtgtgagcacaagtatggcaatgcgccccgtgtccgcatcaatggccatgtggctgcccggttccccttcatccctatgccactggactacatcctgccggagctgctcaagaatgccatgagagccacaatggagagtcacctagacactccctacaatgtcccagatgtggtcatcaccatcgccaacaatgatgtcgatctgatcatcaggatctcagaccgtggtggaggaatcgctcacaaagatctggaccgggtcatggactaccacttcactactgctgaggccagcacacaggacccccggatcagccccctctttggccatctggacatgcatagtggcgcccagtcaggacccatgcacgggtgagaccctgccaggccaggatggaggggtgggggaccccaggagactcaagcctctgaagcctcctgtcctgtccccctgcccacccccagctttggcttcgggttgcccacgtcacgggcctacgcggagtacctcggtgggtctctgcagctgcagtccctgcagggcattggcacggacgtctacctgcggctccgccacatcgatggccgggaggaaagcttccggatctgaccccacagcctttggcctgctcacccgaccagcctgggccgcattccctgcaggacctcccgggtcaggcagggcggccccctgctccacacactgctgcatcttgggtctcagggacccagacagatggacttacatggagctgggcactgccctgcctcaacagggtccattgcctcctcgcctccagaacttggagcagggaagtgggcaccctgaggcctccagcaccagttccgtcattctcgttcctggggaacccccactctgacctgttattaaagttcacattttgaatgccc

SEQ ID NO: 160056 - DNA, 2164 bp, Artificial Sequence
  derived and/or modified sequence
aaagaacgggtgggaatggtgtgggtgggggtcaaagaggaaacccagagatgcagggcgcccctttcccgtggtctgcccccaattgctcaggcaggccagtcacgggcacggaaagatctattcaactcactgcccaatctcctctcctggtgcagaaaagacacccagtcagcgacttgcattatctgcaggcatgagtgaataataataatgcctaacccttatatagtgctaattccacgcctggcactgttctaggcactcatataaattcatgtaatccacacaaccccaaaactgatgatatctcttcatcttaccaagcactgagcagttaaataacttgctccagatattaaggggtcgagctggggtttgaagcctggttacccataaatgaaccaagaactggaaggaggacaagagctccgagaaggagtcagatgggagctgctctccgcgggctgagcctgtcagcatcctcgacgcaccctggtccctgaagtcggagaagagcccctacccacccacacccccttgccccattttgggtcgcctgggtcctcagtcctagcggatcctcagtcctagcggccaccgggtctgaaaggagcaagacgatgatcctggcgtcggtgctgaggagcggtcccgggggcgggcttccgctccggcccctcctgggacccgcactcgcgctccgggcccgctcgacgtcggccaccgacacacaccacgtggagatggctcgggagcgctccaagaccgtcacctccttttacaaccagtcggccatcgacgcggcagcggagaagccctcagtccgcctaacgcccaccatgatgctctacgctggccgctctcaggacggcagccaccttctgaaaagtgctcggtacctgcagcaagaacttccagtgaggattgctcaccgcatcaagggcttccgctgccttcctttcatcattggctgcaaccccaccatactgcacgtgcatgagctatatatccgtgccttccagaagctgacagacttccctccgatcaaggaccaggcggacgaggcccagtactgccagctggtgcgacagctgctggatgaccacaaggatgtggtgaccctcttggcagagggcctacgtgagagccggaagcacatagaggatgaaaagctcgtccgctacttcttggacaagacgctgacttcgaggcttggaatccgcatgttggccacgcatcacctggcgctgcatgaggacaagcctgactttgtcggcatcatctgtactcgtctctcaccaaagaagattattgagaagtgggtggactttgccagacgcctgtgtgagcacaagtatggcaatgcgccccgtgtccgcatcaatggccatgtggctgcccggttccccttcatccctatgccactggactacatcctgccggagctgctcaagaatgccatgagagccacaatggagagtcacctagacactccctacaatgtcccagatgtggtcatcaccatcgccaacaatgatgtcgatctgatcatcaggatctcagaccgtggtggaggaatcgctcacaaagatctggaccgggtcatggactaccacttcactactgctgaggccagcacacaggacccccggatcagccccctctttggccatctggacatgcatagtggcgcccagtcaggacccatgcacggctttggcttcgggttgcccacgtcacgggcctacgcggagtacctcggtgggtctctgcagctgcagtccctgcagggcattggcacggacgtctacctgcggctccgccacatcgatggccgggaggaaagcttccggatctgaccccacagcctttggcctgctcacccgaccagcctgggccgcattccctgcaggacctcccgggtcaggcagggcggccccctgctccacacactgctgcatcttgggtctcagggacccagacagatggacttacatggagctgggcactgccctgcctcaacagggtccattgcctcctcgcctccagaacttggagcagggaagtgggcaccctgaggcctccagcaccagttccgtcattctcgttcctggggaacccccactctgacctgttattaaagttcacattttgaatgccc

SEQ ID NO: 160057 - DNA, 1239 bp, Artificial Sequence
  derived and/or modified sequence
atgattctggccagtgttctgcgcagcggtccaggtggaggccttcccttgcgcccgctgttgggcccggctctagccctcagagctcgaagtacaagcgcgacagacacccaccatgtggagatggctcgagaaaggtctaagactgtgacatctttctataaccagtccgctattgatgcagcagccgaaaagcccagcgtccggctaacccccacgatgatgctgtatgccgggaggtcgcaggatgggtctcacctgctgaagtccgctcgctatttgcagcaagaactgcctgtgcggatcgcccaccggatcaaaggcttccgatgtctcccatttattattggctgcaatccaacgatcttgcacgttcatgagctctacatcagggcttttcagaagcttactgactttcctccgataaaggatcaagccgatgaggcccagtactgccagctggtgagacagctgctcgacgatcacaaggacgtagtgacgcttctggcagagggcctgcgcgagtcaagaaaacatattgaggacgaaaagctggttagatactttttagataagacgttgactagtcgtcttggtatccggatgctggcaacgcaccatctggcgctccatgaagacaaacctgactttgtgggcatcatttgcactcgattgagcccaaagaagataattgagaaatgggtggattttgcccgcagactttgcgaacacaagtatggaaacgccccacgagttcgaataaacggtcacgtggccgctcgattcccctttattccgatgccgcttgactacatcctgcctgagctgcttaaaaacgctatgcgggccacaatggaatcacatctggacacaccatataacgtcccagatgtcgtaattacaattgccaataacgatgtggacttgatcattcgtatctcagaccgcggggggggaattgcccacaaagatctggatagggtcatggattatcattttactaccgcagaagcttcaacacaggacccaaggatcagccctttattcggacatcttgatatgcattccggcgcccagagtggcccaatgcacggattcggtttcggattgcccacctctcgtgcatatgccgaatacttgggtggctccctgcagctccagagtttgcagggaatcgggacagatgtgtacctgaggttaagacacattgacggtcgggaggaatctttccgcatctag

SEQ ID NO: 160058 - DNA, 1239 bp, Artificial Sequence
  derived and/or modified sequence
atgatcctggccagcgtgctgcggagcggccccggcggcggcctgcccctacgcccgcttctcggccccgcattggcactcagggccaggtctacatctgccaccgacactcatcacgttgagatggcccgggaaagaagcaagaccgtcactagcttttataatcagagtgccatcgacgctgcggctgagaagccgtcggtgcgccttacccctacaatgatgctgtacgccgggaggtcacaagatggatctcacttacttaagagtgctaggtacctgcaacaggagcttcccgtgcggatagctcacaggataaaagggtttaggtgcctgccatttatcattggctgtaatcctacaatcctccatgtgcacgaattgtatatcagagcctttcagaaactgactgattttccacctatcaaagaccaagccgacgaagctcaatactgccaattggtgagacagttactggacgaccataaagatgtcgtaaccctgcttgcagaaggactcagagaatccagaaaacatatcgaagatgagaaattggtgcgatatttccttgataagactctgacctctaggctggggattagaatgctagccacccatcatttggcattgcacgaagataagccggactttgttggtatcatctgtacccgtctgtcccccaaaaaaataatagagaagtgggttgatttcgccaggcggctttgcgagcacaaatacggtaacgcaccaagagtacgcataaacgggcacgtcgccgccaggtttcccttcattcccatgccactcgattacatattgcccgaactgctcaagaacgccatgagagcaacgatggaatctcacctggacactccatataatgtgccagacgttgttatcactatcgccaataacgacgtcgaccttatcatccggatctcggaccggggcggaggcattgcacataaggatttggatagggtcatggattatcacttcaccacagcggaggcctccacgcaggacccgcggatctcccccctgtttggccacctggatatgcattcaggagcccaatcagggccaatgcatgggtttggcttcggactgccgacaagtagggcctacgccgaatacctgggaggttccctccaactacagtctcttcagggaattggcaccgatgtctatttgaggctacgccacattgacggacgcgaagaaagcttccgaatttag

SEQ ID NO: 160059 - DNA, 1239 bp, Artificial Sequence
  derived and/or modified sequence
atgatcctggcctccgtcctgcgtagcgggcctggtggcggactgccactgcgcccacttctgggcccagctttggcactgagggctcgctccacatcggcaaccgacactcatcacgtggaaatggcccgagagcgctctaagacggtcacaagtttttataaccagtcggccattgatgccgcagccgagaagccttccgtgcgccttaccccgaccatgatgctgtatgcgggaaggtcacaggatggctcccacctgctgaaatctgctaggtacctgcagcaggagttaccagtccggattgctcataggatcaaggggttcaggtgcctgcccttcattataggctgtaatccaaccatactgcacgtccacgagctttacatcagagcctttcagaaattgactgacttccccccaattaaggaccaggccgacgaagctcagtattgccagttagtgagacagctcctggatgaccacaaagatgtcgtcaccctactcgccgagggactcagggagagccgcaagcacatcgaggacgaaaagctcgtgcgctactttctcgataagactctgacgagtagactggggatcagaatgttggcaacccaccacctcgctttgcacgaagataaacccgacttcgtgggaataatatgcacccgcttgtctccaaaaaagatcattgagaaatgggttgatttcgcacgcagattatgtgagcacaagtatgggaacgctcctcgcgtccggatcaatggacacgtggccgcacgtttcccatttatccctatgccattggactatattcttcctgagctgctgaagaatgccatgagggccactatggagtctcacctagacactccttataatgtgcccgatgtggtaatcactatagccaataatgacgtcgatttgatcatccggatctcagaccgcggtgggggaattgctcacaaggatctggatcgggttatggactatcacttcactacagctgaagcaagcacccaggatcccagaatcagccccctctttggccacttagatatgcacagcggcgctcagagcggcccaatgcacggatttggcttcggcctgccgacctcaagagcatacgccgaatacctgggcggtagcctacagctgcagtccttgcagggtattggaaccgacgtgtatcttcggctgaggcacatcgacggtagagaggaatcttttaggatctag

SEQ ID NO: 160060 - protein, 355 aa, Artificial Sequence
  derived and/or modified sequence
MAVQESAAQLSMTLKVQEYPTLKVPYETLNKRFRAAQKNIDRETSHVTMVVAELEKTLSGCPAVDSVVSLLDGVVEKLSVLKRKAVESIQAEDESAKLCKRRIEHLKEHSSDQPAAASVWKRKRMDRMMVEHLLRCGYYNTAVKLARQSGIESCLEFSLRIQEFIELIRQNKRLDAVRHARKHFSQAEGSQLDEVRQAMGMLAFPPDTHISPYKDLLDPARWRMLIQQFRYDNYRLHQLGNNSVFTLTLQAGLSAIKTPQCYKEDGSSKSPDCPVCSRSLNKLAQPLPMAHCANSRLVCKISGDVMNENNPPMMLPNGYVYGYNSLLSIRQDDKVVCPRTKEVFHFSQAEKVYIM

SEQ ID NO: 160061 - DNA, 1068 bp, Artificial Sequence
  derived and/or modified sequence
atggcagtgcaggaatctgccgcacaactctcaatgacactgaaagtccaggagtaccctacgttaaaggtaccctacgaaactctcaacaagcgctttagggcagcccagaagaacatagaccgtgagacctcgcacgtgacaatggtagtggccgaactcgagaagacgttgagcgggtgcccagcagtcgactcagtcgtctctctccttgacggcgtggtggaaaagctgtcagtactgaagcgtaaggccgttgagtccatccaagcagaagacgagagcgcgaagttgtgtaagcgccggatcgaacatttgaaagagcactcttccgaccagccagccgcggcatctgtttggaaacggaagagaatggacagaatgatggtggagcacttgttacgatgtggatactataacaccgccgtgaaactcgctcgtcagtcaggcatcgagagttgcctggagtttagcctgcgcatccaggagttcatcgaactcatacgccagaacaaacggttggacgcagttagacatgctaggaagcatttttcccaggcagaaggaagccagctggacgaagttcgccaggcaatgggcatgctagcttttcctcctgatacccacatctctccttataaagaccttttggacccagctaggtggcgtatgctgatccaacagtttagatatgacaattaccgcctccaccagctaggcaataattctgtgtttaccctcactctgcaggccggtctttctgcgatcaagacaccccaatgctacaaggaggacggatcttctaaatcacccgattgccctgtctgctcccggtccctgaacaaattagcgcagcctttgccaatggctcactgtgccaattcacgccttgtctgcaagatctcgggcgatgttatgaacgaaaataacccaccaatgatgctccctaacggatacgtgtatggttacaactcactgttgtctatcaggcaggatgacaaggtcgtgtgcccaagaacaaaggaggtgtttcacttcagtcaggcggagaaggtgtatattatgtag

SEQ ID NO: 160062 - DNA, 1068 bp, Artificial Sequence
  derived and/or modified sequence
atggctgtgcaggagagcgctgcccagctgtccatgaccctgaaggtgcaggagtaccccaccctgaaggtgccctatgagaccctgaacaagcgcttccgggccgcccagaagaacatcgaccgggagaccagccacgtgaccatggtggtggccgagctggagaagaccctgagcggctgcccagctgtggacagcgtggtgtccctgctggatggagtggtggagaagctgtctgtgctgaagaggaaggctgtggagagcatccaggccgaggatgaaagtgccaagctgtgcaagagaagaattgagcacctgaaggagcacagcagtgaccagcctgctgctgcctctgtgtggaagaggaagaggatggacaggatgatggtggagcacctgctgcgctgtggctactacaacacagctgtgaagctggcccggcagagcggcatcgagagctgcctggagttcagcctgcgcatccaggagttcatcgagctgatccggcagaacaagaggctggatgctgtgagacatgccaggaagcacttcagccaggccgagggcagccagctggatgaggtgcggcaggccatgggcatgctggccttccccccagacacccacatcagcccctacaaggacctgctggaccctgcccgctggaggatgctgatccagcagttccgctatgacaactaccgcctgcaccagctgggcaacaacagcgtcttcaccctgaccctgcaggccggcctgagcgccatcaagaccccccagtgctacaaggaggatggcagcagcaagagcccagactgccctgtgtgcagccgcagcctgaacaagctggcccagcccctgcccatggcccactgtgccaacagccggctggtgtgcaagatctctggagatgtgatgaatgaaaacaacccccccatgatgctgcccaacggctacgtgtatggctacaacagcctgctgagcatccggcaggatgacaaggtggtgtgccccaggaccaaggaggtgttccacttcagccaggccgagaaggtgtacatcatgtag

SEQ ID NO: 160063 - DNA, 2058 bp, Artificial Sequence
  derived and/or modified sequence
gctaatgttttggccgcttcaagatggcggtgcaggagtcggcggctcagttgtccatgaccctgaaggtccaggagtacccgaccctcaaggtgccctacgagacgctgaacaaacgctttcgcgccgctcagaagaacattgaccgggagaccagccacgtcaccatggtggtggccgagctggagaagacgttgagcggctgccccgccgtggactccgtggtcagcctgctggacggcgtggtggagaagctcagcgtcctcaagaggaaggcggtggaatccatccaggccgaggacgagagcgccaagctgtgcaagcgccggatcgagcacctcaaagagcatagcagcgaccagcccgcggcggccagcgtgtggaagaggaagcgcatggatcgcatgatggtggagcacctgctgcgttgcggctactacaacacggctgtcaagctggcgcgccagagcggcatcgagagctgcctggagttcagcctcagaatccaggagttcattgaactcatccggcagaataagagactggacgctgtgagacatgcaagaaagcacttcagccaagcagaagggagccagctggacgaggtgcgccaggccatgggcatgctggccttcccgcccgacacgcacatctccccgtacaaggaccttctggaccctgcacggtggcggatgctgatccagcagttccggtacgacaactaccgactacaccagctgggaaacaattctgtgttcaccctcaccctgcaggctggcctctcagccatcaagacaccacagtgctacaaggaggacggcagctccaagagccctgactgccctgtgtgcagccgctccctgaacaagctggcgcagcccctgcccatggcccactgtgccaactcccgcctggtctgcaagatttctggcgacgtgatgaacgagaacaatccgcccatgatgctgcccaacggctacgtctacggctacaattctctgctttctatccgtcaagatgataaagtcgtgtgcccgagaaccaaagaagtcttccacttctcacaagccgagaaggtgtacatcatgtaggccccacgtcgtgaagcgcacgcctcggggacgggctgcagtgggcggggaggccacgccttcctcctgtcccacgctccagcctgccgcggcgtttctgtttcttgcgaccaaagatccgtgagcaacgataaatactcttaggaagagagaaaataaggtttcataagtttgtacttgaaaacatttggattggtaggattttgtaacacgtcaaccatttgatgcttctgaaaagtactttcaacttgcgaaggaaactcttctttaaagactgacctaaacaccgagggaaacttaagaacgtttaaaatataggagtccgtgatttccctgtgttttcagtttctttccttctgtgaacgatgagacttggagaacgggctggtccttcaccacttcctgttggccctggcctggccggggaaggtggcagcggcaccggactgacctgcagtgacccgcgatgccgcgccacgagggacacttatggcttcattcgagagctgctgccaaaacgcctggcgccgccaccgtcgggggctggcttcgaggacgcccgcctgcctcgcgggtcgtgtccgcgggactgtgttcgtacgtgcatagtttcgatatcacatcgcggggctgtgttcgtagctgcgtcgtttcgatatcacaccctctgtgtgccgccttacttcctgcttcgagaatgtataacgtggaaatccacgggaccaaatttctgcagaggccttgccggatggttccataactgtagagtctaattgctatccattacagaaattaatcgttcagttgaaagaagtactgatgacttttcaaaacaaatgaaccaccgtagctgacagagaaccgtatcgtagaggtttgtagttagtgcttatttttgcatgttgatgttgactagctaataaactgtaaatgtaaaccatgcgaataaaatggttttctatttctc

SEQ ID NO: 160064 - DNA, 1068 bp, Artificial Sequence
  derived and/or modified sequence
atggccgtgcaggagagcgccgcccagctgagcatgaccctgaaggtgcaggagtatcctaccctgaaggttccctacgagaccctgaataaacgcttcagagccgcccaaaagaatattgatagagaaacctcccacgtgactatggtggtcgccgaactcgagaagacactgtcaggctgccctgccgtggactcagtcgtttcattactcgatggcgtggtggaaaaactttcagtcctgaagagaaaagccgtcgaatccatccaggctgaggacgagagcgctaagctgtgcaagcgacggatagaacacttgaaggaacactcaagcgatcagccagccgcggcctccgtctggaaaaggaagcgcatggaccgtatgatggtggagcatctgctcagatgcggatactataacacagcagttaagctggccagacagagtggcatcgagagttgtctggaattctccctgaggatccaagagttcatcgaacttattagacagaacaagagactggatgccgttcggcacgcgcgtaaacacttctcccaggctgaaggcagccagctggatgaagtgcgccaggctatggggatgctggctttcccacccgacactcacatttcaccctacaaggatctcctggacccagctcgatggcggatgctgatccagcagtttcgctacgacaactatcgtctgcatcagttaggtaataactccgtctttacccttactctgcaagccgggctgtcagccataaaaacaccgcagtgctataaagaagacggttcttctaagagccccgattgccccgtgtgcagcaggtctttaaataagctagcacaaccacttcccatggctcactgcgctaacagtaggctagtgtgtaaaatttccggggatgttatgaacgaaaataatccaccaatgatgttacccaacggttacgtctatggatataacagcttgttgagcatccgtcaagacgataaagtcgtgtgtccacgcactaaggaggtgttccacttcagccaagccgagaaggtctacataatgtag

SEQ ID NO: 160065 - DNA, 1068 bp, Artificial Sequence
  derived and/or modified sequence
atggccgtccaagagtccgccgcacagctgagcatgacccttaaggtgcaggaatacccaaccctgaaggtcccatacgagacactcaacaagcgcttccgggcagctcagaaaaacatcgatcgcgaaacctcgcacgtgacaatggtagtggccgaactcgagaaaacattgtctggttgtcccgctgtggactcagtcgtgtcactgctggacggagtcgtcgagaaactctccgttctgaagaggaaggcagtggagagtatccaagcggaagacgaaagcgccaagttgtgtaagagacgcattgagcacttgaaagagcactccagcgaccaaccagctgccgcttccgtctggaaacgcaagagaatggataggatgatggtggaacacctcctgcgttgtggttactataacacagcggtaaaactcgctagacagtctggaatcgaaagttgccttgagtttagcttaagaattcaggagtttatagaactgatccgtcagaacaagaggctggacgccgttagacatgccaggaaacacttttctcaagctgagggtagtcagctcgacgaggtacgccaggctatggggatgctggcgtttccacccgacactcatattagcccttacaaggatcttctggatcccgctcggtggcgtatgctgattcagcagtttaggtatgacaattaccgcctgcaccagctgggcaacaattcagtgtttacgttgacactgcaggctgggctctccgccattaagacgccccagtgctacaaagaggacggctcttccaaaagcccagactgccctgtctgtagcagatcactcaataaattggcacagcccctgcccatggcccactgcgccaacagccggctcgtgtgcaagatttccggagacgtcatgaacgagaacaacccccctatgatgctccctaacggctacgtgtacggctataatagcttgctgagtatacgtcaagatgacaaggtggtgtgtccacgcacgaaagaggttttccatttttcccaagctgagaaagtgtacataatgtag

SEQ ID NO: 160066 - DNA, 1068 bp, Artificial Sequence
  derived and/or modified sequence
atggccgtgcaggagagcgccgcccagctgagcatgaccctgaaggtgcaggagtaccccaccctgaaggtgccctacgagaccctgaacaagagattcagagccgcccagaagaacatcgacagagagaccagccacgtgaccatggtggtggccgagctggagaagaccctgagcggctgccccgccgtggacagcgtggtgagcctgctggacggcgtggtggagaagctgagcgtgctgaagagaaaggccgtggagagcatccaggccgaggacgagagcgccaagctgtgcaagagaagaatcgagcacctgaaggagcacagcagcgaccagcccgccgccgccagcgtgtggaagagaaagagaatggacagaatgatggtggagcacctgctgagatgcggctactacaacaccgccgtgaagctggccagacagagcggcatcgagagctgcctggagttcagcctgagaatccaggagttcatcgagctgatcagacagaacaagagactggacgccgtgagacacgccagaaagcacttcagccaggccgagggcagccagctggacgaggtgagacaggccatgggcatgctggccttcccccccgacacccacatcagcccctacaaggacctgctggaccccgccagatggagaatgctgatccagcagttcagatacgacaactacagactgcaccagctgggcaacaacagcgtgttcaccctgaccctgcaggccggcctgagcgccatcaagaccccccagtgctacaaggaggacggcagcagcaagagccccgactgccccgtgtgcagcagaagcctgaacaagctggcccagcccctgcccatggcccactgcgccaacagcagactggtgtgcaagatcagcggcgacgtgatgaacgagaacaacccccccatgatgctgcccaacggctacgtgtacggctacaacagcctgctgagcatcagacaggacgacaaggtggtgtgccccagaaccaaggaggtgttccacttcagccaggccgagaaggtgtacatcatgtag

SEQ ID NO: 160067 - protein, 910 aa, Artificial Sequence
  derived and/or modified sequence
MDTAEEDICRVCRSEGTPEKPLYHPCVCTGSIKFIHQECLVQWLKHSRKEYCELCKHRFAFTPIYSPDMPSRLPIQDIFAGLVTSIGTAIRYWFHYTLVAFAWLGVVPLTACRIYKCLFTGSVSSLLTLPLDMLSTENLLADCLQGCFVVTCTLCAFISLVWLREQIVHGGAPIWLEHAAPPFNAAGHHQNEAPAGGNGAENVAADQPANPPAENAVVGENPDAQDDQAEEEEEDNEEEDDAGVEDAADANNGAQDDMNWNALEWDRAAEELTWERMLGLDGSLVFLEHVFWVVSLNTLFILVFAFCPYHIGHFSLVGLGFEEHVQASHFEGLITTIVGYILLAITLIICHGLATLVKFHRSRRLLGVCYIVVKVSLLVVVEIGVFPLICGWWLDICSLEMFDATLKDRELSFQSAPGTTMFLHWLVGMVYVFYFASFILLLREVLRPGVLWFLRNLNDPDFNPVQEMIHLPIYRHLRRFILSVIVFGSIVLLMLWLPIRIIKSVLPNFLPYNVMLYSDAPVSELSLELLLLQVVLPALLEQGHTRQWLKGLVRAWTVTAGYLLDLHSYLLGDQEENENSANQQVNNNQHARNNNAIPVVGEGLHAAHQAILQQGGPVGFQPYRRPLNFPLRIFLLIVFMCITLLIASLICLTLPVFAGRWLMSFWTGTAKIHELYTAACGLYVCWLTIRAVTVMVAWMPQGRRVIFQKVKEWSLMIMKTLIVAVLLAGVVPLLLGLLFELVIVAPLRVPLDQTPLFYPWQDWALGVLHAKIIAAITLMGPQWWLKTVIEQVYANGIRNIDLHYIVRKLAAPVISVLLLSLCVPYVIASGVVPLLGVTAEMQNLVHRRIYPFLLMVVVLMAILSFQVRQFKRLYEHIKNDKYLVGQRLVNYERKSGKQGSSPPPPQSSQE

SEQ ID NO: 160068 - DNA, 2733 bp, Artificial Sequence
  derived and/or modified sequence
atggacaccgcagaggaggatatatgcagggtgtgtcggtcagagggaacacccgagaaacccctctaccacccttgcgtgtgtacaggaagtattaaatttatacaccaggagtgcctggtgcagtggctgaaacatagccgcaaggaatattgcgagttgtgtaagcaccgctttgcattcacacccatatatagccctgatatgccatcccgtctgcctattcaggatatttttgcaggcctggttacatccatcggcacggcaatacgatattggttccattacaccttagtggctttcgcttggctgggtgttgtccctctcaccgcctgccggatatacaagtgcctgttcacaggctcggtgtcctctctccttaccctcccacttgatatgctgtctaccgagaaccttctcgcagattgtctgcaaggttgttttgtagtgacatgcaccctctgcgcgttcatcagcctggtttggctccgggaacaaatcgtgcatggcggcgctccaatctggctggaacacgctgctccaccctttaacgctgccggccaccaccagaatgaagcccccgcgggaggcaatggtgccgaaaatgtagctgctgaccagcctgcaaacccccctgccgagaacgccgttgtcggagagaatcctgacgctcaggacgaccaggccgaagaagaggaggaggacaacgaggaggaggacgacgcgggcgtggaggatgcggcagacgcaaataacggggctcaggatgatatgaactggaatgccctagagtgggatcgcgctgcggaagaacttacctgggaacgcatgcttggtctagatgggtctttggtgttcctggaacatgtgttttgggtcgtgtcattgaacactctgtttattctggtgtttgccttttgtccttaccatatcggtcacttttccctcgtgggcctcggattcgaggagcacgtgcaggcctctcattttgagggcctcataacaacaatcgtggggtatattctcctcgctattactctgatcatatgtcatggcttggccacactcgtgaagttccataggtctaggcggctgctcggcgtttgctatatcgtggtcaaggtgagtctgctcgttgttgttgaaataggtgtgtttcccctcatctgtggatggtggctggatatctgttctttggagatgttcgatgccacacttaaagatagagaactgtcctttcagagcgctcccggcactacaatgttcctgcattggctggtgggcatggtgtacgtcttctactttgcctcatttatcctgctgcttcgcgaggtgctgaggccgggcgtgctttggtttttacgaaacctgaacgacccagacttcaacccggtgcaggagatgatccatctgccaatctatagacaccttaggaggtttatcctgtccgtaatagtgtttggctccatcgtgcttttgatgctttggctgcctattcgaatcatcaagtcagtgcttcccaacttcctcccatataacgtgatgctgtactccgacgccccggtgtccgagttatcattagagctgctcctcctacaggtggtcctgcccgcacttctcgagcaggggcatacacgacaatggctgaagggcctggtgagggcttggactgtgacggctggctatttgctggatctgcacagttacctgctgggggatcaggaagagaacgaaaactcggccaatcagcaggtgaacaacaaccagcacgctcgtaacaacaacgctatccctgtagtgggggagggactccatgctgcccaccaggctattctgcagcagggcggacctgtgggttttcagccatatcgcagacctctgaattttccactcagaatcttcttgctgattgtctttatgtgcatcacattgttaatcgcatcattaatttgcctcaccctccccgtttttgccggcagatggctgatgtctttctggacggggacagcaaagatccacgagttatatacagctgcttgtggattgtatgtatgctggctgacaatccgagctgtaactgtcatggtggcgtggatgcctcaggggcggagagttatcttccagaaagtcaaggaatggtccttgatgatcatgaaaacgctgattgtagccgtgctgctcgccggggttgtgccgctactgctcggtttgctctttgagctcgtgatcgtcgctcctctcagagtgccgctggaccagacaccccttttctacccttggcaagactgggccctgggtgtgctccatgcgaaaattattgccgcaattaccctgatgggaccccaatggtggctgaaaactgtcatagagcaggtgtatgcaaatggcattcgcaacattgacctgcattatatcgtccgcaagttagctgcccccgttatttccgtcttactgctctcgctttgcgttccctatgtgatcgcttctggtgtggtgcccctgcttggcgtgacagctgagatgcaaaatctggtccataggcggatctaccctttccttctgatggtagtggtgctgatggcaattttatccttccaggttcggcagtttaagaggctttatgaacatattaagaacgataaatacttggtgggacagagactggtgaactacgagcgcaaaagcggaaaacagggttcatcgccacctccaccgcagtcatcgcaggagtag

SEQ ID NO: 160069 - DNA, 2733 bp, Artificial Sequence
  derived and/or modified sequence
atggacacagctgaggaggacatctgccgggtgtgccgctctgagggcaccccagagaagcccctgtaccacccctgtgtgtgcaccggcagcatcaagttcatccaccaggagtgcctggtgcagtggctgaagcacagcaggaaggagtactgtgagctgtgcaagcacagatttgccttcacccccatctacagcccagacatgcccagccggctgcccatccaggacatctttgctggcctggtgaccagcatcggcacagccatccgctactggttccactacaccctggtggcctttgcctggctgggcgtggtgcccctgacagcctgccgcatctacaagtgcctcttcaccggctctgtgagcagcctgctgaccctgcccctggacatgctgagcacagagaacctgctggccgactgcctgcagggctgctttgtggtgacctgcaccctgtgtgccttcatcagcctggtgtggctgcgggagcagatcgtgcatggaggagcccccatctggctggagcacgccgccccacccttcaatgctgctggccaccaccagaatgaggccccagctggaggaaatggagcagaaaatgtggccgctgaccagcctgccaaccccccagcagaaaatgctgtggtgggggagaacccagatgcccaggatgaccaggccgaggaggaggaggaggacaatgaggaggaggatgatgctggggtggaggatgctgctgatgccaacaacggggcccaggatgacatgaactggaatgccctggagtgggacagagctgctgaggagctgacctgggagaggatgctgggcctggatggcagcctggtgttcctggagcacgtgttctgggtggtgtccctgaacaccctcttcatcctggtgtttgccttctgcccctaccacatcggccacttcagcctggtgggcctgggctttgaggagcacgtgcaggccagccactttgagggcctcatcaccaccatcgtgggctacatcctgctggccatcaccctcatcatctgccacggcctggccaccctggtgaagttccacaggagccggcggctgctgggcgtgtgctacatcgtggtgaaggtgtccctgctggtggtggtggagattggagtcttccccctcatctgtggctggtggctggacatctgcagcctggagatgtttgatgccaccctgaaggaccgggagctgtccttccagagcgcccctggcaccaccatgttcctgcactggctggtgggcatggtgtatgtgttctactttgccagcttcatcctgctgctgcgggaggtgctgcggcctggggtgctgtggttcctgaggaacctgaatgaccctgacttcaaccctgtgcaggagatgatccacctgcccatctaccgccacctgcggcgcttcatcctgtctgtgattgtgtttggcagcatcgtgctgctgatgctgtggctgcccatccgcatcatcaagtctgtgctgcccaacttcctgccctacaacgtgatgctgtacagtgatgcccctgtgtctgagctgagcctggagctgctgctgctgcaggtggtgctgcctgccctgctggagcagggccacacccggcagtggctgaagggcctggtgcgggcctggacagtgacagctggctacctgctggacctgcacagctacctgctgggggaccaggaggagaatgaaaacagcgccaaccagcaggtgaacaacaaccagcacgccaggaacaacaatgccatccctgtggtgggggagggcctgcacgccgcccaccaggccatcctgcagcagggcggccctgtgggcttccagccctaccgccggcccctgaacttccccctgcgcatcttcctgctgattgtgttcatgtgcatcaccctgctgattgccagcctcatctgcctgaccctgcctgtgtttgctggccgctggctgatgtccttctggacaggaacagccaagatccacgagctgtacacagctgcctgtggcctgtatgtgtgctggctgaccatccgggctgtgacagtgatggtggcctggatgccccagggcagaagagtcatcttccagaaggtgaaggagtggagcctgatgatcatgaagaccctcatcgtggccgtgctgctggccggcgtggtgcccctgctgctgggcctgctgtttgagctggtgattgtggcccccctgcgggtgcccctggaccagacccccctcttctacccctggcaggactgggccctgggcgtgctgcacgccaagatcatcgccgccatcaccctgatgggcccccagtggtggctgaagacagtgattgagcaggtgtatgccaacggcatccggaacatcgacctgcactacatcgtgaggaagctggccgcccctgtgatctctgtgctgctgctgagcctgtgtgtgccctacgtgattgccagcggcgtggtgcccctgctgggcgtgacagctgagatgcagaacctggtgcaccggcgcatctaccccttcctgctgatggtggtggtgctgatggccatcctgtccttccaggtgcggcagttcaagaggctgtatgagcacatcaagaatgacaagtacctggtgggccagaggctggtgaactatgaaaggaagagcggcaagcagggcagcagccccccaccaccccagagcagccaggagtag

SEQ ID NO: 160070 - DNA, 4560 bp, Artificial Sequence
  derived and/or modified sequence
cctctcgcttcctctctcgcacctgagcgtacgcacctgcccgggcccggctccctcctcctctcccctccctctttccccgcccggccgcgggagcctcgtggctgcgtcaccgccgcccccccagacaagatggacaccgcggaggaagacatatgtagagtgtgtcggtcagaaggaacacctgagaaaccgctttatcatccttgtgtatgtactggcagtattaagtttatccatcaagaatgcttagttcaatggctgaaacacagtcgaaaagaatactgtgaattatgcaagcacagatttgcttttacaccaatttattctccagatatgccttcacggcttccaattcaagacatatttgctggactggttacaagtattggcactgcaatacgatattggtttcattatacacttgtggcctttgcatggttgggagttgttcctcttacagcatgccgcatctacaagtgcttgtttactggctccgtgagctcactactgacgctgccattagatatgctgtcaacggaaaatttgttggcagattgtttgcagggttgttttgtggtgacgtgcacactgtgtgcattcatcagcctggtgtggttgagagagcagatagtccatgggggagcaccaatttggttggagcatgctgccccaccgttcaatgctgcggggcatcaccaaaatgaggctccagcaggaggaaatggtgcagaaaatgttgctgctgatcagcctgctaacccaccagctgagaacgcagtggtgggggaaaaccctgatgcccaggatgaccaggcagaagaggaggaggaggacaatgaggaggaagatgacgctggtgtggaggatgcggcagatgctaataacggagcccaggatgacatgaattggaatgctttagaatgggaccgagctgctgaagagcttacatgggaaagaatgctaggacttgatggatcactagtttttctggaacatgtcttctgggtggtatctttaaatacactgttcattcttgtttttgcattttgcccttaccatattggtcatttctcccttgttggtttgggatttgaagaacacgtccaagcatctcattttgaaggcctaatcacaaccatagttgggtatatacttttagcaataacactgataatttgtcatggcttggcaactcttgtgaaatttcatagatctcgtcgcttactgggagtctgctatattgttgttaaggtctctttgttagtggtggtagaaattggagtattccctctcatttgtggttggtggctggatatctgttccttggaaatgtttgatgctactctgaaagatcgagaactgagctttcagtcggctccaggtactaccatgtttctgcattggctagtgggaatggtatatgtcttctactttgcctccttcattctactactgagagaggtacttcgacctggtgtcctgtggtttctaaggaatttgaatgatccagatttcaatccagtacaggaaatgatccatttgccaatatataggcatctccgaagatttattttgtcagtgattgtctttggctccattgtcctcctgatgctttggcttcctatacgtataattaagagtgtgctgcctaattttcttccatacaatgtcatgctctacagtgatgctccagtgagtgaactgtccctcgagctgcttctgcttcaggttgtcttgccagcattactcgaacagggacacacgaggcagtggctgaaggggctggtgcgagcgtggactgtgaccgccggatacttgctggatcttcattcttatttattgggagaccaggaagaaaatgaaaacagtgcaaatcaacaagttaacaataatcagcatgctcgaaataacaacgctattcctgtggtgggagaaggccttcatgcagcccaccaagccatactccagcagggagggcctgttggctttcagccttaccgccgacctttaaattttccactcaggatatttctgttgattgtcttcatgtgtataacattactgattgccagcctcatctgccttactttaccagtatttgctggccgttggttaatgtcgttttggacggggactgccaaaatccatgagctctacacagctgcttgtggtctctatgtttgctggctaaccataagggctgtgacggtgatggtggcatggatgcctcagggacgcagagtgatcttccagaaggttaaagagtggtctctcatgatcatgaagactttgatagttgcggtgctgttggctggagttgtccctctccttctggggctcctgtttgagctggtcattgtggctcccctgagggttcccttggatcagactcctcttttttatccatggcaggactgggcacttggagtcctgcatgccaaaatcattgcagctataacattgatgggtcctcagtggtggttgaaaactgtaattgaacaggtttacgcaaatggcatccggaacattgaccttcactatattgttcgtaaactggcagctcccgtgatctctgtgctgttgctttccctgtgtgtaccttatgtcatagcttctggtgttgttcctttactaggtgttactgcggaaatgcaaaacttagtccatcggcggatttatccatttttactgatggtcgtggtattgatggcaattttgtccttccaagtccgccagtttaagcgcctttatgaacatattaaaaatgacaagtaccttgtgggtcaacgactcgtgaactacgaacggaaatctggcaaacaaggctcatctccaccacctccacagtcatcccaagaataaagtagttgtctcaacaacttgaccttcccctttacatgtccttttttgtggacttctctctttggagatttttcccagtgatctctcagcgttgtttttaagttaaatgtatttgacttgtgttctcagcattcagagagcagcggtgtaagattctgctgttctccctggatcttctgacattactgctgtctgagatttgtatatgtgtaaatacaagttccttgataccctaaaaccttggattaaacagaatgtgcattgtacatctttaaacaaaatgtatattaatttattaaatctagttgtcactttattttggacctgctgtgatctcgacaggaaacgtgccacagagcagtagtgcgcaggcaagacttttcagtgacgccttgtggaacgcagttcatgatgtcctagcagctctcactaagggaactgtacattctttctttcttggctattcagaccttaccaagaacgttaaaggaaacaagtagaaatcagcagtggagtgtctgtggtaagaaaacatgaactttatgcttcactgttagttgtttgtggaagttattttgtataacaccaaagctgttgtacatttcctactgcctgatttttttcatgtgtctgtgtttgtaatattgtatagtatcttgtgctaggtgaggaaattatttttaattttgataatttaatattcctagtgtgatcagcattgggagttgggtttcagtggggcatgtctatacttagagaaaaaaagtccaaatgaagattttcatgagtcagcccccccgcccgcccccaccccacacccacatcctctcttttccacacacaactatctgtttattttttgtagcagtggccgaaagtcctgcaaggtcataaatctttcagagtgacatcaccaactgtactgcatcttactggatttaggacttctgagatgcttgtgaagtatagatgtggttgtggtcttagattgacagcattagagaagactggttagaacatctggtctcgctggttagtgcctcgttggctgaggactaggtgtgcatttctcctagcttttcatcaggaaatcccaaagtttccaaagctttttgtttacagaataaaacttcaaataaaaccaattcattatttgtccagaaggaagcttggctgagctggccttttaacataggaatgtatttcgttggaaacattctgaaaaatctcagagaactgaacccttacaaactttgttttccctcataaccaaagcttcaggttagaagtttagaaaaatagaatggttgggtacatgatctaaatgtttaatgctaaaggtatatcgtaagggtagtgtttgtttttgaacgataatttagaagttctcatagaaagcgtataacataggtcttcagaaactataaaagaattttcatatagtattaaaatccatagactaaaatctgagaattttttaacatatgcaagtcagccaaacataagctaccaaaataaagagcaatgtgttctggctgttttatacttcaacaattttttccctaagtggtaagcaattactttaaaacatatttttaaaaacatcggtatcgggagctgcggtggctccggccggttgtcctggcacacaaggaggcgaggctatgcgttcgaggccaacctaggcaaaattgg

SEQ ID NO: 160071 - DNA, 2733 bp, Artificial Sequence
  derived and/or modified sequence
atggacaccgccgaggaggacatctgccgggtgtgccggagcgaggggacacctgagaagcccctataccacccatgtgtgtgtaccggcagcattaagtttatccaccaggaatgcttagtgcagtggctgaaacatagccgcaaggagtattgtgagctgtgcaagcaccggtttgcattcacacctatctactctcccgacatgcccagccgcctgcctatccaggacatatttgccgggttggtgaccagtatcggaactgctattaggtattggttccactacacgctggtcgccttcgcgtggcttggcgtggtgccgctgacagcatgtcgaatctataaatgcctgtttaccggtagcgtgtctagcctgctcaccctgcccctcgatatgttgagtactgaaaacttgctggcagactgcctccagggatgtttcgtggtgacctgcaccctctgtgccttcatctcactcgtgtggttgcgagagcagattgtccacgggggggcgcccatctggctggagcatgctgctcctccatttaatgccgccgggcatcatcaaaacgaagcccccgctggcggaaatggggcagaaaatgtggcagcagaccagccggccaatccacccgctgaaaacgcggtggtcggagaaaaccccgacgcacaggatgatcaagcagaagaggaagaggaagacaacgaggaggaagatgatgcaggtgttgaggacgcagcagacgcaaacaacggggcccaggatgatatgaattggaacgctttggagtgggatagagccgcagaagaattgacgtgggaacggatgcttgggttggacggctctctcgtgttcctggagcacgtgttctgggtggtttcactaaatacgttgttcatactagtgtttgccttctgcccttatcatatcggacatttcagcctggttggcctggggttcgaggagcacgtccaggcaagccactttgaaggcctgatcaccactatcgtcgggtatattctgctggcaataaccctgataatttgtcacggcctcgctacactggtgaaatttcaccgctcccggagactgctgggcgtgtgctacatagtggtcaaggtaagtttactcgtggtcgttgaaatcggcgtgtttccgcttatatgcggatggtggctcgacatctgtagtctggagatgttcgacgctacactgaaggatcgcgaactgtcatttcaatcagcacccggaacaacaatgttcctgcactggctcgtcggaatggtgtatgtcttctactttgcctctttcattctcctgctgagggaggtgcttcgacccggagtgttatggttcttgaggaatctcaatgaccccgacttcaatccagtgcaggagatgattcatcttccgatatatcggcatctgaggagatttatcctatccgtcattgtattcggatctatcgtcctgctgatgctctggctcccaatacggatcattaagtcggtgctgcccaacttcttaccttacaatgttatgctgtacagtgacgctcccgtgtctgagctctctctcgagttactgctgcttcaggttgtgcttcctgcactcctggagcagggacatactagacagtggctgaaggggcttgtaagggcctggaccgtaacagcgggttatctgctggacctacatagctacttattgggagaccaagaggaaaatgaaaactctgcaaaccagcaggtgaacaacaatcaacatgcccgcaacaacaacgcaatccccgtcgtcggcgagggacttcatgcagctcaccaggccattctgcaacaggggggaccggtgggattccagccttaccgtcggcctctgaatttccccctgagaatattcttattaatcgtgtttatgtgtatcactctgctgatcgcgtcacttatatgtcttaccctcccagtgttcgctggcagatggttgatgagcttttggacaggtacagccaagattcacgagctttatactgccgcatgtggactctatgtttgctggttgaccattagagcagtgacagtgatggtggcgtggatgccccaaggaaggagagtgatattccagaaagtgaaagaatggagtctcatgatcatgaaaactctcattgtggcagtgctgctggccggcgtggttcctctgttactggggctcctctttgaactagtcatcgtggccccattaagagtgccccttgatcagaccccgttgttttatccatggcaggattgggctttaggggtactccatgctaaaatcattgcggccattacacttatgggcccccaatggtggttaaagaccgtcatagagcaggtttacgcaaacggcataaggaatatcgaccttcattacattgtgaggaaactggcagcccctgtgatcagtgtgttgctgctcagcctgtgtgtgccatatgttatagccagcggagtggtaccactcctgggagtgactgcggaaatgcaaaatttggtgcatcggcgcatctacccattcctgttaatggtcgtggttctaatggcgatcttatccttccaggtgcgtcagttcaagcgcctttacgaacacatcaagaacgataaatacttagtgggccagagactagtcaactatgagaggaagagcgggaaacagggatcatctccaccaccaccacaaagctctcaggagtag

SEQ ID NO: 160072 - DNA, 2733 bp, Artificial Sequence
  derived and/or modified sequence
atggataccgccgaagaggacatctgtagggtgtgtcgctccgaaggaactcctgagaagcccctgtatcacccatgcgtgtgtactggctcgatcaagtttatccaccaggaatgcttggtacagtggctgaaacacagccggaaagaatactgtgaactgtgcaagcaccgatttgcatttacacccatttacagccctgacatgccttctagattgccgattcaggatatatttgccggactggtgacttccatcgggacagccataaggtactggttccattatacattggtggcttttgcctggctgggggtggtacccctaaccgcatgccgaatctacaagtgcctgtttactggttctgtttcatcgctgctgacgctgcccctggatatgctcagcacggaaaacctgcttgccgattgcctccaaggatgcttcgttgtcacatgtaccctttgtgcttttatatctctcgtctggttgcgggagcagatagtgcacggcggagcccctatttggctggagcacgctgctccgccatttaacgccgctggccaccaccagaacgaagctcccgcaggaggtaacggggctgagaatgtcgccgcagaccagccagcaaatccgccagcagagaatgcagtcgtgggcgagaatccagacgctcaagacgatcaagcagaggaagaggaggaagataacgaggaggaagacgacgccggagtggaagatgccgcagacgcaaacaacggggctcaggatgacatgaattggaatgcattggagtgggaccgggcagcagaggagctgacttgggagagaatgttaggcttagacggttccctggtgtttctggagcacgtattttgggtagtgagcctcaatactctgttcatcctggtgttcgcgttctgtccataccatataggacatttctctttggtggggttgggctttgaagagcatgtgcaggcctcccatttcgaaggtctgatcacaaccattgtgggttacatcttactggcgatcacgcttatcatctgtcacgggttagctaccctggtaaagtttcacagatccagacggctactgggggtgtgttacatcgtggtgaaggtgagcctgttggtcgtggttgagatcggagtattcccattgatctgcggttggtggttggacatttgcagtctggaaatgttcgatgcaacattgaaggaccgcgagctttcatttcagagcgcgccagggacaactatgttcctccattggctggtcggtatggtctatgtattttatttcgcgtcatttatcctactccttcgggaggtcctcaggcccggagtgttgtggtttctgcgaaacctcaacgatccggacttcaatcccgtacaagagatgattcatttgccaatttaccgccacctgcgcagattcatcttgtcagtgatagtcttcggcagcattgttttgctcatgctgtggctccctattagaatcattaagtctgtgcttccgaacttcctgccatataacgtcatgctgtactctgacgctcccgtgtcagaactctcgctagaattgcttctcctgcaggtcgtgctgccggcattgttggaacagggtcacactagacagtggttgaaaggactggtgcgcgcatggactgtgacggcaggctaccttctggatctccactcttacctcctcggagaccaagaagaaaatgagaattctgccaatcagcaggtgaataataaccagcacgcgagaaataacaatgccattcctgtggtcggagaagggcttcacgccgcacatcaagcaatccttcagcagggcggacccgtagggtttcagccctaccggcgaccactcaatttccccctgaggatcttcctgctgattgtgtttatgtgcatcactttgctcatcgcatccctcatctgcctgaccctgccggtgtttgctggcaggtggctcatgagcttctggacaggcaccgccaagattcatgaattatacactgcggcttgtggtctctacgtgtgctggctcaccatcagggcggtcaccgtcatggttgcgtggatgcctcagggccgacgggtgatcttccagaaggtcaaggaatggtcgctaatgataatgaaaactctgatcgtagccgtgttactggccggagtggtccctctcctcctgggattgctttttgagcttgtgatagttgcaccactccgggtgcccctagaccagacacccctgttctacccatggcaagattgggccctgggcgtcctgcatgcgaaaatcattgcggctatcactttgatgggcccacagtggtggctgaagacggtgatagaacaggtttacgccaacggtattcgtaacatagatttacactacatagtacgaaagctcgccgcaccagttatttctgtcctcctcctcagtctttgtgttccatacgttattgcgtccggcgtcgtgcccctgttgggagtcactgccgaaatgcagaatctggtacatcggaggatttatccttttctccttatggtcgtcgtacttatggctattctgtcatttcaggtcagacagtttaaaagactgtatgaacatatcaagaacgacaagtacctcgtaggtcagagattggttaactacgagcgcaagagcgggaagcaggggagttctcctcctccaccacagagcagtcaagagtag

SEQ ID NO: 160073 - DNA, 2733 bp, Artificial Sequence
  derived and/or modified sequence
atggacaccgccgaggaggacatctgcagagtgtgcagaagcgagggcacccccgagaagcccctgtaccacccctgcgtgtgcaccggcagcatcaagttcatccaccaggagtgcctggtgcagtggctgaagcacagcagaaaggagtactgcgagctgtgcaagcacagattcgccttcacccccatctacagccccgacatgcccagcagactgcccatccaggacatcttcgccggcctggtgaccagcatcggcaccgccatcagatactggttccactacaccctggtggccttcgcctggctgggcgtggtgcccctgaccgcctgcagaatctacaagtgcctgttcaccggcagcgtgagcagcctgctgaccctgcccctggacatgctgagcaccgagaacctgctggccgactgcctgcagggctgcttcgtggtgacctgcaccctgtgcgccttcatcagcctggtgtggctgagagagcagatcgtgcacggcggcgcccccatctggctggagcacgccgccccccccttcaacgccgccggccaccaccagaacgaggcccccgccggcggcaacggcgccgagaacgtggccgccgaccagcccgccaacccccccgccgagaacgccgtggtgggcgagaaccccgacgcccaggacgaccaggccgaggaggaggaggaggacaacgaggaggaggacgacgccggcgtggaggacgccgccgacgccaacaacggcgcccaggacgacatgaactggaacgccctggagtgggacagagccgccgaggagctgacctgggagagaatgctgggcctggacggcagcctggtgttcctggagcacgtgttctgggtggtgagcctgaacaccctgttcatcctggtgttcgccttctgcccctaccacatcggccacttcagcctggtgggcctgggcttcgaggagcacgtgcaggccagccacttcgagggcctgatcaccaccatcgtgggctacatcctgctggccatcaccctgatcatctgccacggcctggccaccctggtgaagttccacagaagcagaagactgctgggcgtgtgctacatcgtggtgaaggtgagcctgctggtggtggtggagatcggcgtgttccccctgatctgcggctggtggctggacatctgcagcctggagatgttcgacgccaccctgaaggacagagagctgagcttccagagcgcccccggcaccaccatgttcctgcactggctggtgggcatggtgtacgtgttctacttcgccagcttcatcctgctgctgagagaggtgctgagacccggcgtgctgtggttcctgagaaacctgaacgaccccgacttcaaccccgtgcaggagatgatccacctgcccatctacagacacctgagaagattcatcctgagcgtgatcgtgttcggcagcatcgtgctgctgatgctgtggctgcccatcagaatcatcaagagcgtgctgcccaacttcctgccctacaacgtgatgctgtacagcgacgcccccgtgagcgagctgagcctggagctgctgctgctgcaggtggtgctgcccgccctgctggagcagggccacaccagacagtggctgaagggcctggtgagagcctggaccgtgaccgccggctacctgctggacctgcacagctacctgctgggcgaccaggaggagaacgagaacagcgccaaccagcaggtgaacaacaaccagcacgccagaaacaacaacgccatccccgtggtgggcgagggcctgcacgccgcccaccaggccatcctgcagcagggcggccccgtgggcttccagccctacagaagacccctgaacttccccctgagaatcttcctgctgatcgtgttcatgtgcatcaccctgctgatcgccagcctgatctgcctgaccctgcccgtgttcgccggcagatggctgatgagcttctggaccggcaccgccaagatccacgagctgtacaccgccgcctgcggcctgtacgtgtgctggctgaccatcagagccgtgaccgtgatggtggcctggatgccccagggcagaagagtgatcttccagaaggtgaaggagtggagcctgatgatcatgaagaccctgatcgtggccgtgctgctggccggcgtggtgcccctgctgctgggcctgctgttcgagctggtgatcgtggcccccctgagagtgcccctggaccagacccccctgttctacccctggcaggactgggccctgggcgtgctgcacgccaagatcatcgccgccatcaccctgatgggcccccagtggtggctgaagaccgtgatcgagcaggtgtacgccaacggcatcagaaacatcgacctgcactacatcgtgagaaagctggccgcccccgtgatcagcgtgctgctgctgagcctgtgcgtgccctacgtgatcgccagcggcgtggtgcccctgctgggcgtgaccgccgagatgcagaacctggtgcacagaagaatctaccccttcctgctgatggtggtggtgctgatggccatcctgagcttccaggtgagacagttcaagagactgtacgagcacatcaagaacgacaagtacctggtgggccagagactggtgaactacgagagaaagagcggcaagcagggcagcagccccccccccccccagagcagccaggagtag

SEQ ID NO: 160074 - protein, 655 aa, Artificial Sequence
  derived and/or modified sequence
MATPVVTKTAWKLQEIVAHASNVSSLVLGKASGRLLATGGDDCRVNLWSINKPNCIMSLTGHTSPVESVRLNTPEELIVAGSQSGSIRVWDLEAAKILRTLMGHKANICSLDFHPYGEFVASGSQDTNIKLWDIRRKGCVFRYRGHSQAVRCLRFSPDGKWLASAADDHTVKLWDLTAGKMMSEFPGHTGPVNVVEFHPNEYLLASGSSDRTIRFWDLEKFQVVSCIEGEPGPVRSVLFNPDGCCLYSGCQDSLRVYGWEPERCFDVVLVNWGKVADLAICNDQLIGVAFSQSNVSSYVVDLTRVTRTGTVARDPVQDHRPLAQPLPNPSAPLRRIYERPSTTCSKPQRVKQNSESERRSPSSEDDRDERESRAEIQNAEDYNEIFQPKNSISRTPPRRSEPFPAPPEDDAATAKEAAKPSPAMDVQFPVPNLEVLPRPPVVASTPAPKAEPAIIPATRNEPIGLKASDFLPAVKIPQQAELVDEDAMSQIRKGHDTMCVVLTSRHKNLDTVRAVWTMGDIKTSVDSAVAINDLSVVVDLLNIVNQKASLWKLDLCTTVLPQIEKLLQSKYESYVQTGCTSLKLILQRFLPLITDMLAAPPSVGVDISREERLHKCRLCYKQLKSISGLVKSKSGLSGRHGSTFRELHLLMASLD

SEQ ID NO: 160075 - DNA, 1968 bp, Artificial Sequence
  derived and/or modified sequence
atggccacccccgtggtgaccaagaccgcctggaagctgcaggagatcgtggcccacgccagcaacgtgagcagcctggtgctgggcaaggccagcggcagactgctggccaccggcggcgacgactgcagagtgaacctgtggagcatcaacaagcccaactgcatcatgagcctgaccggccacaccagccccgtggagagcgtgagactgaacacccccgaggagctgatcgtggccggcagccagagcggcagcatcagagtgtgggacctggaggccgccaagatcctgagaaccctgatgggccacaaggccaacatctgcagcctggacttccacccctacggcgagttcgtggccagcggcagccaggacaccaacatcaagctgtgggacatcagaagaaagggctgcgtgttcagatacagaggccacagccaggccgtgagatgcctgagattcagccccgacggcaagtggctggccagcgccgccgacgaccacaccgtgaagctgtgggacctgaccgccggcaagatgatgagcgagttccccggccacaccggccccgtgaacgtggtggagttccaccccaacgagtacctgctggccagcggcagcagcgacagaaccatcagattctgggacctggagaagttccaggtggtgagctgcatcgagggcgagcccggccccgtgagaagcgtgctgttcaaccccgacggctgctgcctgtacagcggctgccaggacagcctgagagtgtacggctgggagcccgagagatgcttcgacgtggtgctggtgaactggggcaaggtggccgacctggccatctgcaacgaccagctgatcggcgtggccttcagccagagcaacgtgagcagctacgtggtggacctgaccagagtgaccagaaccggcaccgtggccagagaccccgtgcaggaccacagacccctggcccagcccctgcccaaccccagcgcccccctgagaagaatctacgagagacccagcaccacctgcagcaagccccagagagtgaagcagaacagcgagagcgagagaagaagccccagcagcgaggacgacagagacgagagagagagcagagccgagatccagaacgccgaggactacaacgagatcttccagcccaagaacagcatcagcagaaccccccccagaagaagcgagcccttccccgccccccccgaggacgacgccgccaccgccaaggaggccgccaagcccagccccgccatggacgtgcagttccccgtgcccaacctggaggtgctgcccagaccccccgtggtggccagcacccccgcccccaaggccgagcccgccatcatccccgccaccagaaacgagcccatcggcctgaaggccagcgacttcctgcccgccgtgaagatcccccagcaggccgagctggtggacgaggacgccatgagccagatcagaaagggccacgacaccatgtgcgtggtgctgaccagcagacacaagaacctggacaccgtgagagccgtgtggaccatgggcgacatcaagaccagcgtggacagcgccgtggccatcaacgacctgagcgtggtggtggacctgctgaacatcgtgaaccagaaggccagcctgtggaagctggacctgtgcaccaccgtgctgccccagatcgagaagctgctgcagagcaagtacgagagctacgtgcagaccggctgcaccagcctgaagctgatcctgcagagattcctgcccctgatcaccgacatgctggccgccccccccagcgtgggcgtggacatcagcagagaggagagactgcacaagtgcagactgtgctacaagcagctgaagagcatcagcggcctggtgaagagcaagagcggcctgagcggcagacacggcagcaccttcagagagctgcacctgctgatggccagcctggactag

SEQ ID NO: 160076 - DNA, 1968 bp, Artificial Sequence
  derived and/or modified sequence
atggctactccagtggtgactaaaacagcgtggaagcttcaggaaattgtcgctcacgccagtaacgtatctagccttgtcctgggaaaagcctctggcaggctgttagcaacagggggagacgattgccgagtgaatctgtggtctattaacaagcccaattgtattatgagcctcacaggtcacacgtcgccggtggagtcggtacgcctgaacaccccagaagagctgatagtggctggtagccagtccggcagcatccgggtatgggaccttgaggccgccaaaattctgagaaccctgatggggcacaaggcaaatatatgctctctggatttccatccctacggggagttcgtcgcctccgggagccaggacaccaacattaagctgtgggatattcgccgcaagggctgcgtgtttcggtaccggggacactctcaggccgtgcgttgtcttcggtttagccccgacgggaagtggctggcatctgccgcagacgatcacacagtcaaactgtgggacttaaccgccggaaaaatgatgagtgaattcccggggcacacaggtccagttaatgtcgtagaattccaccccaacgagtaccttctggcgtcagggtcctccgacagaaccatcagattttgggatctcgagaaattccaggtagtgagttgcattgagggcgagccggggcctgtcaggtccgtgctttttaatcccgatggttgttgcctttacagcggctgtcaggattccctcagagtgtacggttgggaaccggagcggtgtttcgacgtcgttctggtcaactgggggaaagtggccgatttagccatctgtaatgatcagctcatcggagtggcattctcgcagagcaacgtctccagctacgtagtggaccttaccagagttacacggactggcacagtggcaagggacccggttcaggatcacaggcctctcgctcagccacttccgaacccctcagctccccttcgccggatctacgaacgcccatccaccacttgtagcaagccacagagggtcaaacaaaactcagagtccgagaggaggagcccaagttcggaggatgatcgggatgagcgggagagtcgagccgaaatccagaatgccgaagactacaatgaaatctttcagcccaaaaactcgatttccagaactccacctagacggtctgagcccttccctgcccctcctgaggacgacgctgctactgctaaggaggccgccaaaccgagtcccgccatggacgtgcaatttccagtgccaaatctggaggttctgccgaggcccccggtcgttgcttcgacaccagcgccgaaggcagaacctgccatcatcccggcaacaaggaacgagcctatagggctaaaggcatccgatttcctgccggctgtcaaaattccccagcaggcggagctggtcgacgaggatgccatgagccaaatccgtaagggacacgacacaatgtgtgttgttctaacttctcgtcataaaaatctggatacagtgagagctgtctggactatgggagatataaaaacctcagtggacagtgctgtggcgatcaatgacttaagtgttgtcgtggatctgctcaatattgtgaatcagaaggcctctctttggaaactcgacctgtgtacgacggtcctcccacagatagaaaagctcctgcagtctaagtacgagtcctatgtgcagacaggctgcacttccctcaaactgatcctccagaggtttctgccccttatcactgacatgctggctgcccctccttcagtcggggtcgacatatctagggaagagaggctgcacaaatgtcggctctgttacaagcagttgaagtcaatcagcggcctcgtaaagtccaagtccgggttaagtgggagacatggctctaccttccgggaactgcacctgttaatggcctcgcttgactag

SEQ ID NO: 160077 - DNA, 1968 bp, Artificial Sequence
  derived and/or modified sequence
atggccacccctgtggtgaccaagacagcctggaagctgcaggagatcgtggcccacgccagcaatgtgagcagcctggtgctgggcaaggccagcggccgcctgctggccactggaggagatgactgccgggtgaacctgtggagcatcaacaagcccaactgcatcatgagcctgaccggccacaccagccctgtggagagcgtgcggctgaacaccccagaggagctgattgtggccggcagccagagcggcagcatccgggtgtgggacctggaggccgccaagatcctgcggaccctgatgggccacaaggccaacatctgcagcctggacttccacccctacggggagtttgtggccagcggcagccaggacaccaacatcaagctgtgggacatccggaggaagggctgtgtgttccgctaccggggccacagccaggccgtgcgctgcctgcgcttctccccagatggcaagtggctggccagcgctgctgatgaccacacagtgaagctgtgggacctgacagctgggaagatgatgtctgagttccctggccacactggacctgtgaatgtggtggagttccaccccaatgagtacctgctggccagcggcagcagtgacaggaccatccgcttctgggacctggagaagttccaggtggtgtcctgcattgaaggagagcccggccctgtgcgctctgtgctcttcaacccagatggctgctgcctgtacagcggctgccaggacagcctgcgggtgtatggctgggagcctgagcgctgctttgatgtggtgctggtgaactggggcaaggtggccgacctggccatctgcaatgaccagctgattggagtggccttcagccagagcaatgtgtcctcctatgtggtggacctgaccagggtgaccaggacaggcaccgtggcccgggaccctgtgcaggaccaccggcccctggcccagcccctgcccaaccccagcgcccccctgcggcgcatctatgagcggcccagcaccacctgcagcaagccccagagggtgaagcagaacagcgagagcgagcggcgcagccccagcagtgaagatgacagagatgagcgggagagcagagctgagatccagaatgctgaggactacaatgagatcttccagcccaagaacagcatcagcaggaccccaccccggcgctctgagcccttccctgcccccccagaagatgatgctgccacagccaaggaggccgccaagcccagccctgccatggatgtgcagtttcctgtgcccaacctggaggtgctgcccaggcctcctgtggtggccagcaccccagcccccaaggccgagcccgccatcatcccagccaccagaaatgagcccatcggcctgaaggccagtgacttcctgcctgctgtgaagatcccccagcaggccgagctggtggatgaagatgccatgagccagatcagaaaaggacatgacaccatgtgtgtggtgctgaccagccgccacaagaacctggacacagtgcgggctgtgtggaccatgggagacatcaagacctctgtggacagcgctgtggccatcaatgacctgtctgtggtggtggacctgctgaacatcgtgaaccagaaggccagcctgtggaagctggacctgtgcaccaccgtgctgccccagatcgagaagctgctgcagagcaaatatgagagctatgtgcagacaggctgcaccagcctgaagctgatcctgcagcgcttcctgcccctcatcacagacatgctggccgccccacccagcgtgggcgtggacatcagccgggaggagcggctgcacaagtgccgcctgtgctacaagcagctgaagagcatcagcggcctggtgaagagcaagagcggcctgagcggccgccacggcagcaccttccgggagctgcacctgctgatggccagcctggactag

SEQ ID NO: 160078 - DNA, 2664 bp, Artificial Sequence
  derived and/or modified sequence
gggctctgagccggaggttttgttgtgagggtcggttgtcaagcagcggccaatcaaggcaggggatggaggcaagtgggggtcgcgcctggagcggagcctcggcctccggagccgcagctgcagccctgtattgagctgagatggctcgagcctaacattccatgatccaggatcgtgacagatgtgcacaggctgctgctgttgctgctgtgggtaatttggaaccacgaggcaccccagggccagaagacgaggcattctgtctgcctggatgtgtgggaactctctgccaacttgattggtggatctggggggggatccacccccaccccacgaggaaagcacagtttattttgtgggtggggcttcaggtgccagccagctgaaggatggccacccctgtggtcaccaagacagcctggaagttgcaagagatcgtcgcgcatgccagcaacgtgtcctcactggtgctgggcaaagcctccgggcggctgctggctacaggcggggatgactgccgcgtcaacctgtggtccatcaacaagcccaactgcatcatgagcctgacgggccacacatccccagtggagagcgtccgcctcaacacccccgaggagctcatcgtggccggctctcagtcgggctccatccgtgtctgggacctggaagctgccaaaattcttcgcacactcatgggacacaaagccaacatctgcagcctggatttccacccgtacggcgagtttgtagcctctggttcccaggacacaaacatcaagctctgggacatcaggaggaaaggctgtgtcttccgatacagggggcacagccaggccgtgcggtgtctccggttcagccccgatgggaagtggttggcgtcggccgcagatgaccacaccgtgaagctctgggatctcactgccggcaagatgatgtctgagttccctggtcacacggggcctgtcaacgtggtcgagtttcaccccaacgagtacctcctggcctccggcagctctgacaggacaatccgcttctgggacctggagaagttccaggtggtgagctgcatcgaaggggagcctgggcccgtcaggagcgtcctcttcaacccagacggctgctgcctgtacagcggctgccaggactcactgcgtgtctacggctgggaacctgagcggtgctttgatgtggtcctcgtcaactggggcaaggtggccgacctggccatctgcaatgaccagttgataggtgtggccttctcccagagcaacgtctcctcctacgtggtggatctgacgcgtgtcaccaggactggcacggtggcccgggaccctgtgcaggaccaccggcccctggcacagccactgcccaaccccagcgcccccctccggcgcatctatgagcggcccagcacaacctgcagcaagcctcagagggtgaagcagaactcagagagcgagcgccgcagccccagcagcgaggatgaccgggacgagcgcgagtcccgcgcggagatccagaacgccgaggactacaacgagatcttccagcccaagaacagcatcagtcggacgccaccccggagaagtgagcccttccctgcacccccagaggacgacgcagccacagcaaaggaggcagcaaagcccagccctgccatggatgtgcagttcccggtgccaaatctggaggtcctgccccggcccccagtggttgcttccacacctgcacccaaggctgagcctgccatcatccctgccacccggaacgagcccatcgggctgaaggcctccgacttcctgcccgccgtgaagatcccccagcaggccgagctggtggacgaggatgccatgtcacagatccgcaaaggccacgacaccatgtgtgtggtgctcaccagccgccacaagaacctggacactgtgcgggctgtgtggaccatgggcgacatcaagacgtcggtggactccgctgtggccatcaacgacctgtcggtggtggtggacctcctgaacatcgtcaaccagaaagcctccctgtggaagctggacctgtgcaccaccgtcctgccacagattgagaagcttctgcagagcaagtatgagagctacgtccagacgggctgcacctccctgaagctgatcctgcagcggtttctgcccctcatcacagacatgctggcggccccaccctctgtgggtgtggatatcagcagggaggagaggctgcataagtgccggctctgctacaagcagcttaagagcatcagcggcctggtcaagagcaagtcaggcctgagcggccgccatggcagtaccttccgcgagctgcacctgctcatggccagtctggactgaggaaagcagtgggcaggggcgctcggcagcccacagggcctggcctcagcccccactcctgttccttgtgcacccactggcccatgagcctctgcctggcccctgctgctgtcctgtggccgtcctggaggaggtgatgctggtccctggccacctctacagccctgaactcttgagacaactctctccagcaatagctgcccagctttgcccaactgttgcttcttggggcagcgaactgagccctggggctgctgctgtaatttataaggcaaattttattaaatttgtaactattcccagg

SEQ ID NO: 160079 - DNA, 1968 bp, Artificial Sequence
  derived and/or modified sequence
atggccacccccgtggtgaccaagaccgcctggaagctgcaggagattgtggcccacgccagcaatgtgtcctccttggtgctgggtaaggccagcggcaggctcctggccacgggcggtgacgactgtcgggtgaatctttggtccattaataaaccaaactgtattatgagtctcaccgggcatacctcaccagtagagtccgtgcggctgaacactccagaggagctgattgttgcgggctcccagtctggaagtatccgtgtgtgggacctggaggccgcaaaaatcctgcgcacactgatgggtcataaggccaatatatgctctctggattttcatccgtatggggaatttgtggcctcggggtctcaagacaccaatatcaaactttgggacattaggcgcaaaggctgtgtttttcggtatagagggcacagccaggccgtacggtgtctgaggttcagccccgatgggaagtggctggcctccgcggcagacgatcatacggtgaagctctgggatctcaccgcaggaaaaatgatgtccgaatttcctgggcacactggaccagttaatgtagtcgaattccaccccaatgagtacctgctcgccagcggcagcagcgatcgcaccatccgcttttgggatcttgaaaagttccaggtcgtcagctgcatagaaggcgagcccggccccgtgcggtccgtcttgttcaacccagatgggtgctgcttatattccgggtgtcaggattctctgcgcgtgtatggctgggagcccgagcgatgtttcgacgtcgttctggtcaattggggtaaggtagcagacctggcaatctgcaatgatcaactcatcggagtggcattttctcagtccaacgtgtcgagttatgtcgtggacctgacccgcgtaacaagaaccggcactgtagcacgagatcccgtgcaggatcacagacctctggcacagccgctacccaacccgagtgcgccactgaggagaatatacgaaaggcctagcactacatgttccaagccccagcgggtgaaacagaacagcgagtctgagagacgctcaccaagctccgaggatgaccgagatgagcgggaatccagggcagaaattcaaaacgctgaggattataatgagatctttcaacctaaaaactccatatcccgaacaccgcccagacgctccgaaccatttccggccccacctgaagatgatgcagcaacagctaaagaagccgccaagccatctcctgcaatggacgtccagttccctgtccccaacctggaggttctacctcggccacctgtggttgccagtacacctgctcctaaggctgagccggctataatacctgccacacggaacgagccaattgggttaaaggcctccgacttcctcccagccgtgaaaattccgcagcaagcggaactagtggatgaggacgccatgagtcagataagaaagggacatgataccatgtgtgtggtgttgactagcaggcataagaatttagacacggtgcgggctgtctggacaatgggggacatcaagacctctgtggactcagcagtagccattaacgatctgtctgtagttgtcgacctgcttaatattgtgaatcagaaggcgtccttatggaaactcgacctctgcacaacggtattaccccagatcgagaagttgttgcagagtaaatatgagtcttacgtgcagactggttgtacttcacttaaattgatccttcagcggtttctgcccttaatcacggatatgctggctgccccccccagcgtgggggtggatatttcacgcgaagagaggcttcacaaatgtaggctgtgctacaagcagctgaagtccatcagtgggctggtcaagagcaaaagtggcttgtcgggaaggcacggaagcacgttcagagagctccatcttcttatggcatccttagattag

SEQ ID NO: 160080 - DNA, 1968 bp, Artificial Sequence
  derived and/or modified sequence
atggctacaccagtagtgacaaagactgcctggaaattgcaagagattgttgcccatgcctctaatgtgtcatctttagtgcttggcaaagccagcggcagactgctagcaaccggaggcgacgattgtagggtgaacctgtggtcaataaacaagcctaactgtattatgtctctgacaggacataccagcccagttgagtccgtgcgactgaacacccctgaagaactcatagtggcgggtagccaaagcggaagcattcgtgtgtgggatctcgaggctgctaaaatacttagaaccctgatgggccacaaggccaacatctgctccctggatttccacccctatggagaattcgtggccagtggaagccaggacaccaatattaaactgtgggacatcagaagaaagggatgcgtgtttagatatcggggacatagtcaggctgtccgctgcctgagatttagcccggacgggaaatggctggcttccgctgcagatgaccacacagtcaaattgtgggacctcacagccggaaagatgatgtccgaatttcccggtcacactgggccagtgaacgtggtggagtttcacccaaacgaatacttactcgcgtccggctcctctgacagaaccatccgattttgggacctggagaagttccaagtcgtcagttgcattgagggtgagcctggcccagtgagaagtgtattattcaaccccgatggttgttgtctgtatagcggatgccaggacagcctgcgggtctacggatgggagcccgagcgatgttttgacgtcgtgctggtgaattggggtaaggtagccgacctggccatctgcaatgatcaactgataggagtcgccttctctcagagtaatgtctcaagctatgtcgtggacttgacgagggtcactcgaacaggcaccgtggctcgcgaccctgtccaagaccacaggccactggcccagccattgcccaatccctctgcaccacttagacggatctatgaacggccaagtactacttgttcaaagccccagagagtgaagcagaactcagaatctgagcggaggtcaccgagtagtgaggatgaccgcgacgagcgtgagtcccgagcagagatccagaatgcagaagactacaatgagatatttcagccaaagaactccattagcaggactccaccccgacgctctgagcctttcccagcccctccagaggacgacgctgccacggctaaagaggccgcaaaacccagccccgcaatggatgtgcagttccctgttcccaacctagaggtactgccaagacctcctgtggtcgcctctacccccgcacctaaggcagaacctgctatcattcctgcaacacgcaatgagccgattggtcttaaggcttctgacttcttgcccgctgtgaagatccctcagcaagcggagctggtggatgaggacgctatgtctcaaatcagaaagggccatgataccatgtgtgtggtactaacctcccggcacaagaacctggacactgtgagagccgtttggaccatgggcgacatcaagactagcgtagacagtgcggtcgcaattaacgatctgtcagtggttgtggacctgctgaatatcgtgaatcaaaaagcttctctgtggaagcttgatttgtgcacgactgtcctgccccagattgaaaagctcctccagagtaaatatgaatcgtacgtgcaaacaggttgtacatcccttaaattgatcttgcagcggtttctgcccctgatcacagatatgctcgccgctccacccagtgtgggggtggatatctccagggaagagcgccttcacaagtgtcgactgtgctataagcagttgaaatcaataagcggattggtgaaatctaagtcaggcctgagtgggagacacggcagcacgttccgcgagctgcatctcttgatggcttccctggactag

SEQ ID NO: 160081 - protein, 362 aa, Artificial Sequence
  derived and/or modified sequence
MFSSVAHLARANPFNTPHLQLVHDGLGDLRSSSPGPTGQPRRPRNLAAAAVEEQYSCDYGSGRFFILCGLGGIISCGTTHTALVPLDLVKCRMQVDPQKYKGIFNGFSVTLKEDGVRGLAKGWAPTFLGYSMQGLCKFGFYEVFKVLYSNMLGEENTYLWRTSLYLAASASAEFFADIALAPMEAAKVRIQTQPGYANTLRDAAPKMYKEEGLKAFYKGVAPLWMRQIPYTMMKFACFERTVEALYKFVVPKPRSECSKPEQLVVTFVAGYIAGVFCAIVSHPADSVVSVLNKEKGSSASLVLKRLGFKGVWKGLFARIIMIGTLTALQWFIYDSVKVYFRLPRPPPPEMPESLKKKLGLTQ

SEQ ID NO: 160082 - DNA, 1089 bp, Artificial Sequence
  derived and/or modified sequence
atgttttcctcagtcgcacatctggctcgtgccaatccatttaacacgccccacctgcagctggtccatgatggactgggagacctgaggtcaagctctcccggacccacaggacagcctcgtcgccccagaaacctcgccgcggcggccgtcgaagaacagtactcctgcgattacggcagcggaagatttttcattctttgtggacttggcggcatcattagctgtggaactacccacacagctttggtccccctggatctggttaagtgccggatgcaagtggacccacaaaagtataaggggattttcaatggcttctccgtgactctcaaggaggatggcgtccggggactcgccaagggttgggcccctacattcctcgggtattcaatgcagggcctgtgcaagttcggattctatgaagtttttaaggttctgtactcgaacatgcttggagaagagaatacctacctgtggcgaacttctctgtatctcgctgccagtgctagcgcagagttcttcgcagatattgctcttgcaccaatggaggccgctaaagtgaggattcagacacagccagggtatgcaaacacactgcgcgacgctgctccaaagatgtataaagaggaaggtctgaaggccttttataagggcgtggctccactgtggatgcgccagatcccatacacaatgatgaagttcgcctgctttgaaaggactgtggaagccctatacaagttcgtggtgcctaaaccaaggagcgagtgtagcaaacctgagcagcttgtggtgacctttgtggcgggctacatcgccggagtgttttgcgcaatcgtttcacatccagctgattccgtggttagtgttctgaacaaagagaaaggcagcagcgcttcactagtccttaaacgcctggggtttaaaggggtgtggaagggattgttcgcaaggatcataatgatcggaactctcactgcactgcagtggttcatttatgactcagtcaaagtctatttccggttgcccagaccgccaccacccgagatgcctgagagcttaaaaaaaaaacttggtctgacacagtag

SEQ ID NO: 160083 - DNA, 1089 bp, Artificial Sequence
  derived and/or modified sequence
atgttcagctccgtcgctcacctggcccgggcaaatccttttaataccccccacctgcagctggttcacgacggactcggtgacttgcgctcctcctcaccagggcctactggtcagccacgcagacctaggaacctcgccgccgccgctgtcgaggagcaatactcctgtgattatgggtcaggaagattcttcatcctgtgcgggctgggggggatcattagttgcggcaccacacacaccgctttggtcccactagatctcgtcaagtgcaggatgcaggtggaccctcagaagtataaaggcattttcaatggcttttccgtcacactcaaggaagacggagtccgtggtctggccaaaggatgggcgcctacatttctgggatattcaatgcagggcctgtgtaagtttgggttttacgaggtgttcaaagtcctgtatagcaacatgctgggcgaagaaaacacatatttgtggaggacatctttatacctggctgcatctgcaagcgcggagttctttgcagatattgccctggccccaatggaggctgctaaggtgagaatccagactcaaccaggttacgcaaatacactgcgggatgccgctccgaaaatgtacaaggaagagggcctgaaggccttctacaagggcgtcgctcctctctggatgagacaaattccttatacaatgatgaaattcgcctgtttcgaacggaccgttgaagctctgtataaattcgtggtccctaagcccaggtctgagtgctccaagccagagcagctcgtggtaacattcgtggcaggatacatagctggcgtgttttgtgccatagtgtctcatcctgctgactcagttgtcagtgtccttaataaggaaaaaggttctagtgcctccttggttttaaagcgccttgggttcaaaggcgtgtggaagggattgtttgccaggataataatgatagggaccctgacagcccttcagtggttcatctacgactccgtcaaagtctatttcaggctccctcgaccccctccgcctgagatgcccgaatctctgaagaaaaaactggggctcacccaatag

SEQ ID NO: 160084 - DNA, 1089 bp, Artificial Sequence
  derived and/or modified sequence
atgttcagctctgtggcccacctggcccgggccaaccccttcaacaccccccacctgcagctggtgcatgatggcctgggggacctgcggagcagcagccctggccccaccggccagccccggcggcccaggaacctggccgctgctgctgtggaggagcagtacagctgtgactatggcagcggccgcttcttcatcctgtgtggcctgggcggcatcatcagctgtggcaccacccacacagccctggtgcccctggacctggtgaagtgcaggatgcaggtggacccccagaagtacaagggcatcttcaacggcttctctgtgaccctgaaggaggatggagtgcggggcctggccaagggctgggcccccaccttcctgggctacagcatgcagggcctgtgcaagtttggcttctatgaggtgttcaaggtgctgtacagcaacatgctgggggaggagaacacctacctgtggaggaccagcctgtacctggccgccagcgccagcgctgagttctttgctgacatcgccctggcccccatggaggccgccaaggtgcgcatccagacccagcccggctacgccaacaccctgagagatgctgcccccaagatgtacaaggaggagggcctgaaggccttctacaagggcgtggcccccctgtggatgaggcagatcccctacaccatgatgaagtttgcctgctttgagaggacagtggaggccctgtacaagtttgtggtgcccaagcccaggtctgagtgcagcaagccagagcagctggtggtgacctttgtggccggctacatcgccggggtcttctgtgccatcgtgagccaccctgctgacagcgtggtgtctgtgctgaacaaggagaagggcagcagcgccagcctggtgctgaagaggctgggcttcaagggcgtgtggaagggcctgtttgcccgcatcatcatgattggcaccctgacagccctgcagtggttcatctatgattctgtgaaggtgtacttccggctgcccaggcctcctcctcctgagatgcctgagagcctgaagaagaagctgggcctgacccagtag

SEQ ID NO: 160085 - DNA, 1089 bp, Artificial Sequence
  derived and/or modified sequence
atgttcagcagcgtggcccacctggcccgggccaaccccttcaacaccccccatctccaattagtgcacgatgggctcggtgatcttagatcaagcagcccgggccctactggccagcctcgccggccgaggaatttagccgccgccgctgtggaggaacaatacagctgcgactatgggagcggacgcttttttatcctctgcggactcggaggcatcatctcctgtggcactacacatactgccttagtgccactcgacctcgttaaatgccgcatgcaggtcgacccccagaaatacaaaggaatcttcaatggctttagtgttactctgaaggaggatggtgtgcgcggactggctaagggttgggccccaactttccttgggtactccatgcaaggcctgtgtaagtttggtttctatgaggtatttaaggtgctgtactccaacatgctgggggaggaaaacacatacttgtggcgtacaagcctatacctggctgcctccgcaagtgccgaattttttgccgacattgccttagccccgatggaggctgctaaggttagaattcagacccagcccggctacgctaataccctgagagacgctgcacccaagatgtataaggaagaaggcctgaaggccttttataagggcgtggctcctctctggatgagacagattccctacactatgatgaagtttgcctgcttcgaaagaacagttgaagcgctttacaaattcgtggtccccaagccccgttccgaatgctctaagcccgagcagctcgttgttactttcgtcgcaggctatatagccggcgttttttgcgctattgtgagccacccagcagactccgtggtgtccgtgttaaacaaggagaaagggtcaagcgcctctttggtgctcaagcggctgggcttcaagggggtctggaaaggcctgttcgctagaataataatgatcggtacactaaccgccctccagtggttcatctacgactcagtgaaggtatacttccgactgcccaggccgccaccccccgaaatgcctgaatccctcaagaagaagcttgggttaacacagtag

SEQ ID NO: 160086 - DNA, 1089 bp, Artificial Sequence
  derived and/or modified sequence
atgttcagcagcgtggcccacctggcccgggccaaccccttcaacaccccccacctccagctggtacacgacggattaggcgacctgagaagctcctcgcccgggcctaccggacagcccaggaggcctagaaacctggccgccgctgcagtggaagaacagtactcctgcgattacggctctgggcggttctttatcctctgtggactgggcggaatcatctcatgcggaacaacacatacagcactggtgcccctggacttggtcaagtgccgcatgcaggtggatccacagaaatacaaaggtatctttaatggtttttctgtgaccctgaaggaagacggggtacgaggactggccaagggctgggccccgaccttcctgggctactcaatgcaaggcctttgcaaatttggattctacgaagtgtttaaggtgctttatagtaatatgctcggggaggaaaatacttacctatggcgcactagcctgtatctggccgcgtcagcttctgccgaattttttgccgatattgctctggccccgatggaggccgctaaggtcaggatccagacacagcccggttacgcgaatacacttcgagatgcggccccaaagatgtataaagaggagggactgaaggccttctataaaggggtggctcccctgtggatgcgacaaataccctatactatgatgaagttcgcgtgcttcgagagaactgtcgaggcattgtacaagttcgtggtgccaaagcctagaagcgagtgtagcaagcccgagcagctcgtggtaacgtttgttgctggctacatcgcaggcgttttctgcgcaatagtgagtcacccggccgacagcgtggtttccgtccttaataaggagaagggttcatctgctagcctggttttaaagaggctggggttcaagggggtgtggaagggcctattcgccagaatcatcatgattggcaccctcacggcactgcagtggttcatctacgattcagttaaggtgtactttcgtctcccgagaccacctccacctgaaatgccggaatccctaaaaaaaaaactgggcctcacgcagtag

SEQ ID NO: 160087 - DNA, 1089 bp, Artificial Sequence
  derived and/or modified sequence
atgttcagtagcgtggctcatctagcgagggctaacccctttaacacgcctcacctccagttagtgcacgatggcctcggagacctgcgcagttccagcccagggcctacagggcagcccagacggccacgtaaccttgctgcggcagctgtcgaggaacagtattcatgcgactatggttccgggaggttcttcatactgtgtggactcggtggaattattagctgtggcaccacacacacagccctggtcccacttgatttggtaaaatgccgaatgcaggtggaccctcagaaatataaaggtatcttcaacggcttcagtgtgaccctcaaagaggacggtgtcagaggactggcaaagggctgggcccctactttcctaggatactccatgcagggcctgtgtaaatttggcttctacgaggtttttaaagtcctgtatagcaacatgctgggagaggagaacacgtacctgtggcggacctccctgtatctggctgccagcgcctcagccgaattctttgccgatatcgcgctggcccctatggaggccgcaaaggtgcgaatccagacacaaccgggttacgccaacacactcagggatgcagctcccaaaatgtataaggaagaaggcctgaaagctttctataaaggcgtcgccccactgtggatgcgtcagatcccctacactatgatgaagttcgcctgcttcgaaagaacggtggaagcactctacaagtttgtggtccccaaaccgcgaagcgaatgtagcaaacccgagcaattagttgttacattcgtcgctggctatatcgctggggtattctgtgccatcgtttcacatcccgctgatagcgttgtgtctgtgctcaacaaggagaaaggaagctccgcttctctggtccttaagcgactggggttcaagggagtgtggaagggccttttcgcacgaattataatgatagggactctaaccgcactgcagtggttcatctacgactcagtcaaggtctattttcgactgcccagacccccacctcccgagatgcctgagtcattgaaaaagaagcttgggctcacccaatag

SEQ ID NO: 160088 - DNA, 1089 bp, Artificial Sequence
  derived and/or modified sequence
atgttctcctccgtggcgcacttggctcgggcaaacccatttaacacgcctcatctccagctggtgcacgacggtctcggcgatcttcgaagtagctctccaggtcccaccggacagcccaggcgaccaagaaatcttgccgcagctgccgttgaagagcagtatagttgtgactatggctcaggaagattcttcattctttgtgggcttggcggaataatttcatgtggtaccactcataccgctctggttcctctggacctggtgaagtgcaggatgcaagtggatccacagaaatacaagggaatctttaatgggtttagtgttaccctcaaggaagacggcgtgcgaggcctcgcaaagggctgggctccaaccttcctcggctattctatgcaggggctgtgcaagtttgggttttacgaagtctttaaggtgttgtactcaaacatgctgggcgaggaaaacacctatctgtggagaacttcactctacctggccgcatcagcgtctgccgaatttttcgcagatattgcactcgctccaatggaggctgcaaaggtgcgcatccagacccaacccggatacgcaaacactctacgcgacgctgctcccaaaatgtacaaggaggaagggcttaaagctttctacaagggcgtggccccactgtggatgaggcagatcccgtataccatgatgaaattcgcctgcttcgagcgaaccgtggaggcattatacaagttcgtagtccccaagccccgttcggagtgctccaagcctgagcaactcgtcgtgaccttcgtggctggttacattgctggagtgttttgtgctatcgtatcccatccagccgatagtgtggtgtctgtgctgaataaggagaagggctcctcagcttcattagtccttaagcgattgggtttcaagggtgtgtggaagggcctattcgcgagaatcatcatgatcgggaccctgaccgcgctacagtggttcatctatgatagcgttaaagtgtactttcggttacccaggccccctcctcccgaaatgcctgagtcactaaaaaagaaactggggctcacacagtag

SEQ ID NO: 160089 - DNA, 1678 bp, Artificial Sequence
  derived and/or modified sequence
gtgtgcgtcacgccgacgacgcgcgaagggcacacatcttaggacccggaggacgtccggcctctgtgagccgcaacctttccaagggagtggttgtgtgatcgccatcttagggaaaagatgttctcgtccgtggcgcacctggcgcgggcgaaccccttcaacacgccacatctgcagctggtgcacgatggtctcggggacctccgcagcagctccccagggcccacgggccagccccgccgccctcgcaacctggcagccgccgccgtggaagagcagtatagctgtgactatggatctggcagattctttatcctttgtggacttggaggaattattagctgtggcacaacacatacagcattggttcctctagatctggttaaatgcagaatgcaggtggacccccaaaagtacaagggcatatttaacggattctcagttacacttaaagaggatggtgttcgtggtttggctaaaggatgggctccgactttccttggctactccatgcagggactctgcaagtttggcttttatgaagtctttaaagtcttgtatagcaatatgcttggagaggagaatacttatctctggcgcacatcactatatttggctgcctctgccagtgctgaattctttgctgacattgccctggctcctatggaagctgctaaggttcgaattcaaacccagccaggttatgccaacactttgagggatgcagctcccaaaatgtataaggaagaaggcctaaaagcattctacaagggggttgctcctctctggatgagacagataccatacaccatgatgaagttcgcctgctttgaacgtactgttgaagcactgtacaagtttgtggttcctaagccccgcagtgaatgttcaaagccagagcagctggttgtaacatttgtagcaggttacatagctggagtcttttgtgcaattgtttctcaccctgctgattctgtggtatctgtgttgaataaagaaaaaggtagcagtgcttctctggtcctcaagagacttggatttaaaggtgtatggaagggactgtttgcccgtatcatcatgattggtaccctgactgcactacagtggtttatctatgactccgtgaaggtctacttcagacttcctcgccctcctccacccgagatgccagagtctctgaagaagaagcttgggttaactcagtagttagatcaaagcaaatgtggactgaatctgcttgttgatcagtgttgaagaaagtgcaaaaggaacttttatatatttgacagtgtaggaaattgtctattcctgatataattactgtagtactcttgcttaaggcaagagtttcagatttactgttgaaataaacccaactcttcatgatttgcctgtgacttatttttaaaacttttttaaaaaagatttagctttaaaatagttggaaagaatgaagtatataagttaaggaaaaaatacaaaactgaccatgaccattgttggttgaatattccagttgctattcagaaattgtcatatgtctcaagttttatcacacaaagttcctgtatttctagggaagcagactttaaatttctaaaaacttgatttaattatagttaaatatgtgtagtcatttgtggttattttggcaagtaaatgtcagtgtatactt

SEQ ID NO: 160090 - DNA, 1359 bp, Artificial Sequence
  derived and/or modified sequence
aagggcacacatcttaggacccggaggacgtccggcctctgtgagccgcaacctttccaagggagtggttgtgtgatcgccatcttagggaatgttctcgtccgtggcgcacctggcgcgggcgaaccccttcaacacgccacatctgcagctggtgcacgatggtctcggggacctccgcagcagctccccagggcccacgggccagccccgccgccctcgcaacctggcagccgccgccgtggaagagcagtatagctgtgactatggatctggcagattctttatcctttgtggacttggaggaattattagctgtggcacaacacatacagcattggttcctctagatctggttaaatgcagaatgcaggtggacccccaaaagtacaagggcatatttaacggattctcagttacacttaaagaggatggtgttcgtggtttggctaaaggatgggctccgactttccttggctactccatgcagggactctgcaagtttggcttttatgaagtctttaaagtcttgtatagcaatatgcttggagaggagaatacttatctctggcgcacatcactatatttggctgcctctgccagtgctgaattctttgctgacattgccctggctcctatggaagctgctaaggttcgaattcaaacccagccaggttatgccaacactttgagggatgcagctcccaaaatgtataaggaagaaggcctaaaagcattctacaagggggttgctcctctctggatgagacagataccatacaccatgatgaagttcgcctgctttgaacgtactgttgaagcactgtacaagtttgtggttcctaagccccgcagtgaatgttcaaagccagagcagctggttgtaacatttgtagcaggttacatagctggagtcttttgtgcaattgtttctcaccctgctgattctgtggtatctgtgttgaataaagaaaaaggtagcagtgcttctctggtcctcaagagacttggatttaaaggtgtatggaagggactgtttgcccgtatcatcatgattggtaccctgactgcactacagtggtttatctatgactccgtgaaggtctacttcagacttcctcgccctcctccacccgagatgccagagtctctgaagaagaagcttgggttaactcagtagttagatcaaagcaaatgtggactgaatctgcttgttgatcagtgttgaagaaagtgcaaaaggaacttttatatatttgacagtgtaggaaattgtctattcctgatataattactgtagtactcttgcttaaggcaagagtttcagatttactgttgaaataaacccaactcttcatg

SEQ ID NO: 160091 - DNA, 1089 bp, Artificial Sequence
  derived and/or modified sequence
atgttcagcagcgtggcccacctggccagagccaaccccttcaacaccccccacctgcagctggtgcacgacggcctgggcgacctgagaagcagcagccccggccccaccggccagcccagaagacccagaaacctggccgccgccgccgtggaggagcagtacagctgcgactacggcagcggcagattcttcatcctgtgcggcctgggcggcatcatcagctgcggcaccacccacaccgccctggtgcccctggacctggtgaagtgcagaatgcaggtggacccccagaagtacaagggcatcttcaacggcttcagcgtgaccctgaaggaggacggcgtgagaggcctggccaagggctgggcccccaccttcctgggctacagcatgcagggcctgtgcaagttcggcttctacgaggtgttcaaggtgctgtacagcaacatgctgggcgaggagaacacctacctgtggagaaccagcctgtacctggccgccagcgccagcgccgagttcttcgccgacatcgccctggcccccatggaggccgccaaggtgagaatccagacccagcccggctacgccaacaccctgagagacgccgcccccaagatgtacaaggaggagggcctgaaggccttctacaagggcgtggcccccctgtggatgagacagatcccctacaccatgatgaagttcgcctgcttcgagagaaccgtggaggccctgtacaagttcgtggtgcccaagcccagaagcgagtgcagcaagcccgagcagctggtggtgaccttcgtggccggctacatcgccggcgtgttctgcgccatcgtgagccaccccgccgacagcgtggtgagcgtgctgaacaaggagaagggcagcagcgccagcctggtgctgaagagactgggcttcaagggcgtgtggaagggcctgttcgccagaatcatcatgatcggcaccctgaccgccctgcagtggttcatctacgacagcgtgaaggtgtacttcagactgcccagaccccccccccccgagatgcccgagagcctgaagaagaagctgggcctgacccagtag

SEQ ID NO: 160092 - protein, 397 aa, Artificial Sequence
  derived and/or modified sequence
MNAGSDPVVIVSAARTIIGSFNGALAAVPVQDLGSTVIKEVLKRATVAPEDVSEVIFGHVLAAGCGQNPVRQASVGAGIPYSVPAWSCQMICGSGLKAVCLAVQSIGIGDSSIVVAGGMENMSKAPHLAYLRTGVKIGEMPLTDSILCDGLTDAFHNCHMGITAENVAKKWQVSREDQDKVAVLSQNRTENAQKAGHFDKEIVPVLVSTRKGLIEVKTDEFPRHGSNIEAMSKLKPYFLTDGTGTVTPANASGINDGAAAVVLMKKSEADKRGLTPLARIVSWSQVGVEPSIMGIGPIPAIKQAVTKAGWSLEDVDIFEINEAFAAVSAAIVKELGLNPEKVNIEGGAIALGHPLGASGCRILVTLLHTLERMGRSRGVAALCIGGGMGIAMCVQRE

SEQ ID NO: 160093 - DNA, 1194 bp, Artificial Sequence
  derived and/or modified sequence
atgaacgctggatccgatcccgtggtcatagtgtcggcggcacgcaccattatcggatccttcaacggcgctctagccgccgttccagttcaggacttgggctctaccgtgatcaaagaggttctaaaacgcgccacagtggcccctgaagacgtatcagaagtgatctttgggcatgtgctcgccgccggatgcggacagaatccggttcgccaggcttccgtgggggccggaatcccctattccgtgccagcctggagctgccagatgatatgtggtagtggtttgaaggccgtctgtctggcggtacaaagcataggaattggggacagctccattgtggtagccggcgggatggaaaacatgagtaaggcgccgcacctcgcctatctgagaaccggagtgaagataggggaaatgcctctcactgatagcatcctctgcgacggtttaaccgatgcatttcacaactgccacatgggtattacagccgagaacgtggcaaaaaagtggcaggtgagcagggaggatcaggacaaggtggccgtcctgagtcagaacagaacagaaaacgcgcaaaaagctggtcatttcgacaaagagatcgttcctgtactagtgtctacccgaaaaggacttattgaggtgaagacggatgaattccctcgccacggatccaacattgaggctatgagcaagctaaagccatattttctgacagacggaactggtacagttacgccggcaaacgcttccggaatcaacgatggcgcagctgcagtcgtattgatgaaaaagagcgaagctgataagaggggcttaactccgctggctagaatagtgagttggagtcaggtgggcgttgaaccaagcataatggggattggccccatacccgccatcaagcaggctgtgacaaaggccggttggtctctggaggacgtggacatttttgaaataaatgaagcctttgctgctgtgtccgccgccattgtgaaggagctcggattaaaccctgaaaaggtgaatattgaggggggggccatcgctttgggccacccgctgggtgccagtgggtgtcgaatattagtgacgctcttgcatacgttggaacggatgggtcgctcccggggagtcgccgcgctgtgcataggggggggcatgggtatcgccatgtgcgttcagagggaatag

SEQ ID NO: 160094 - DNA, 1194 bp, Artificial Sequence
  derived and/or modified sequence
atgaatgccggcagtgaccctgtggtgattgtgtctgctgcccggaccatcatcggcagcttcaacggggccctggccgctgtgcctgtgcaggacctgggcagcaccgtcatcaaggaggtgctgaagagggccaccgtggccccagaagatgtgtctgaggtgatctttggacatgtgctggccgccggctgcggccagaaccctgtgcggcaggcctctgtgggcgccggcatcccctacagcgtgcctgcctggagctgccagatgatctgtggcagcggcctgaaggctgtgtgcctggccgtgcagagcatcggcatcggggacagcagcatcgtggtggccggcggcatggagaacatgagcaaggccccccacctggcctacctgaggactggagtgaagattggagagatgcccctgacagacagcatcctgtgtgatggcctgacagatgccttccacaactgccacatgggcatcacagcagaaaatgtggccaagaagtggcaggtgtcccgggaggaccaggacaaggtggccgtgctgagccagaacagaacagaaaatgcccagaaggccggccactttgacaaggagatcgtgcctgtgctggtgtccaccaggaagggcctcatcgaggtgaagacagatgagttccccaggcatggcagcaacatcgaggccatgagcaagctgaagccctacttcctgacagatggcactggaacagtgaccccagccaatgccagcggcatcaatgatggagctgctgctgtggtgctgatgaagaagtctgaggccgacaagaggggcctgacccccctggcccgcatcgtgtcctggagccaggtgggcgtggagcccagcatcatgggcatcggccccatcccagccatcaagcaggccgtgaccaaggccggctggagcctggaggatgtggacatctttgagatcaatgaggcctttgctgctgtgtctgctgccatcgtgaaggagctgggcctgaaccctgagaaggtgaacatcgagggcggggccatcgccctgggccaccccctgggcgccagcggctgccgcatcctggtgaccctgctgcacaccctggagaggatgggccgcagccggggcgtggccgccctgtgcatcggcggcggcatgggcatcgccatgtgtgtgcagcgggagtag

SEQ ID NO: 160095 - DNA, 1194 bp, Artificial Sequence
  derived and/or modified sequence
atgaacgccggcagcgaccccgtggtgatcgtgagcgccgcccggaccataattggcagctttaacggcgccctggctgctgtgcccgtgcaagatcttggaagtacagtgatcaaggaagtgttaaaacgggctacagtcgcacctgaggatgtgagcgaagtcatattcggccacgtgcttgcggctggctgtgggcagaatcctgtgaggcaagcctcagttggcgcaggcatcccttattctgttcctgcctggagctgccaaatgatatgtggcagcggcctcaaggctgtgtgcttggctgtgcagagcataggcatcggggactcttcaattgtggtggcgggaggtatggagaacatgagcaaggccccccacctagcctacctgagaaccggcgtgaagatcggcgaaatgccacttacagattccatcctttgcgacggcctgactgacgccttccacaactgtcatatgggcatcaccgccgagaacgtagcaaagaaatggcaagtgagtcgcgaggaccaagataaggtggcagttctgtctcagaaccgaacagagaacgcccaaaaagccggtcatttcgataaggagatcgtgcccgtcctggtgtcaactagaaaaggcttaatcgaggtcaaaacggatgagtttcctcgccatggcagtaatatcgaggcaatgtcgaagttaaagccatattttctgacagacgggaccggcaccgtgacgcccgcgaacgctagcggcatcaacgatggcgcggccgcggtggtgctcatgaagaaatctgaggctgataagcgcggtctgacaccactggcgaggattgtgtcatggtcccaggtcggagtggaaccttcaatcatgggtataggccctataccggccattaagcaagccgtaaccaaggcaggctggtcccttgaggacgtggatatttttgaaatcaatgaagcattcgccgctgtgtcagccgcaattgttaaggaactggggctgaatcccgaaaaggtaaacattgaaggaggcgcgatcgcgcttggacaccctttgggcgccagcggatgccgaatcctcgtgacacttctgcacactctggaacgtatgggccggtctaggggagtggcggccctctgcatcggcggcggcatgggtatcgctatgtgcgtccagcgagagtag

SEQ ID NO: 160096 - DNA, 1194 bp, Artificial Sequence
  derived and/or modified sequence
atgaatgcagggtctgacccagtggtcatcgtgagcgctgccagaacaatcatcgggtctttcaacggagcgctcgccgctgttccggtccaagatcttgggtctaccgtcattaaagaggtcctaaaaagagctactgttgcccctgaggatgtcagtgaggtgatctttggtcacgtcctcgcagccggatgtggccagaaccccgtgcgtcaggccagcgtcggagctggcatcccttacagcgtcccagcctggtcatgtcaaatgatttgcgggtccggcttgaaagcagtctgtctcgccgttcaaagtatcggtatcggggactcctcgatagtcgtggcaggcggaatggaaaacatgtctaaggcacctcatctggcttatctgcggacgggcgtcaaaatcggggaaatgccgcttaccgattcaatcctttgcgatggcctcacagatgcgtttcacaactgccatatggggattacagccgagaatgtagcaaaaaagtggcaggtgtcaagagaggatcaggacaaagtcgccgtgctttctcaaaaccggaccgaaaatgcgcagaaagcgggtcatttcgataaagagatcgtgccggtgctggtttccactcggaaaggtttgattgaagtcaagactgacgagttccccagacacggttccaacatcgaagcaatgtctaaactaaagccatattttctaaccgatggcaccgggaccgtcactcccgcaaatgcctccggcattaacgatggggctgccgctgtggtcctcatgaagaagagtgaagcggacaaaagggggctcacacccctggcacgaattgtgtcatggtcccaggtgggggtagaacctagtattatgggtattggccctattccagctataaagcaggctgtgacgaaggcagggtggtccctggaagacgtcgacattttcgaaatcaatgaggcctttgcagcggtgtctgctgcaatcgtgaaagaattgggcctcaatcctgagaaagtgaacattgagggtggggcaattgcgctgggccacccactgggcgctagtggttgccgaatccttgtcacgctactccataccctggagaggatggggagaagcaggggcgtcgccgctttatgtattggcggtggtatggggatcgcaatgtgcgtccaaagagagtag

SEQ ID NO: 160097 - DNA, 3180 bp, Artificial Sequence
  derived and/or modified sequence
ggtgtgatctcggctcactgaaacctctgcctcctaggttcaagcgattttcccatgtcagcctccccagtagctgggattacaggcgcacggcaccacgcccggctaatttttctattttatggtagaaacgggatatcaccatgttggccaggctggtgtcaaactgctgacctcaaatgatccgccctcctcggcctcccaaagtgctgggattacaggtgtgagccaaggtgcccgacctgatgtgcttgtaagaatttaaatgaagagggtcagtcagcttaggagacgaggttagatgtaaggatttcagacttgtcagtatacaggtggtgattgatgccgtaggaatgactggtattacccagggagctggtgcaaagtaggagccttggggaacatgttaaggggatgtgagagtaagcccacaaagactcagaagtggccagggagtaaggggaaaatgggatagaatagagcaaaagccacgggaggcattccttgaattccttggactcagatatgttaggggacaggaaacacattgaagacaactgaagagacttcagtgtgctgctgagttcttagcagagtagacagctgatttcaccactattccagaccctaaagatttctcctgaaattgcactgttatgcaatttttttccttctctattgccccacctctggggcctacactctttaccttctctgatttatctgacccatccgcatatctctgcaaagtcttaatgtaggtttccaggatttaatgattctttcaatcaactttaaagttcttcaggaagattctccaggtccgtcaacagttttccccttcatgactttgtgacaaagctttcttgttccactatccaggtgttcccaacaagttgctgtaacggtggcccctcataagcttgcctggaaaccctagaaagctcagaaaaattatgaactttgcccagtaagaggctgggaagtcagaaagggttttaaacaaaactgaccccacttgttacatgctcctttcactgtccaaacgtcaaccaaaggaacttttgtgacgctaagacgctcccggcgtcctcacccgttcacagccagagttgatcttagaaggcagggggctcgcaccgagacgctcctagcaagcccctcacgcgagcgaatgactggcgccaggagaaacgcataggacctcccgaagccgccgagagcaaaaggacccatcagagctgtgctgagacccgccgcgggccgggctcgcactcgagattctcgcccgtgggattccagtcctgagctgaacgagagataagtctttgtcaccccccagtctttactgtttcgagaaaccctaagattttttaaaaaaaagcccaagacgtcaagtcggggaactccaacattggggtgtccagaaacactggggtttcaggcgctctgtaaatgcgtccgaggtccgcggttctgcccgcaagcccagaccccggcctcacttccgccccgcgccccgcgccccggcctcacttccgccccgcgccccgcgccccgcgccccgcgcgcctccgcccgcccctgctccggccttgcgcctgcgcacagtgggatgcgcggggaggtggtgcgcggggaggtggagggcgaggggcggggctacctcaggtcccgcccgcggcaggcctgtgggctgcgaggaggagctttgcctagcttgcaggcagcgcagggcagacggcggcaggagaagcaagatgaatgcaggctcagatcctgtggtcatcgtctcggcggcgcggaccatcataggttccttcaatggtgccttagctgctgttcctgtccaggacctgggctccactgtcatcaaagaagtcttgaagagggccactgtggctccggaagatgtgtctgaggtcatctttggacatgtcttggcagcaggctgtgggcagaatcctgttagacaagccagtgtgggtgcaggaattccctactctgttccagcatggagctgccagatgatctgtgggtcaggcctaaaagctgtgtgccttgcagtccagtcaatagggataggagactccagcattgtggttgcaggaggcatggaaaatatgagcaaggctcctcacttggcttacttgagaacaggagtaaagataggtgagatgccactgactgacagtatactctgtgatggtcttacagatgcatttcacaactgtcatatgggtattacagctgaaaatgtagccaaaaaatggcaagtgagtagagaagatcaggacaaggttgcagttctgtcccagaacaggacagagaatgcacagaaagctggccattttgacaaagagattgtaccagttttggtgtcaactagaaaaggtcttattgaagttaaaacagatgagtttcctcgccatgggagcaacatagaagccatgtccaagctaaagccttactttcttactgatggaacgggaacagtcaccccagccaatgcttcaggaataaatgatggtgctgcagctgtcgttcttatgaagaagtcagaagctgataaacgtgggcttacacctttagcacggatagtttcctggtcccaagtgggtgtggagccttccattatgggaataggaccaattccagccataaagcaagctgttacaaaagcaggttggtcactggaagatgttgacatatttgaaatcaatgaagcctttgcagctgtctctgctgcaatagttaaagaacttggattaaacccagagaaggtcaatattgaaggaggggctatagccttgggccaccctcttggagcatctggctgtcgaattcttgtgaccctgttacacacactggagagaatgggcagaagtcgtggtgttgcagccctgtgcattgggggtgggatgggaatagcaatgtgtgttcagagagaatgaattgcttaaactttgaacaacctcaatttctttttaaactaataaagtactaggttgcaatatgtgaaatcagaggaccaaagtacagatggaaaccatttcctacatcacaaaaacccaagtttacagcttgtactttactttaatgtgtaatactcaactcaaggtacaagacaattgcatttaacattgttataaataaaaggaacatcagatcaatcattaa

SEQ ID NO: 160098 - DNA, 1194 bp, Artificial Sequence
  derived and/or modified sequence
atgaacgccggcagcgaccccgtggtgatcgtgagcgccgccagaaccatcatcggcagcttcaacggcgccctggccgccgtgcccgtgcaggacctgggcagcaccgtgatcaaggaggtgctgaagagagccaccgtggcccccgaggacgtgagcgaggtgatcttcggccacgtgctggccgccggctgcggccagaaccccgtgagacaggccagcgtgggcgccggcatcccctacagcgtgcccgcctggagctgccagatgatctgcggcagcggcctgaaggccgtgtgcctggccgtgcagagcatcggcatcggcgacagcagcatcgtggtggccggcggcatggagaacatgagcaaggccccccacctggcctacctgagaaccggcgtgaagatcggcgagatgcccctgaccgacagcatcctgtgcgacggcctgaccgacgccttccacaactgccacatgggcatcaccgccgagaacgtggccaagaagtggcaggtgagcagagaggaccaggacaaggtggccgtgctgagccagaacagaaccgagaacgcccagaaggccggccacttcgacaaggagatcgtgcccgtgctggtgagcaccagaaagggcctgatcgaggtgaagaccgacgagttccccagacacggcagcaacatcgaggccatgagcaagctgaagccctacttcctgaccgacggcaccggcaccgtgacccccgccaacgccagcggcatcaacgacggcgccgccgccgtggtgctgatgaagaagagcgaggccgacaagagaggcctgacccccctggccagaatcgtgagctggagccaggtgggcgtggagcccagcatcatgggcatcggccccatccccgccatcaagcaggccgtgaccaaggccggctggagcctggaggacgtggacatcttcgagatcaacgaggccttcgccgccgtgagcgccgccatcgtgaaggagctgggcctgaaccccgagaaggtgaacatcgagggcggcgccatcgccctgggccaccccctgggcgccagcggctgcagaatcctggtgaccctgctgcacaccctggagagaatgggcagaagcagaggcgtggccgccctgtgcatcggcggcggcatgggcatcgccatgtgcgtgcagagagagtag

SEQ ID NO: 160099 - protein, 1100 aa, Artificial Sequence
  derived and/or modified sequence
MGNAAGSAEQPAGPAAPPPKQPAPPKQPMPAAGELEERFNRALNCMNLPPDKVQLLSQYDNEKKWELICDQERFQVKNPPAAYIQKLKSYVDTGGVSRKVAADWMSNLGFKRRVQESTQVLRELETSLRTNHIGWVQEFLNEENRGLDVLLEYLAFAQCSVTYDMESTDNGASNSEKNKPLEQSVEDLSKGPPSSVPKSRHLTIKLTPAHSRKALRNSRIVSQKDDVHVCIMCLRAIMNYQSGFSLVMNHPACVNEIALSLNNKNPRTKALVLELLAAVCLVRGGHDIILAAFDNFKEVCGEQHRFEKLMEYFRNEDSNIDFMVACMQFINIVVHSVENMNFRVFLQYEFTHLGLDLYLERLRLTESDKLQVQIQAYLDNIFDVGALLEDTETKNAVLEHMEELQEQVALLTERLRDAENESMAKIAELEKQLSQARKELETLRERFSESTAMGPSRRPPEPEKAPPAAPTRPSALELKVEELEEKGLIRILRGPGDAVSIEILPVAVATPSGGDAPTPGVPTGSPSPDLAPAAEPAPGAAPPPPPPLPGLPSPQEAPPSAPPQAPPLPGSPEPPPAPPLPGDLPPPPPPPPPPPGTDGPVPPPPPPPPPPPGGPPDALGRRDSELGPGVKAKKPIQTKFRMPLLNWVALKPSQITGTVFTELNDEKVLQELDMSDFEEQFKTKSQGPSLDLSALKSKAAQKAPSKATLIEANRAKNLAITLRKGNLGAERICQAIEAYDLQALGLDFLELLMRFLPTEYERSLITRFEREQRPMEELSEEDRFMLCFSRIPRLPERMTTLTFLGNFPDTAQLLMPQLNAIIAASMSIKSSDKLRQILEIVLAFGNYMNSSKRGAAYGFRLQSLDALLEMKSTDRKQTLLHYLVKVIAEKYPQLTGFHSDLHFLDKAGSVSLDSVLADVRSLQRGLELTQREFVRQDDCMVLKEFLRANSPTMDKLLADSKTAQEAFESVVEYFGENPKTTSPGLFFSLFSRFIKAYKKAEQEVEQWKKEAAAQEAGADTPGKGEPPAPKSPPKARRPQMDLISELKRRQQKEPLIYESDRDGAIEDIITVIKTVPFTARTGKRTSRLLCEASLGEEMPL

SEQ ID NO: 160100 - DNA, 3315 bp, Artificial Sequence
  derived and/or modified sequence
atgggcaacgccgccggcagcgccgagcagcccgccggccccgccgcccccccccccaagcagcccgccccccccaagcagcccatgcccgccgccggcgagctggaggagagattcaacagagccctgaactgcatgaacctgccccccgacaaggtgcagctgctgagccagtacgacaacgagaagaagtgggagctgatctgcgaccaggagagattccaggtgaagaacccccccgccgcctacatccagaagctgaagagctacgtggacaccggcggcgtgagcagaaaggtggccgccgactggatgagcaacctgggcttcaagagaagagtgcaggagagcacccaggtgctgagagagctggagaccagcctgagaaccaaccacatcggctgggtgcaggagttcctgaacgaggagaacagaggcctggacgtgctgctggagtacctggccttcgcccagtgcagcgtgacctacgacatggagagcaccgacaacggcgccagcaacagcgagaagaacaagcccctggagcagagcgtggaggacctgagcaagggcccccccagcagcgtgcccaagagcagacacctgaccatcaagctgacccccgcccacagcagaaaggccctgagaaacagcagaatcgtgagccagaaggacgacgtgcacgtgtgcatcatgtgcctgagagccatcatgaactaccagagcggcttcagcctggtgatgaaccaccccgcctgcgtgaacgagatcgccctgagcctgaacaacaagaaccccagaaccaaggccctggtgctggagctgctggccgccgtgtgcctggtgagaggcggccacgacatcatcctggccgccttcgacaacttcaaggaggtgtgcggcgagcagcacagattcgagaagctgatggagtacttcagaaacgaggacagcaacatcgacttcatggtggcctgcatgcagttcatcaacatcgtggtgcacagcgtggagaacatgaacttcagagtgttcctgcagtacgagttcacccacctgggcctggacctgtacctggagagactgagactgaccgagagcgacaagctgcaggtgcagatccaggcctacctggacaacatcttcgacgtgggcgccctgctggaggacaccgagaccaagaacgccgtgctggagcacatggaggagctgcaggagcaggtggccctgctgaccgagagactgagagacgccgagaacgagagcatggccaagatcgccgagctggagaagcagctgagccaggccagaaaggagctggagaccctgagagagagattcagcgagagcaccgccatgggccccagcagaagaccccccgagcccgagaaggccccccccgccgcccccaccagacccagcgccctggagctgaaggtggaggagctggaggagaagggcctgatcagaatcctgagaggccccggcgacgccgtgagcatcgagatcctgcccgtggccgtggccacccccagcggcggcgacgcccccacccccggcgtgcccaccggcagccccagccccgacctggcccccgccgccgagcccgcccccggcgccgccccccccccccccccccccctgcccggcctgcccagcccccaggaggccccccccagcgcccccccccaggccccccccctgcccggcagccccgagcccccccccgccccccccctgcccggcgacctgcccccccccccccccccccccccccccccccccggcaccgacggccccgtgcccccccccccccccccccccccccccccccccggcggcccccccgacgccctgggcagaagagacagcgagctgggccccggcgtgaaggccaagaagcccatccagaccaagttcagaatgcccctgctgaactgggtggccctgaagcccagccagatcaccggcaccgtgttcaccgagctgaacgacgagaaggtgctgcaggagctggacatgagcgacttcgaggagcagttcaagaccaagagccagggccccagcctggacctgagcgccctgaagagcaaggccgcccagaaggcccccagcaaggccaccctgatcgaggccaacagagccaagaacctggccatcaccctgagaaagggcaacctgggcgccgagagaatctgccaggccatcgaggcctacgacctgcaggccctgggcctggacttcctggagctgctgatgagattcctgcccaccgagtacgagagaagcctgatcaccagattcgagagagagcagagacccatggaggagctgagcgaggaggacagattcatgctgtgcttcagcagaatccccagactgcccgagagaatgaccaccctgaccttcctgggcaacttccccgacaccgcccagctgctgatgccccagctgaacgccatcatcgccgccagcatgagcatcaagagcagcgacaagctgagacagatcctggagatcgtgctggccttcggcaactacatgaacagcagcaagagaggcgccgcctacggcttcagactgcagagcctggacgccctgctggagatgaagagcaccgacagaaagcagaccctgctgcactacctggtgaaggtgatcgccgagaagtacccccagctgaccggcttccacagcgacctgcacttcctggacaaggccggcagcgtgagcctggacagcgtgctggccgacgtgagaagcctgcagagaggcctggagctgacccagagagagttcgtgagacaggacgactgcatggtgctgaaggagttcctgagagccaacagccccaccatggacaagctgctggccgacagcaagaccgcccaggaggccttcgagagcgtggtggagtacttcggcgagaaccccaagaccaccagccccggcctgttcttcagcctgttcagcagattcatcaaggcctacaagaaggccgagcaggaggtggagcagtggaagaaggaggccgccgcccaggaggccggcgccgacacccccggcaagggcgagccccccgcccccaagagcccccccaaggccagaagaccccagatggacctgatcagcgagctgaagagaagacagcagaaggagcccctgatctacgagagcgacagagacggcgccatcgaggacatcatcaccgacctgagaaaccagccctacatcagagccgacaccggcagaagaagcgccagaagaagaccccccggcccccccctgcaggtgaccagcgacctgagcctgtag

SEQ ID NO: 160101 - DNA, 3303 bp, Artificial Sequence
  derived and/or modified sequence
atgggcaacgccgccggcagcgccgagcagcccgccggccccgccgcccccccccccaagcagcccgccccccccaagcagcccatgcccgccgccggcgagctggaggagagattcaacagagccctgaactgcatgaacctgccccccgacaaggtgcagctgctgagccagtacgacaacgagaagaagtgggagctgatctgcgaccaggagagattccaggtgaagaacccccccgccgcctacatccagaagctgaagagctacgtggacaccggcggcgtgagcagaaaggtggccgccgactggatgagcaacctgggcttcaagagaagagtgcaggagagcacccaggtgctgagagagctggagaccagcctgagaaccaaccacatcggctgggtgcaggagttcctgaacgaggagaacagaggcctggacgtgctgctggagtacctggccttcgcccagtgcagcgtgacctacgacatggagagcaccgacaacggcgccagcaacagcgagaagaacaagcccctggagcagagcgtggaggacctgagcaagggcccccccagcagcgtgcccaagagcagacacctgaccatcaagctgacccccgcccacagcagaaaggccctgagaaacagcagaatcgtgagccagaaggacgacgtgcacgtgtgcatcatgtgcctgagagccatcatgaactaccagagcggcttcagcctggtgatgaaccaccccgcctgcgtgaacgagatcgccctgagcctgaacaacaagaaccccagaaccaaggccctggtgctggagctgctggccgccgtgtgcctggtgagaggcggccacgacatcatcctggccgccttcgacaacttcaaggaggtgtgcggcgagcagcacagattcgagaagctgatggagtacttcagaaacgaggacagcaacatcgacttcatggtggcctgcatgcagttcatcaacatcgtggtgcacagcgtggagaacatgaacttcagagtgttcctgcagtacgagttcacccacctgggcctggacctgtacctggagagactgagactgaccgagagcgacaagctgcaggtgcagatccaggcctacctggacaacatcttcgacgtgggcgccctgctggaggacaccgagaccaagaacgccgtgctggagcacatggaggagctgcaggagcaggtggccctgctgaccgagagactgagagacgccgagaacgagagcatggccaagatcgccgagctggagaagcagctgagccaggccagaaaggagctggagaccctgagagagagattcagcgagagcaccgccatgggccccagcagaagaccccccgagcccgagaaggccccccccgccgcccccaccagacccagcgccctggagctgaaggtggaggagctggaggagaagggcctgatcagaatcctgagaggccccggcgacgccgtgagcatcgagatcctgcccgtggccgtggccacccccagcggcggcgacgcccccacccccggcgtgcccaccggcagccccagccccgacctggcccccgccgccgagcccgcccccggcgccgccccccccccccccccccccctgcccggcctgcccagcccccaggaggccccccccagcgcccccccccaggccccccccctgcccggcagccccgagcccccccccgccccccccctgcccggcgacctgcccccccccccccccccccccccccccccccccggcaccgacggccccgtgcccccccccccccccccccccccccccccccccggcggcccccccgacgccctgggcagaagagacagcgagctgggccccggcgtgaaggccaagaagcccatccagaccaagttcagaatgcccctgctgaactgggtggccctgaagcccagccagatcaccggcaccgtgttcaccgagctgaacgacgagaaggtgctgcaggagctggacatgagcgacttcgaggagcagttcaagaccaagagccagggccccagcctggacctgagcgccctgaagagcaaggccgcccagaaggcccccagcaaggccaccctgatcgaggccaacagagccaagaacctggccatcaccctgagaaagggcaacctgggcgccgagagaatctgccaggccatcgaggcctacgacctgcaggccctgggcctggacttcctggagctgctgatgagattcctgcccaccgagtacgagagaagcctgatcaccagattcgagagagagcagagacccatggaggagctgagcgaggaggacagattcatgctgtgcttcagcagaatccccagactgcccgagagaatgaccaccctgaccttcctgggcaacttccccgacaccgcccagctgctgatgccccagctgaacgccatcatcgccgccagcatgagcatcaagagcagcgacaagctgagacagatcctggagatcgtgctggccttcggcaactacatgaacagcagcaagagaggcgccgcctacggcttcagactgcagagcctggacgccctgctggagatgaagagcaccgacagaaagcagaccctgctgcactacctggtgaaggtgatcgccgagaagtacccccagctgaccggcttccacagcgacctgcacttcctggacaaggccggcagcgtgagcctggacagcgtgctggccgacgtgagaagcctgcagagaggcctggagctgacccagagagagttcgtgagacaggacgactgcatggtgctgaaggagttcctgagagccaacagccccaccatggacaagctgctggccgacagcaagaccgcccaggaggccttcgagagcgtggtggagtacttcggcgagaaccccaagaccaccagccccggcctgttcttcagcctgttcagcagattcatcaaggcctacaagaaggccgagcaggaggtggagcagtggaagaaggaggccgccgcccaggaggccggcgccgacacccccggcaagggcgagccccccgcccccaagagcccccccaaggccagaagaccccagatggacctgatcagcgagctgaagagaagacagcagaaggagcccctgatctacgagagcgacagagacggcgccatcgaggacatcatcaccgtgatcaagaccgtgcccttcaccgccagaaccggcaagagaaccagcagactgctgtgcgaggccagcctgggcgaggagatgcccctgtag

SEQ ID NO: 160102 - DNA, 3959 bp, Artificial Sequence
  derived and/or modified sequence
cggacggggccgccccgatgggacgccgcgctccggcccctgcgcgccgctgagccgagcgccccccgctgccgagacccccgccgccaccgccagccgctgccccctcgcccccgcccgggccgggagcctcgtccccgtcccccggaaagctggatttccgaggctggaggcgcctggccggctgggtggggaccaccatgggcaacgcggccggcagcgccgagcagcccgcgggccccgccgcgccgccccccaagcagcccgcgcctcccaagcagccgatgcccgcggccggagagctggaggagaggttcaaccgcgccctgaactgcatgaacttgcccccagacaaggtccagctgctgagccagtatgacaacgagaagaagtgggagctcatctgtgatcaggagcggtttcaagtcaagaatccccccgcagcctacatccagaagctgaagagctatgtggatactggtggggtcagccgaaaggtagcagctgattggatgtccaacctggggtttaagaggcgagttcaggagtccacgcaggtgctacgggagctggagacctccctgaggaccaaccacattgggtgggtgcaggagttcctcaatgaagagaaccgtggcctggatgtgctgctcgagtacctggcctttgcccagtgctctgtcacgtatgacatggagagcacagacaacggggcttccaactcagagaaaaacaagcccctggagcagtctgtggaagacctcagcaagggtccaccctcctccgtgcccaaaagccgccacctgaccatcaagctgaccccagcccacagcaggaaggccctgcggaattcccgcatcgtcagccagaaggacgacgtccacgtctgtattatgtgcctacgcgccatcatgaactaccagtctggcttcagccttgtcatgaaccacccagcctgtgtcaatgagattgctctgagcctcaacaacaagaaccccagaaccaaggctctggtgctggagctgctggcggccgtgtgcttggtgcggggaggacatgacatcatccttgcagcctttgacaacttcaaggaggtgtgtggggagcagcaccgctttgaaaagctgatggaatatttccggaatgaggacagcaacatcgacttcatggtggcctgcatgcagttcatcaacattgtggtacattcggtggagaacatgaacttccgtgtcttcctgcaatatgagttcacccacttgggcctggacctgtacttggagaggcttcggctcaccgagagtgacaagctgcaggtgcagatccaggcgtacctggacaatatttttgatgtgggggcgctgctggaggacacagagaccaagaacgctgtgctggagcacatggaggaactgcaggagcaagtggcgctgctgacagagcggcttcgggacgcggagaacgaatccatggccaagattgcagaactggaaaaacagctaagccaggcgcgcaaggagttggagaccctgcgggagcgcttcagcgaatcgaccgccatggggccctccaggcgtcccccagagcctgagaaagcgcctcccgctgccccgacgcggccctcggccctggagctgaaggtggaggagctggaggagaaggggttaatccgtattctgcgggggccgggggatgctgtctccatcgagatcctccccgtcgctgtggcaactccgagcggcggtgatgctccgactccgggggtgccgaccggctcccccagcccagatctcgcacctgcagcagagccggctcccggagcagcgccaccgccgccgcccccactgcccggcctcccctccccgcaggaagccccgccctctgcgcccccacaggccccgcctctccctggcagcccggagcccccgcctgcgccgccgctgcccggagacctgccgcccccacccccgccaccgccaccacctccgggcactgacgggccggtgcctccgccgccgccgccgccgccgccgcctcccggaggtcctcctgatgccctaggaagacgcgactcagaattgggcccaggagtgaaggccaagaagcccatccagactaagttccgaatgccactcttgaactgggtggcactgaaacccagccagatcaccggcactgtcttcacagagctcaatgatgagaaggtgctgcaggagctagacatgagtgattttgaggaacagttcaagaccaagtcccaaggccccagcctggacctcagcgctctcaagagtaaggcagcccagaaggcccccagcaaggcgacactcattgaggccaaccgggccaagaacttggccatcaccctgcggaagggcaacctgggggccgagcgcatctgccaagccattgaggcgtacgacctgcaggctctgggcctggacttcctggagctgctgatgcgcttcctgcccacagagtatgagcgcagcctcatcacccgctttgagcgggagcagcggccaatggaggagctgtcagaggaggaccgcttcatgctatgcttcagccgcatcccgcgcctgccggagcgcatgaccacactcaccttcctgggcaacttcccggacacagcccagctgctcatgccgcaactgaatgccatcattgcagcctcaatgtccatcaagtcctctgacaaactccgccagatcctggagattgtcctggcctttggcaactacatgaacagtagcaagcgtggggcagcctatggcttccggctccagagcctggatgcgctgttggagatgaagtcgactgatcgcaagcagacgctgctgcactacctggtgaaggtcattgctgagaagtacccgcaactcacaggcttccacagcgacctgcacttcctggacaaggcgggctcagtgtccctggacagtgtcctggcggacgtgcgctccctgcagcgaggcctagagttgacacagagagagtttgtgcggcaggatgactgcatggtgctcaaggagttcctgagggccaactcgcccaccatggacaagctgctggcagacagcaagacggctcaggaggcctttgagtctgtggtggagtacttcggagagaaccccaagaccacatccccaggcctgttcttctccctctttagccgcttcattaaggcctacaagaaagctgagcaggaggtggaacagtggaaaaaagaagccgctgcccaggaggcaggcgctgataccccgggcaaaggggagcccccagcacccaagtcaccgccaaaggcccggcggccacagatggacctcatctctgagctgaaacggaggcagcagaaggagccactcatttatgagagcgaccgtgatggggccattgaagacatcatcacagtgatcaagacggtgcccttcacggcccgcaccggcaagcggacatcccggctcctctgtgaggccagcctgggagaagagatgcccctctagcccctcagatctgcggaaccagccctacatccgcgcagacacaggccgccgcagtgcccgtcggcgtcccccgggccccccactgcaggtcacctccgacctctcgctgtagccgctatttctgcaggtggattctgcaggggtgtggggccgtggacaggctgaggctcaaggaaggtggtcctcagctcggctggccgggcagcccctcctccgctgtggcccgcctcaaacgggctggtgcatcctcctcttggccacagagggcagcatcgcccgccccttcccccaaatgctgcttgcagcacccaccctaaagccccctccaaatagccatacttagcctcagcaggagcctggcctgtaacttataaagtgcacctcgcccccgcaagccccagccccgaggaccgtccatggaccttatttttatatgagattaataaagatgtttgc

SEQ ID NO: 160103 - DNA, 3315 bp, Artificial Sequence
  derived and/or modified sequence
atgggcaacgccgcagggtctgctgaacagcccgccgggccggcagcaccccctcccaaacagcccgccccccccaagcagcctatgccagctgcgggggagctggaggaaaggttcaatcgagctctcaactgtatgaatctcccccctgataaagtgcagttgcttagccagtatgacaatgaaaaaaagtgggaattgatttgtgatcaggaacggttccaagtgaagaaccctcctgccgcctacatccagaagctgaagtcctacgtagacaccggaggggtgtcacgaaaggtggctgccgactggatgtcaaatttggggtttaaaaggagggtccaagaatcaacccaggtcctcagagaactagagactagtctcagaaccaaccacattgggtgggtgcaggaattcttaaatgaggagaacagaggactggacgtgttgctcgagtatcttgcattcgcccagtgtagcgtgacgtatgacatggagtctactgataacggtgcttccaatagtgagaagaataaacccctcgaacaaagcgtagaagaccttagcaaaggaccaccctcttccgtgccaaagagccgacatctcacaatcaaactcacccctgcgcacagcaggaaggccctgcggaactctaggatcgtttctcagaaggacgacgttcatgtctgtattatgtgcctcagggctataatgaactaccagagtggcttttctctggtgatgaatcaccccgcctgtgtcaatgagattgctctgagcctcaataataagaaccctcggacgaaggccctagtgctagagctcttagccgccgtctgcctcgttcgaggaggccatgacatcatactggctgcgtttgacaactttaaggaagtgtgcggcgagcagcaccgatttgagaagctgatggagtactttcggaatgaagattcgaacattgactttatggttgcatgtatgcagttcataaatattgtggtccactctgtggaaaacatgaactttcgcgtttttctccaatatgaattcacacacctgggcctggatttatatcttgaacgcctgaggttaacagaatccgacaaactccaggtgcagatacaagcttacctcgacaacatcttcgatgtaggcgccctgcttgaagatacagagactaagaacgccgtgctcgagcacatggaggaattacaggaacaggttgcgttgctcacggagcggctgcgtgatgccgagaacgagtccatggccaagatcgccgaactggaaaagcagttgtcacaggccagaaaggaactggagaccttgagagaacggtttagcgagagcacagctatgggccccagccgccgcccacctgagccagagaaagccccacccgctgctcctactaggccaagtgcgcttgagctgaaagtagaggagctggaggaaaaaggcctcattcggattctgcgtggccccggcgatgccgtgtccattgaaattctccctgtggcagtagcaaccccctctggtggcgacgctccaacacctggcgtgccgactggtagcccttcccccgatctggcaccggctgcagagcccgcgcccggcgctgccccccccccaccgccacccctgcctggacttccctcccctcaagaggctccaccctctgccccaccccaagccccaccactgcctgggtcacccgagccaccgccagcaccccccctgcccggcgacctccctcctccgccgcccccccccccacctccccctggcacagacggtccagtgcctccccctcccccacccccccccccaccacccggagggccccccgacgcactcggtcgcagagattccgaactgggaccaggtgttaaggcaaagaagcctattcaaacaaagtttagaatgcccctcctcaattgggtcgcactcaaaccaagccagattactggtacagtgtttaccgagctcaatgacgagaaggtcctacaagagttggacatgtccgattttgaagaacagttcaagacaaagtctcagggtccatctctggacctgtctgcactcaaaagtaaggccgctcagaaagctcccagcaaggcgacactgatcgaggcaaatagggccaagaatctggctataacactgaggaagggtaacttaggagctgaacgtatctgtcaggctatcgaagcttatgaccttcaggctttagggctcgatttcctggagctcctgatgagattcttgcctaccgagtatgaaaggagcctgatcacgcgcttcgagcgcgaacagaggccgatggaggagttgtctgaagaagaccgctttatgctgtgctttagccgcataccacgactgccagagaggatgactaccttgacctttttaggtaacttccccgacactgcacagctgttgatgccccagttaaatgccattatcgccgcttctatgtccatcaaatccagtgacaagcttagacaaattttagaaatcgtcttggcttttggaaattatatgaactcctccaagagaggagcagcatatggctttaggctgcaaagcttggatgccctacttgagatgaaatcaacagaccgtaagcagacactgctgcactatctggtgaaggttatcgccgagaagtaccctcagcttacaggtttccactccgatttacattttctcgataaagcaggctcagttagtctggattctgtgctagcagacgtccgcagtctgcagcgcggactggagctcacacagcgggagttcgtgaggcaagatgattgtatggtgctgaaagaattcttacgcgctaacagcccgacaatggataaactgctggcagactcaaaaactgcacaggaggcttttgaatctgtggtggaatattttggagagaatcccaagaccacaagcccaggcttgttcttttcattgttcagcagatttattaaagcctacaagaaggcagaacaggaagtggaacagtggaagaaggaggcagccgcacaggaggccggcgccgatactcctggtaagggggaacccccagcccctaaatctcccccaaaagccaggaggccccagatggatttgatttccgagctcaagagaagacagcaaaaagaaccattgatctacgagtcagatcgggacggggcaattgaagatattataacagaccttcggaaccaaccgtatattagggctgataccgggcggaggagtgcccgacggcgtccacccgggcctccactccaggtgaccagcgacctttccctctag

SEQ ID NO: 160104 - DNA, 3303 bp, Artificial Sequence
  derived and/or modified sequence
atgggcaacgctgcgggcagtgctgaacaacctgccggaccggccgccccaccaccaaagcagccagccccccctaagcaacccatgcccgccgctggagagctggaggagaggttcaatcgtgccttaaactgtatgaatctaccgcctgataaggtgcaactcctgtcacagtatgacaacgagaagaaatgggagctgatttgtgaccaggaacggtttcaggtcaagaatcccccagcggcttatatccagaaacttaaaagttacgtggacacgggaggggtttcgagaaaggtagccgccgattggatgtctaatttaggatttaaaagaagggtccaggagtctacccaggtcctgagagagttggaaacaagtctcaggacaaatcatattggctgggttcaggaattcctgaatgaagaaaacagaggtttagatgtcctactagagtacctagctttcgctcagtgttccgtgacttacgacatggagtctactgacaacggagccagtaacagcgagaagaacaagcctctggaacagtccgtggaggatttgagcaaaggacctccgagcagcgtgcctaagagccgtcacctgaccatcaaacttactcctgcccacagccgcaaggccctaagaaacagccggatcgtgagccagaaagacgacgtgcatgtgtgcataatgtgtttgcgagccatcatgaactaccagtccgggttttcactggtgatgaaccatcccgcatgtgtcaatgagattgcactcagcctgaacaacaagaatccaaggaccaaggccctggtgctcgaacttcttgctgccgtctgtctcgtgagaggaggccacgacattatcctggcagcttttgacaactttaaggaggtttgcggagaacaacatagattcgagaagctcatggagtatttccggaatgaggacagcaacatcgacttcatggttgcatgtatgcagttcatcaacattgtggtgcatagtgtcgagaacatgaacttcagggtgtttcttcagtatgaatttactcacctggggcttgacctttacctggaaagacttagactgactgagagtgataaactgcaggttcagattcaagcttatctggacaacatattcgacgtcggggcgttgctcgaggacacggagacaaaaaatgcggttctggaacacatggaggaacttcaagaacaagtggccctcttgaccgagagactgagggatgctgaaaacgaatccatggccaaaatcgctgagctggagaagcagctgagccaggccaggaaggagctggagaccttaagagagcgttttagcgaatccacggccatgggcccatcacgcagacctccagaacccgaaaaagcgcccccagcagcgccaaccagacctagtgccctcgagctgaaggttgaggaactggaagaaaagggtctcatacgcatactgcgaggccccggtgatgccgtttcaatcgagatcctccctgtcgccgtggccacgccatccggtggtgacgcccctactcctggagtgccaactggttctccatcacctgacctagctcctgcagcagagccggcccctggtgcagcaccccccccacctcctccactccctggccttcctagcccccaggaggccccacctagtgccccccctcaggctccgcctcttcctggtagccccgaacctcctcctgcgccccccctccctggggacctgcctccacctccacctcctcctcctcctcccccaggcaccgacggcccagtgccaccgccccccccgccgccccctcccccaccaggcgggcctccagacgccctcggccggagggactctgaattgggcccaggggttaaggccaagaagccaattcaaacaaaatttcgcatgcccctgttgaactgggtcgcactgaaaccatcacagattaccggaactgtgttcaccgagttaaatgacgagaaagtgctgcaggagctggacatgtccgacttcgaggaacagtttaagaccaagtctcagggtccatcgctggatctcagtgctctcaagagcaaggcagcgcagaaggctccctcaaaagccactctaatcgaggccaatcgcgcgaagaacctcgctatcactctgagaaaagggaatttgggtgccgaaagaatatgccaggcaattgaagcctatgatctacaggcacttggccttgattttctcgagctgttgatgcgttttctgcccacagaatacgagagaagcctgattactaggtttgagcgagaacagcggccaatggaagagctgtctgaggaggatagattcatgctctgtttctcgcgaattccccgtttgcccgaacgaatgacgacgttgactttcctcggcaattttcctgacaccgcccaactattgatgccccagctcaacgcaatcattgctgctagcatgtctattaaaagttctgataagctccggcaaatcctggagattgtgttagccttcggcaattacatgaatagttcaaaacgtggggccgcttatgggtttaggctgcagtcgttggatgctctcctagagatgaaaagcactgaccggaagcagaccctgttgcactacctcgtgaaggtgattgccgaaaagtaccctcagctgaccgggttccactcagatttgcactttctcgataaggctggatcggtttccctggactcagtgttggccgatgttagaagcctccagcgtgggctcgaactcacccagcgggagtttgtacgtcaggacgactgcatggtcttgaaagagtttttacgggccaatagtccaaccatggacaaacttcttgccgattccaagacagctcaggaagcattcgagtccgtggtcgagtacttcggggaaaaccccaaaacaaccagcccagggttgtttttctctcttttcagccgcttcataaaggcctataaaaaggcagaacaggaggtggaacaatggaagaaggaggcagccgcgcaggaagccggagcagatacccccggtaaaggcgaaccacccgcccctaagtccccaccaaaagcaaggagaccccagatggatctgatttctgagctgaagcgacgtcagcagaaagagccccttatctatgagtccgatagggacggcgcaattgaagacataatcacagtcatcaaaacagtgccctttactgcaagaaccgggaagcgaacctcacgtttgctgtgcgaagcctcactaggcgaagaaatgccattgtag

SEQ ID NO: 160105 - DNA, 3315 bp, Artificial Sequence
  derived and/or modified sequence
atgggaaatgctgctggcagcgctgagcagcctgctggccctgctgcccccccacccaagcagcctgccccacccaagcagcccatgcctgctgctggggagctggaggagcgcttcaacagagccctgaactgcatgaacctgcccccagacaaggtgcagctgctgagccagtatgacaatgagaagaagtgggagctgatctgtgaccaggagcgcttccaggtgaagaaccccccagctgcctacatccagaagctgaagagctatgtggacacaggaggagtgtccaggaaggtggccgctgactggatgagcaacctgggcttcaagagaagagtgcaggagagcacccaggtgctgcgggagctggagaccagcctgcggaccaaccacatcggctgggtgcaggagttcctgaatgaagaaaatagaggcctggatgtgctgctggagtacctggcctttgcccagtgcagcgtgacctatgacatggagagcacagacaacggggccagcaacagcgagaagaacaagcccctggagcagagcgtggaggacctgagcaagggcccccccagctctgtgcccaagagccgccacctgaccatcaagctgaccccagcccacagcaggaaggccctgaggaacagccgcatcgtgtcccagaaggatgatgtgcacgtgtgcatcatgtgcctgcgggccatcatgaactaccagagcggcttcagcctggtgatgaaccacccagcctgtgtgaatgaaattgccctgagcctgaacaacaagaaccccaggaccaaggccctggtgctggagctgctggccgctgtgtgcctggtgcggggcggccatgacatcatcctggccgcctttgacaacttcaaggaggtgtgtggggagcagcacagatttgagaagctgatggagtacttcagaaatgaagacagcaacatcgacttcatggtggcctgcatgcagttcatcaacatcgtggtgcacagcgtggagaacatgaacttccgggtcttcctgcagtatgagttcacccacctgggcctggacctgtacctggagcggctgcggctgacagaaagtgacaagctgcaggtgcagatccaggcctacctggacaacatctttgatgtgggcgccctgctggaggacacagagaccaagaatgctgtgctggagcacatggaggagctgcaggagcaggtggccctgctgacagagcggctgagagatgctgaaaatgaatccatggccaagattgctgagctggagaagcagctgagccaggccaggaaggagctggagaccctgcgggagcgcttcagcgagagcacagccatgggccccagcagaagacctcctgagcctgagaaggcccccccagctgcccccacccggcccagcgccctggagctgaaggtggaggagctggaggagaagggcctcatccgcatcctgcggggccctggagatgctgtgtccattgagatcctgcctgtggccgtggccacccccagcggaggagatgcccccaccccaggagtgcccaccggcagccccagcccagacctggccccagctgctgagcccgcccctggggccgcccctcctcctcctccacccctgcccggcctgcccagcccccaggaggccccacccagcgccccaccccaggccccacccctgcccggcagccctgagcccccaccagccccacccctgcccggggacctgcccccacctcctcctcctcctcctcctcctcctggaacagatggccctgtgcccccacctcctcctcctcctcctcctcctcctgggggccccccagatgccctgggcagaagagacagcgagctgggccctggggtgaaggccaagaagcccatccagaccaagttcaggatgcccctgctgaactgggtggccctgaagcccagccagatcaccggcaccgtcttcacagagctgaatgatgagaaggtgctgcaggagctggacatgtctgactttgaggagcagttcaagaccaagagccagggccccagcctggacctgagcgccctgaagagcaaggccgcccagaaggcccccagcaaggccaccctcatcgaggccaacagagccaagaacctggccatcaccctgaggaagggcaacctgggcgctgagcgcatctgccaggccatcgaggcctatgacctgcaggccctgggcctggacttcctggagctgctgatgaggttcctgcccacagaatatgaaagaagcctcatcaccaggtttgagcgggagcagaggcccatggaggagctgtctgaagaagatcgcttcatgctgtgcttcagccgcatcccccggctgcctgagaggatgaccaccctgaccttcctgggcaacttcccagacacagcccagctgctgatgccccagctgaatgccatcatcgccgcctccatgagcatcaagagcagtgacaagctgcggcagatcctggagatcgtgctggccttcggcaactacatgaacagcagcaagagaggagctgcctacggcttccggctgcagagcctggatgccctgctggagatgaagagcacagacaggaagcagaccctgctgcactacctggtgaaggtgattgctgagaagtacccccagctgaccggcttccacagcgacctgcacttcctggacaaggccggctctgtgtccctggacagcgtgctggctgatgtgcgcagcctgcagaggggcctggagctgacccagcgggagtttgtgcggcaggatgactgcatggtgctgaaggagttcctgcgggccaacagccccaccatggacaagctgctggccgacagcaagacagcccaggaggcctttgaatctgtggtggagtactttggagagaaccccaagaccaccagccctggcctcttcttcagcctcttcagccgcttcatcaaggcctacaagaaggccgagcaggaggtggagcagtggaagaaggaggccgccgcccaggaggccggggctgacaccccaggaaaaggagagcccccagcccccaagagcccccccaaggcccggcggccccagatggacctgatcagcgagctgaagaggcggcagcagaaggagcccctcatctatgaaagtgacagagatggagccatcgaggacatcatcacagacctgaggaaccagccctacatccgggctgacaccggccgccgcagcgccaggagaagacctcctggcccccccctgcaggtgaccagtgacctgagcctgtag

SEQ ID NO: 160106 - DNA, 3303 bp, Artificial Sequence
  derived and/or modified sequence
atgggaaatgctgctggcagcgctgagcagcctgctggccctgctgcccccccacccaagcagcctgccccacccaagcagcccatgcctgctgctggggagctggaggagcgcttcaacagagccctgaactgcatgaacctgcccccagacaaggtgcagctgctgagccagtatgacaatgagaagaagtgggagctgatctgtgaccaggagcgcttccaggtgaagaaccccccagctgcctacatccagaagctgaagagctatgtggacacaggaggagtgtccaggaaggtggccgctgactggatgagcaacctgggcttcaagagaagagtgcaggagagcacccaggtgctgcgggagctggagaccagcctgcggaccaaccacatcggctgggtgcaggagttcctgaatgaagaaaatagaggcctggatgtgctgctggagtacctggcctttgcccagtgcagcgtgacctatgacatggagagcacagacaacggggccagcaacagcgagaagaacaagcccctggagcagagcgtggaggacctgagcaagggcccccccagctctgtgcccaagagccgccacctgaccatcaagctgaccccagcccacagcaggaaggccctgaggaacagccgcatcgtgtcccagaaggatgatgtgcacgtgtgcatcatgtgcctgcgggccatcatgaactaccagagcggcttcagcctggtgatgaaccacccagcctgtgtgaatgaaattgccctgagcctgaacaacaagaaccccaggaccaaggccctggtgctggagctgctggccgctgtgtgcctggtgcggggcggccatgacatcatcctggccgcctttgacaacttcaaggaggtgtgtggggagcagcacagatttgagaagctgatggagtacttcagaaatgaagacagcaacatcgacttcatggtggcctgcatgcagttcatcaacatcgtggtgcacagcgtggagaacatgaacttccgggtcttcctgcagtatgagttcacccacctgggcctggacctgtacctggagcggctgcggctgacagaaagtgacaagctgcaggtgcagatccaggcctacctggacaacatctttgatgtgggcgccctgctggaggacacagagaccaagaatgctgtgctggagcacatggaggagctgcaggagcaggtggccctgctgacagagcggctgagagatgctgaaaatgaatccatggccaagattgctgagctggagaagcagctgagccaggccaggaaggagctggagaccctgcgggagcgcttcagcgagagcacagccatgggccccagcagaagacctcctgagcctgagaaggcccccccagctgcccccacccggcccagcgccctggagctgaaggtggaggagctggaggagaagggcctcatccgcatcctgcggggccctggagatgctgtgtccattgagatcctgcctgtggccgtggccacccccagcggaggagatgcccccaccccaggagtgcccaccggcagccccagcccagacctggccccagctgctgagcccgcccctggggccgcccctcctcctcctccacccctgcccggcctgcccagcccccaggaggccccacccagcgccccaccccaggccccacccctgcccggcagccctgagcccccaccagccccacccctgcccggggacctgcccccacctcctcctcctcctcctcctcctcctggaacagatggccctgtgcccccacctcctcctcctcctcctcctcctcctgggggccccccagatgccctgggcagaagagacagcgagctgggccctggggtgaaggccaagaagcccatccagaccaagttcaggatgcccctgctgaactgggtggccctgaagcccagccagatcaccggcaccgtcttcacagagctgaatgatgagaaggtgctgcaggagctggacatgtctgactttgaggagcagttcaagaccaagagccagggccccagcctggacctgagcgccctgaagagcaaggccgcccagaaggcccccagcaaggccaccctcatcgaggccaacagagccaagaacctggccatcaccctgaggaagggcaacctgggcgctgagcgcatctgccaggccatcgaggcctatgacctgcaggccctgggcctggacttcctggagctgctgatgaggttcctgcccacagaatatgaaagaagcctcatcaccaggtttgagcgggagcagaggcccatggaggagctgtctgaagaagatcgcttcatgctgtgcttcagccgcatcccccggctgcctgagaggatgaccaccctgaccttcctgggcaacttcccagacacagcccagctgctgatgccccagctgaatgccatcatcgccgcctccatgagcatcaagagcagtgacaagctgcggcagatcctggagatcgtgctggccttcggcaactacatgaacagcagcaagagaggagctgcctacggcttccggctgcagagcctggatgccctgctggagatgaagagcacagacaggaagcagaccctgctgcactacctggtgaaggtgattgctgagaagtacccccagctgaccggcttccacagcgacctgcacttcctggacaaggccggctctgtgtccctggacagcgtgctggctgatgtgcgcagcctgcagaggggcctggagctgacccagcgggagtttgtgcggcaggatgactgcatggtgctgaaggagttcctgcgggccaacagccccaccatggacaagctgctggccgacagcaagacagcccaggaggcctttgaatctgtggtggagtactttggagagaaccccaagaccaccagccctggcctcttcttcagcctcttcagccgcttcatcaaggcctacaagaaggccgagcaggaggtggagcagtggaagaaggaggccgccgcccaggaggccggggctgacaccccaggaaaaggagagcccccagcccccaagagcccccccaaggcccggcggccccagatggacctgatcagcgagctgaagaggcggcagcagaaggagcccctcatctatgaaagtgacagagatggagccatcgaggacatcatcaccgtcatcaagacagtgcccttcaccgccaggacaggcaagaggaccagccggctgctgtgtgaggccagcctgggggaggagatgcccctgtag

SEQ ID NO: 160107 - DNA, 3315 bp, Artificial Sequence
  derived and/or modified sequence
atgggcaacgccgccggcagcgccgagcagcccgccggccccgccgctcccccccctaagcagcccgctcccccaaagcagcccatgcccgccgcaggcgagctggaggaacgcttcaatcgcgccctgaattgcatgaacctgcccccagataaagtgcaattgctctcacagtacgacaacgagaaaaaatgggaactaatttgtgatcaagagcgtttccaggttaagaatcccccagctgcatacatacaaaagctcaaatcctatgtagatactggaggcgtgtctcgcaaggttgctgccgattggatgtccaacctggggtttaagagaagagtgcaggagtccactcaggtgctccgagagctcgagacaagcttgaggacgaaccatattggctgggttcaggaatttctgaacgaggaaaatcggggactggacgtgctcctcgagtatttggccttcgcccagtgctcagtgacttacgatatggaatcaaccgataacggagcaagcaattctgaaaaaaacaagccgctggagcaatcagtggaagatcttagcaaaggacctcccagcagcgtgccaaagagtcgccacctgaccattaaactgactcctgcccattcccgtaaagccctgcgaaatagtcggatcgtgtcccagaaggatgacgtccatgtgtgcatcatgtgcttaagggcgattatgaattatcaatcaggtttcagcctggtcatgaatcatccagcgtgtgttaacgagatcgcgctgtcactgaataacaagaacccccgaaccaaggctcttgtgctggagcttctcgccgcagtttgcttggtgagaggcggacatgatatcatcctcgctgcctttgacaattttaaggaggtgtgtggagagcagcaccgattcgagaaactaatggagtacttccgcaatgaggatagcaacatagactttatggtagcctgtatgcagttcatcaatattgtggtccacagcgtggagaacatgaatttcagggtgttcctccagtacgagttcacccatctggggctcgatctctacctggaaaggctgcggcttacggagtccgacaaactgcaagtgcaaatccaggcctatctggacaacatttttgatgtgggagctcttctggaggacaccgagacaaagaacgctgttctcgagcatatggaggagctgcaggagcaggtggcactcttgaccgaacggcttcgagatgctgagaatgagtccatggcaaaaatcgccgaactcgaaaaacagctgagccaggcaagaaaggagctggaaacactaagagagagatttagcgagtctacagccatgggacccagcagaaggcctccagagccagagaaagcgcccccagctgctccaaccagaccctcagccctcgagttgaaggtcgaggaactggaagagaaagggctcatccggatcctcaggggccccggagatgcagtatcgatagaaatcctgcccgtagccgtggcaacgccttccggaggagatgctcccactcctggagtcccaaccggctcacccagccctgatctcgcccctgccgcagagcccgcgcctggagcagcgcccccgccgcctccaccactgcctggattgccctctcctcaggaagctcccccatccgctccacctcaggctccccctctcccaggtagtcccgagccccctcccgcccctccactgcccggtgatctacctccgccaccgcctccacctcctccaccacctggtaccgatggacccgttccgcctccacccccaccaccaccacctccccccggaggaccaccagacgctctgggacgacgcgacagcgagctcggcccgggagtcaaggccaaaaagcccatccagacaaaattccggatgccacttcttaattgggtcgccctcaagccctcccaaatcaccggaacagtattcaccgagttaaatgatgaaaaggtcctgcaggagcttgacatgagcgactttgaggagcagttcaagacgaagagccagggcccttccctagacctgagcgcactcaagagcaaagcggcacagaaggcaccgtccaaagccacgctgatcgaggccaacagagctaagaatctcgccataacactgagaaagggaaacctgggagccgagcgtatctgccaggccatagaggcttacgatctgcaagccctcggactcgattttctggaactgctcatgaggtttctcccgaccgaatacgaacggtctcttattacacggtttgaaagggaacagagacccatggaggaactgtcagaagaagacaggtttatgctgtgctttagtagaatccctcggctcccagaaagaatgactacattgacgtttttaggaaatttccccgacaccgcacagcttctgatgccccagctcaacgccattatcgcggcctccatgagtattaagagctccgataaacttaggcagatcttggaaattgtcttagcctttggtaactatatgaactcatcgaaacgcggagctgcctatggctttaggctgcaaagcctcgacgctctattagagatgaaatcaaccgaccgaaagcagactctgctccactacctggtaaaagtcattgcagaaaaatacccccagttgacggggttccattctgatctgcattttttagataaggcaggctctgtaagtcttgatagtgtcctggctgatgttcgtagcctccagcggggactcgagctcacgcagagagagttcgttcgccaggacgactgtatggtcctgaaagagttcctgcgagcaaattctcccacaatggataaacttttagctgatagcaagactgcacaggaggccttcgagagcgtcgtggagtacttcggggaaaatcctaagaccacctcccccgggctgtttttttctctgttctctaggttcattaaggcctacaagaaggctgaacaggaggtggaacaatggaaaaaagaagccgcagcccaggaagctggcgccgatacccccggtaaaggggaacctccagctcccaaatcacccccaaaagcccgccggcctcaaatggaccttatctccgagctgaagaggcgtcaacagaaggagcccctcatctacgagtcagatcgtgatggagccattgaggatataataacagacctgcgaaaccagccttatattagggctgacacagggcggcggtccgcaagaagacgacctccaggaccccccctgcaggttacttccgacttaagcctgtag

SEQ ID NO: 160108 - DNA, 3303 bp, Artificial Sequence
  derived and/or modified sequence
atgggcaacgccgccggcagcgccgagcagcccgccggccccgccgccccaccaccgaagcaacccgcccctccaaagcagcccatgcctgcagctggagaattagaagaacgatttaaccgggctctcaactgtatgaacctgccccctgacaaagtgcagctgctgagccagtacgacaatgagaaaaaatgggagctgatatgtgaccaggaacgtttccaggtgaaaaacccgcccgccgcgtacattcagaagctgaaatcttatgtagataccgggggggtcagtaggaaagttgctgcggattggatgtccaacctgggattcaagaggagagtgcaggaatctactcaagtcctgcgagagctggaaacctcgttgcgtacgaaccacatcgggtgggttcaggagttccttaacgaagagaacaggggcctggacgttctcctggagtaccttgcctttgcccagtgttccgtcacttacgatatggagagcactgacaacggcgcatcaaattcggaaaaaaataagccattagagcagtccgtggaggacctgtcaaagggcccgccaagctcagtccctaagtccagacaccttacaatcaagttaacacccgcccacagccgaaaagccctcaggaatagcagaatcgtgagccagaaggacgacgttcatgtctgtattatgtgtctccgcgccatcatgaactaccagagtggtttctccttagttatgaatcatcccgcctgcgttaacgagatcgccctgagcctcaataacaagaaccccagaacaaaggccttggttttggaactgctggctgctgtttgcctagtgcgcgggggccacgacatcatccttgcagctttcgacaatttcaaggaagtgtgtggggagcaacacaggtttgagaaactgatggagtattttagaaacgaggattctaacatcgacttcatggtggcctgtatgcagttcatcaacattgtcgtccactccgtggaaaatatgaactttcgcgtcttcctgcagtatgagttcacccacctcggtttggacctgtatctagagcgcctgaggctcaccgagtccgacaagctccaggtccagattcaagcatacttggataacatttttgacgtgggagcgctcctcgaggatactgagacgaaaaacgctgtgttagagcacatggaggagttgcaggaacaggtggccctactgaccgaacggctgcgcgacgccgaaaatgagagtatggcaaagatcgctgaattggagaagcagctgtcccaggcaaggaaggaattggagactctgagagaacggttctcagagtctaccgctatggggccatcccgaaggcccccggagcccgaaaaggcccctcccgctgctcctaccagaccgtccgctttagagctcaaggtggaggagctggaagaaaaaggcctgattcgaatcttgcgcggccctggggatgccgtctccatagagatcttaccagtcgcagtggctaccccatctggcggtgatgcccccaccccaggcgtgccaacaggatcaccttcccccgacctcgcccctgccgccgaaccagctcccggagctgcgccaccaccccccccaccactgcccggactgccatcccctcaggaggcgccccccagtgctcctccgcaggcaccgcccctccctggcagcccggaaccaccaccggcccccccactcccaggagatctcccgccccccccccctcccccacccccgcctcccgggactgatggcccagtcccccctccaccgcctccgcctccgccaccgccaggcgggccccccgacgctctgggccgcagggacagtgagctcggccccggggtgaaagcaaaaaagcccatacagaccaaattcagaatgccactcctaaattgggtcgctctgaagccctcccaaatcactggaacagtgtttaccgaactgaatgacgagaaggtattgcaggaactcgacatgtccgacttcgaggaacagttcaagaccaagtctcagggacccagcctggacctcagcgccctgaaatcaaaggctgcccaaaaggcaccatcaaaggccaccctcattgaagcaaaccgcgccaaaaaccttgcaatcaccctccggaaggggaatctcggggctgagaggatctgccaggccatagaagcgtacgatctccaggcactcggattagacttcctcgaactgctgatgaggttcctgccaacggagtacgagagatctctgataacccgtttcgagagggaacagcgaccaatggaggaattgagcgaagaggacaggttcatgttatgctttagtaggatccctcgcttgcctgaaaggatgactacgcttacattcttaggcaacttcccagacacagctcaactgctgatgccacagctaaatgccatcatagctgcttcgatgtcaataaaaagcagtgacaaacttcgacagattctggagatcgtgctcgcgttcgggaattatatgaactccagcaaaagaggtgccgcctatgggtttcggctgcaatctcttgacgcactcctcgagatgaaatccactgaccggaaacaaacattgctccattatctggtcaaggtcatcgctgagaaatatccacaattgaccggatttcacagcgatctgcatttccttgataaggccggctccgtttcactggattccgtgctcgctgatgtccggtctctacaacgaggactggagcttacccagagagagttcgttagacaggacgactgcatggtgcttaaggagttccttagagcaaattcacccactatggataagctgctggctgactctaaaaccgctcaggaggctttcgaatctgtcgtcgagtacttcggagagaatcccaagaccacgtcccctggtctgtttttttcattgtttagccggtttattaaggcatacaagaaagccgagcaggaagtggaacagtggaagaaggaagccgcagcacaggaagcaggtgccgatacccccggtaagggagagcctcccgcacctaaaagccccccaaaggccaggcgcccccaaatggatcttatctccgaactcaaacgccggcagcagaaagagccacttatctacgagtccgacagggatggcgccatagaggatatcattacagtgattaagaccgttccattcaccgctagaacaggaaaacggactagtcggctgctctgcgaggccagccttggcgaagagatgcctctgtag

SEQ ID NO: 160109 - DNA, 3315 bp, Artificial Sequence
  derived and/or modified sequence
atgggaaacgccgcaggctctgctgaacagccggcaggacctgccgctccccctccaaagcagcccgctccgcctaagcagccgatgcccgctgctggggagttagaagaacgctttaatagagcgctaaattgtatgaacctgcctcccgacaaagtgcagctcctgagccaatacgacaacgagaaaaaatgggagcttatctgcgaccaagaacggttccaagtcaaaaatcccccagccgcatatattcagaagctcaagagctacgtggatacagggggagtctcccgtaaagtagccgctgattggatgtcaaacctgggatttaagcgcagggtgcaggaaagcactcaggtgttgcgtgaactagaaacatccctgcggaccaatcacataggatgggttcaagagtttttgaacgaagagaatagagggctcgacgttctgcttgaataccttgctttcgctcaatgttcagttacttacgatatggaatcaacagacaacggtgccagcaatagcgaaaaaaataaaccactggagcaaagtgttgaggacctgtccaagggccctccatcctcggtccccaagtcgcgccacctcaccatcaagttaacccccgcacatagtcgtaaagctctgcgcaactctagaatcgttagccagaaggatgacgtgcacgtgtgtattatgtgtttgcgggcaatcatgaactaccagagtgggttctctttagtcatgaaccatccagcctgcgtgaacgagattgcactgtctctcaacaataaaaaccccagaaccaaagcattggtccttgagctgctagcagccgtttgcttggtaagaggcggacacgacataatactagctgcgtttgacaacttcaaagaggtttgtggggagcagcacagattcgagaagctgatggagtatttcaggaacgaagactccaacatcgatttcatggtagcctgtatgcagtttattaacattgtggtccattccgtggagaatatgaacttccgcgtgttcctccagtatgaatttacccaccttggactcgacctgtacctagagcggctaaggctgacagagagcgataaacttcaagtgcagattcaagcatatctggataacatcttcgatgttggcgcattactcgaggatacggagacgaagaacgctgtactggagcacatggaggaactgcaagaacaggtggctctattaactgagaggttgcgagatgccgagaatgagtccatggctaaaatcgccgaactagagaaacagttgtcgcaggccagaaaagagctggaaacgctcagagaaaggttttcggaatcaaccgcaatgggaccctcacggagaccgccagagcctgaaaaggccccacctgctgcacctacacggcctagtgctctggaattaaaggtggaagaacttgaagagaaaggattgatcagaatactgagagggccaggtgacgcagtgagtatcgaaattctcccggttgccgtggcaacacccagtggcggtgatgcaccaacgcccggtgtgccgactgggtcaccgagtccggaccttgcccctgcggcagagccagccccaggtgctgccccaccaccaccaccccctcttccaggtttgcctagtccccaagaggcccctccttctgcaccaccacaggcccctcccctccctggatcccccgagccaccccctgccccacctcttcctggcgacctacctcctcctcctcctccacctccaccaccccctggcacagatgggcctgtgcctcctccgcctccacctcctccccctcccccaggaggtcctccagatgctttgggacgcagagactccgagctcggacctggggttaaagccaaaaagcctatacagacaaagttcagaatgcctcttcttaattgggtcgcccttaagccgtcacaaattaccggaactgttttcactgaactaaatgacgaaaaggttcttcaggagctggacatgtcggattttgaggaacagttcaagacaaagagccagggtccgtcgttggacctctccgctttgaaaagcaaggctgcccaaaaggccccatcaaaagctactttgattgaagctaatcgggcaaaaaacctggccatcaccctgagaaagggcaatctgggcgctgaacggatatgtcaagcgatcgaagcatatgatctgcaggccctaggcctggactttttagagcttctcatgcgatttctaccgaccgaatacgaacgctcgctgatcacccgcttcgaaagggagcagcggcctatggaggaactctcagaggaagacagattcatgctctgcttttccagaattccacggttgcccgagcggatgactaccctgacctttctcggtaatttcccagacaccgcgcaactgttgatgcctcaactgaacgccatcatagccgcttccatgtccattaagtctagtgacaagcttcgccagattctcgaaattgtgctggccttcggtaattatatgaattcgagtaagaggggagccgcttacggattcagactccagtctttggatgctcttctggagatgaagagcaccgatcgcaaacagacactcctgcattacctggtaaaggtgatcgctgagaagtatccacagctcacaggcttccactccgatctccatttcctcgataaggcgggttctgtgagcctggactcagtcctcgcagatgtacgatctctgcagaggggcctggagctgacacaacgggagtttgtgaggcaggacgactgcatggtgctgaaagagttcctccgcgcaaacagccccaccatggataaactcctcgcggacagcaaaacagcccaggaggcattcgaaagcgttgtggagtactttggggaaaacccaaagacaacatctcctggactcttcttcagcctgttctctcgctttattaaagcatacaaaaaagccgaacaggaggtcgagcagtggaaaaaagaagccgcagctcaggaggccggagctgataccccgggtaaaggggagcctcctgcgcctaaaagtcctccaaaggcaaggcggccacagatggacctcatttcagagctgaaacgtcgccagcagaaggagcctctgatatatgagagcgaccgtgatggagccatcgaggacatcattacagacctccggaaccagccatacatcagagcggataccggcagaagatctgcacgccgtcgtcccccaggccctccacttcaggtaactagcgacttgtcactctag

SEQ ID NO: 160110 - DNA, 3303 bp, Artificial Sequence
  derived and/or modified sequence
atgggtaacgcagcgggaagtgcagagcagcccgcaggccctgccgctcctccacccaagcagcctgcgccaccgaaacagccaatgcctgccgcaggcgagctggaggagcggttcaaccgcgctttgaactgcatgaatctgccgccagataaagtccaacttctgagtcagtacgataatgaaaagaaatgggagctgatctgcgatcaggaacggttccaagttaagaatcctccagcggcatatattcagaagttaaagtcttacgttgacactgggggagtatcccggaaggttgcagctgattggatgagcaatctcggttttaagcgacgggtccaggagtccactcaggtgctgagggagctggagacaagcttgaggactaaccacattgggtgggtgcaggaatttctgaacgaggaaaataggggtctggatgtcctgctagagtatctggccttcgcccagtgctctgttacctatgatatggagagcaccgataacggcgctagtaacagtgagaagaacaaacccctagaacagtccgtggaagaccttagcaagggacccccttcctctgtcccaaaaagccggcacctcactatcaagctgacacccgctcatagccgaaaggcactgaggaactctcggattgtgtcccaaaaggacgacgtccacgtgtgtattatgtgccttcgggctataatgaactaccagtccggtttcagccttgttatgaaccatcctgcttgcgtcaacgaaatcgctctaagcctcaataataaaaaccctagaacaaaagctctggtcctggaattgttggccgctgtgtgtctggtccgcggagggcacgacatcatcttggctgcttttgacaactttaaagaagtgtgcggagagcaacataggttcgaaaaactgatggagtatttcaggaatgaggactctaatatagacttcatggtcgcatgcatgcaattcatcaacattgtggtccactctgtcgagaacatgaatttcagggtttttcttcagtacgaatttacacatcttggattggacctctatctggagcgcttgaggctcaccgagagtgataaactccaagttcagatccaggcttacctcgacaacatttttgacgtgggggcactgttggaggacacagagacgaaaaacgccgttctagaacacatggaggagctgcaggagcaggttgcactgctgactgaaagactgcgagatgccgaaaatgaatctatggccaaaatcgccgagctagaaaagcagctgtcgcaggctagaaaggaactggagacacttagagagaggttctcagaaagcacagcaatgggacctagcaggcgacctcccgagcctgagaaggcgccacccgcagccccaacacgaccctccgctctcgagcttaaagttgaagaactggaggagaaaggactcatacgcattctgcgcggtccgggtgatgccgtgtccattgaaatcctgcctgtggcggtagcgaccccctccggcggagatgcacccaccccaggcgttcccaccggttccccctctcccgacctcgcgcctgccgcagagcctgctccgggtgccgcacccccaccaccgcctcccctcccaggactgccgtccccgcaagaagcccctcccagcgcccctccccaggctcccccattgcctggcagccctgaacccccaccagccccacccctaccaggggatctgccccctcccccacccccacctcctccacctcccggaaccgacggaccagtaccccctcccccacctcccccaccgccacctccaggcggaccacccgacgctctcggaagaagagattccgagctcgggcctggggtaaaagccaaaaagccaattcaaaccaagtttcgcatgcctctgctgaattgggtagccctcaagcccagccaaataaccggcaccgtattcactgagctcaacgacgagaaggtgctccaggaattggacatgagcgatttcgaggaacaatttaagaccaaatcccaggggcctagtctcgacctttctgcccttaaatctaaggcggctcagaaagcaccttctaaggctaccctgattgaagctaaccgggctaaaaacttggcgataactttgaggaaaggtaacctgggagccgagcgaatttgtcaggcaatagaagcttatgacctacaggcgctgggcctggacttcctcgagctgctgatgcggtttctgcctaccgaatatgagcgttccttgattacacgctttgaacgcgagcagcgccctatggaagaactcagtgaggaggacagatttatgctgtgtttctccagaattcctagactccccgagagaatgaccacgttaacttttctgggcaactttcctgacactgcacaactgctgatgcctcagcttaacgccataatcgcggcaagtatgtctatcaagtccagcgacaaactgagacaaatactggagattgtcctggctttcggcaattacatgaacagcagcaagcgcggagcagcttatgggttccgcttgcaaagtttggatgcactgctagaaatgaagagcacagacagaaaacagacactgttgcattacctcgtgaaggtgattgcggaaaagtacccacagctgacgggtttccattctgacctccattttctagacaaagcgggatctgtaagcctggactctgtcctagcggatgtgagaagcttgcaacgagggctggagctgacccagagggaatttgtgagacaagatgattgtatggtgctgaaagagtttctgagagccaacagccctaccatggataaacttctggcagacagtaaaacggcccaggaggcctttgaaagtgttgttgagtactttggcgagaacccgaaaacaacatcacccggattgttcttctcacttttttcccgcttcatcaaggcatataagaaggcggaacaggaggtcgagcaatggaagaaagaggcagcagcccaggaggctggcgctgacactcctggcaagggggagcctccagccccaaaaagtccccctaaggctaggaggccccaaatggacctcatttcagagctgaagagacggcagcaaaaagagcccctcatctatgaatctgaccgggacggtgccattgaggacatcatcaccgtgatcaagactgtgccatttactgccaggaccgggaagcgaacatctaggctactctgtgaggctagccttggcgaagagatgcccctctag

SEQ ID NO: 160111 - DNA, 3859 bp, Artificial Sequence
  derived and/or modified sequence
cggacggggccgccccgatgggacgccgcgctccggcccctgcgcgccgctgagccgagcgccccccgctgccgagacccccgccgccaccgccagccgctgccccctcgcccccgcccgggccgggagcctcgtccccgtcccccggaaagctggatttccgaggctggaggcgcctggccggctgggtggggaccaccatgggcaacgcggccggcagcgccgagcagcccgcgggccccgccgcgccgccccccaagcagcccgcgcctcccaagcagccgatgcccgcggccggagagctggaggagaggttcaaccgcgccctgaactgcatgaacttgcccccagacaaggtccagctgctgagccagtatgacaacgagaagaagtgggagctcatctgtgatcaggagcggtttcaagtcaagaatccccccgcagcctacatccagaagctgaagagctatgtggatactggtggggtcagccgaaaggtagcagctgattggatgtccaacctggggtttaagaggcgagttcaggagtccacgcaggtgctacgggagctggagacctccctgaggaccaaccacattgggtgggtgcaggagttcctcaatgaagagaaccgtggcctggatgtgctgctcgagtacctggcctttgcccagtgctctgtcacgtatgacatggagagcacagacaacggggcttccaactcagagaaaaacaagcccctggagcagtctgtggaagacctcagcaagggtccaccctcctccgtgcccaaaagccgccacctgaccatcaagctgaccccagcccacagcaggaaggccctgcggaattcccgcatcgtcagccagaaggacgacgtccacgtctgtattatgtgcctacgcgccatcatgaactaccagtctggcttcagccttgtcatgaaccacccagcctgtgtcaatgagattgctctgagcctcaacaacaagaaccccagaaccaaggctctggtgctggagctgctggcggccgtgtgcttggtgcggggaggacatgacatcatccttgcagcctttgacaacttcaaggaggtgtgtggggagcagcaccgctttgaaaagctgatggaatatttccggaatgaggacagcaacatcgacttcatggtggcctgcatgcagttcatcaacattgtggtacattcggtggagaacatgaacttccgtgtcttcctgcaatatgagttcacccacttgggcctggacctgtacttggagaggcttcggctcaccgagagtgacaagctgcaggtgcagatccaggcgtacctggacaatatttttgatgtgggggcgctgctggaggacacagagaccaagaacgctgtgctggagcacatggaggaactgcaggagcaagtggcgctgctgacagagcggcttcgggacgcggagaacgaatccatggccaagattgcagaactggaaaaacagctaagccaggcgcgcaaggagttggagaccctgcgggagcgcttcagcgaatcgaccgccatggggccctccaggcgtcccccagagcctgagaaagcgcctcccgctgccccgacgcggccctcggccctggagctgaaggtggaggagctggaggagaaggggttaatccgtattctgcgggggccgggggatgctgtctccatcgagatcctccccgtcgctgtggcaactccgagcggcggtgatgctccgactccgggggtgccgaccggctcccccagcccagatctcgcacctgcagcagagccggctcccggagcagcgccaccgccgccgcccccactgcccggcctcccctccccgcaggaagccccgccctctgcgcccccacaggccccgcctctccctggcagcccggagcccccgcctgcgccgccgctgcccggagacctgccgcccccacccccgccaccgccaccacctccgggcactgacgggccggtgcctccgccgccgccgccgccgccgccgcctcccggaggtcctcctgatgccctaggaagacgcgactcagaattgggcccaggagtgaaggccaagaagcccatccagactaagttccgaatgccactcttgaactgggtggcactgaaacccagccagatcaccggcactgtcttcacagagctcaatgatgagaaggtgctgcaggagctagacatgagtgattttgaggaacagttcaagaccaagtcccaaggccccagcctggacctcagcgctctcaagagtaaggcagcccagaaggcccccagcaaggcgacactcattgaggccaaccgggccaagaacttggccatcaccctgcggaagggcaacctgggggccgagcgcatctgccaagccattgaggcgtacgacctgcaggctctgggcctggacttcctggagctgctgatgcgcttcctgcccacagagtatgagcgcagcctcatcacccgctttgagcgggagcagcggccaatggaggagctgtcagaggaggaccgcttcatgctatgcttcagccgcatcccgcgcctgccggagcgcatgaccacactcaccttcctgggcaacttcccggacacagcccagctgctcatgccgcaactgaatgccatcattgcagcctcaatgtccatcaagtcctctgacaaactccgccagatcctggagattgtcctggcctttggcaactacatgaacagtagcaagcgtggggcagcctatggcttccggctccagagcctggatgcgctgttggagatgaagtcgactgatcgcaagcagacgctgctgcactacctggtgaaggtcattgctgagaagtacccgcaactcacaggcttccacagcgacctgcacttcctggacaaggcgggctcagtgtccctggacagtgtcctggcggacgtgcgctccctgcagcgaggcctagagttgacacagagagagtttgtgcggcaggatgactgcatggtgctcaaggagttcctgagggccaactcgcccaccatggacaagctgctggcagacagcaagacggctcaggaggcctttgagtctgtggtggagtacttcggagagaaccccaagaccacatccccaggcctgttcttctccctctttagccgcttcattaaggcctacaagaaagctgagcaggaggtggaacagtggaaaaaagaagccgctgcccaggaggcaggcgctgataccccgggcaaaggggagcccccagcacccaagtcaccgccaaaggcccggcggccacagatggacctcatctctgagctgaaacggaggcagcagaaggagccactcatttatgagagcgaccgtgatggggccattgaagacatcatcacagatctgcggaaccagccctacatccgcgcagacacaggccgccgcagtgcccgtcggcgtcccccgggccccccactgcaggtcacctccgacctctcgctgtagccgctatttctgcaggtggattctgcaggggtgtggggccgtggacaggctgaggctcaaggaaggtggtcctcagctcggctggccgggcagcccctcctccgctgtggcccgcctcaaacgggctggtgcatcctcctcttggccacagagggcagcatcgcccgccccttcccccaaatgctgcttgcagcacccaccctaaagccccctccaaatagccatacttagcctcagcaggagcctggcctgtaacttataaagtgcacctcgcccccgcaagccccagccccgaggaccgtccatggaccttatttttatatgagattaataaagatgtttgc

SEQ ID NO: 160112 - protein, 347 aa, Artificial Sequence
  derived and/or modified sequence
MALLFSLILAICTRPGFLASPSGVRLVGGLHRCEGRVEVEQKGQWGTVCDDGWDIKDVAVLCRELGCGAASGTPSGILYEPPAEKEQKVLIQSVSCTGTEDTLAQCEQEEVYDCSHDEDAGASCENPESSFSPVPEGVRLADGPGHCKGRVEVKHQNQWYTVCQTGWSLRAAKVVCRQLGCGRAVLTQKRCNKHAYGRKPIWLSQMSCSGREATLQDCPSGPWGKNTCNHDEDTWVECEDPFDLRLVGGDNLCSGRLEVLHKGVWGSVCDDNWGEKEDQVVCKQLGCGKSLSPSFRDRKCYGPGVGRIWLDNVRCSGEEQSLEQCQHRFWGFHDCTHQEDVAVICSG

SEQ ID NO: 160113 - DNA, 1044 bp, Artificial Sequence
  derived and/or modified sequence
atggcactgctgttttcactcatcctggccatctgtactaggcctggcttcctggctagtccctctggggtgaggttggtgggcggtcttcataggtgtgaaggtcgggtcgaggtggaacagaagggccaatggggcaccgtgtgcgatgacgggtgggacattaaggatgtggcggtcttatgccgcgaacttggttgcggggctgcttctggcacaccatccggcatactgtatgagccccccgcagaaaaggaacagaaggtcttgatccagagcgtgagttgcactggcactgaggacacactggcccagtgcgaacaggaggaggtttatgattgctcccacgatgaggacgctggggccagctgtgaaaacccagagtctagcttcagccctgtccctgagggagtgagattggccgacgggccaggacactgtaaaggccgcgtggaggtgaagcaccagaatcagtggtataccgtctgtcagacgggctggagcctgcgagctgcaaaagtagtgtgcagacaactcggctgcggccgcgccgttctgactcaaaaacgttgtaataagcatgcatacggtaggaaacctatctggctgagtcagatgtcttgctccggacgggaagccacgctgcaggactgtccaagcggcccttggggcaaaaacacctgtaatcacgatgaagacacctgggtagagtgtgaagatcccttcgacctgaggctggtagggggagataacctgtgttctggaagactggaggtactacacaaaggcgtgtgggggtctgtgtgcgacgacaattggggggagaaagaggatcaggtggtgtgcaagcagctgggatgtgggaagtccctatcccccagctttcgagaccggaaatgctacggcccaggagtgggacgcatttggctggataatgtgcgatgctccggtgaagaacagtctctcgagcagtgccagcacagattttgggggttccacgactgcactcatcaagaagatgtcgctgtgatttgctcaggttag

SEQ ID NO: 160114 - DNA, 1044 bp, Artificial Sequence
  derived and/or modified sequence
atggccctgctcttcagcctcatcctggccatctgcaccaggcctggcttcctggccagccccagcggcgtgcggctggtgggcggcctgcaccgctgtgagggccgggtggaggtggagcagaagggccagtggggcaccgtgtgtgatgatggctgggacatcaaggatgtggccgtgctgtgccgggagctgggctgtggggccgccagcggcaccccatctggcatcctgtatgagcccccagctgagaaggagcagaaggtgctgatccagagcgtgtcctgcacaggaacagaggacaccctggcccagtgtgagcaggaggaggtgtatgactgcagccatgatgaagatgctggggccagctgtgaaaatcctgagagcagcttcagccctgtgcctgagggcgtgcggctggctgatggccctggccactgcaagggccgggtggaggtgaagcaccagaaccagtggtacacagtgtgccagacaggctggagcctgcgggccgccaaggtggtgtgccggcagctgggctgcggccgggctgtgctgacccagaagcgctgcaacaagcacgcctacggcaggaagcccatctggctgagccagatgagctgcagcggccgggaggccaccctgcaggactgccccagcggcccctggggcaagaacacctgcaaccatgatgaggacacctgggtggagtgtgaggacccctttgacctgcggctggtgggcggggacaacctgtgcagcggccgcctggaggtgctgcacaagggcgtgtggggctctgtgtgtgatgacaactggggcgagaaggaggaccaggtggtgtgcaagcagctgggctgcggcaagagcctgagccccagcttccgggacagaaaatgttatggccctggggtgggccgcatctggctggacaacgtgcgctgcagcggggaggagcagagcctggagcagtgccagcaccgcttctggggcttccatgactgcacccaccaggaggatgtggccgtcatctgcagcggctag

SEQ ID NO: 160115 - DNA, 1044 bp, Artificial Sequence
  derived and/or modified sequence
atggccctgctgttcagcctgatcctggccatctgcacccggcccggctttctagcttcgcctagcggtgttaggctggttgggggcttacaccggtgcgaaggccgggtcgaggtggagcagaagggccaatggggcacggtgtgtgacgacgggtgggacatcaaggacgtggcggtgctatgcagggagctgggctgcggcgccgcctctggtactccctcagggatcctgtacgagcctcccgccgagaaagagcaaaaggtgcttatccagtctgtttcgtgtaccggtaccgaggatacgctggctcagtgtgagcaagaagaagtgtatgactgtagccacgacgaagatgctggtgccagttgtgaaaacccggagagctctttcagtccagtgccagaaggcgtgcggctcgctgacggtcctggccactgcaaaggaagggtcgaggtcaaacaccaaaatcagtggtacacggtctgccagactggatggagcctgagggctgccaaggtcgtctgtaggcagttgggctgtggtcgggctgtactgacacagaagaggtgcaataagcacgcatacggacggaagccaatctggctctcccagatgagctgttccggtcgggaggcgactctgcaggactgtccttccggcccttggggtaaaaacacctgcaaccacgatgaagacacttgggtcgagtgtgaagacccattcgatttacgcctagtaggcggagataatttgtgctctggccggttggaagtgctccacaagggcgtgtgggggtctgtctgtgacgacaactggggagagaaggaggaccaggtggtttgtaagcagctgggatgcggaaagtctctgtccccttcgttccgcgatcggaagtgttacggccctggagttgggagaatctggctggacaatgtgagatgttccggagaggaacagagcttggagcagtgccagcacagattctggggtttccatgattgtacccaccaggaggacgtggcagtgatctgctccggatag

SEQ ID NO: 160116 - DNA, 1044 bp, Artificial Sequence
  derived and/or modified sequence
atggcccttctgttttcgctgatcctggccatctgcacaagacctggattcttggcttctccatctggcgtgagattagtggggggtttgcacaggtgcgagggtagagttgaggtcgaacagaaaggccagtggggcacggtctgtgatgacggttgggacattaaagatgtggccgtattgtgtcgggaactcggctgcggcgcagcctctggcacaccgtcaggcattctgtacgaacctccagctgaaaaggagcagaaggtgctgattcaatcagtcagttgtacgggcaccgaggacactctggcccagtgcgagcaagaagaagtttacgattgctcccacgatgaggatgccggtgcgtcctgcgaaaaccccgaatcaagcttttcgcctgttcccgagggggtccgtcttgccgatggcccaggacattgtaaggggagagttgaagttaaacatcagaatcaatggtacaccgtatgtcagacagggtggtccctccgggctgcgaaagttgtctgcagacaattggggtgtgggcgagcagtgctcacgcagaaacgatgtaacaaacacgcttacggccgtaagcccatctggctgtcccagatgagctgcagcgggcgagaagccactttacaggattgccctagcggcccatgggggaaaaacacgtgcaatcatgatgaggatacctgggtcgaatgcgaggatccattcgatctgaggcttgtgggcggagacaacctgtgtagcgggaggctcgaagtgctgcataagggcgtgtggggctccgtttgcgatgacaactggggggagaaggaagaccaggtggtgtgtaagcagctggggtgcggcaaaagcctcagcccctcattccgagatcggaaatgttacggtcccggagtggggcgtatctggctcgacaatgtgagatgcagcggagaagaacagtctctggagcagtgtcaacacagattctggggcttccatgactgtacacaccaggaggatgtagccgtcatttgcagcggatag

SEQ ID NO: 160117 - DNA, 2191 bp, Artificial Sequence
  derived and/or modified sequence
ctcctcttaacatacttgcagctaaaactaaatattgctgcttggggacctccttctagccttaaatttcagctcatcaccttcacctgccttggtcatggctctgctattctccttgatccttgccatttgcaccagacctggattcctagcgtctccatctggagtgcggctggtggggggcctccaccgctgtgaagggcgggtggaggtggaacagaaaggccagtggggcaccgtgtgtgatgacggctgggacattaaggacgtggctgtgttgtgccgggagctgggctgtggagctgccagcggaacccctagtggtattttgtatgagccaccagcagaaaaagagcaaaaggtcctcatccaatcagtcagttgcacaggaacagaagatacattggctcagtgtgagcaagaagaagtttatgattgttcacatgatgaagatgctggggcatcgtgtgagaacccagagagctctttctccccagtcccagagggtgtcaggctggctgacggccctgggcattgcaagggacgcgtggaagtgaagcaccagaaccagtggtataccgtgtgccagacaggctggagcctccgggccgcaaaggtggtgtgccggcagctgggatgtgggagggctgtactgactcaaaaacgctgcaacaagcatgcctatggccgaaaacccatctggctgagccagatgtcatgctcaggacgagaagcaacccttcaggattgcccttctgggccttgggggaagaacacctgcaaccatgatgaagacacgtgggtcgaatgtgaagatccctttgacttgagactagtaggaggagacaacctctgctctgggcgactggaggtgctgcacaagggcgtatggggctctgtctgtgatgacaactggggagaaaaggaggaccaggtggtatgcaagcaactgggctgtgggaagtccctctctccctccttcagagaccggaaatgctatggccctggggttggccgcatctggctggataatgttcgttgctcaggggaggagcagtccctggagcagtgccagcacagattttgggggtttcacgactgcacccaccaggaagatgtggctgtcatctgctcaggatagtatcctggtgttgcttgacctggcccccctggccccgcctgccctctgcttgttctcctgagccctgattatcctcatactcattctggggctcaggcttgagccactactccctcatcccctcaggagtctgaacactgggcttatgccttactctcagggacaagcagcccccattgctgcctgtagatgtgagctgttgagttccctcttgctggggaagatgagcttccatgtatcctgtgctcaaccctgaccctttgacactggttctggcctttcctgccttttctcaagctgcctggaatcctcaaacctgtcactttggtcagatgtgcagaccattactaaggtctatgtctgcaaacattactaatctaggtcctattactaatctatgtctgcaaacattaaaggaatgaaacaatgaaaggaacatttgaaagaaaatgtgggtagacaatttcttgcaacttgggggaaagtttagaattcttttgattggactactttttttttttttcctcaagcttcaggtgaccacaatagcaacacctccctattctgttatttcttagtgtaggtagacaattctttcaggagcagagcagcgtcctataatcctagaccttttcatgacgtgtaaaaaatgatgtttcatcctctgattgccccaataaaaatctttgttgtccatccctatacaacctgccaacatggttgacatttaatgagaggaatgtcaaaaatacattttactttattcaaagaaaaatatattggttactgggaaaaggtcaagaaagaggcagaaagagatcagggagggctaaagttgtgtcttatgccaagcgaaagtgaaaaatatcattttcactttatcaactgagactttggggcctgtaagcttgaggcaagacagaaataagagaatcaagacttgattgtaaaaattgacaactttagattctgaggctaggctgagtacttattatacggctacatttacacatttacacttatctaataaatcagatttcacagtctcaa

SEQ ID NO: 160118 - DNA, 1044 bp, Artificial Sequence
  derived and/or modified sequence
atggccctgctgttcagcctgatcctggccatctgcaccagacccggcttcctggccagccccagcggcgtgagactggtgggcggcctgcacagatgcgagggcagagtggaggtggagcagaagggccagtggggcaccgtgtgcgacgacggctgggacatcaaggacgtggccgtgctgtgcagagagctgggctgcggcgccgccagcggcacccccagcggcatcctgtacgagccccccgccgagaaggagcagaaggtgctgatccagagcgtgagctgcaccggcaccgaggacaccctggcccagtgcgagcaggaggaggtgtacgactgcagccacgacgaggacgccggcgccagctgcgagaaccccgagagcagcttcagccccgtgcccgagggcgtgagactggccgacggccccggccactgcaagggcagagtggaggtgaagcaccagaaccagtggtacaccgtgtgccagaccggctggagcctgagagccgccaaggtggtgtgcagacagctgggctgcggcagagccgtgctgacccagaagagatgcaacaagcacgcctacggcagaaagcccatctggctgagccagatgagctgcagcggcagagaggccaccctgcaggactgccccagcggcccctggggcaagaacacctgcaaccacgacgaggacacctgggtggagtgcgaggaccccttcgacctgagactggtgggcggcgacaacctgtgcagcggcagactggaggtgctgcacaagggcgtgtggggcagcgtgtgcgacgacaactggggcgagaaggaggaccaggtggtgtgcaagcagctgggctgcggcaagagcctgagccccagcttcagagacagaaagtgctacggccccggcgtgggcagaatctggctggacaacgtgagatgcagcggcgaggagcagagcctggagcagtgccagcacagattctggggcttccacgactgcacccaccaggaggacgtggccgtgatctgcagcggctag

SEQ ID NO: 160119 - protein, 1498 aa, Artificial Sequence
  derived and/or modified sequence
MDGASAEQDGLQEDRSHSGPSSLPEAPLKPPGPLVPPDQQDKVQCAEVNRASTEGESPDGPGQGGLCQNGPTPPFPDPPSSLDPTTSPVGPDASPGVAGFHDNLRKSQGTSAEGSVRKEALQSLRLSLPMQETQLCSTDSPLPLEKEEQVRLQARKWLEEQLKQYRVKRQQERSSQPATKTRLFSTLDPELMLNPENLPRASTLAMTKEYSFLRTSVPRGPKVGSLGLPAHPREKKTSKSSKIRSLADYRTEDSNAGNSGGNVPAPDSTKGSLKQNRSSAASVVSEISLSPDTDDRLENTSLAGDSVSEVDGNDSDSSSYSSASTRGTYGILSKTVGTQDTPYMVNGQEIPADTLGQFPSIKDVLQAAAAEHQDQGQEVNGEVRSRRDSICSSVSLESSAAETQEEMLQVLKEKMRLEGQLEALSLEASQALKEKAELQAQLAALSTKLQAQVECSHSSQQRQDSLSSEVDTLKQSCWDLERAMTDLQNMLEAKNASLASSNNDLQVAEEQYQRLMAKVEDMQRSMLSKDNTVHDLRQQMTALQSQLQQVQLERTTLTSKLKASQAEISSLQSVRQWYQQQLALAQEARVRLQGEMAHIQVGQMTQAGLLEHLKLENVSLSQQLTETQHRSMKEKGRIAAQLQGIEADMLDQEAAFMQIQEAKTMVEEDLQRRLEEFEGERERLQRMADSAASLEQQLEQVKLTLLQRDQQLEALQQEHLDLMKQLTLTQEALQSREQSLDALQTHYDELQARLGELQGEAASREDTICLLQNEKIILEAALQAAKSGKEELDRGARRLEEGTEETSETLEKLREELAIKSGQVEHLQQETAALKKQMQKIKEQFLQQKVMVEAYRRDATSKDQLISELKATRKRLDSELKELRQELMQVHGEKRTAEAELSRLHREVAQVRQHMADLEGHLQSAQKERDEMETHLQSLQFDKEQMVAVTEANEALKKQIEELQQEARKAITEQKQKMRRLGSDLTSAQKEMKTKHKAYENAVGILSRRLQEALAAKEAADAELGQLRAQGGSSDSSLALHERIQALEAELQAVSHSKTLLEKELQEVIALTSQELEESREKVLELEDELQESRGFRKKIKRLEESNKKLALELEHEKGKLTGLGQSNAALREHNSILETALAKREADLVQLNLQVQAVLQRKEEEDRQMKHLVQALQASLEKEKEKVNSLKEQVAAAKVEAGHNRRHFKAASLELSEVKKELQAKEHLVQKLQAEADDLQIREGKHSQEIAQFQAELAEARAQLQLLQKQLDEQLSKQPVGNQEMENLKWEVDQKEREIQSLKQQLDLTEQQGRKELEGLQQLLQNVKSELEMAQEDLSMTQKDKFMLQAKVSELKNNMKTLLQQNQQLKLDLRRGAAKTRKEPKGEASSSNPATPIKIPDCPVPASLLEELLRPPPAVSKEPLKNLNSCLQQLKQEMDSLQRQMEEHALTVHESLSSWTPLEPATASPVPPGGHAGPRGDPQRHSQSRASKEGPGE

SEQ ID NO: 160120 - protein, 1390 aa, Artificial Sequence
  derived and/or modified sequence
MDGASAEQDGLQEDRSHSGPSSLPEAPLKPPGPLVPPDQQDKVQCAEVNRASTEGESPDGPGQGGLCQNGPTPPFPDPPSSLDPTTSPVGPDASPGVAGFHDNLRKSQGTSAEGSVRKEALQSLRLSLPMQETQLCSTDSPLPLEKEEQVRLQARKWLEEQLKQYRVKRQQERSSQPATKTRLFSTLDPELMLNPENLPRASTLAMTKEYSFLRTSVPRGPKVGSLGLPAHPREKKTSKSSKIRSLADYRTEDSNAGNSGGNVPAPDSTKGSLKQNRSSAASVVSEISLSPDTDDRLENTSLAGDSVSEVDGNDSDSSSYSSASTRGTYGILSKTVGTQDTPYMVNGQEIPADTLGQFPSIKDVLQAAAAEHQDQGQEVNGEVRSRRDSICSSVSLESSAAETQEEMLQVLKEKMRLEGQLEALSLEASQALKEKAELQAQLAALSTKLQAQVECSHSSQQRQDSLSSEVDTLKQSCWDLERAMTDLQNMLEAKNASLASSNNDLQVAEEQYQRLMAKVEDMQRSMLSKDNTVHDLRQQMTALQSQLQQVQLERTTLTSKLKASQAEISSLQSVRQWYQQQLALAQEARVRLQGEMAHIQVGQMTQAGLLEHLKLENVSLSQQLTETQHRSMKEKGRIAAQLQGIEADMLDQEAAFMQIQEAKTMVEEDLQRRLEEFEGERERLQRMADSAASLEQQLEQVKLTLLQRDQQLEALQQEHLDLMKQLTLTQEALQSREQSLDALQTHYDELQARLGELQGEAASREDTICLLQNEKIILEAALQAAKSGKEELDRGARRLEEGTEETSETLEKLREELAIKSGQVEHLQQETAALKKQMQKIKEQFLQQKVMVEAYRRDATSKDQLISELKATRKRLDSELKELRQELMQVHGEKRTAEAELSRLHREVAQVRQHMADLEGHLQSAQKERDEMETHLQSLQFDKEQMVAVTEANEALKKQIEELQQEARKAITEQKQKMRRLGSDLTSAQKEMKTKHKAYENAVGILSRRLQEALAAKEAADAELGQLRAQGGSSDSSLALHERIQALEAELQAVSHSKTLLEKELQEVIALTSQELEESREKVLELEDELQESRGFRKKIKRLEESNKKLALELEHEKGKLTGLGQSNAALREHNSILETALAKREADLVQLNLQVQAVLQRKEEEDRQMKHLVQALQASLEKEKEKVNSLKEQVAAAKVEAGHNRRHFKAASLELSEVKKELQAKEHLVQKLQAEADDLQIREGKHSQEIAQFQAELAEARAQLQLLQKQLDEQLSKQPVGNQEMENLKWEVDQKEREIQSLKQQLDLTEQQGRKELEGLQQLLQNVKSELEMAQEDLSMTQKDKFMLQAKVSELKNNMKTLLQQNQQLKLDLRRGAAKTVLRPASLPG

SEQ ID NO: 160121 - DNA, 4497 bp, Artificial Sequence
  derived and/or modified sequence
atggatggtgccagcgccgagcaggacggacttcaggaggacagatcccactccggcccttcttctctcccagaggctccactgaaaccccctggcccactagtcccaccagatcagcaggacaaggtgcagtgtgctgaagttaacagggccagtaccgaaggcgagtctcccgatgggcccggtcagggaggtctctgtcagaacggacccactcctccattcccagatcctccatcttccctggatcctacgacctcccctgtgggaccggacgcctctccaggagttgctggcttccacgacaacttgagaaagagccagggcaccagcgcggaggggtccgtgcggaaggaggccttacaatcccttaggctgtctcttccaatgcaagagacgcagctctgtagcactgattcccctcttcccctggagaaggaggaacaggtgaggcttcaggctagaaaatggcttgaagagcagctgaaacagtaccgcgtaaagcgccagcaggagcgcagttcacagccagccacaaagacgcggctctttagcactctggaccccgaacttatgctcaatccagagaatctgccaagggcctccacgctggcaatgaccaaagagtattctttcttgcggacatctgtacccaggggcccgaaggtgggctcactgggactccccgctcatcccagggaaaaaaagaccagcaagtcttccaagatccgttccctggcggactatcgaacagaggattcaaatgcgggaaatagtggggggaacgtgccagcgcctgatagcacgaagggcagcctgaaacagaatcgcagttcggcagcctccgtggtcagcgagatcagcctgagtcccgacacagacgataggctggagaacaccagcttagctggtgacagcgtgtctgaggtagacgggaatgattccgatagttctagctactctagcgcttctacaagggggacttatgggatcctgtcaaagaccgtaggaactcaagacactccgtacatggttaatggacaggagatccccgcagataccctcggacaatttccttccataaaagacgtacttcaggcagctgccgccgaacatcaggaccaagggcaagaagtcaacggggaagtgcgatcccgccgtgatagcatctgtagcagtgtttcgctggaatcaagcgccgccgaaactcaagaagaaatgctccaggtcctgaaagagaaaatgcgcttagagggacagcttgaggccctttccttggaagcctctcaggcactgaaagagaaggccgagctccaggctcagctggctgcgctaagtacaaagctgcaggctcaagtcgaatgctctcactccagccaacagagacaggactcactgagttcggaagtggacactttaaagcagtcatgctgggacctggagcgtgcgatgaccgaccttcaaaacatgctcgaggccaaaaacgctagcctcgctagttccaacaatgacctgcaggtggccgaggagcaatatcagcgcttgatggctaaggttgaagatatgcagaggtctatgctgtctaaggacaatactgtgcacgacctgaggcagcaaatgaccgctctgcagtctcaactgcagcaggtgcagctggagaggacaactctgacaagcaagcttaaagcctcccaggctgaaatctcaagtctacagagtgtacggcagtggtaccaacagcagttagcccttgcgcaagaagcgcgggtgagactgcagggagaaatggcacatatccaagtggggcagatgacccaagcgggtctgctggaacatcttaagttggagaatgtctcactctctcagcagctcaccgagactcagcatcgcagtatgaaggagaagggcaggatagccgcccaattgcagggaattgaagccgacatgctggatcaggaagccgccttcatgcagatccaggaagccaaaaccatggtggaggaggacctgcaaagacgcttggaggagtttgagggcgagcgcgaacgcctccagaggatggcagacagtgcagcctcactcgagcagcagcttgagcaggttaaactcactctgctgcagcgggaccagcagctcgaagccctccagcaggaacacctggatttgatgaagcagctcacactgacccaggaggccctgcaaagccgggaacagtctctggatgccctccagacacattatgacgaacttcaggctcgtttgggggagctacagggcgaggccgcatctcgcgaggatacaatctgcttgctacaaaacgagaaaatcatcttggaagccgccctccaggctgcaaagtctggtaaggaggagttggatcggggggcccggcgcttagaggaggggacagaggagacctccgaaactctggaaaagctgagagaagagctggccattaagtcgggacaggtggaacaccttcagcaggagaccgccgctctaaagaaacagatgcagaagattaaggaacaatttttacaacagaaagtgatggtggaggcttacagaagagacgccacttccaaggaccagcttatctctgaactgaaggccaccaggaagcggctggactcggaactgaaagagctccgacaggaattaatgcaggtccatggggagaaacgtaccgctgaagctgagctctcccggctccatagagaagttgcgcaggtgcggcagcatatggccgacctggagggtcacctccagagcgcccaaaaagagcgggatgagatggagacacatctgcaaagtctccaattcgacaaagaacagatggtggctgtgactgaagccaatgaggccttaaaaaagcagatcgaggagctccagcaggaagctagaaaggccattaccgaacagaagcagaagatgcgaagacttggctcagatttgacctccgcccagaaagaaatgaaaactaagcacaaggcctacgagaatgccgtcggaatactgtcacggcgcctccaggaggctctggctgctaaagaggctgcggatgccgagcttggccaacttcgagctcaaggaggcagctccgactcctcattagccctccacgaacggatccaggcactggaggctgagctccaggcagtttctcactctaaaacacttctggaaaaagagctgcaagaagtgattgctctcacctcacaagaactcgaagagtcacgtgagaaggtgctagaacttgaggacgagctccaggagagtcgtggttttagaaagaaaattaagagactagaagagagcaataagaagctcgctctggagctggagcatgaaaagggcaagctgactggtttgggccaaagcaatgcagctctccgtgagcataattccatcctcgaaacggctttggccaagagagaggccgacctggttcagctgaacttacaggtccaagcagtgctccagaggaaagaagaagaggatcggcagatgaaacatttggtacaggctctccaggcttccctggaaaaagagaaggagaaggttaattctctgaaggagcaggtcgctgctgcaaaggtggaggccggtcacaataggcgccatttcaaggccgcaagtctggaactctctgaagttaagaaagaacttcaggcaaaggagcacctggtgcagaaactgcaagccgaagcggacgacttacagattcgcgagggtaagcactcacaggagatagcccagtttcaggctgagttggccgaagcacgagcccagttacagctgcttcaaaagcagctggatgagcagttgtcaaaacagccggtgggcaatcaagagatggagaaccttaagtgggaagtagaccagaaggaaagggagatccagagcctgaaacaacaactggaccttaccgagcagcaggggcgcaaagagcttgaggggctgcagcagctgttgcagaacgtcaagagcgagttagagatggcacaggaggatttgagtatgacccagaaagataagttcatgctgcaagctaaggttagtgaactcaaaaacaatatgaagacattgttgcagcaaaaccagcagctcaagctggacttaaggagaggtgctgccaaaacgcgcaaagaaccaaagggagaagctagcagctctaaccccgccacaccaattaagattccagactgcccagtaccggcatcccttctcgaggagctgctccgtcctccgccggcagtatcaaaagagccgctgaagaatctcaactcatgcctccagcaattgaaacaggaaatggacagcctgcagagacagatggaagagcacgcactgacagtgcacgagtccctgagtagttggacacccctggagcccgccaccgcatcaccagtgcccccgggtggccacgcgggcccgcggggggaccctcagcggcattcccagtcaagagcttctaaggagggacctggagagtag

SEQ ID NO: 160122 - DNA, 4497 bp, Artificial Sequence
  derived and/or modified sequence
atggacggggcttctgcagagcaggacggcctgcaagaagatagatcccactccggaccatcaagcttgcccgaggccccattaaagcccccggggcctttggttcctcctgaccagcaggacaaagtgcagtgcgcggaggtaaaccgggcctccaccgagggcgagagtcctgacggcccaggacagggtggattgtgtcaaaatgggccaacacctccttttcctgaccccccaagctccctcgacccaaccactagtcccgtgggccctgacgcatctccaggcgtggccggctttcacgataatctccggaaatcacaagggacaagtgccgaaggttccgtccggaaggaagctctgcagagcctgcgtctttccctgccaatgcaggagacgcagctatgttccaccgattccccattgcccctggagaaagaagaacaagtgcgactgcaggctcgtaagtggttagaagagcaactgaaacagtatcgcgtcaaacgtcagcaagagaggtcttcacagcccgctaccaagacaagactgttcagcacgctggaccctgagctgatgcttaaccccgaaaacctgccgcgcgccagcaccctcgcgatgacgaaggagtactcatttctgcgcacctccgtgccgagaggacccaaagtagggagcctcggcctgccagctcacccccgagaaaaaaagaccagcaaatcatcgaaaattcgttctttagctgattatcggacagaggatagtaacgctggaaattctggcggcaatgttcctgcccctgatagtactaagggcagcctcaaacagaaccgttcttccgctgcttccgtagtctcagagatttcactctctccagatactgatgataggttagaaaatacctctctcgctggggatagtgtgtccgaagtagatgggaatgattccgacagttcttcatactcgtccgcatcgactcgtgggacctacgggattctgagcaagacagtggggacgcaagacacaccctacatggtgaacggacaggaaatacctgcggatacgctgggacagttcccatctattaaggacgtcttgcaggccgcagccgccgagcatcaggaccaaggccaggaggtgaatggcgaggttcgatcgcgccgggactctatctgcagtagtgtatctctggagtcatcagctgctgaaacccaggaggagatgttgcaggtgctgaaggaaaagatgcgcctggagggccagctggaggctctctcactggaggcttcacaagcgctcaaagaaaaagctgagctgcaggcgcagcttgctgctctctctacaaaactgcaggcccaagttgaatgctcccatagcagccagcaaaggcaggactccctctcatccgaggtcgataccctgaagcagtcttgttgggatctggagagagcaatgacagacctgcaaaatatgttagaggctaagaatgcaagtctcgcttccagcaacaacgacctgcaggtggccgaggagcagtaccagcgtctgatggcaaaagtcgaggacatgcagcgttctatgctctctaaagataatacagtgcacgacctaaggcagcagatgactgcactccaatcacagctacagcaggtgcaattagagcgaactaccctgaccagtaagttgaaagcaagtcaggccgaaatctcctcgcttcagagtgtaagacagtggtatcaacaacagcttgccctggcccaggaagctagagtgcgattgcagggggagatggctcatatacaggtgggccagatgacccaggcgggacttctggagcatctgaagttggagaatgtgtcgctgagtcagcaactaacagagacccagcatcgatctatgaaggaaaaaggccggatagcggcccagctgcagggaatagaggcagacatgctcgatcaggaagctgcattcatgcagattcaagaggcgaagaccatggtggaggaggacctgcagcgtcggctggaggaattcgaaggagagcgagagcggttgcagagaatggccgattctgcggcgtctctagaacaacagctcgaacaagtcaagctgaccctgctgcaaagggaccagcagctcgaggcccttcagcaggagcacctggacctaatgaagcagctcactctgacccaagaagccctccagagcagagaacagagtttagacgcactgcagacacattatgacgagttacaggcccggctgggagagttacagggcgaggccgcttccagagaagataccatttgcctgctgcagaacgagaagatcattttggaagcagctcttcaggccgccaagagtgggaaagaggagctcgaccgaggggctcggcggcttgaagagggtacagaggagacgagcgaaacgttagagaaactgagggaggagttggccatcaaaagcggacaggtggagcatctgcagcaagagaccgccgcattgaaaaagcagatgcagaagatcaaggaacagtttcttcaacagaaagtaatggtcgaggcctatagacgggatgcgacctctaaggaccagttgatttctgagcttaaagcgacacggaagcggctggactcggagctgaaagagcttcgccaggagctaatgcaggtccatggcgagaagaggacggctgaggccgaactgtctcgactccatcgagaagtcgctcaggtgagacagcacatggccgatctggagggacacttgcagagtgcccagaaagaaagagacgaaatggagacacacctgcagagtctgcagtttgataaagagcagatggtggccgtgacagaagctaacgaggcgctgaaaaaacagatagaagagctgcagcaggaagctaggaaagccataactgaacagaagcaaaagatgaggcgcctgggctccgacttgacttctgcgcagaaagagatgaaaactaagcacaaggcatatgagaacgccgttggcattctgagtcgtcgtctccaggaagccttggcagctaaagaagccgccgatgccgagctcgggcaattgagggcacaaggcggctcatccgattcctccttagcactccacgagcgaattcaggccttagaggccgaattacaggccgtcagtcattccaagaccctcctagaaaaagagctccaggaagttattgctctcaccagccaagagcttgaagaatcaagagaaaaggttttggagctagaggacgagttgcaggagagtaggggtttccggaaaaagatcaagaggctggaagagtcaaacaaaaagcttgcactggaattggaacacgaaaaagggaagctgacaggactaggtcagagtaacgccgccctgcgggaacataacagcatcttagaaacagctctggctaaacgcgaagctgatctggtacagctgaacctgcaagtgcaggctgtgttacagcgcaaggaagaagaggatcgccagatgaagcacctcgttcaggcgctacaggcctcacttgaaaaagagaaggagaaagtgaattcgcttaaagagcaagttgccgccgccaaagtcgaggcgggccacaatagacgccactttaaagccgcatcgctagaactgtcagaagttaaaaaagagctgcaggccaaggagcacttagttcaaaaattgcaagcagaagcagatgatttgcagatccgcgaaggtaagcatagccaggaaatcgcccagtttcaggcggagttagccgaagcccgcgcgcaactccagctgctccaaaagcagctcgacgaacagctgtcaaagcagccagtgggaaaccaggagatggagaacttgaaatgggaggttgaccagaaagagcgagagattcagagcttgaagcaacagctggatctcacagaacagcagggaaggaaagaattggagggactccagcaactgctgcaaaacgtcaagtctgaactggagatggctcaagaagatctcagcatgacacagaaggataagtttatgctgcaggctaaggtgtcagagctgaaaaataatatgaagaccctgcttcagcagaatcaacagttgaagctggatcttcgaagaggcgcagcaaaaacgcgcaaggagcccaaaggcgaggcttcttctagtaacccagcaactcccataaagattccagattgccctgtgccagcttccctcctggaagaactgttacgtccccctccagcagtaagcaaggagccacttaagaacctaaactcctgcctccagcagctcaagcaggagatggacagcctacagagacagatggaggaacacgcccttaccgtgcacgagtcgcttagcagttggactccactggagccagctactgcatcgcccgttcctcccggaggtcacgccggaccccggggtgatccccagcgccatagtcagagccgggcgagcaaagagggtcccggcgagtag

SEQ ID NO: 160123 - DNA, 4173 bp, Artificial Sequence
  derived and/or modified sequence
atggacggagccagcgcagagcaagatggcctgcaggaagacaggtcgcatagcgggccctcgtctctgcctgaggcccctctgaagccacccggtccgctggtgccccctgaccagcaagataaagtccagtgtgcagaggttaacagagcatcaacagagggcgagagtcctgacggccccggccagggcggattatgccaaaatgggccgacgcctccattcccagatccaccttcaagcctcgatcccactaccagccccgtgggccctgatgccagtcccggagtggccggattccatgacaacctccggaaatcccaggggacctctgccgagggctcagtccggaaagaagccctgcagtccctaaggctcagtcttcctatgcaagaaacacaactttgtagcacagacagtccgctgccgttggaaaaagaggagcaggtaaggctgcaggctagaaagtggcttgaagagcagctcaagcaatatcgcgtaaagcggcagcaagagcggagctcacagccagccacaaaaactcgactctttagcacattggatccagagctgatgttaaaccctgaaaatcttcctagggcaagcacactagctatgacaaaagagtattcatttttgcgcacaagtgtcccaaggggtccaaaagttgggagcctcggacttccagcacatcccagggagaagaagacctcaaagagtagtaagatcaggagcctcgccgattataggaccgaagattccaatgcaggcaactccggtggcaatgtccccgccccggactcgaccaaagggtcactgaaacagaataggtcatcggccgcttccgtggtctccgagatctcgctctcccccgacacagacgatcgattagagaatacttctctggcgggcgacagtgtgtcagaagtcgatggcaacgattctgactccagcagttacagcagcgcttcgacaagggggacgtatggcatcctgtccaagacagttgggacccaggataccccctacatggtcaatgggcaggaaatacccgccgacactctgggccaatttcccagtattaaagacgtcctccaggccgctgctgccgaacaccaggatcaaggacaggaagtgaacggggaggtacggagtagacgggactctatttgttccagtgtttccttggagtcttccgctgccgagacccaggaggagatgcttcaggtgttgaaggagaaaatgcggcttgagggccaactggaagccctgagcctggaggcctcacaagctcttaaagagaaagcagagctccaggcgcagctggctgcgctctccactaagctccaagcccaggtggaatgcagccattcctcccagcagcggcaggatagtttgtcctcagaggtggacaccctcaaacagtcttgttgggaccttgagcgcgcaatgaccgatttgcagaatatgctggaagccaagaatgcgtcgctggcctcgagtaataacgacctgcaggtagcagaggagcagtatcaacggctaatggccaaagtggaggatatgcaaaggagcatgctctccaaagacaacactgtacacgatctgcgtcaacagatgaccgcacttcagtcccagctccagcaagtccaactggagcgcacaacactgacctcgaagcttaaggctagtcaagccgagatttcaagcctccaatcagtgagacagtggtaccagcaacaacttgctctcgcccaggaggcccgggtgcgtctgcagggcgaaatggcccacattcaggtagggcagatgactcaggccggcctcctggaacatctcaaactcgagaacgtttccctttctcaacaactcactgagactcagcataggtccatgaaagaaaaggggcgcattgcggcccagctgcagggtatcgaggctgacatgctggatcaggaggccgccttcatgcaaatccaggaggctaagaccatggtggaggaagacctgcagcgtagattggaggagtttgaaggggagcgagagagactccagagaatggctgacagcgccgcttccttagagcaacagctggaacaggtaaaattgaccctgctccagcgcgatcagcagctggaggcattgcagcaggagcacctggatctgatgaaacagctgacactgacgcaagaggcactgcagagtagagagcagagcctcgatgccctgcagacacactacgacgaattgcaggcgcgactgggcgagctacaaggcgaagcagctagccgggaagacaccatctgcctgcttcagaatgaaaaaataatcctggaagccgcactccaagccgccaaatctggcaaagaagaattagaccgtggcgcgcgcaggttggaagagggtactgaggagacgagtgagactctggagaagctacgggaagaattggcaatcaagtctggacaggtggagcatctgcaacaagaaacggccgccctgaagaagcagatgcagaagattaaggagcagttcctgcagcagaaggtcatggtcgaggcttatagacgggacgccacctcaaaggatcagctgatctctgaactcaaagccacacgaaagcgccttgactctgaactcaaggagttaaggcaggaactcatgcaggtccacggagagaagaggacggcggaggccgagctaagtcgcctccatcgcgaagtggcccaggtcaggcagcacatggcagatttggaaggccatctccaaagcgcccagaaggaaagagatgagatggaaacacacctgcaaagcctgcagttcgataaagagcagatggtggctgttacagaagctaatgaggctctcaagaaacagattgaagagctccaacaggaggccaggaaagcgattacagagcagaagcagaagatgagacgccttggcagtgatctgactagtgctcagaaagaaatgaaaaccaagcacaaggcctacgagaatgcagtaggaatcctcagtcggcggctgcaggaagccctggccgccaaggaagcggcagacgctgaacttggacaactccgggcacagggagggagttccgattccagcctcgcgctgcatgagaggatccaagctctggaggccgagctgcaagctgtgagccatagcaaaacactgctcgaaaaagagttacaggaagtcatcgccctgacgagccaggaactcgaggagagcagagaaaaggtgttggaacttgaggatgagttgcaggaatcccgcggcttcagaaagaagatcaaacgcctcgaagaatctaataagaaactggccctggagctggaacacgaaaaagggaagctaacaggactgggacaatcaaacgccgcccttcgagagcacaactctattctggagactgcccttgcgaagcgcgaggcagatctcgtccagctgaacctgcaggtgcaggctgtgctgcagaggaaagaagaggaagacaggcagatgaagcacctcgtccaggccttgcaagccagtctcgagaaagaaaaagagaaagtgaatagtttgaaggaacaggtggccgctgcaaaggtggaagcgggccacaacaggcggcactttaaggccgcctccctggaactgagcgaggtgaaaaaggaactgcaggcaaaggagcacttagtgcagaagctccaggccgaggccgacgatctccaaattagggaaggaaaacactcacaagagattgcacagttccaagccgaactggcagaagctagagcacagcttcagctcctccagaagcagcttgacgagcagctgagcaagcagcccgtcggaaatcaggagatggagaacttgaaatgggaagtggatcagaaagaacgcgagattcagtccctgaaacagcagctcgatcttacggaacagcaggggagaaaggaactcgaggggcttcaacagctgctgcagaatgtgaaatctgagctggagatggcacaggaggatctctccatgacgcagaaggacaaattcatgctacaggcaaaagtaagtgagttgaaaaataatatgaaaactctccttcagcagaatcagcagctgaaactcgatctgagacgcggagcggccaagactgtgctcagacccgcatcccttccaggttag

SEQ ID NO: 160124 - DNA, 9252 bp, Artificial Sequence
  derived and/or modified sequence
ggcctgggcgcgtccctgcagcgtggcgggacggccccgttccagtcacccccgcctcgctgcggtggcctcgggcctgggcgcccgccttcagctgcggcggagctggctctgtaaatgccggtgcccgcgagccctcctgaatgcttgtctgcgcccgacgagcgcggcctgtcccgaagctgtccactgccaccactcgggcagtgcttgctttagcctggccctttgcagctgaaaggcgtgacatggtgtcgggtggttcgtgggaagtcggggtttcaggagtccgtgtacttccttgtttgtctttgtcgctggccgacttgtcttcattccaggtggccagagcgagtggggccgggcgttgtcacgggtatcatgatattagctggtttgacatcaagtcatttgtgagtcatcagatcttctcctgaaaatgggagacacagtagggcccctcccaggagctcttggctgttgctgatggcagaagccaagcttgtccaaggttcacttgtagcccctcagcgtcagctcagctggtgtcgtcctgaccatggacggcgcgtcggccgagcaagatggcctccaggaggacagatcccacagtggcccctcgtctctccccgaggccccactgaagcccccgggcccactggtgccacctgaccagcaggacaaagtccagtgtgccgaggtaaacagagcatccacggaaggggaaagcccggatggacctggccagggaggcctctgtcagaacgggccaacgccacccttcccagaccctccgtcgtctctcgatcccaccacaagcccagtgggccctgatgcctctccaggtgtggctggtttccatgacaacctaaggaagtctcagggaactagtgctgagggcagtgttagaaaagaagctttgcagtctctcagactcagtcttcctatgcaagaaacgcaactgtgctctacagattctcccctgcccctggagaaggaggagcaggtccgacttcaggctcggaagtggctggaagagcagctcaaacagtacagggtgaagcgccagcaggagaggtccagtcaacctgcaaccaaaacgagactttttagcacgcttgatcctgagctcatgttaaacccagaaaacttaccaagggccagtaccctggctatgacaaaagaatattccttcctgcgcaccagtgtccctcgggggcctaaggtgggcagcctggggcttccggcacatcctagggagaaaaaaacttccaaatcaagcaaaatccggtctctggccgattacagaactgaagattcaaatgcggggaattctgggggaaatgtcccggctcccgattctaccaagggttccctgaagcagaacagaagcagtgcggcgtccgttgtgtctgagatcagcctgtcccccgacactgacgaccgtctggagaacacctccctggctggagacagcgtgtctgaggtggatggaaatgacagcgacagctcatcgtacagcagcgcctccacccgagggacctatggcattctgtcgaagacagtgggcacgcaggacaccccctatatggtcaacggccaggagattcctgcggataccctgggccagttcccctccattaaggacgtcctccaggccgcagccgctgagcaccaagaccaggggcaggaggtcaacggggaggtgcggagtcggagagacagcatctgcagcagcgtgtccttggagagctctgcagcagaaacacaggaggagatgctgcaggtgctcaaagagaaaatgcgactcgaaggacagctggaagccttgtcactggaggcgagtcaggcacttaaagagaaggctgagctgcaggcccagctggccgccctcagcacgaagctgcaggcgcaggtggagtgcagccacagcagccagcagcggcaggattcgctgagctcggaggtggacaccctgaagcagtcgtgctgggacctggagcgagccatgactgacctgcagaacatgctggaggcaaaaaatgccagcctggcgtcgtccaacaacgacttgcaggtggccgaggagcagtaccagaggcttatggccaaggtagaggacatgcagaggagcatgctcagcaaggacaacacagtgcacgacctgcgacagcagatgacagccttgcagagccagcttcagcaggtgcagctggagcggacgacgctgaccagcaagctgaaggcgtcgcaggcggagatctcgtccctgcagagtgtccggcagtggtaccagcagcagctcgccctggcacaggaggcccgcgtcaggctgcagggtgagatggcccacatccaggttggacagatgacccaggcaggtctcctggagcacctgaaactcgagaatgtgtccctgtcccagcagctgacggaaactcagcacaggtccatgaaggagaaggggcgcatcgcggcacagctgcagggcattgaggctgacatgttggatcaggaagcagccttcatgcagattcaggaggcaaagacgatggtggaggaggaccttcagaggaggctggaagagtttgaaggtgagagggagcggctgcagaggatggcggactcggcggcatccctggagcagcagctggagcaggtgaagttgactttactccagcgagaccagcagcttgaggctttgcagcaggagcacctggacctgatgaaacagctcaccttgactcaggaggctctgcagagcagggagcagtccctcgatgccctgcagacacactacgatgagctgcaggccaggctgggggagctgcagggcgaggccgcctccagggaggacacgatctgcctcctgcagaacgagaagatcatcttggaggcggctttgcaggcggccaagagtggcaaggaggagcttgacagaggagcaagacgcttggaagaaggtaccgaggaaacgtcggaaactttagagaagttaagagaagaattagctatcaaatccggccaggtggaacacctgcagcaggagactgctgctctgaaaaagcaaatgcaaaaaataaaggaacagtttctccaacaaaaggtgatggtggaggcctaccggcgcgacgccacctccaaagaccagctcatcagtgagctgaaagccaccaggaagaggctggactcggagctgaaggagctgcggcaggagctgatgcaagtgcacggggagaagcggactgccgaggcggagctctcgcgcctgcacagagaggtggcccaggtccgtcagcacatggcggaccttgaagggcatctccagtcggcgcagaaggagcgagacgagatggaaacacacttgcagtcgttgcagttcgataaggagcagatggtcgcggtcacagaggccaatgaggcgctgaagaaacaaatcgaagagttgcagcaagaggcccggaaggccatcacggaacagaagcagaagatgaggcggctgggctcagacttgaccagcgcccagaaggagatgaagaccaaacataaggcctacgagaacgccgtgggcatcctcagccgccgcctgcaggaggccctcgcggccaaggaggctgcggacgcggagctgggccagctccgagcccagggtggcagcagtgacagcagcctggctctacatgaaaggatccaggccctggaggcggagctgcaggctgtcagtcatagcaagacgctgctggaaaaggaactgcaggaggtcatagcgctgaccagccaggagctggaggagtcccgggagaaggtgctggagctggaggacgagcttcaagaatccagaggctttaggaagaagataaaacgccttgaggagtcaaacaagaagttggctcttgaattagagcacgagaaagggaagcttacgggcctcggtcagtccaacgcagctctgcgggaacacaacagcatcctagaaacagctttggccaagagggaggcagacctagtccagttgaaccttcaggtgcaggcagttttgcagcgcaaagaagaggaggatcgccagatgaagcatcttgtccaggccctgcaggcctcactagagaaggagaaggagaaggtgaacagcctcaaggagcaggtggctgctgccaaggtggaagccgggcataaccgccgccacttcaaggcggcctccttggagctgagtgaggtgaagaaggagctgcaggccaaggaacacctggtgcagaagctgcaggccgaggccgacgaccttcagattcgggaggggaaacattcccaggagatagcacagttccaagcagagctggccgaggcccgggcacagctccagctcctgcagaagcagctggacgagcagctcagcaaacagcccgtgggaaaccaagagatggaaaatctcaaatgggaggtggatcagaaagaaagagaaatccagtccttgaagcagcagctggacttgacggagcagcagggcaggaaggaactggaagggctacagcagctgctgcagaacgtcaagtctgagttggagatggcccaggaagacctgtccatgacccagaaggataaatttatgctccaggcaaaagtgtcggagctgaagaacaacatgaagaccctgctccagcagaaccagcagctcaagctggacctacgccgcggcgcggccaagacgagaaaggagccgaaaggcgaggccagctcttccaaccctgccacgcccatcaagatcccggactgcccagttcccgcctcgctgctggaggagctgctgagaccaccgcccgccgtgagcaaggagcccctcaagaacctgaacagctgcctccagcagctcaagcaggagatggacagcctgcagcgccagatggaggagcacgccctgacggtgcacgagtctctgtcctcgtggacgccgctggagccagccactgccagccctgtgcccccggggggtcacgccggcccacgcggcgacccacagagacacagtcagagcagggcttccaaagaagggccgggagagtgactgctgtggactcgcctccgtgcgccgctgccccagaaggctcttatcaatgttatttatttgattgtgtggtcgatgtttttctaagacatgaaatttaagttttgttttgcctttaacaagaagtaaaatatatagcagaatgagagccaaggactagaaaaacattcgaagatcacaattagcttttcacatggaatgaccaactcttaaaagcctgataggctctcggcgaggagctttgaacgtgtctgaagggttacttgtaggtcgtggcttctgagcggccaccgatgctgctctctgcgggtgacagggagaggctgcgtaactgggagcagctgtgtgacagggtctgcggcaccgcgcctggccaggccggctgcagtttctcacttccctgttccattcagtaagagctttacttttccgcagaaatgaaattttatctgtacctttggctttttacttgtttttttggatagccatcccaccataggatgtgtacatagatactgaatatcataatccaatctttgttttttttttttttttttttttgagacagagtctcgctttgttgcccaggctggagtgcagtggcacactctccgctcactgcaagctccgcctcccaggttcatgcgattctcctgcctcagcctctcgagtagctgggattacaggcgtgcgccactatgccaggctaatgtttgtatttttagtagcaatggggtttcaccatgttggccaggatggtctcgatctcctgacctcaagtgatctgcccatctcagcctcccaaagtgctgggattacaggcgtgagcccctgcgcccggcctgtcacccagtctttaagaagcatatgctcatgttattgaagaagaacctacttattattgattgccttttgaaaatttgttgggaataatttacctgcaggatttagggatagtcagaaaattctaagaaatataattattttatttaccttctaaagccaaatattcttacacagaaaggtcctctgttgttctggttttactttgttgctgaggatctttccttcctgctggtctcttcctctcaggccactggccctgtgtgattccaccgtggctggccactgggaaggggcagcttggacccttggtcaggcctgacggccatcaggaggcacaaggacactgaggccccatatctgatctgacctttgggggggcacagggagaggccggtggaggaggaggaggagagcagaccaggggctccctgcagcgactcccgcggtttcccctggagtcagccaggtgtaggtcgcaggcggtaacaaacctcacactcctgttccccaagtgaaaatctttaccattgtctgtgggagcgcctgtactcgtgtgtaggagcacctgtacttctgcagtcatcgagaagtcctggatcttttgtggttacaccagcatcatgtggcaagcagaggcgacttccggaagagacaggcaggcaccgtgaggaaggtggctgtgctctcccaggtgtctcagagacagatgccttatttaaaatcagcacgacatgtgtgagatcttctgtttcctaccccaaatcctgaaaccctgcagacactggctgactgggagaggtggggtctgtaagttgtcccctagtttgctaagaaaatctaaaataatatttattatatgagttaggagagagagaatgggtccgcgtggcctcctctgcagatgtactggtctgaaatgaggttctgagtcactggccaggccagatgtgctcatgtcggtgtctggtgtctgttttgtggagaaaacagtatggtgtgttttaagctatttgtgttctgttgtaatatacttttagaaggttaattggtaaggttaaggtagcattaaccacaaagatgtttggtatttaaaaaatattctctagcaaatattggaatttccaaaatatatcatttgtacagggttaattttgaaataatacttgaaaatttcattataaatatatcctactttttatcttaagttgaagatgttatttactaaattgttcttgtaccattagaaaaaaaaatacggcaatttacgttcttatttattttggctgtactacccctttgttttaattttaaaatcaagaaatcgggccgggcgcggtggctcatgcctgtaatcccagcactttgggaggccgaggcgggtggatcacctgaggtcaagaggtccagaccatcctggccaacatggcaaaaccccgtctttactaaacatacaaaaattagccgggtgtcgtagtgcgcacctataatcccagctacttgggaggctgaggcaggagaatcacttgaacccaggaggcggagcttgcagtgagccgagatcgcgccactgccctccagcctgggcaacagagcgagactccgtctcaaaaataaataaatgattttaaaaaatctaaaatcgagaaatcacacattcagtggggagcgacttctccttgcttatgggaagtcctcaagtgagtgatgttcaccatgtatttttttttctcttaggacagactaattctgaaaataccgaaggaaaagtagctctatgttctcaccccggttttcctgcgtgtgtgcccttgggtgcgatgcctcccccagcgctctgtggtcgccggtgccagggccccctctggtttggcagggcctggctgcctttgctccctgcagtgagtcttttggtgttttcatgcacggcttgtgcttctggatctgaggcctctcgtgttcacgcggacacttccttccttaagaagacgcctaaaagaggaagttggaattttttttttttttttttgagacagagtctcgctctgtcgcccaggctggagtgcagtggcgtgatctctgctcactgcaagctccgccatctgggttcaagcgattctcctgcctcattctccccagtagctgggattacaggtgcccgccaccacaccagcctaatttttgtatttttagaggggtggagttccaccatgttggccaggctggtcttgaactcttgacctcaggtgatcctgagcctcagcctcccaaagtgctggaattataggcgtgaaccaccgcccccggctgcagttggatttttaaattgcttttttttattgttgaggtttttttatctccaagggactctcccggcacttctaccttccagagttacttcagtgcataaagtttgaattattttgttcttgtgggcagaagtgggaatgatggaatatcctcacggaaaaggcagtgaagttgggagtactgcttacaaaacagggtcaccagtgcattatgtggcgtgttcatccccacgccgtgtgtcacgggctagggcggcgtgttcatccccacaccgtgtgtcacaacaggctagggcacttcacgatgtcactacttgtttttctgatgttccaaaaacaacgtaacttggttttcatgtgtttttccgtggtatatgtgagattgatgctacgggtcttacggactcacacccgttcccactctctgcaatatggatcaggcagtgtttctgataggatgtgaaatggactctcctcgggtgggtccagcaggggccctgcccaccagaacacagtccgtgctgtgctgcgctaaggagctggccctcaactctccttggtgcagggttcccacaaccgagttctagttccctgaggtctttaaaaacaaaaacagaatgttgtacgtgaagattctaggaggggagggaccagcaaatctgagagaaccgtcctggggcctcccttcgaggagccctctgatgtgaggagggacttgagttgagtgacgctgtggtgtgaggtgttctgagctcactgaccggaaggtccaggtgaatctcgtcataagtgatctcaggctctcacaggatccggagggaaatgtgttagagggtctggaaaattcagtgcttttgagttacttgtttttattaaaaatttcctcacaaaagagagtcctcaagttgtggctgttcttgggaaaggggtcaccgtgtctgacaaagtgtaactttaaaaagcacgttgattttttacaaatgtaagtgtgcttgggaattccttaaattttgtgcaataaactattttttggtaaagattttc

SEQ ID NO: 160125 - DNA, 8871 bp, Artificial Sequence
  derived and/or modified sequence
ggtatcatgatattagctggtttgacatcaagtcatttgtgagtcatcagatcttctcctgaaaatgggagacacagtagggcccctcccaggagctcttggctgttgctgatggcagaagccaagcttgtccaaggttcacttgtagcccctcagcgtcagctcagctggtgtcgtcctgaccatggacggcgcgtcggccgagcaagatggcctccaggaggacagatcccacagtggcccctcgtctctccccgaggccccactgaagcccccgggcccactggtgccacctgaccagcaggacaaagtccagtgtgccgaggtaaacagagcatccacggaaggggaaagcccggatggacctggccagggaggcctctgtcagaacgggccaacgccacccttcccagaccctccgtcgtctctcgatcccaccacaagcccagtgggccctgatgcctctccaggtgtggctggtttccatgacaacctaaggaagtctcagggaactagtgctgagggcagtgttagaaaagaagctttgcagtctctcagactcagtcttcctatgcaagaaacgcaactgtgctctacagattctcccctgcccctggagaaggaggagcaggtccgacttcaggctcggaagtggctggaagagcagctcaaacagtacagggtgaagcgccagcaggagaggtccagtcaacctgcaaccaaaacgagactttttagcacgcttgatcctgagctcatgttaaacccagaaaacttaccaagggccagtaccctggctatgacaaaagaatattccttcctgcgcaccagtgtccctcgggggcctaaggtgggcagcctggggcttccggcacatcctagggagaaaaaaacttccaaatcaagcaaaatccggtctctggccgattacagaactgaagattcaaatgcggggaattctgggggaaatgtcccggctcccgattctaccaagggttccctgaagcagaacagaagcagtgcggcgtccgttgtgtctgagatcagcctgtcccccgacactgacgaccgtctggagaacacctccctggctggagacagcgtgtctgaggtggatggaaatgacagcgacagctcatcgtacagcagcgcctccacccgagggacctatggcattctgtcgaagacagtgggcacgcaggacaccccctatatggtcaacggccaggagattcctgcggataccctgggccagttcccctccattaaggacgtcctccaggccgcagccgctgagcaccaagaccaggggcaggaggtcaacggggaggtgcggagtcggagagacagcatctgcagcagcgtgtccttggagagctctgcagcagaaacacaggaggagatgctgcaggtgctcaaagagaaaatgcgactcgaaggacagctggaagccttgtcactggaggcgagtcaggcacttaaagagaaggctgagctgcaggcccagctggccgccctcagcacgaagctgcaggcgcaggtggagtgcagccacagcagccagcagcggcaggattcgctgagctcggaggtggacaccctgaagcagtcgtgctgggacctggagcgagccatgactgacctgcagaacatgctggaggcaaaaaatgccagcctggcgtcgtccaacaacgacttgcaggtggccgaggagcagtaccagaggcttatggccaaggtagaggacatgcagaggagcatgctcagcaaggacaacacagtgcacgacctgcgacagcagatgacagccttgcagagccagcttcagcaggtgcagctggagcggacgacgctgaccagcaagctgaaggcgtcgcaggcggagatctcgtccctgcagagtgtccggcagtggtaccagcagcagctcgccctggcacaggaggcccgcgtcaggctgcagggtgagatggcccacatccaggttggacagatgacccaggcaggtctcctggagcacctgaaactcgagaatgtgtccctgtcccagcagctgacggaaactcagcacaggtccatgaaggagaaggggcgcatcgcggcacagctgcagggcattgaggctgacatgttggatcaggaagcagccttcatgcagattcaggaggcaaagacgatggtggaggaggaccttcagaggaggctggaagagtttgaaggtgagagggagcggctgcagaggatggcggactcggcggcatccctggagcagcagctggagcaggtgaagttgactttactccagcgagaccagcagcttgaggctttgcagcaggagcacctggacctgatgaaacagctcaccttgactcaggaggctctgcagagcagggagcagtccctcgatgccctgcagacacactacgatgagctgcaggccaggctgggggagctgcagggcgaggccgcctccagggaggacacgatctgcctcctgcagaacgagaagatcatcttggaggcggctttgcaggcggccaagagtggcaaggaggagcttgacagaggagcaagacgcttggaagaaggtaccgaggaaacgtcggaaactttagagaagttaagagaagaattagctatcaaatccggccaggtggaacacctgcagcaggagactgctgctctgaaaaagcaaatgcaaaaaataaaggaacagtttctccaacaaaaggtgatggtggaggcctaccggcgcgacgccacctccaaagaccagctcatcagtgagctgaaagccaccaggaagaggctggactcggagctgaaggagctgcggcaggagctgatgcaagtgcacggggagaagcggactgccgaggcggagctctcgcgcctgcacagagaggtggcccaggtccgtcagcacatggcggaccttgaagggcatctccagtcggcgcagaaggagcgagacgagatggaaacacacttgcagtcgttgcagttcgataaggagcagatggtcgcggtcacagaggccaatgaggcgctgaagaaacaaatcgaagagttgcagcaagaggcccggaaggccatcacggaacagaagcagaagatgaggcggctgggctcagacttgaccagcgcccagaaggagatgaagaccaaacataaggcctacgagaacgccgtgggcatcctcagccgccgcctgcaggaggccctcgcggccaaggaggctgcggacgcggagctgggccagctccgagcccagggtggcagcagtgacagcagcctggctctacatgaaaggatccaggccctggaggcggagctgcaggctgtcagtcatagcaagacgctgctggaaaaggaactgcaggaggtcatagcgctgaccagccaggagctggaggagtcccgggagaaggtgctggagctggaggacgagcttcaagaatccagaggctttaggaagaagataaaacgccttgaggagtcaaacaagaagttggctcttgaattagagcacgagaaagggaagcttacgggcctcggtcagtccaacgcagctctgcgggaacacaacagcatcctagaaacagctttggccaagagggaggcagacctagtccagttgaaccttcaggtgcaggcagttttgcagcgcaaagaagaggaggatcgccagatgaagcatcttgtccaggccctgcaggcctcactagagaaggagaaggagaaggtgaacagcctcaaggagcaggtggctgctgccaaggtggaagccgggcataaccgccgccacttcaaggcggcctccttggagctgagtgaggtgaagaaggagctgcaggccaaggaacacctggtgcagaagctgcaggccgaggccgacgaccttcagattcgggaggggaaacattcccaggagatagcacagttccaagcagagctggccgaggcccgggcacagctccagctcctgcagaagcagctggacgagcagctcagcaaacagcccgtgggaaaccaagagatggaaaatctcaaatgggaggtggatcagaaagaaagagaaatccagtccttgaagcagcagctggacttgacggagcagcagggcaggaaggaactggaagggctacagcagctgctgcagaacgtcaagtctgagttggagatggcccaggaagacctgtccatgacccagaaggataaatttatgctccaggcaaaagtgtcggagctgaagaacaacatgaagaccctgctccagcagaaccagcagctcaagctggacctacgccgcggcgcggccaagacgagaaaggagccgaaaggcgaggccagctcttccaaccctgccacgcccatcaagatcccggactgcccagttcccgcctcgctgctggaggagctgctgagaccaccgcccgccgtgagcaaggagcccctcaagaacctgaacagctgcctccagcagctcaagcaggagatggacagcctgcagcgccagatggaggagcacgccctgacggtgcacgagtctctgtcctcgtggacgccgctggagccagccactgccagccctgtgcccccggggggtcacgccggcccacgcggcgacccacagagacacagtcagagcagggcttccaaagaagggccgggagagtgactgctgtggactcgcctccgtgcgccgctgccccagaaggctcttatcaatgttatttatttgattgtgtggtcgatgtttttctaagacatgaaatttaagttttgttttgcctttaacaagaagtaaaatatatagcagaatgagagccaaggactagaaaaacattcgaagatcacaattagcttttcacatggaatgaccaactcttaaaagcctgataggctctcggcgaggagctttgaacgtgtctgaagggttacttgtaggtcgtggcttctgagcggccaccgatgctgctctctgcgggtgacagggagaggctgcgtaactgggagcagctgtgtgacagggtctgcggcaccgcgcctggccaggccggctgcagtttctcacttccctgttccattcagtaagagctttacttttccgcagaaatgaaattttatctgtacctttggctttttacttgtttttttggatagccatcccaccataggatgtgtacatagatactgaatatcataatccaatctttgttttttttttttttttttttttgagacagagtctcgctttgttgcccaggctggagtgcagtggcacactctccgctcactgcaagctccgcctcccaggttcatgcgattctcctgcctcagcctctcgagtagctgggattacaggcgtgcgccactatgccaggctaatgtttgtatttttagtagcaatggggtttcaccatgttggccaggatggtctcgatctcctgacctcaagtgatctgcccatctcagcctcccaaagtgctgggattacaggcgtgagcccctgcgcccggcctgtcacccagtctttaagaagcatatgctcatgttattgaagaagaacctacttattattgattgccttttgaaaatttgttgggaataatttacctgcaggatttagggatagtcagaaaattctaagaaatataattattttatttaccttctaaagccaaatattcttacacagaaaggtcctctgttgttctggttttactttgttgctgaggatctttccttcctgctggtctcttcctctcaggccactggccctgtgtgattccaccgtggctggccactgggaaggggcagcttggacccttggtcaggcctgacggccatcaggaggcacaaggacactgaggccccatatctgatctgacctttgggggggcacagggagaggccggtggaggaggaggaggagagcagaccaggggctccctgcagcgactcccgcggtttcccctggagtcagccaggtgtaggtcgcaggcggtaacaaacctcacactcctgttccccaagtgaaaatctttaccattgtctgtgggagcgcctgtactcgtgtgtaggagcacctgtacttctgcagtcatcgagaagtcctggatcttttgtggttacaccagcatcatgtggcaagcagaggcgacttccggaagagacaggcaggcaccgtgaggaaggtggctgtgctctcccaggtgtctcagagacagatgccttatttaaaatcagcacgacatgtgtgagatcttctgtttcctaccccaaatcctgaaaccctgcagacactggctgactgggagaggtggggtctgtaagttgtcccctagtttgctaagaaaatctaaaataatatttattatatgagttaggagagagagaatgggtccgcgtggcctcctctgcagatgtactggtctgaaatgaggttctgagtcactggccaggccagatgtgctcatgtcggtgtctggtgtctgttttgtggagaaaacagtatggtgtgttttaagctatttgtgttctgttgtaatatacttttagaaggttaattggtaaggttaaggtagcattaaccacaaagatgtttggtatttaaaaaatattctctagcaaatattggaatttccaaaatatatcatttgtacagggttaattttgaaataatacttgaaaatttcattataaatatatcctactttttatcttaagttgaagatgttatttactaaattgttcttgtaccattagaaaaaaaaatacggcaatttacgttcttatttattttggctgtactacccctttgttttaattttaaaatcaagaaatcgggccgggcgcggtggctcatgcctgtaatcccagcactttgggaggccgaggcgggtggatcacctgaggtcaagaggtccagaccatcctggccaacatggcaaaaccccgtctttactaaacatacaaaaattagccgggtgtcgtagtgcgcacctataatcccagctacttgggaggctgaggcaggagaatcacttgaacccaggaggcggagcttgcagtgagccgagatcgcgccactgccctccagcctgggcaacagagcgagactccgtctcaaaaataaataaatgattttaaaaaatctaaaatcgagaaatcacacattcagtggggagcgacttctccttgcttatgggaagtcctcaagtgagtgatgttcaccatgtatttttttttctcttaggacagactaattctgaaaataccgaaggaaaagtagctctatgttctcaccccggttttcctgcgtgtgtgcccttgggtgcgatgcctcccccagcgctctgtggtcgccggtgccagggccccctctggtttggcagggcctggctgcctttgctccctgcagtgagtcttttggtgttttcatgcacggcttgtgcttctggatctgaggcctctcgtgttcacgcggacacttccttccttaagaagacgcctaaaagaggaagttggaattttttttttttttttttgagacagagtctcgctctgtcgcccaggctggagtgcagtggcgtgatctctgctcactgcaagctccgccatctgggttcaagcgattctcctgcctcattctccccagtagctgggattacaggtgcccgccaccacaccagcctaatttttgtatttttagaggggtggagttccaccatgttggccaggctggtcttgaactcttgacctcaggtgatcctgagcctcagcctcccaaagtgctggaattataggcgtgaaccaccgcccccggctgcagttggatttttaaattgcttttttttattgttgaggtttttttatctccaagggactctcccggcacttctaccttccagagttacttcagtgcataaagtttgaattattttgttcttgtgggcagaagtgggaatgatggaatatcctcacggaaaaggcagtgaagttgggagtactgcttacaaaacagggtcaccagtgcattatgtggcgtgttcatccccacgccgtgtgtcacgggctagggcggcgtgttcatccccacaccgtgtgtcacaacaggctagggcacttcacgatgtcactacttgtttttctgatgttccaaaaacaacgtaacttggttttcatgtgtttttccgtggtatatgtgagattgatgctacgggtcttacggactcacacccgttcccactctctgcaatatggatcaggcagtgtttctgataggatgtgaaatggactctcctcgggtgggtccagcaggggccctgcccaccagaacacagtccgtgctgtgctgcgctaaggagctggccctcaactctccttggtgcagggttcccacaaccgagttctagttccctgaggtctttaaaaacaaaaacagaatgttgtacgtgaagattctaggaggggagggaccagcaaatctgagagaaccgtcctggggcctcccttcgaggagccctctgatgtgaggagggacttgagttgagtgacgctgtggtgtgaggtgttctgagctcactgaccggaaggtccaggtgaatctcgtcataagtgatctcaggctctcacaggatccggagggaaatgtgttagagggtctggaaaattcagtgcttttgagttacttgtttttattaaaaatttcctcacaaaagagagtcctcaagttgtggctgttcttgggaaaggggtcaccgtgtctgacaaagtgtaactttaaaaagcacgttgattttttacaaatgtaagtgtgcttgggaattccttaaattttgtgcaataaactattttttggtaaag

SEQ ID NO: 160126 - DNA, 5496 bp, Artificial Sequence
  derived and/or modified sequence
tccgccggagcatccgggccgggcggcctccggggctgccagagcagcagggtgaggggctcggaggccgcggcgcctcggggctcgggctcccgctcccgctcccgctcccgcagtgcatgggcgggggaggctcgaggggcggcggcggggcctgggcgcgtccctgcagcgtggcgggacggccccgttccagtcacccccgcctcgctgcggtggcctcgggcctgggcgcccgccttcagctgcggcggagctggctctgtaaatgccggtgcccgcgagccctcctgaatgcttgtctgcgcccgacgagcgcggcctgtcccgaagctgtccactgccaccactcgggcagtgcttgctttagcctggccctttgcagctgaaaggcgtgacatggtgtcgggtggttcgtgggaagtcggggtttcaggagtccgtgtacttccttgtttgtctttgtcgctggccgacttgtcttcattccaggtggccagagcgagtggggccgggcgttgtcacgggtatcatgatattagctggtttgacatcaagtcatttgtgagtcatcagatcttctcctgaaaatgggagacacagtagggcccctcccaggagctcttggctgttgctgatggcagaagccaagcttgtccaaggttcacttgtagcccctcagcgtcagctcagctggtgtcgtcctgaccatggacggcgcgtcggccgagcaagatggcctccaggaggacagatcccacagtggcccctcgtctctccccgaggccccactgaagcccccgggcccactggtgccacctgaccagcaggacaaagtccagtgtgccgaggtaaacagagcatccacggaaggggaaagcccggatggacctggccagggaggcctctgtcagaacgggccaacgccacccttcccagaccctccgtcgtctctcgatcccaccacaagcccagtgggccctgatgcctctccaggtgtggctggtttccatgacaacctaaggaagtctcagggaactagtgctgagggcagtgttagaaaagaagctttgcagtctctcagactcagtcttcctatgcaagaaacgcaactgtgctctacagattctcccctgcccctggagaaggaggagcaggtccgacttcaggctcggaagtggctggaagagcagctcaaacagtacagggtgaagcgccagcaggagaggtccagtcaacctgcaaccaaaacgagactttttagcacgcttgatcctgagctcatgttaaacccagaaaacttaccaagggccagtaccctggctatgacaaaagaatattccttcctgcgcaccagtgtccctcgggggcctaaggtgggcagcctggggcttccggcacatcctagggagaaaaaaacttccaaatcaagcaaaatccggtctctggccgattacagaactgaagattcaaatgcggggaattctgggggaaatgtcccggctcccgattctaccaagggttccctgaagcagaacagaagcagtgcggcgtccgttgtgtctgagatcagcctgtcccccgacactgacgaccgtctggagaacacctccctggctggagacagcgtgtctgaggtggatggaaatgacagcgacagctcatcgtacagcagcgcctccacccgagggacctatggcattctgtcgaagacagtgggcacgcaggacaccccctatatggtcaacggccaggagattcctgcggataccctgggccagttcccctccattaaggacgtcctccaggccgcagccgctgagcaccaagaccaggggcaggaggtcaacggggaggtgcggagtcggagagacagcatctgcagcagcgtgtccttggagagctctgcagcagaaacacaggaggagatgctgcaggtgctcaaagagaaaatgcgactcgaaggacagctggaagccttgtcactggaggcgagtcaggcacttaaagagaaggctgagctgcaggcccagctggccgccctcagcacgaagctgcaggcgcaggtggagtgcagccacagcagccagcagcggcaggattcgctgagctcggaggtggacaccctgaagcagtcgtgctgggacctggagcgagccatgactgacctgcagaacatgctggaggcaaaaaatgccagcctggcgtcgtccaacaacgacttgcaggtggccgaggagcagtaccagaggcttatggccaaggtagaggacatgcagaggagcatgctcagcaaggacaacacagtgcacgacctgcgacagcagatgacagccttgcagagccagcttcagcaggtgcagctggagcggacgacgctgaccagcaagctgaaggcgtcgcaggcggagatctcgtccctgcagagtgtccggcagtggtaccagcagcagctcgccctggcacaggaggcccgcgtcaggctgcagggtgagatggcccacatccaggttggacagatgacccaggcaggtctcctggagcacctgaaactcgagaatgtgtccctgtcccagcagctgacggaaactcagcacaggtccatgaaggagaaggggcgcatcgcggcacagctgcagggcattgaggctgacatgttggatcaggaagcagccttcatgcagattcaggaggcaaagacgatggtggaggaggaccttcagaggaggctggaagagtttgaaggtgagagggagcggctgcagaggatggcggactcggcggcatccctggagcagcagctggagcaggtgaagttgactttactccagcgagaccagcagcttgaggctttgcagcaggagcacctggacctgatgaaacagctcaccttgactcaggaggctctgcagagcagggagcagtccctcgatgccctgcagacacactacgatgagctgcaggccaggctgggggagctgcagggcgaggccgcctccagggaggacacgatctgcctcctgcagaacgagaagatcatcttggaggcggctttgcaggcggccaagagtggcaaggaggagcttgacagaggagcaagacgcttggaagaaggtaccgaggaaacgtcggaaactttagagaagttaagagaagaattagctatcaaatccggccaggtggaacacctgcagcaggagactgctgctctgaaaaagcaaatgcaaaaaataaaggaacagtttctccaacaaaaggtgatggtggaggcctaccggcgcgacgccacctccaaagaccagctcatcagtgagctgaaagccaccaggaagaggctggactcggagctgaaggagctgcggcaggagctgatgcaagtgcacggggagaagcggactgccgaggcggagctctcgcgcctgcacagagaggtggcccaggtccgtcagcacatggcggaccttgaagggcatctccagtcggcgcagaaggagcgagacgagatggaaacacacttgcagtcgttgcagttcgataaggagcagatggtcgcggtcacagaggccaatgaggcgctgaagaaacaaatcgaagagttgcagcaagaggcccggaaggccatcacggaacagaagcagaagatgaggcggctgggctcagacttgaccagcgcccagaaggagatgaagaccaaacataaggcctacgagaacgccgtgggcatcctcagccgccgcctgcaggaggccctcgcggccaaggaggctgcggacgcggagctgggccagctccgagcccagggtggcagcagtgacagcagcctggctctacatgaaaggatccaggccctggaggcggagctgcaggctgtcagtcatagcaagacgctgctggaaaaggaactgcaggaggtcatagcgctgaccagccaggagctggaggagtcccgggagaaggtgctggagctggaggacgagcttcaagaatccagaggctttaggaagaagataaaacgccttgaggagtcaaacaagaagttggctcttgaattagagcacgagaaagggaagcttacgggcctcggtcagtccaacgcagctctgcgggaacacaacagcatcctagaaacagctttggccaagagggaggcagacctagtccagttgaaccttcaggtgcaggcagttttgcagcgcaaagaagaggaggatcgccagatgaagcatcttgtccaggccctgcaggcctcactagagaaggagaaggagaaggtgaacagcctcaaggagcaggtggctgctgccaaggtggaagccgggcataaccgccgccacttcaaggcggcctccttggagctgagtgaggtgaagaaggagctgcaggccaaggaacacctggtgcagaagctgcaggccgaggccgacgaccttcagattcgggaggggaaacattcccaggagatagcacagttccaagcagagctggccgaggcccgggcacagctccagctcctgcagaagcagctggacgagcagctcagcaaacagcccgtgggaaaccaagagatggaaaatctcaaatgggaggtggatcagaaagaaagagaaatccagtccttgaagcagcagctggacttgacggagcagcagggcaggaaggaactggaagggctacagcagctgctgcagaacgtcaagtctgagttggagatggcccaggaagacctgtccatgacccagaaggataaatttatgctccaggcaaaagtgtcggagctgaagaacaacatgaagaccctgctccagcagaaccagcagctcaagctggacctacgccgcggcgcggccaagacggtactcaggcccgcgtccctcccggggtagccgacgtgcgctgtagatgctctcggacaggaggctggcagacgtgttagtcattcagacataaacggatttgttgagcccacactgagcagctgctgtgtagtcagtggtaatggggtgacagatgaaatcatttcattctggtttcattcatccaacagtgttttcctcgttctgtgaattcaaataccactttgttgtaatgtgctttgtaaagcagatgagcggtggtctgtgactcggcagtccctgctgtgtgtgaagggctggggcccgggagctgtgcccaggcgcccggcggttttctgtgctcggtccacatccatgttttccaggaggcaggtgggagggcagcgctcggattgagaggccgtttagcgtcgtgtgcttatctgtggaaaaagtttgaagtcccagaaaagggagcctaagctggaaaacttacttaatttcttacggaaattccacatcaaggtcttgagtatctgatgggagaagcgtctgggagagctgtagtctgtggctcggccccgtcctgccgcagacccaggacttaggttgtctctgctttgctctggttttgtgccttaggaataaaggtgtttcctcagcc

SEQ ID NO: 160127 - DNA, 4497 bp, Artificial Sequence
  derived and/or modified sequence
atggatggagccagcgctgagcaggacggcctgcaggaggacaggagccacagcggccccagcagcctgcctgaggcccccctgaagcccccaggccccctggtgcccccagaccagcaggacaaggtgcagtgtgccgaggtgaacagagccagcacagaaggagagagcccagatggccctggccagggcggcctgtgccagaatggccccaccccacccttcccagacccccccagcagcctggaccccaccaccagccctgtgggcccagatgccagccctggggtggccggcttccatgacaacctgaggaagagccagggcaccagcgctgagggctctgtgaggaaggaggccctgcagagcctgcggctgagcctgcccatgcaggagacccagctgtgcagcacagacagccccctgcccctggagaaggaggagcaggtgcggctgcaggccaggaagtggctggaggagcagctgaagcagtacagagtgaagaggcagcaggagaggagcagccagcctgccaccaagaccaggctcttcagcaccctggaccctgagctgatgctgaaccctgagaacctgccccgggccagcaccctggccatgaccaaggagtacagcttcctgcggacctctgtgccccggggccccaaggtgggcagcctgggcctgcctgcccacccccgggagaagaagaccagcaagagcagcaagatccgcagcctggccgactacagaacagaggacagcaatgccggcaacagcggcggcaatgtgcctgccccagacagcaccaagggcagcctgaagcagaacagaagcagcgctgcctctgtggtgtctgagatcagcctgagcccagacacagatgaccggctggagaacaccagcctggccggggacagcgtgtctgaggtggatggaaatgacagcgacagcagcagctacagcagcgccagcacccggggcacctacggcatcctgagcaagacagtgggcacccaggacaccccctacatggtgaatggccaggagatcccagctgacaccctgggccagttccccagcatcaaggatgtgctgcaggccgctgctgctgagcaccaggaccagggccaggaggtgaatggagaggtgcgcagccggcgggacagcatctgcagctctgtgtccctggagagcagcgctgctgagacccaggaggagatgctgcaggtgctgaaggagaagatgaggctggagggccagctggaggccctgagcctggaggccagccaggccctgaaggagaaggccgagctgcaggcccagctggccgccctgagcaccaagctgcaggcccaggtggagtgcagccacagcagccagcagaggcaggacagcctgagcagcgaggtggacaccctgaagcagagctgctgggacctggagcgggccatgacagacctgcagaacatgctggaggccaagaatgccagcctggccagcagcaacaatgacctgcaggtggccgaggagcagtaccagaggctgatggccaaggtggaggacatgcagaggtccatgctgagcaaggacaacacagtgcatgacctgcggcagcagatgacagccctgcagagccagctgcagcaggtgcagctggagaggaccaccctgaccagcaagctgaaggccagccaggccgagatcagcagcctgcagagcgtgcggcagtggtaccagcagcagctggccctggcccaggaggcccgggtgcggctgcagggcgagatggcccacatccaggtgggccagatgacccaggccggcctgctggagcacctgaagctggagaatgtgtccctgagccagcagctgacagagacccagcaccgctccatgaaggagaagggcagaattgctgcccagctgcagggcattgaagctgacatgctggaccaggaggccgccttcatgcagatccaggaggccaagaccatggtggaggaggacctgcagaggcggctggaggagtttgaaggagagcgggagcggctgcagaggatggctgacagcgctgccagcctggagcagcagctggagcaggtgaagctgaccctgctgcagagggaccagcagctggaggccctgcagcaggagcacctggacctgatgaagcagctgaccctgacccaggaggccctgcagagccgggagcagagcctggatgccctgcagacccactatgatgagctgcaggcccggctgggggagctgcagggcgaggccgccagccgggaggacaccatctgcctgctgcagaatgagaagatcatcctggaggccgccctgcaggccgccaagagcggcaaggaggagctggacagaggagcccggcggctggaggagggcacagaggagaccagcgagaccctggagaagctgcgggaggagctggccatcaagagcggccaggtggagcacctgcagcaggagacagctgccctgaagaagcagatgcagaagatcaaggagcagttcctgcagcagaaggtgatggtggaggcctacagaagagatgccaccagcaaggaccagctgatcagcgagctgaaggccaccaggaagaggctggacagcgagctgaaggagctgcggcaggagctgatgcaggtgcatggagagaagaggacagctgaggccgagctgagccggctgcaccgggaggtggcccaggtgcggcagcacatggctgacctggagggccacctgcagagcgcccagaaggagagagatgagatggagacccacctgcagagcctgcagtttgacaaggagcagatggtggccgtgacagaggccaatgaggccctgaagaagcagatcgaggagctgcagcaggaggccaggaaggccatcacagagcagaagcagaagatgaggcggctgggcagtgacctgaccagcgcccagaaggagatgaagaccaagcacaaggcctatgaaaatgctgtgggcatcctgagccggcggctgcaggaggccctggccgccaaggaggccgcagatgctgagctgggccagctgcgggcccagggcggcagcagtgacagcagcctggccctgcacgagcgcatccaggccctggaggccgagctgcaggccgtgagccacagcaagaccctgctggagaaggagctgcaggaggtgattgccctgaccagccaggagctggaggagagccgggagaaggtgctggagctggaggatgagctgcaggagagccggggcttcaggaagaagatcaagaggctggaggagagcaacaagaagctggccctggagctggagcacgagaagggcaagctgaccggcctgggccagagcaatgctgccctgcgggagcacaacagcatcctggagacagccctggccaagcgggaggccgacctggtgcagctgaacctgcaggtgcaggccgtgctgcagaggaaggaggaggaggaccggcagatgaagcacctggtgcaggccctgcaggccagcctggagaaggagaaggagaaggtgaacagcctgaaggagcaggtggccgccgccaaggtggaggccggccacaacagaagacacttcaaggccgccagcctggagctgtctgaggtgaagaaggagctgcaggccaaggagcacctggtgcagaagctgcaggccgaggctgatgacctgcagatccgggagggcaagcacagccaggagatcgcccagttccaggccgagctggccgaggcccgggcccagctgcagctgctgcagaagcagctggatgagcagctgagcaagcagcctgtgggcaaccaggagatggagaacctgaagtgggaggtggaccagaaggagcgggagatccagagcctgaagcagcagctggacctgacagagcagcagggcaggaaggagctggagggcctgcagcagctgctgcagaatgtgaagtctgagctggagatggcccaggaggacctgtccatgacccagaaggacaagttcatgctgcaggccaaggtgtctgagctgaagaacaacatgaagaccctgctgcagcagaaccagcagctgaagctggacctgcggcggggggccgccaagaccaggaaggagcccaagggggaggccagcagcagcaacccagccacccccatcaagatcccagactgccctgtgcctgccagcctgctggaggagctgctgcggcccccacctgctgtgtccaaggagcccctgaagaacctgaacagctgcctgcagcagctgaagcaggagatggacagcctgcagaggcagatggaggagcacgccctgactgtgcatgagagcctgagctcctggacccccctggagcccgccacagccagccctgtgcccccaggcggccatgctggccccaggggggacccccagaggcacagccagagccgggccagcaaggagggccctggagagtag

SEQ ID NO: 160128 - DNA, 4173 bp, Artificial Sequence
  derived and/or modified sequence
atggatggagccagcgctgagcaggacggcctgcaggaggacaggagccacagcggccccagcagcctgcctgaggcccccctgaagcccccaggccccctggtgcccccagaccagcaggacaaggtgcagtgtgccgaggtgaacagagccagcacagaaggagagagcccagatggccctggccagggcggcctgtgccagaatggccccaccccacccttcccagacccccccagcagcctggaccccaccaccagccctgtgggcccagatgccagccctggggtggccggcttccatgacaacctgaggaagagccagggcaccagcgctgagggctctgtgaggaaggaggccctgcagagcctgcggctgagcctgcccatgcaggagacccagctgtgcagcacagacagccccctgcccctggagaaggaggagcaggtgcggctgcaggccaggaagtggctggaggagcagctgaagcagtacagagtgaagaggcagcaggagaggagcagccagcctgccaccaagaccaggctcttcagcaccctggaccctgagctgatgctgaaccctgagaacctgccccgggccagcaccctggccatgaccaaggagtacagcttcctgcggacctctgtgccccggggccccaaggtgggcagcctgggcctgcctgcccacccccgggagaagaagaccagcaagagcagcaagatccgcagcctggccgactacagaacagaggacagcaatgccggcaacagcggcggcaatgtgcctgccccagacagcaccaagggcagcctgaagcagaacagaagcagcgctgcctctgtggtgtctgagatcagcctgagcccagacacagatgaccggctggagaacaccagcctggccggggacagcgtgtctgaggtggatggaaatgacagcgacagcagcagctacagcagcgccagcacccggggcacctacggcatcctgagcaagacagtgggcacccaggacaccccctacatggtgaatggccaggagatcccagctgacaccctgggccagttccccagcatcaaggatgtgctgcaggccgctgctgctgagcaccaggaccagggccaggaggtgaatggagaggtgcgcagccggcgggacagcatctgcagctctgtgtccctggagagcagcgctgctgagacccaggaggagatgctgcaggtgctgaaggagaagatgaggctggagggccagctggaggccctgagcctggaggccagccaggccctgaaggagaaggccgagctgcaggcccagctggccgccctgagcaccaagctgcaggcccaggtggagtgcagccacagcagccagcagaggcaggacagcctgagcagcgaggtggacaccctgaagcagagctgctgggacctggagcgggccatgacagacctgcagaacatgctggaggccaagaatgccagcctggccagcagcaacaatgacctgcaggtggccgaggagcagtaccagaggctgatggccaaggtggaggacatgcagaggtccatgctgagcaaggacaacacagtgcatgacctgcggcagcagatgacagccctgcagagccagctgcagcaggtgcagctggagaggaccaccctgaccagcaagctgaaggccagccaggccgagatcagcagcctgcagagcgtgcggcagtggtaccagcagcagctggccctggcccaggaggcccgggtgcggctgcagggcgagatggcccacatccaggtgggccagatgacccaggccggcctgctggagcacctgaagctggagaatgtgtccctgagccagcagctgacagagacccagcaccgctccatgaaggagaagggcagaattgctgcccagctgcagggcattgaagctgacatgctggaccaggaggccgccttcatgcagatccaggaggccaagaccatggtggaggaggacctgcagaggcggctggaggagtttgaaggagagcgggagcggctgcagaggatggctgacagcgctgccagcctggagcagcagctggagcaggtgaagctgaccctgctgcagagggaccagcagctggaggccctgcagcaggagcacctggacctgatgaagcagctgaccctgacccaggaggccctgcagagccgggagcagagcctggatgccctgcagacccactatgatgagctgcaggcccggctgggggagctgcagggcgaggccgccagccgggaggacaccatctgcctgctgcagaatgagaagatcatcctggaggccgccctgcaggccgccaagagcggcaaggaggagctggacagaggagcccggcggctggaggagggcacagaggagaccagcgagaccctggagaagctgcgggaggagctggccatcaagagcggccaggtggagcacctgcagcaggagacagctgccctgaagaagcagatgcagaagatcaaggagcagttcctgcagcagaaggtgatggtggaggcctacagaagagatgccaccagcaaggaccagctgatcagcgagctgaaggccaccaggaagaggctggacagcgagctgaaggagctgcggcaggagctgatgcaggtgcatggagagaagaggacagctgaggccgagctgagccggctgcaccgggaggtggcccaggtgcggcagcacatggctgacctggagggccacctgcagagcgcccagaaggagagagatgagatggagacccacctgcagagcctgcagtttgacaaggagcagatggtggccgtgacagaggccaatgaggccctgaagaagcagatcgaggagctgcagcaggaggccaggaaggccatcacagagcagaagcagaagatgaggcggctgggcagtgacctgaccagcgcccagaaggagatgaagaccaagcacaaggcctatgaaaatgctgtgggcatcctgagccggcggctgcaggaggccctggccgccaaggaggccgcagatgctgagctgggccagctgcgggcccagggcggcagcagtgacagcagcctggccctgcacgagcgcatccaggccctggaggccgagctgcaggccgtgagccacagcaagaccctgctggagaaggagctgcaggaggtgattgccctgaccagccaggagctggaggagagccgggagaaggtgctggagctggaggatgagctgcaggagagccggggcttcaggaagaagatcaagaggctggaggagagcaacaagaagctggccctggagctggagcacgagaagggcaagctgaccggcctgggccagagcaatgctgccctgcgggagcacaacagcatcctggagacagccctggccaagcgggaggccgacctggtgcagctgaacctgcaggtgcaggccgtgctgcagaggaaggaggaggaggaccggcagatgaagcacctggtgcaggccctgcaggccagcctggagaaggagaaggagaaggtgaacagcctgaaggagcaggtggccgccgccaaggtggaggccggccacaacagaagacacttcaaggccgccagcctggagctgtctgaggtgaagaaggagctgcaggccaaggagcacctggtgcagaagctgcaggccgaggctgatgacctgcagatccgggagggcaagcacagccaggagatcgcccagttccaggccgagctggccgaggcccgggcccagctgcagctgctgcagaagcagctggatgagcagctgagcaagcagcctgtgggcaaccaggagatggagaacctgaagtgggaggtggaccagaaggagcgggagatccagagcctgaagcagcagctggacctgacagagcagcagggcaggaaggagctggagggcctgcagcagctgctgcagaatgtgaagtctgagctggagatggcccaggaggacctgtccatgacccagaaggacaagttcatgctgcaggccaaggtgtctgagctgaagaacaacatgaagaccctgctgcagcagaaccagcagctgaagctggacctgcggcggggggccgccaagacagtgctgcggcctgccagcctgcctggatag

SEQ ID NO: 160129 - DNA, 4497 bp, Artificial Sequence
  derived and/or modified sequence
atggacggcgccagcgccgagcaggacggcctgcaggaggaccggtcccattcgggacctagttccctgcccgaagctcccttgaaacctccgggaccgcttgtccccccagatcagcaggataaagtacaatgcgccgaagttaatcgggcctccacagagggcgagtcccccgacggcccgggccagggaggcctttgccaaaatggacctacccctcctttccccgaccctccatcatccttggatcccaccacatctcctgtagggcccgacgcgagcccaggcgttgccggcttccacgataacttgcggaaatcacaaggtacttcggccgagggttcagtccgcaaggaggcactgcagtctcttagactaagtctgccaatgcaggagacacagctctgtagcaccgactctccactgcctctagaaaaggaagaacaggtgagactgcaagctagaaagtggctagaggaacagttgaagcagtatcgagtgaagaggcagcaagagcgatcctcacagcctgcaacgaaaacccggcttttctctacgcttgacccagagctgatgttgaaccccgagaaccttcctcgcgccagtactcttgcaatgaccaaggagtatagtttcctgcgcacatcagttcctagggggcccaaggtcggtagcctcggtcttcctgctcatccccgcgaaaagaagacgtccaaaagctcaaagatcaggagcctcgccgactacagaacagaggacagcaatgcaggcaactcaggcggtaatgtgcccgctcctgacagcaccaagggatcgttgaagcaaaatagatctagtgccgctagtgtggtaagtgagatttcactcagtccggacacggacgaccgcctggaaaacacatctctggcaggtgactccgtgtcagaagttgatgggaatgatagtgactcttcctcatactcctccgcctccacgcgaggaacgtacgggatcctctcaaaaaccgtggggacacaggataccccgtacatggtcaatgggcaggaaattccagcagatactttaggccagtttccctctataaaagatgtgctgcaagcggccgccgcggagcaccaggatcagggtcaggaggttaacggagaagtgagaagccgaagggacagcatctgcagtagcgtctcactggagtcttctgccgccgaaacccaggaggagatgctacaggtgctgaaggaaaagatgcggcttgaaggccagcttgaagccttgtctctcgaagcatctcaggcgttaaaggaaaaagccgagctacaggcccagctcgctgccctgtctacgaagctgcaggcccaggtcgaatgctcacatagctcccaacagcgccaagattccttatcaagtgaggttgacaccctcaagcagtcttgctgggaccttgagagagcaatgaccgatctgcaaaatatgttagaggctaaaaatgcaagcttagcctcctccaacaacgatcttcaagtggccgaagaacagtaccagcgcctgatggcaaaggtggaagatatgcaaagatccatgttgagtaaggataacacagtgcatgacctccgccagcagatgacggcattacagagccaattacaacaggtacagttggaaaggactactctaacgagcaagctaaaggcttcacaggcggaaatcagtagcctacagtctgtgcgccaatggtaccagcaacagctcgccctagcgcaggaagcaagggtgaggctgcagggggagatggcgcacatccaggtgggccagatgactcaggccggcctacttgaacacctcaaactggaaaacgtgagccttagtcagcagcttaccgagactcagcacaggtctatgaaggaaaaaggaagaatcgctgcccagcttcaaggcatagaagccgacatgcttgaccaagaggccgcgtttatgcagatccaggaggccaagaccatggtggaagaggacctgcagcgccgattggaggagtttgagggtgagcgagagcgactacagcgaatggctgatagcgctgcaagtctagagcagcagctggaacaagtgaaacttactctactgcagagagatcaacaactagaagcgcttcagcaagagcaccttgatcttatgaaacagctcacactcacacaagaggccctccaatctagggagcagagtctggacgctctccaaacacattacgatgaactgcaggccaggctcggcgaactgcagggtgaagcggctagtcgcgaggatacaatctgcctgcttcagaacgaaaaaattattctagaggcggcgctacaagctgccaagagtgggaaggaggagctggacaggggcgccaggcggctggaagaaggaaccgaagaaacatctgagaccctcgaaaaactccgggaggagctggccattaaatctggccaggtggaacacctgcagcaggagaccgccgccctcaagaagcagatgcagaagatcaaagaacagttcctgcagcagaaggtcatggtcgaggcttatagaagggacgccacttcgaaagatcaactgatcagcgaactgaaagccactcgcaaaagactggattctgaactgaaagagctccgacaagaattgatgcaagtacacggtgagaagcgtacggccgaagctgagctttcacgcctgcacagggaggtggctcaggtgcgccagcacatggctgatttagagggtcatttgcaatcagcccagaaggagagagatgagatggaaacccacctgcagagtctgcagtttgacaaggaacagatggttgcagtaaccgaggcaaacgaggctctcaaaaagcaaatcgaggagctgcaacaagaggctcgcaaggctatcaccgagcagaaacaaaagatgagaagactggggagcgatctgacatctgcgcagaaagagatgaaaactaaacacaaagcttacgagaatgcagtcggcatcctctcaagacgcctccaagaggcgcttgcagccaaagaggccgcagatgcagagttgggacagctccgggcccaggggggttctagtgactcctcacttgctctgcatgagcgcatccaggctctggaggctgaactccaagccgtgtcacattcgaaaactttgttggagaaggagctccaggaggttatagccctgacttcccaggagctcgaggagagccgagagaaggtactcgagctagaggacgaattacaggagtcaaggggttttcgcaaaaaaatcaagcggctcgaggagtccaacaagaaacttgcacttgagctggaacatgaaaaggggaagctcacaggactgggtcagtccaacgctgctctccgtgaacacaatagtatactggaaacagcattagccaaacgcgaggccgatttggttcaactgaatttgcaggttcaggccgtgttgcagcggaaagaagaggaagatagacaaatgaaacacctggtacaagccctccaagcctcactggagaaggaaaaggaaaaggtgaattctttgaaagagcaagtcgctgcagccaaagtggaggcaggccacaatcggcgccactttaaggctgcctccctggagctttctgaagtaaaaaaggaactccaggcaaaggagcacctcgttcagaaactccaggccgaggccgacgatctgcagattagagaaggtaagcacagccaggagattgcacagttccaagccgagctggctgaagcgcgcgctcaacttcagctgcttcagaaacagctggatgagcagctgtctaaacaaccggtcgggaatcaagaaatggagaatctgaagtgggaggtggatcagaaagagagagagatacaaagtctaaagcagcaacttgaccttactgaacagcaaggccgcaaagagttggagggtctgcagcaactcctccagaacgtcaaatccgaattagagatggctcaggaggacctcagcatgacccaaaaagacaagttcatgttgcaggccaaggttagtgagctgaagaacaacatgaaaacactgctacagcaaaaccagcagttgaagctagatcttaggagaggagccgctaaaacaaggaaagagcctaaaggcgaggccagttcatctaatcccgcgacccccattaaaatccctgactgcccagtgccagcctcgctcctcgaggagctgttacggcctcctccagctgtgtccaaggaacccctgaaaaatctcaatagctgtctgcagcagctcaagcaggagatggactccctccagagacagatggaagagcacgctctcaccgtgcacgagagccttagctcatggacacccctcgagcccgctaccgcgagtcccgtcccaccaggtggtcacgctggccccaggggggatccccagaggcactcccagagcagggccagtaaagaaggccctggcgaatag

SEQ ID NO: 160130 - DNA, 4497 bp, Artificial Sequence
  derived and/or modified sequence
atggacggcgccagcgccgagcaggacggcctgcaggaggaccggtctcactcgggcccaagcagcctcccggaggcgcctctaaaacccccaggtcccctggttcctccagaccagcaggacaaggtgcaatgtgctgaggtcaacagggcttcaacagagggagagtcgcccgacggtccagggcagggcggtctctgccaaaatgggcccaccccgccctttcccgatccgccatctagtctggaccctacgactagtcccgtcgggccagatgcatcccctggtgtggccggcttccacgacaacctgcgcaagtcacagggtacctctgccgaagggagcgtgcggaaggaagcactccagtcactgcggctctcccttcccatgcaggaaacccagttgtgctccacagatagccctttacccctggagaaagaggagcaggtccgacttcaggcccggaaatggctcgaggaacagctgaagcagtacagagtgaagcgccaacaggaacggtcatcccagccagctacaaagacccgactgttttcaacactggatccagaattgatgctgaatcccgaaaacttgcccagagcctccactcttgccatgactaaagagtacagttttctgcgaacatctgtgcctcggggtcccaaggtggggtctctgggccttcctgctcacccccgggaaaaaaaaaccagcaagagctcaaaaatccggtcactagcggattatcgaactgaggactctaacgccggcaatagtggtggcaatgttcccgcaccagattcaactaagggttctctcaaacagaacaggagctctgctgcttctgttgttagcgagatcagcttatccccagatactgatgacaggctcgagaacacatcgctcgctggagactccgtttccgaggtggacggtaatgattcagatagctcttcatactcatcagcttccacaaggggcacttatggtatcctgtcgaaaactgtgggcacccaggataccccctacatggtgaacgggcaggagattccagccgacacacttggccagttccccagcatcaaagatgtattgcaggccgccgctgccgagcaccaagatcagggccaggaggtgaacggcgaagtcaggagtcgccgggattcgatttgttcctctgtgagtttagagtcatccgcagctgagacccaggaggaaatgctgcaggtgttgaaagagaagatgcggttggagggtcagctcgaagcgctcagcctcgaggctagccaagccctgaaagagaaagcagaactacaggcacagcttgcagccctgagcaccaaactccaggcccaggtggaatgctcacacagctcccagcagcgtcaggacagcctctctagtgaggtggacacattaaagcaatcatgctgggatctggagcgggctatgacagatctgcagaatatgctcgaggcgaagaatgcttctctggcgagtagtaataacgatttacaggtggccgaggaacagtaccagagactcatggctaaggtggaggacatgcaacgctccatgttatcaaaagacaatacagtgcacgatctgagacagcagatgacggcactgcaaagtcagcttcaacaggtccagttagagagaacaacattgaccagcaaactcaaggccagccaggctgagatctccagtttgcagtctgtcaggcagtggtaccagcagcagcttgcactagctcaggaggcccgagtacgactgcagggagaaatggctcacattcaagtgggccagatgacccaagctgggttgttagagcacctgaagttggagaacgtatcgctttctcagcagctcaccgaaacacagcatcggagcatgaaggaaaaaggacgaatcgccgcccagttgcagggtatcgaggccgacatgctggatcaggaggctgcgtttatgcagatccaggaagctaagaccatggtggaggaagatcttcagcgccgcttggaagagttcgagggggaaagagagaggcttcagcggatggctgactccgcagcttcccttgagcagcaactggagcaggtcaagttgaccctgttgcagagagatcagcaacttgaggcccttcagcaggaacacctggatttaatgaaacaactcactttgacccaagaggctttacagagccgcgagcagagcctcgacgcattgcagacacactacgacgaactgcaggctcggcttggagaattgcagggcgaagccgcctctcgcgaagatacaatctgcctgttacaaaatgagaagatcattctggaagcggccttacaggccgccaagtctggcaaggaggagctggaccgcggagcccggaggctggaggagggaactgaggagacctccgagacactcgagaagctaagagaagagctcgccataaagtctggacaagtggaacatctccagcaggagaccgccgctttgaaaaaacaaatgcagaaaatcaaagagcagtttctccagcagaaagtaatggtggaggcctatcgtcgggatgcgacgagtaaagatcagcttatttccgaactcaaggcaacccggaaaaggttagactctgagctgaaggaactcaggcaggagctcatgcaagtacacggcgaaaagcgcacagctgaggcggagcttagccggttgcatagggaagtcgctcaggtgagacagcatatggccgacttagagggtcacctgcagtcagcccaaaaggaaagggatgagatggaaacccatctgcaaagcctacaattcgacaaagagcagatggtcgcagtaacagaagccaacgaagccctgaagaagcaaatcgaggagctgcagcaggaagctcggaaggctattactgagcagaagcagaaaatgcgtagactggggtccgacctgacttccgcccagaaggagatgaagacaaaacataaagcttatgaaaacgctgtgggcatcctttcacggcgattacaggaggccctggccgcaaaggaagcggcagacgcggaactgggccagttaagagctcagggagggtccagtgactcttcacttgcactccacgagcgtattcaggctctggaagcagagctgcaggctgtctcacactcaaagactctcctcgagaaggaactgcaagaagtgatcgccctgactagccaggaactggaagaaagtagggagaaggtcttagagctagaggatgagctccaggagtcccgcggctttagaaaaaaaattaaaagattagaagagagcaacaaaaaactagctcttgaattggagcatgaaaaaggcaagctcacgggcctcgggcaaagcaacgccgcactcagggagcacaactcgatcctggagacagccctagcgaagcgagaggctgatcttgttcagctgaatttgcaggtccaagctgtcttgcagcgcaaagaggaagaagaccggcagatgaagcatttggtacaggctttgcaagccagcctcgagaaagaaaaagagaaggtaaacagtctgaaggagcaggtggcggctgcaaaagtggaagcgggtcataatagaagacactttaaagccgccagcctggaactatctgaagtgaagaaggaacttcaggcaaaggagcacttggtccagaaactgcaagcagaggccgacgatctgcaaatcagagagggcaaacactcacaggagattgcccaattccaggcagagctggccgaggccagagctcaactacaactcctgcagaagcaattggatgagcagctcagcaaacagccagtcggaaaccaggagatggagaatctgaaatgggaggtggatcagaaagaacgagaaatacagtcgctaaagcaacagcttgacttgaccgaacaacagggccggaaggaattggagggcctgcagcagctgctacagaatgtcaagagcgagctcgagatggcccaagaagacctgtccatgacacaaaaagataaattcatgttgcaagcaaaagtctccgaactgaagaacaacatgaagacccttctgcagcagaatcagcagctgaaactggatctgcggcggggtgcagccaaaactagaaaggaacccaaaggagaggcaagtagtagtaatcctgcaacacctattaaaattcctgactgccctgtgcccgcctccttactcgaagagctcctcaggccgccacccgccgtgtccaaagagcccctgaagaatctgaactcctgcctgcagcagctgaaacaagaaatggactctcttcaacggcagatggaggagcacgcgctgacagtacacgagtccctgtcttcctggacccccctcgagccagccacagcatcacccgtaccccctgggggtcatgctggccctcgtggcgatccgcagcggcattcccaaagccgggccagcaaagaagggccaggtgaatag

SEQ ID NO: 160131 - DNA, 4173 bp, Artificial Sequence
  derived and/or modified sequence
atggacggcgccagcgccgagcaggacggcctgcaggaggaccggtcccacagcggcccttcctctctacccgaggcacccttaaagcctccaggtccattagttccgccagaccagcaggacaaggtgcaatgcgctgaggttaatcgggcaagtaccgaaggcgagagcccagatggtcccggccagggtggcctttgtcaaaacgggcccaccccaccattcccagaccctccaagctcgttggaccctacaacctcacctgttggcccggacgctagtcccggcgtcgccggcttccacgacaatctgcgcaagagccagggaacctcggcagagggatcagtccggaaggaagccctgcaatccctgagattaagcctccccatgcaggagacccaactgtgtagcaccgattcgcctctccccctggagaaagaagaacaggtgaggctccaagctcggaaatggctggaggaacagctaaaacagtatagagtaaaacgccaacaggaaaggtccagtcagcccgcgaccaagaccagactgttttcgacgctggatcctgagctgatgctgaaccccgagaaccttcctcgtgcctcaacacttgctatgaccaaagagtatagcttcctacgcacgagcgtgcccagaggacccaaagttggaagcttgggcttacctgcgcatcccagagagaagaaaacatctaagagcagtaagatcagaagtctggccgattacagaacagaggacagtaatgcaggtaacagcggcggcaacgtgcccgcaccagatagcacgaaaggatctttgaagcagaataggtccagtgcagcatcagtggtctctgagatttctctgtcccccgacactgacgaccgcctggagaatacaagtctggccggggacagcgtgtcagaagtcgacggtaacgatagtgatagctcctcctacagcagcgccagcactcgaggcacatacgggatcctcagcaaaacagttggaacccaagacacgccctatatggtaaatggtcaagaaattcccgctgacaccctcgggcagttcccatctatcaaagacgttctacaggctgccgcggccgaacaccaagatcagggtcaggaggtgaacggggaagtcaggagcagacgggactcgatatgctcctctgttagtttagaaagctcagctgcggagacacaggaagagatgctgcaagtgttgaaggaaaaaatgcgcctggagggtcagctcgaagccctgtccctggaagccagccaagcgctgaaagaaaaagcagagcttcaagcacagcttgcagcactttcgactaagctgcaggctcaggttgagtgcagtcacagcagccagcaaagacaggattcattgtcttctgaggtcgatacactgaaacagagttgttgggacctggaacgggccatgacagatctgcagaatatgcttgaagcaaaaaacgcttctcttgcaagttcgaacaacgatttacaagtggctgaggagcagtaccagaggcttatggccaaagttgaggatatgcagagatcaatgctttctaaagacaataccgtccacgatttgcgtcagcagatgacagccttacagtctcaacttcagcaggttcagcttgaacggacaactctgacctcaaaactgaaagctagccaggccgagattagcagtcttcaaagcgtgaggcagtggtaccagcaacaactggccctcgctcaggaggcaagggtacggcttcagggtgagatggcacacatccaggttggccagatgacccaggcgggcctgttggagcatttaaaactagagaatgtgtcactatcccagcagctcacagaaactcaacatcgctccatgaaggagaaaggacggatcgccgcccagttacagggcatagaagccgatatgctggaccaggaggcggcattcatgcagattcaggaggcaaaaactatggtggaggaggacctgcagcgacgactcgaggagttcgagggcgaaagggaacggctccagcggatggctgatagcgccgccagcctggagcagcaattggaacaggtgaaattgaccctcttgcagcgcgatcaacagctggaggcgctgcaacaggagcacctggacctgatgaaacaacttaccctgactcaggaagccctgcagtcacgggaacagtccctcgatgccctgcagacgcactacgatgagctgcaagcccgtctcggggagctgcaaggggaggcagctagccgagaggatactatttgcctgttgcagaatgaaaagatcatcctcgaggctgccctccaggccgccaagtctggcaaagaggagctggataggggggcgcgaaggcttgaagagggcacagaagagacgtccgaaactcttgagaagctgcgcgaggagttagccattaagtcaggccaggtcgagcacttgcagcaggagacagcagcactgaagaagcagatgcaaaaaatcaaagagcagttcttacaacaaaaagtgatggtggaagcataccgacgcgacgctaccagcaaggaccagttaatctccgaacttaaggctactagaaaaagacttgatagcgagctcaaggagttacgccaggagctgatgcaggtgcacggcgaaaaaaggactgctgaagccgagctgtcacgcctccaccgagaagtagctcaagtccgccagcatatggccgatctggaagggcacctccagtcagctcagaaggaaagagatgaaatggagactcaccttcagtccctgcaattcgataaagaacaaatggtggcagttaccgaggccaacgaagcactgaagaagcagattgaggagcttcagcaggaggccagaaaagctattactgaacagaaacagaagatgcggcgcctgggtagtgatctgaccagcgcacaaaaagaaatgaaaaccaagcacaaggcttatgagaacgcagttggcatcttatcacggcggctgcaggaggctcttgccgcgaaggaggcagcagacgccgaactggggcaactgagagctcagggcggatcctctgattcttccctcgctctgcacgagaggatacaagcgctagaggcggaattgcaggcggtgtcgcacagcaaaaccctgctcgagaaggaactgcaggaggtcatagcattaactagtcaggagttagaggagagcagagagaaggttttagagcttgaagacgagttacaggagtcacgaggtttccgcaagaaaatcaaaagattggaagaatccaataaaaaactggcactggaactcgaacacgagaaagggaaactgacgggcctcggacagagtaacgccgctctgcgcgagcacaactctatcttggagaccgcactggctaagagggaagctgacctggtgcagttgaacctccaggtccaggcagtgctccaacggaaggaggaggaagatcgccagatgaagcatcttgtgcaagcgctccaagcaagtcttgagaaagagaaagagaaagtaaacagtctaaaggagcaggtggcggcagcaaaggtcgaggcgggccacaataggaggcattttaaggcagcttccctggaattgtcagaagttaagaaagagctccaggccaaggaacatctggtgcaaaagcttcaggcggaagctgacgacttgcagattagagaggggaaacatagtcaggaaatcgctcaatttcaggcggaattggccgaagcgcgtgctcagttgcagctcctgcagaagcagctagacgaacaactgtccaaacaacccgtaggcaaccaagagatggagaatctgaagtgggaagtcgatcaaaaagaacgggagatacaaagcttgaaacagcaactggacctcactgagcagcaggggagaaaagaactcgagggcctgcagcagctgctacagaatgttaagtctgagcttgagatggcccaggaggacctctccatgacacagaaagacaagtttatgttacaggcaaaagtgtcagagctcaaaaataacatgaagaccctgttgcaacaaaaccaacagttgaaattagacctgaggcgcggcgcggctaaaactgtgctgcgccctgcttccctcccagggtag

SEQ ID NO: 160132 - DNA, 4497 bp, Artificial Sequence
  derived and/or modified sequence
atggatggggcttccgccgagcaggatgggctacaggaagatcggtcccacagcggaccaagcagtcttccagaggccccacttaagccacctggcccactggtgcctcccgatcagcaggacaaggtccagtgcgccgaagtgaacagagcatcaactgaaggggaatctccagacgggccaggccaaggaggattgtgccagaacggcccaacccccccattcccggatcccccatcgtctcttgacccaaccacctcacccgttgggcctgacgctagcccaggcgtggccggatttcacgataacctcagaaagagtcagggcacatcagctgagggctccgtccggaaggaggccctgcagtcattgagactctcactaccgatgcaagaaacgcaactgtgctctaccgacagccctctgcccctggagaaagaggagcaggtgaggctgcaggcgcgtaagtggctggaagagcagctgaaacagtacagagtcaagcggcagcaggaacgctccagccagccagcgactaaaacacggctcttttctacccttgacccggagctgatgctcaaccctgagaacctgccgcgagcaagcacacttgccatgaccaaggagtacagtttcttgcgcaccagcgtgcccagaggaccaaaagtgggttctctcggtcttcctgcccatcccagagaaaaaaagacatccaagtcatccaaaatccggtccttagctgattataggacagaagactccaatgcgggtaattctgggggtaacgtccccgctccggacagtactaagggctctctgaagcaaaatagatcgagcgctgcaagcgtggtaagcgagatttcgcttagccccgacaccgacgaccgcttggagaatacgtcacttgctggggattcagtcagtgaagtggatgggaacgatagcgatagtagttcctactccagcgccagtacccgcggaacctatggcatattgtctaaaacggtaggcacgcaggacacaccctacatggtaaacggccaggagattcccgctgataccctcggtcagtttcccagcatcaaggatgtgctgcaggccgctgcagccgagcaccaggaccagggccaggaagtcaacggcgaagtccgttcaaggcgcgacagcatctgttccagtgtatcactggagtccagcgcagccgagactcaggaagaaatgttgcaggtcctgaaggagaaaatgagactcgaggggcagttggaggccctctctcttgaggccagccaggctttgaaagagaaggccgagctgcaggctcaactggccgcactttcaaccaagcttcaggcccaggtcgaatgtagccacagttcccagcaacggcaagatagccttagctctgaggtggacaccttgaagcagagttgttgggacctagagcgtgcaatgaccgatctacaaaatatgctcgaggcaaaaaatgcttcgctggccagctcaaataatgatcttcaggttgccgaagaacagtatcagaggctcatggccaaggtggaggacatgcaacgatccatgctttcaaaggataatactgtgcatgacctacgccagcagatgacggcacttcagagtcagctgcagcaagtacaattagagagaacaacactaacgtctaaacttaaagcatcacaggccgagattagctcgctccagtctgtgcgccagtggtatcaacagcagttggcactggcacaggaagctagggttcgattgcagggcgagatggcccatatccaggtcgggcagatgacccaggccggacttctcgagcacctcaagctggagaacgtgagcctttcacaacagttgaccgagacccagcaccggtctatgaaagaaaagggccgaattgccgcacaacttcaaggcattgaagcagatatgttggaccaggaagccgcttttatgcaaattcaggaggccaagactatggtggaagaagacctgcagcggaggctggaagagttcgagggagagcgcgagcgtctgcagagaatggcagattctgctgcgagcctggagcaacagctcgaacaagtcaaacttacactgttacagagggaccagcagctggaggccctccagcaggagcaccttgacctgatgaagcagctgaccctgacccaagaggccctccagagcagggagcagtccctggatgctctgcagacacattacgatgagcttcaggccaggctgggcgagttgcagggggaggcagcttccagagaggacaccatttgtttactgcagaatgagaaaattattcttgaggctgcactccaggccgcaaaatcgggcaaggaggaactggatcgcggtgctagaaggcttgaggaggggacagaggaaacaagcgaaactctagaaaagctccgcgaggaactcgccatcaaatctggacaggttgaacacctgcagcaggaaacagctgcgcttaaaaaacagatgcaaaagatcaaggagcagttcctgcagcagaaggtgatggtggaagcatatcgacgcgatgcaacatctaaagaccagctcatttctgagctgaaggcaacacggaaacgcctggattctgaacttaaggagctgcggcaggaactgatgcaggtgcatggtgagaaaagaacagcggaggcagaattgtctagactccacagagaggttgctcaggttcgccagcacatggctgatcttgagggccaccttcagtctgctcagaaggagagagacgagatggaaacgcacctgcaatccctgcagttcgacaaagagcaaatggtcgccgttacagaagcaaatgaagccctgaagaagcagatagaggaactccagcaagaggcgcgaaaggcgataacggagcagaagcagaaaatgcgtcgtctaggcagcgatttaacatctgcccaaaaagagatgaagaccaagcataaagcatacgagaatgcagtcggcattctctcccgtagattgcaagaggccttagccgcaaaagaggctgccgacgctgaattagggcagctacgggctcagggtggctcaagcgacagctccctggctctccacgagcgaatacaggcactggaagctgaactgcaggcagtgagccattcgaaaacactgctggaaaaagagctccaggaggtgattgccctcaccagccaagaactggaggagtctagggaaaaagtgctggagctggaggatgaactccaagaatcaaggggttttagaaagaaaatcaagcgcctggaggagagcaacaaaaaactagcacttgagctcgagcacgagaaaggaaagctcacaggtctgggccagagtaatgctgccctccgtgagcacaatagtatcctagagactgccctcgctaaacgcgaggctgatctcgtccagctgaatcttcaggtgcaggccgtccttcaacggaaagaggaagaggataggcagatgaagcatctggttcaggccctacaggcctccttggaaaaggaaaaggagaaagtcaacagcctgaaggaacaggtggctgcggctaaggtagaagctggacataatcggaggcactttaaggccgcttccctggagttatctgaggtcaaaaaagagcttcaggcgaaagagcacttggtgcagaagctacaggctgaggccgatgacctgcagatcagagagggcaaacactctcaggagatcgcacagttccaagctgagctggccgaggctagggcccaactccagttactacagaagcaactggatgaacagcttagcaagcagccagttggaaaccaagagatggagaatctaaaatgggaagtggatcagaaagagagagagatccaatcattaaaacagcagctcgatctgactgagcaacagggaaggaaggaattagaaggcctccagcaactcctccagaacgtgaagagcgagttagagatggcacaggaagatctttctatgacccagaaggataaatttatgctgcaggctaaggtgagcgaactgaagaataatatgaagacccttttgcaacagaatcagcagctcaaactggatctgcggagaggggctgcgaaaacaaggaaggaacccaagggagaggctagctcctctaatcccgcaaccccgattaagatacccgactgccctgtcccagcctccctccttgaggagctgttacggccaccccctgcagtgtccaaggagcctttgaaaaatttgaactcctgcttgcagcaactcaaacaggagatggattcattgcaaaggcagatggaagaacatgcactcacggtgcatgagtcgctctcttcctggacgccactggaacctgccacagcatctccagtgccgccagggggacatgcagggcctcggggagaccctcaacgccactctcaatctagagcctctaaggaagggccaggcgagtac

SEQ ID NO: 160133 - DNA, 4496 bp, Artificial Sequence
  derived and/or modified sequence
atggacggtgcctctgccgaacaggatggcctccaggaggatcgctctcattcaggtcccagctctctaccagaggcccctctgaaaccaccgggacccttagttccaccagaccaacaggataaggttcaatgtgccgaagtaaacagggcgagcaccgagggagagtcacccgacggtcctggtcaagggggattatgtcagaacgggcctaccccccctttcccggatcctccgtcttcactagatccaaccacaagccccgttggcccagatgctagcccgggagtcgccggattccacgacaatctgcggaagtcgcagggcacatcagcggagggtagcgtcagaaaggaggctctgcaatctttgcgactctcacttcccatgcaagagacccagctgtgcagcaccgatagccctctgcccctggaaaaagaagagcaagttcgcctgcaggccagaaagtggctggaggagcaactgaagcagtaccgcgtgaaacgccagcaggagcgtagtagccaacccgcaacgaagacccgcctattttccactctggatccagagttgatgctgaaccccgaaaatctcccacgggcaagcacgttggcaatgactaaggagtactcattcctgaggacatccgtcccacgtggccctaaggtcgggtccctgggccttccggctcatcccagggaaaagaagacttctaagtcatccaagatacgatcattggccgactatagaactgaagactcaaatgctgggaatagcggcggaaatgtccccgctccggacagcacgaaaggctctctgaaacaaaataggtcctcagctgccagtgttgtgtctgaaatcagcctttccccagacactgacgataggctggaaaacacatccctggccggagatagcgtgtccgaggtagatgggaatgattccgattcctccagctacagttcagcatcaacaagaggcacctatgggatcctgagcaagaccgttggcacgcaggatacaccctacatggtgaacggacaagaaatccccgctgacactcttggacagtttcctagcataaaagacgtcctacaggccgcagcagccgaacatcaggatcaggggcaggaggtcaatggggaagtgcgttcgagacgtgacagcatttgttcttcggtttcacttgagtcaagcgctgccgaaacgcaagaggaaatgctgcaggtgcttaaggaaaaaatgcggcttgaagggcagctcgaggcactttccctcgaagcatcacaggcactaaaagagaaggccgaactgcaggcgcagctagcggctctgtctactaaattacaggcacaggtggaatgcagccattctagtcaacagcggcaagacagtctttcttccgaggtcgacaccctgaagcaatcctgctgggacctggagcgcgcaatgactgatcttcagaacatgctggaggcgaagaatgcctccttagcctcctcaaacaacgatctccaagtggccgaggagcagtatcagagattaatggctaaagtggaagatatgcagcgctccatgctctccaaggataacaccgtccacgatcttcgacagcagatgacagcactgcaatcccaactgcagcaagtgcagctcgagcgcacaacactgacctcaaagctcaaagcgtcccaagctgagatcagctccctccagagtgttcgccagtggtatcagcaacaattggcattagcgcaggaggcacgggtgcggttacagggggaaatggcccacatccaggtgggccaaatgactcaggccggattgctggaacatctgaaattggaaaatgtgagcttgagccagcagttgaccgagacccagcaccgctcaatgaaagagaaaggtagaatcgccgctcagcttcaggggatcgaggcagacatgttagatcaagaagccgctttcatgcaaattcaggaagcaaaaactatggttgaggaagacttgcaacggcgtctggaggaattcgagggcgagcgagagaggctgcagaggatggccgatagcgcggcttctctcgaacagcagctggagcaagtcaagcttaccttgctgcagcgagaccagcagctcgaggctcttcaacaggagcacctggacctgatgaagcaactgacacttacacaggaggctcttcaatcaagagaacagtctttggacgctctgcagacccattacgacgagttacaggcgcgtcttggggagctgcaaggtgaggctgcctctcgggaggacaccatctgtttgcttcaaaacgaaaagattatcctggaggctgctttacaagctgctaagagcggaaaggaggaactggacagaggtgccaggaggctagaggagggaacggaggagacatccgaaacattggagaagctgcgagaggagctggcgatcaagtctggccaggtagagcacctgcaacaagaaacagccgctcttaagaaacagatgcagaaaatcaaggaacaatttttacagcagaaggtgatggtggaggcttatcgtagagacgctactagcaaagatcaactcatctccgagctcaaggccacacgcaaaagattggattcagagctgaaagaactgagacaggaacttatgcaggtgcatggcgagaagcgtactgccgaggctgaactgagccgcctccaccgtgaggtagcccaggtaagacaacatatggctgacctggaaggacaccttcaatcagcccagaaagagcgtgatgagatggaaacccatctgcagtcattgcagtttgacaaagagcaaatggtcgccgtgaccgaggccaatgaggcacttaaaaagcagatcgaggaactccagcaggaggcgagaaaggccattaccgagcagaagcagaagatgaggcggttaggatcagatctgacttcagcccaaaaggaaatgaagactaagcataaagcatatgagaacgcagtcggcatcctgagtcggagactgcaggaggcgctggcagccaaggaggcggcagatgccgagctagggcagctgagagcgcaggggggaagttcagattcaagtttggcactacacgaaaggatccaggccctagaggcggagctgcaagctgtctcacatagcaaaactttacttgagaaggaactccaggaggtcatagccctgaccagtcaggagctagaggaatcacgcgagaaagtcctggagcttgaggatgagttgcaagaaagccggggattccgcaagaagattaagagactggaagaatccaataagaaactggcgctcgagctggaacatgagaagggtaagttaacagggctcggccagagcaacgcggctctccgcgaacataactcgatcctggaaacagccctcgccaaaagagaggcagacttggtacagctgaaccttcaggtccaagcagtgctccaaagaaaagaagaggaggacaggcaaatgaagcacctcgttcaggccctgcaagcctcactggagaaggagaaggaaaaggtcaactcattgaaggaacaggtggccgctgccaaggtggaggcagggcataacagacggcacttcaaagctgcctcccttgagctgagtgaggttaaaaaggagctccaagccaaagagcacttggtgcagaagctgcaggcagaggcagatgacctccagattagagaaggcaaacactctcaggagatcgctcagttccaggccgaattggccgaagcacgcgcacagttacagttgctgcagaagcagctcgatgagcagctttccaagcagcccgtgggtaatcaggagatggaaaacctaaaatgggaggtggaccagaaagaaagagagatccaatccctgaagcagcagttggacctcacggaacaacagggaagaaaagagttggaaggccttcagcagctgctgcagaatgtcaagagtgagctggaaatggcccaagaagacctgagcatgacacagaaagataagttcatgttgcaggccaaggtgtctgaattgaagaataacatgaaaacgctcctgcagcagaatcagcaactcaagcttgatctgagaagaggagccgcaaagacaaggaaggagccaaaaggtgaggccagttcgtccaacccagcaacaccaattaagattccggattgccctgtccctgcctcactgctagaggagctgttgcggccacctcccgcagtctctaaggagccactgaaaaacctgaacagttgcttgcagcagctaaagcaggagatggactcgctgcaacgacagatggaagagcacgcactgacagtccacgaatccctgtccagctggactcccctcgaacccgctaccgccagccccgtgccacctggcggacacgccggaccccgtggcgacccccagaggcacagtcagagccgagccagcaaagaaggccctggtgagta

SEQ ID NO: 160134 - DNA, 4173 bp, Artificial Sequence
  derived and/or modified sequence
atggatggagcctccgccgagcaagatgggctacaagaggatcgctcacattccggcccttctagcctgcctgaagcgccactaaaaccgcctggtccccttgtgccccctgaccaacaggataaagttcagtgtgccgaagtgaatcgggcttcaactgagggggaaagccctgatgggccagggcaggggggactttgccaaaatggacctacccccccatttcccgaccccccatctagtcttgaccccacaacctcacccgtgggacctgacgcatctcccggtgtggccggatttcatgataatctcagaaagtctcagggaacgagtgccgaaggcagtgtgcgcaaggaggccctacagtctctgcgtctttcactgcctatgcaggaaacgcagttatgctctactgactcgccgctgcccctggagaaagaagagcaggtcagactgcaggcacggaagtggcttgaggaacaactgaaacagtatcgggtgaaacggcagcaagaacgctcctctcagccagccacaaagacccggcttttctcaactctggatcccgaactcatgctcaatcccgaaaacctgccaagagccagtacactcgctatgacaaaggagtactctttcctaagaaccagcgttccgaggggaccaaaagtcggcagcttggggctacctgcgcatcctcgggagaagaaaacttccaaaagttcgaaaatacgctctctggccgactacaggacagaagatagtaatgcaggcaactccggcggtaacgtccccgctcccgattcaaccaaggggagtctgaagcagaacaggagttccgccgcttccgtagtgtctgagatctccttgtctcccgataccgacgaccggctagagaacactagcttggcaggcgatagcgtgtccgaggttgatggcaacgactccgattcttcttcctacagcagcgcttctacacggggtacatatggtatcctttccaagacagtgggaactcaagatactccgtacatggtgaacggccaggaaatccctgccgacactctggggcagtttccctccatcaaggatgtgctgcaggccgctgccgcagaacatcaggaccagggacaggaggtgaacggagaggtcagatctaggcgagattctatctgtagctcagtaagcctggaatcttcggcagccgaaactcaggaagagatgcttcaagtcctgaaggagaaaatgcgcctggagggccaattggaagccttgtccctagaggcctctcaggccttaaaggagaaggcagaactacaggcccagctggccgcactgagcacaaaattacaggcccaagtcgaatgctcacattcgtcccaacagcgacaagacagcctgagcagcgaggtggacacactgaagcagtcctgctgggatctcgaacgggctatgaccgacctgcagaacatgctggaagccaaaaacgcctccctggccagttctaataacgatctgcaggtagcagaggagcaataccagcgtctgatggccaaagttgaagacatgcagcggtccatgctgagtaaagacaatactgtgcacgacttgcgacagcagatgactgccctgcagtctcaattacaacaagttcagctggagcgtactactctcacaagtaaactgaaagcttcccaggcagagatctcctctttgcaatccgtcagacagtggtaccagcaacagcttgccctcgctcaggaagctcgggttagactccagggcgagatggcacacattcaggttggacagatgactcaggccggtctgctggagcacctgaaactggagaacgtgagtctgtcccagcaactgaccgaaactcaacacagaagtatgaaagaaaagggtcggattgccgctcaactacagggcatcgaggctgatatgttagaccaggaggcggcttttatgcagatccaggaagccaaaacgatggtcgaggaggatctgcagcgcaggctcgaggaatttgaaggagaacgggagcgcctgcaaagaatggccgatagcgccgcttcattggaacagcagttggaacaagtgaaactgacactcctccagcgcgatcagcaactggaagccttgcagcaggagcacctcgacctgatgaagcagttaaccctgacacaagaggccttacaatctagagaacagtctctcgatgccttgcagacccattacgacgagctgcaggccaggttgggcgaactccagggcgaggccgcatctagggaggacaccatttgcctgctccagaacgaaaagatcatccttgaggccgctctgcaggcagccaaatctgggaaagaggagttggatagaggagccaggcggctggaggagggcaccgaggaaacatctgagacattggagaagctgcgggaagagctcgccattaagtcaggccaggtagaacacctccagcaggaaacggcagcactgaaaaagcaaatgcaaaaaatcaaggaacaatttcttcagcaaaaggtgatggttgaggcgtataggagggatgccacttcgaaggaccaattgatcagcgagctcaaagccacaaggaagcggttggactccgagctgaaggagttgagacaggagctcatgcaggttcacggagagaagaggaccgcagaggcagagctgtcgcggttgcaccgagaagttgctcaggtgagacagcatatggccgacctggaaggtcacctccagtcagctcagaaggagcgagatgagatggaaacccatctgcagtcgttacagtttgacaaggagcaaatggttgccgttactgaagctaatgaggccttaaagaagcaaattgaggagctccagcaggaggccagaaaagccattaccgagcagaagcagaagatgcggcgactcggctccgatttgacctccgcccagaaagaaatgaagacaaagcacaaggcttatgagaatgccgtgggcattctgagtaggcggctgcaagaagccctggccgctaaggaagctgctgatgccgaactgggccagctacgggcacagggtggatcaagcgatagtagtctcgcgctccacgaacgaattcaagccctggaggccgagctgcaggccgtgtcccactcaaagactctgctggagaaagagttgcaggaggttatcgcattaacctctcaggaattagaggagagccgggagaaggtgcttgaacttgaggacgagctgcaggagtctcgcggattccgcaagaaaatcaaaaggctggaagagtccaataagaaattggccctcgaactcgaacacgaaaaagggaagcttactgggctcgggcaatctaatgccgcactgagagagcacaattcaatacttgagacggcactggcaaagagagaggccgaccttgtgcagttgaatctgcaggtgcaggcagtgctgcagcgtaaggaagaggaagatcgccaaatgaagcaccttgttcaagccctgcaggcctccctcgaaaaggagaaggaaaaagtgaactcgctgaaggaacaggttgccgctgccaaggtcgaggccggacataatagaaggcactttaaggccgcttccctagaacttagcgaggtgaagaaggaattacaagccaaggagcacttggtgcagaagctccaggctgaagccgatgatctgcagatcagagagggaaagcacagtcaagaaatcgcacaatttcaggctgaactggcagaagctagagcgcagctacagttgttgcagaaacagcttgatgagcagctcagtaaacaacccgttggcaaccaggagatggaaaacctgaagtgggaggttgatcagaaggaacgggagatacaatccctgaaacaacagctagacctgactgaacagcagggacgcaaagaacttgaaggattacaacaactgcttcagaacgtcaagtccgaattagaaatggctcaagaggacttgtcaatgacacagaaggacaaatttatgctgcaggccaaggtctcagagctgaagaacaatatgaaaactttgctgcagcagaatcagcagcttaagctggacctccgcagaggtgcagcgaagactgtactacggccagcaagcctaccgggatag

SEQ ID NO: 160135 - DNA, 4497 bp, Artificial Sequence
  derived and/or modified sequence
atggacggcgccagcgccgagcaggacggcctgcaggaggacagaagccacagcggccccagcagcctgcccgaggcccccctgaagccccccggccccctggtgccccccgaccagcaggacaaggtgcagtgcgccgaggtgaacagagccagcaccgagggcgagagccccgacggccccggccagggcggcctgtgccagaacggccccaccccccccttccccgacccccccagcagcctggaccccaccaccagccccgtgggccccgacgccagccccggcgtggccggcttccacgacaacctgagaaagagccagggcaccagcgccgagggcagcgtgagaaaggaggccctgcagagcctgagactgagcctgcccatgcaggagacccagctgtgcagcaccgacagccccctgcccctggagaaggaggagcaggtgagactgcaggccagaaagtggctggaggagcagctgaagcagtacagagtgaagagacagcaggagagaagcagccagcccgccaccaagaccagactgttcagcaccctggaccccgagctgatgctgaaccccgagaacctgcccagagccagcaccctggccatgaccaaggagtacagcttcctgagaaccagcgtgcccagaggccccaaggtgggcagcctgggcctgcccgcccaccccagagagaagaagaccagcaagagcagcaagatcagaagcctggccgactacagaaccgaggacagcaacgccggcaacagcggcggcaacgtgcccgcccccgacagcaccaagggcagcctgaagcagaacagaagcagcgccgccagcgtggtgagcgagatcagcctgagccccgacaccgacgacagactggagaacaccagcctggccggcgacagcgtgagcgaggtggacggcaacgacagcgacagcagcagctacagcagcgccagcaccagaggcacctacggcatcctgagcaagaccgtgggcacccaggacaccccctacatggtgaacggccaggagatccccgccgacaccctgggccagttccccagcatcaaggacgtgctgcaggccgccgccgccgagcaccaggaccagggccaggaggtgaacggcgaggtgagaagcagaagagacagcatctgcagcagcgtgagcctggagagcagcgccgccgagacccaggaggagatgctgcaggtgctgaaggagaagatgagactggagggccagctggaggccctgagcctggaggccagccaggccctgaaggagaaggccgagctgcaggcccagctggccgccctgagcaccaagctgcaggcccaggtggagtgcagccacagcagccagcagagacaggacagcctgagcagcgaggtggacaccctgaagcagagctgctgggacctggagagagccatgaccgacctgcagaacatgctggaggccaagaacgccagcctggccagcagcaacaacgacctgcaggtggccgaggagcagtaccagagactgatggccaaggtggaggacatgcagagaagcatgctgagcaaggacaacaccgtgcacgacctgagacagcagatgaccgccctgcagagccagctgcagcaggtgcagctggagagaaccaccctgaccagcaagctgaaggccagccaggccgagatcagcagcctgcagagcgtgagacagtggtaccagcagcagctggccctggcccaggaggccagagtgagactgcagggcgagatggcccacatccaggtgggccagatgacccaggccggcctgctggagcacctgaagctggagaacgtgagcctgagccagcagctgaccgagacccagcacagaagcatgaaggagaagggcagaatcgccgcccagctgcagggcatcgaggccgacatgctggaccaggaggccgccttcatgcagatccaggaggccaagaccatggtggaggaggacctgcagagaagactggaggagttcgagggcgagagagagagactgcagagaatggccgacagcgccgccagcctggagcagcagctggagcaggtgaagctgaccctgctgcagagagaccagcagctggaggccctgcagcaggagcacctggacctgatgaagcagctgaccctgacccaggaggccctgcagagcagagagcagagcctggacgccctgcagacccactacgacgagctgcaggccagactgggcgagctgcagggcgaggccgccagcagagaggacaccatctgcctgctgcagaacgagaagatcatcctggaggccgccctgcaggccgccaagagcggcaaggaggagctggacagaggcgccagaagactggaggagggcaccgaggagaccagcgagaccctggagaagctgagagaggagctggccatcaagagcggccaggtggagcacctgcagcaggagaccgccgccctgaagaagcagatgcagaagatcaaggagcagttcctgcagcagaaggtgatggtggaggcctacagaagagacgccaccagcaaggaccagctgatcagcgagctgaaggccaccagaaagagactggacagcgagctgaaggagctgagacaggagctgatgcaggtgcacggcgagaagagaaccgccgaggccgagctgagcagactgcacagagaggtggcccaggtgagacagcacatggccgacctggagggccacctgcagagcgcccagaaggagagagacgagatggagacccacctgcagagcctgcagttcgacaaggagcagatggtggccgtgaccgaggccaacgaggccctgaagaagcagatcgaggagctgcagcaggaggccagaaaggccatcaccgagcagaagcagaagatgagaagactgggcagcgacctgaccagcgcccagaaggagatgaagaccaagcacaaggcctacgagaacgccgtgggcatcctgagcagaagactgcaggaggccctggccgccaaggaggccgccgacgccgagctgggccagctgagagcccagggcggcagcagcgacagcagcctggccctgcacgagagaatccaggccctggaggccgagctgcaggccgtgagccacagcaagaccctgctggagaaggagctgcaggaggtgatcgccctgaccagccaggagctggaggagagcagagagaaggtgctggagctggaggacgagctgcaggagagcagaggcttcagaaagaagatcaagagactggaggagagcaacaagaagctggccctggagctggagcacgagaagggcaagctgaccggcctgggccagagcaacgccgccctgagagagcacaacagcatcctggagaccgccctggccaagagagaggccgacctggtgcagctgaacctgcaggtgcaggccgtgctgcagagaaaggaggaggaggacagacagatgaagcacctggtgcaggccctgcaggccagcctggagaaggagaaggagaaggtgaacagcctgaaggagcaggtggccgccgccaaggtggaggccggccacaacagaagacacttcaaggccgccagcctggagctgagcgaggtgaagaaggagctgcaggccaaggagcacctggtgcagaagctgcaggccgaggccgacgacctgcagatcagagagggcaagcacagccaggagatcgcccagttccaggccgagctggccgaggccagagcccagctgcagctgctgcagaagcagctggacgagcagctgagcaagcagcccgtgggcaaccaggagatggagaacctgaagtgggaggtggaccagaaggagagagagatccagagcctgaagcagcagctggacctgaccgagcagcagggcagaaaggagctggagggcctgcagcagctgctgcagaacgtgaagagcgagctggagatggcccaggaggacctgagcatgacccagaaggacaagttcatgctgcaggccaaggtgagcgagctgaagaacaacatgaagaccctgctgcagcagaaccagcagctgaagctggacctgagaagaggcgccgccaagaccagaaaggagcccaagggcgaggccagcagcagcaaccccgccacccccatcaagatccccgactgccccgtgcccgccagcctgctggaggagctgctgagacccccccccgccgtgagcaaggagcccctgaagaacctgaacagctgcctgcagcagctgaagcaggagatggacagcctgcagagacagatggaggagcacgccctgaccgtgcacgagagcctgagcagctggacccccctggagcccgccaccgccagccccgtgccccccggcggccacgccggccccagaggcgacccccagagacacagccagagcagagccagcaaggagggccccggcgagtag

SEQ ID NO: 160136 - DNA, 4173 bp, Artificial Sequence
  derived and/or modified sequence
atggacggcgccagcgccgagcaggacggcctgcaggaggacagaagccacagcggccccagcagcctgcccgaggcccccctgaagccccccggccccctggtgccccccgaccagcaggacaaggtgcagtgcgccgaggtgaacagagccagcaccgagggcgagagccccgacggccccggccagggcggcctgtgccagaacggccccaccccccccttccccgacccccccagcagcctggaccccaccaccagccccgtgggccccgacgccagccccggcgtggccggcttccacgacaacctgagaaagagccagggcaccagcgccgagggcagcgtgagaaaggaggccctgcagagcctgagactgagcctgcccatgcaggagacccagctgtgcagcaccgacagccccctgcccctggagaaggaggagcaggtgagactgcaggccagaaagtggctggaggagcagctgaagcagtacagagtgaagagacagcaggagagaagcagccagcccgccaccaagaccagactgttcagcaccctggaccccgagctgatgctgaaccccgagaacctgcccagagccagcaccctggccatgaccaaggagtacagcttcctgagaaccagcgtgcccagaggccccaaggtgggcagcctgggcctgcccgcccaccccagagagaagaagaccagcaagagcagcaagatcagaagcctggccgactacagaaccgaggacagcaacgccggcaacagcggcggcaacgtgcccgcccccgacagcaccaagggcagcctgaagcagaacagaagcagcgccgccagcgtggtgagcgagatcagcctgagccccgacaccgacgacagactggagaacaccagcctggccggcgacagcgtgagcgaggtggacggcaacgacagcgacagcagcagctacagcagcgccagcaccagaggcacctacggcatcctgagcaagaccgtgggcacccaggacaccccctacatggtgaacggccaggagatccccgccgacaccctgggccagttccccagcatcaaggacgtgctgcaggccgccgccgccgagcaccaggaccagggccaggaggtgaacggcgaggtgagaagcagaagagacagcatctgcagcagcgtgagcctggagagcagcgccgccgagacccaggaggagatgctgcaggtgctgaaggagaagatgagactggagggccagctggaggccctgagcctggaggccagccaggccctgaaggagaaggccgagctgcaggcccagctggccgccctgagcaccaagctgcaggcccaggtggagtgcagccacagcagccagcagagacaggacagcctgagcagcgaggtggacaccctgaagcagagctgctgggacctggagagagccatgaccgacctgcagaacatgctggaggccaagaacgccagcctggccagcagcaacaacgacctgcaggtggccgaggagcagtaccagagactgatggccaaggtggaggacatgcagagaagcatgctgagcaaggacaacaccgtgcacgacctgagacagcagatgaccgccctgcagagccagctgcagcaggtgcagctggagagaaccaccctgaccagcaagctgaaggccagccaggccgagatcagcagcctgcagagcgtgagacagtggtaccagcagcagctggccctggcccaggaggccagagtgagactgcagggcgagatggcccacatccaggtgggccagatgacccaggccggcctgctggagcacctgaagctggagaacgtgagcctgagccagcagctgaccgagacccagcacagaagcatgaaggagaagggcagaatcgccgcccagctgcagggcatcgaggccgacatgctggaccaggaggccgccttcatgcagatccaggaggccaagaccatggtggaggaggacctgcagagaagactggaggagttcgagggcgagagagagagactgcagagaatggccgacagcgccgccagcctggagcagcagctggagcaggtgaagctgaccctgctgcagagagaccagcagctggaggccctgcagcaggagcacctggacctgatgaagcagctgaccctgacccaggaggccctgcagagcagagagcagagcctggacgccctgcagacccactacgacgagctgcaggccagactgggcgagctgcagggcgaggccgccagcagagaggacaccatctgcctgctgcagaacgagaagatcatcctggaggccgccctgcaggccgccaagagcggcaaggaggagctggacagaggcgccagaagactggaggagggcaccgaggagaccagcgagaccctggagaagctgagagaggagctggccatcaagagcggccaggtggagcacctgcagcaggagaccgccgccctgaagaagcagatgcagaagatcaaggagcagttcctgcagcagaaggtgatggtggaggcctacagaagagacgccaccagcaaggaccagctgatcagcgagctgaaggccaccagaaagagactggacagcgagctgaaggagctgagacaggagctgatgcaggtgcacggcgagaagagaaccgccgaggccgagctgagcagactgcacagagaggtggcccaggtgagacagcacatggccgacctggagggccacctgcagagcgcccagaaggagagagacgagatggagacccacctgcagagcctgcagttcgacaaggagcagatggtggccgtgaccgaggccaacgaggccctgaagaagcagatcgaggagctgcagcaggaggccagaaaggccatcaccgagcagaagcagaagatgagaagactgggcagcgacctgaccagcgcccagaaggagatgaagaccaagcacaaggcctacgagaacgccgtgggcatcctgagcagaagactgcaggaggccctggccgccaaggaggccgccgacgccgagctgggccagctgagagcccagggcggcagcagcgacagcagcctggccctgcacgagagaatccaggccctggaggccgagctgcaggccgtgagccacagcaagaccctgctggagaaggagctgcaggaggtgatcgccctgaccagccaggagctggaggagagcagagagaaggtgctggagctggaggacgagctgcaggagagcagaggcttcagaaagaagatcaagagactggaggagagcaacaagaagctggccctggagctggagcacgagaagggcaagctgaccggcctgggccagagcaacgccgccctgagagagcacaacagcatcctggagaccgccctggccaagagagaggccgacctggtgcagctgaacctgcaggtgcaggccgtgctgcagagaaaggaggaggaggacagacagatgaagcacctggtgcaggccctgcaggccagcctggagaaggagaaggagaaggtgaacagcctgaaggagcaggtggccgccgccaaggtggaggccggccacaacagaagacacttcaaggccgccagcctggagctgagcgaggtgaagaaggagctgcaggccaaggagcacctggtgcagaagctgcaggccgaggccgacgacctgcagatcagagagggcaagcacagccaggagatcgcccagttccaggccgagctggccgaggccagagcccagctgcagctgctgcagaagcagctggacgagcagctgagcaagcagcccgtgggcaaccaggagatggagaacctgaagtgggaggtggaccagaaggagagagagatccagagcctgaagcagcagctggacctgaccgagcagcagggcagaaaggagctggagggcctgcagcagctgctgcagaacgtgaagagcgagctggagatggcccaggaggacctgagcatgacccagaaggacaagttcatgctgcaggccaaggtgagcgagctgaagaacaacatgaagaccctgctgcagcagaaccagcagctgaagctggacctgagaagaggcgccgccaagaccgtgctgagacccgccagcctgcccggctag

SEQ ID NO: 160137 - protein, 709 aa, Artificial Sequence
  derived and/or modified sequence
MPSATSHSGSGSKSSGPPPPSGSSGSEAAAGAGAAAPASQHPATGTGAVQTEAMKQILGVIDKKLRNLEKKKGKLDDYQERMNKGERLNQDQLDAVSKYQEVTNNLEFAKELQRSFMALSQDIQKTIKKTARREQLMREEAEQKRLKTVLELQYVLDKLGDDEVRTDLKQGLNGVPILSEEELSLLDEFYKLVDPERDMSLRLNEQYEHASIHLWDLLEGKEKPVCGTTYKVLKEIVERVFQSNYFDSTHNHQNGLCEEEEAASAPAVEDQVPEAEPEPAEEYTEQSEVESTEYVNRQFMAETQFTSGEKEQVDEWTVETVEVVNSLQQQPQAASPSVPEPHSLTPVAQADPLVRRQRVQDLMAQMQGPYNFIQDSMLDFENQTLDPAIVSAQPMNPTQNMDMPQLVCPPVHSESRLAQPNQVPVQPEATQVPLVSSTSEGYTASQPLYQPSHATEQRPQKEPIDQIQATISLNTDQTTASSSLPAASQPQVFQAGTSKPLHSSGINVNAAPFQSMQTVFNMNAPVPPVNEPETLKQQNQYQASYNQSFSSQPHQVEQTELQQEQLQTVVGTYHGSPDQSHQVTGNHQQPPQQNTGFPRSNQPYYNSRGVSRGGSRGARGLMNGYRGPANGFRGGYDGYRPSFSNTPNSGYTQSQFSAPRDYSGYQRDGYQQNFKRGSGQSGPRGAPRGRGGPPRPNRGMPQMNTQQVN

SEQ ID NO: 160138 - protein, 465 aa, Artificial Sequence
  derived and/or modified sequence
MNVTSLFSFTSPAVKRLLGWKQGDEEEKWAEKAVDALVKKLKKKKGAMEELEKALSCPGQPSNCVTIPRSLDGRLQVSHRKGLPHVIYCRVWRWPDLQSHHELKPLECCEFPFGSKQKEVCINPYHYKRVESPVLPPVLVPRHSEYNPQHSLLAQFRNLGQNEPHMPLNATFPDSFQQPNSHPFPHSPNSSYPNSPGSSSSTYPHSPTSSDPGSPFQMPADTPPPAYLPPEDPMTQDGSQPMDTNMMAPPLPSEINRGDVQAVAYEEPKHWCSIVYYELNNRVGEAFHASSTSVLVDGFTDPSNNKNRFCLGLLSNVNRNSTIENTRRHIGKGVHLYYVGGEVYAECLSDSSIFVQSRNCNYHHGFHPTTVCKIPSGCSLKIFNNQEFAQLLAQSVNHGFETVYELTKMCTIRMSFVKGWGAEYHRQDVTSTPCWIEIHLHGPLQWLDKVLTQMGSPHNPISSVS

SEQ ID NO: 160139 - protein, 58 aa, Artificial Sequence
  derived and/or modified sequence
MNVTSLFSFTSPAVKRLLGWKQGDEEEKWAEKAVDALVKKLKKKKGAMEELEKALSCP

SEQ ID NO: 160140 - protein, 95 aa, Artificial Sequence
  derived and/or modified sequence
MNVTSLFSFTSPAVKRLLGWKQGDEEEKWAEKAVDALVKKLKKKKGAMEELEKALSCPGQPSNCVTIPRSLDGRLQVSHRKGLPHVIYCRVWRWP

SEQ ID NO: 160141 - protein, 133 aa, Artificial Sequence
  derived and/or modified sequence
MNVTSLFSFTSPAVKRLLGWKQGDEEEKWAEKAVDALVKKLKKKKGAMEELEKALSCPGQPSNCVTIPRSLDGRLQVSHRKGLPHVIYCRVWRWPDLQSHHELKPLECCEFPFGSKQKEVCINPYHYKRVESP

SEQ ID NO: 160142 - protein, 106 aa, Artificial Sequence
  derived and/or modified sequence
MNVTSLFSFTSPAVKRLLGWKQGDEEEKWAEKAVDALVKKLKKKKGAMEELEKALSCPGQPSNCVTIPRSLDGRLQVSHRKGLPHVIYCRVWRWPDLQSHHELKPL

SEQ ID NO: 160143 - protein, 112 aa, Artificial Sequence
  derived and/or modified sequence
MNVTSLFSFTSPAVKRLLGWKQGDEEEKWAEKAVDALVKKLKKKKGAMEELEKALSCPGQPSNCVTIPRSLDGRLQVSHRKGLPHVIYCRVWRWPDLQSHHELKPLECCEFP

SEQ ID NO: 160144 - DNA, 3056 bp, Artificial Sequence
  derived and/or modified sequence
ggcagctgaggagtggaggctgggcagctccgactccctgacgccagcgcgaccagatcaatccaggctccaggagaaagcaggcgggcgggcggagaaaggagaggccgagcggctcaacccgggccgaggctcggggagcggagagtggcgcagcgcccggccgtccggacccgggccgcgagaccccgctcgcccggccactcgtgctcccacacggacgggcgcgccgccaacccggtgctgactgggttacttttttaaacactaggaatggtaatttctactcttctggacttcaaactaagaagttaaagagacttctctgtaaataaacaaatctcttctgctgtccttttgcatttggagacagctttatttcaccatatccaaggagtataactagtgctgtcattatgaatgtgacaagtttattttcctttacaagtccagctgtgaagagacttcttgggtggaaacagggcgatgaagaagaaaaatgggcagagaaagctgttgatgctttggtgaaaaaactgaagaaaaagaaaggtgccatggaggaactggaaaaggccttgagctgcccagggcaaccgagtaactgtgtcaccattccccgctctctggatggcaggctgcaagtctcccaccggaagggactgcctcatgtcatttactgccgtgtgtggcgctggcccgatcttcagagccaccatgaactaaaaccactggaatgctgtgagtttccttttggttccaagcagaaggaggtctgcatcaatccctaccactataagagagtagaaagccctgtacttcctcctgtgctggttccaagacacagcgaatataatcctcagcacagcctcttagctcagttccgtaacttaggacaaaatgagcctcacatgccactcaacgccacttttccagattctttccagcaacccaacagccacccgtttcctcactctcccaatagcagttacccaaactctcctgggagcagcagcagcacctaccctcactctcccaccagctcagacccaggaagccctttccagatgccagctgatacgcccccacctgcttacctgcctcctgaagaccccatgacccaggatggctctcagccgatggacacaaacatgatggcgcctcccctgccctcagaaatcaacagaggagatgttcaggcggttgcttatgaggaaccaaaacactggtgctctattgtctactatgagctcaacaatcgtgtgggtgaagcgttccatgcctcctccacaagtgtgttggtggatggtttcactgatccttccaacaataagaaccgtttctgccttgggctgctctccaatgttaaccggaattccactattgaaaacaccaggcggcatattggaaaaggagttcatctttattatgttggaggggaggtgtatgccgaatgccttagtgacagtagcatctttgtgcaaagtcggaactgcaactaccatcatggatttcatcctactactgtttgcaagatccctagtgggtgtagtctgaaaatttttaacaaccaagaatttgctcagttattggcacagtctgtgaaccatggatttgagacagtctatgagcttacaaaaatgtgtactatacgtatgagctttgtgaagggctggggagcagaataccaccgccaggatgttactagcaccccctgctggattgagatacatctgcacggccccctccagtggctggataaagttcttactcaaatgggttcacctcataatcctatttcatctgtatcttaaatggccccaggcatctgcctctggaaaactattgagccttgcatgtacttgaaggatggatgagtcagacacgattgagaactgacaaaggagccttgataatacttgacctctgtgaccaactgttggattcagaaatttaaacaaaaaaaaaaaaaaacacacacaccttggtaacatactgttgatatcaagaacctgtttagtttacattgtaacattctattgtaaaatcaactaaaattcagacttttagcaggactttgtgtacagttaaaggagagatggccaagccagggacaaattgtctattagaaaacggtcctaagagattctttggtgtttggcactttaaggtcatcgttgggcagaagtttagcattaatagttgttctgaaacgtgttttatcaggtttagagcccatgttgagtcttcttttcatgggttttcataatattttaaaactatttgtttagcgatggttttgttcgtttaagtaaaggttaatcttgatgatatacataataatctttctaaaattgtatgctgaccatacttgctgtcagaataatgctaggcatatgctttttgctaaatatgtatgtacagagtatttggaagttaagaattgattagactagtgaatttaggagtatttgaggtgggtggggggaagagggaaatgacaactgcaaatgtagactatactgtaaaaattcagtttgttgctttaaagaaacaaactgatacctgaattttgctgtgtttccattttttagagatttttatcatttttttctctctcggcattcttttttctcatactcttcaaaaagcagttctgcagctggttaattcatgtaactgtgagagcaaatgaataattcctgctattctgaaattgcctacatgtttcaataccagttatatggagtgcttgaatttaataagcagtttttacggagtttacagtacagaaataggctttaattttcaagtgaattttttgccaaacttagtaactctgttaaatatttggaggatttaaagaacatcccagtttgaattcatttcaaactttttaaatttttttgtactatgtttggttttattttccttctgttaatcttttgtattcacttatgctctcgtacattgagtacttttattccaaaactagtgggttttctctactggaaattttcaataaacctgtcattattgcttactttgattaaaaa

SEQ ID NO: 160145 - DNA, 1398 bp, Artificial Sequence
  derived and/or modified sequence
atgaatgtgacctcattgttttcatttacttcccctgccgtgaaaaggctcttaggttggaaacagggggatgaggaagaaaaatgggccgaaaaagccgttgacgctctcgtcaaaaaactaaaaaagaaaaaaggagccatggaagagctggagaaagccttaagctgccctggtcagcctagcaattgcgtgaccattcctcgctccctagatggtcgacttcaggtgtcacataggaagggcctgccccacgtcatttactgccgcgtatggcggtggcccgacctgcagagccatcacgagttgaagccccttgagtgctgcgaatttccattcggcagtaagcagaaggaggtatgtatcaacccataccattacaaacgagtagaatccccagtgctgccccccgtactggttccacgccactcggagtacaatccacagcattccttgctggcccagttcaggaatttgggtcagaacgagcctcatatgccactaaatgcgaccttcccggactccttccagcagcccaactctcacccgtttccgcatagcccaaattcaagctacccgaatagtcctggctcatccagcagcacctacccacacagccccacatcaagtgacccgggaagcccattccagatgcccgccgacacacccccccctgcgtatcttcctcctgaagaccccatgacacaggacggcagtcagccaatggatacaaacatgatggcccccccgttaccttcggaaataaatagaggagatgtccaggcagtggcctacgaagagcccaagcattggtgttccatcgtgtactacgagctaaataatagggtcggagaagcatttcacgccagcagcacctctgtacttgtggacgggtttacagatccatctaataataaaaaccggttctgcctcggcctgctttctaatgtgaatagaaatagtacgatcgagaacacaaggcggcacatcggtaagggtgtgcacttgtattacgtgggcggtgaagtatacgcggaatgcttatctgattcctccatattcgttcagagtcggaactgcaattaccaccacggattccacccaaccactgtgtgcaagattcccagtggatgctctctaaaaatcttcaacaaccaagagttcgcccagctactggcccagtccgtgaatcacggattcgagaccgtctatgagttgaccaaaatgtgtacaataaggatgagttttgtgaagggctggggagccgaataccatcgccaagacgtcaccagtaccccttgctggatcgagatccatctccatgggcccctacagtggttggacaaggtattgacccagatgggatctccacacaaccctatcagctctgtgtcctag

SEQ ID NO: 160146 - DNA, 1398 bp, Artificial Sequence
  derived and/or modified sequence
atgaatgtcactagcctctttagctttaccagcccggcggtgaaacggctcttggggtggaaacagggcgatgaggaggaaaagtgggccgagaaagctgtcgacgctttagtgaagaagttaaagaagaagaaaggcgccatggaagagctggagaaagcattatcgtgtcccggccagccatcgaattgtgtaacgatccctcgctccttggacgggcggctgcaggtgtcacaccgcaaaggcctgccccacgtcatctactgtcgggtgtggaggtggccggacttgcagtctcatcacgaactgaagccactggaatgctgtgagttccccttcgggagcaagcagaaagaggtatgcatcaacccatatcattataaacgagttgagtcgccagtattaccccctgtgttggtgccgcgtcactccgaatataacccccagcattcactgctcgctcaattccgaaatctagggcagaacgagccacacatgcctctcaacgcgaccttcccagactcattccagcagccaaatagtcaccccttcccccatagcccaaattccagctacccgaactctcccggtagcagttcaagtacatacccccactctccaactagctctgacccgggttcaccgtttcagatgcctgctgacactccaccacctgcttatctgcctcctgaggatcctatgacccaggacgggtctcagcctatggacaccaacatgatggcccccccgctgccttccgaaatcaatcggggagatgttcaggccgttgcctatgaagagccaaagcactggtgctccattgtgtactacgagctaaacaaccgcgtgggggaggctttccatgcttcttcaacttccgtgctcgtagacgggtttacggacccatctaataacaaaaacaggttctgcctgggactactgtccaatgtgaacaggaattctaccatcgagaatacccggcgccacataggcaagggcgtgcatctgtactatgttggaggcgaagtgtacgctgaatgtttaagcgatagctctatatttgtgcaatctagaaactgtaactaccaccatggatttcacccgactaccgtgtgcaaaataccatcaggctgcagcctcaagattttcaataaccaggagtttgcacagttgctggcacagtccgtgaaccacgggtttgagaccgtctacgagctcacaaaaatgtgtactattaggatgtcctttgtaaagggctggggagccgaataccacaggcaggatgttacgtcgacgccttgctggatcgagatccatctccatggcccccttcaatggttggacaaagtcttaacccagatgggaagtccccacaatccaatatcttcagtgtcctag

SEQ ID NO: 160147 - DNA, 33 bp, Artificial Sequence
  derived and/or modified sequence
atgaacgtgacctctctgttttcctttacgtag

SEQ ID NO: 160148 - DNA, 1398 bp, Artificial Sequence
  derived and/or modified sequence
atgaacgtcacttcattgttcagctttacctctccggccgtgaagagactgctggggtggaagcagggagacgaagaggagaagtgggctgaaaaagctgtggacgcgctcgtcaaaaaacttaagaaaaagaaaggcgccatggaggagctggagaaggccctgtcttgcccaggtcagccgtcaaattgtgtaactatcccaaggtctttggacgggcgcctgcaggtctcacatcgtaaaggattgccccatgtgatttattgcagggtctggcggtggcctgacttgcagtctcaccatgagctcaagcccctggagtgctgtgagtttccttttggctcaaaacagaaggaggtctgcatcaacccttatcactacaagcgggtggagtcaccggttctccccccggtgttggtaccaaggcactctgaatataaccctcagcactccctgcttgcccaattccggaacctggggcaaaacgaaccccatatgcctctcaatgcaacctttccagactcctttcagcagcccaacagccaccccttccctcatagccccaacagctcataccccaacagtcccggcagcagctcttctacttatcctcactcgcctacgagttctgacccagggagcccgtttcagatgccagccgatactcctccccccgcctatcttccgcctgaggacccaatgacccaggacggctctcagccgatggatactaacatgatggcccccccactgccaagcgagataaaccgtggagacgtgcaggccgtcgcttatgaggaaccaaagcactggtgttcaatcgtgtattacgaactaaataatcgagtgggtgaggctttccacgcatcatcgacctccgtgttggtggatggcttcaccgatcctagcaataacaaaaatcggttctgcctggggcttctgtctaatgttaacagaaatagtaccatcgaaaatacacgcagacatatcgggaagggcgtgcatctgtactacgtggggggcgaggtatacgcagaatgtctgtctgatagttcaatcttcgtccagtctagaaactgtaactatcatcatgggtttcaccctacaaccgtgtgcaagatcccctctgggtgtagcctgaaaatattcaataatcaggaattcgcccagctgctagctcagtccgtcaatcacggctttgaaacagtgtatgaactcaccaagatgtgcactatacgtatgtccttcgtcaaaggctggggggcagagtatcacagacaggatgtaacgtctacaccatgctggatcgaaatccatctgcacggaccgctacagtggctggacaaggtattaacccagatggggagccctcataacccgataagttcagtgagttag

SEQ ID NO: 160149 - DNA, 1398 bp, Artificial Sequence
  derived and/or modified sequence
atgaatgtgaccagcctcttctccttcaccagccctgctgtgaagaggctgctgggctggaagcagggagatgaggaggagaagtgggccgagaaggctgtggatgccctggtgaagaagctgaagaagaagaagggggccatggaggagctggagaaggccctgagctgccccggccagcccagcaactgtgtgaccatccccaggagcctggatggccgcctgcaggtgagccacaggaagggcctgccccacgtgatctactgccgggtgtggcgctggccagacctgcagagccaccacgagctgaagcccctggagtgctgtgagttccccttcggcagcaagcagaaggaggtgtgcatcaacccctaccactacaagagggtggagagccctgtgctgccccctgtgctggtgcccaggcacagcgagtacaacccccagcacagcctgctggcccagttcaggaacctgggccagaatgagccccacatgcccctgaatgccaccttcccagacagcttccagcagcccaacagccaccccttcccccacagccccaacagcagctaccccaacagccctggcagcagcagcagcacctacccccacagccccaccagcagtgaccccggcagccccttccagatgcctgctgacaccccacctccagcctacctgcccccagaggaccccatgacccaggacggcagccagcccatggacaccaacatgatggccccacccctgcccagcgagatcaacagaggagatgtgcaggccgtggcctatgaggagcccaagcactggtgcagcatcgtgtactatgagctgaacaacagagtgggggaggccttccacgccagcagcacctctgtgctggtggatggcttcacagaccccagcaacaacaagaaccgcttctgcctgggcctgctgagcaatgtgaacagaaacagcaccatcgagaacaccaggaggcacatcggcaagggcgtgcacctgtactacgtgggcggggaggtgtatgcagagtgcctgagtgacagcagcatctttgtgcagagcaggaactgcaactaccaccacggcttccaccccaccaccgtgtgcaagatccccagcggctgcagcctgaagatcttcaacaaccaggagtttgcccagctgctggcccagagcgtgaaccacggctttgagaccgtgtatgagctgaccaagatgtgcaccatccgcatgagctttgtgaagggctggggcgctgagtaccaccggcaggatgtgaccagcaccccctgctggattgagatccacctgcacggccccctgcagtggctggacaaggtgctgacccagatgggcagcccccacaaccccatcagctctgtgtcctag

SEQ ID NO: 160150 - DNA, 33 bp, Artificial Sequence
  derived and/or modified sequence
atgaatgtgaccagcctcttctccttcacctag

SEQ ID NO: 160151 - DNA, 1398 bp, Artificial Sequence
  derived and/or modified sequence
atgaacgtgaccagcctgttcagcttcaccagccccgccgtgaagagattgctggggtggaagcaaggggacgaagaggaaaagtgggccgaaaaggccgtcgacgccctggttaagaaattaaaaaagaaaaagggcgccatggaggagctcgaaaaggcattgtcttgccctgggcagccgtccaattgcgtaaccattccacgtagtctggacgggcgtcttcaagtttctcaccgtaaagggttgccacatgtgatttattgccgggtctggcggtggcctgatttgcaaagccatcatgagctcaaacccttggaatgctgtgaattcccattcggaagcaaacagaaggaagtgtgcatcaatccttaccattataaacgagtggagtctccagtgttgccacctgtactcgtcccgcgacatagtgaatataatccccagcactcgctgctggcgcaatttaggaacctgggccagaatgagccccacatgccactgaacgcaaccttccccgattctttccagcagcctaatagccaccccttcccccactcgcctaattctagttatcctaattcaccaggttcatcctctagcacataccctcatagccctactagttctgaccctggctcccccttccaaatgcctgctgatacccctccgcctgcatacctcccaccagaagacccgatgacacaagatggtagccagcctatggacacgaacatgatggccccacctctgccctccgagatcaaccggggggatgttcaagctgtggcatacgaggaacccaagcactggtgcagtattgtgtactatgagttaaataatagagttggagaggccttccacgccagtagcacttctgtgttggtagatgggttcacggacccgtctaacaataaaaataggttctgtctggggctgttatccaatgtaaataggaattctaccatagagaacacaagaaggcacattggcaagggggtgcacctctattatgtggggggggaggtgtacgctgagtgtctttcggactcaagtatattcgtacagtcgagaaactgtaattatcatcacggctttcatcccaccactgtctgcaagattccctccgggtgcagtctgaagattttcaacaaccaagagtttgcccagctgctggcccagtccgtgaatcacgggttcgagactgtttacgagctcactaagatgtgcactatccgaatgagctttgttaaagggtggggtgctgagtaccataggcaagatgtaaccagcaccccatgttggatcgaaatacacctgcatggaccgctgcagtggcttgataaggtcctgactcaaatgggttcgcctcacaaccctattagcagcgtgagctag

SEQ ID NO: 160152 - DNA, 1398 bp, Artificial Sequence
  derived and/or modified sequence
atgaacgtgaccagcctgttcagcttcaccagccccgccgtgaagcggttattaggttggaaacaaggggatgaggaggaaaagtgggctgagaaggcggtagacgcactggttaagaaacttaaaaaaaaaaagggggccatggaagaactagagaaggcactgagctgtcccggtcagccttcgaattgtgtgaccattcccaggtctctagacggaaggctgcaggtatcgcatcggaagggcctccctcacgtgatttactgtagggtgtggcgatggcccgacctccaatcgcatcacgagctgaaacccctggaatgctgcgaatttccctttggatccaagcagaaggaggtctgcatcaatccatatcactacaaaagagtggagagccctgttctcccgcccgttctggtgcctaggcacagcgagtacaatccacagcacagccttctggcacagttcaggaacctgggccagaacgagccccacatgccactcaacgccacgttccctgattcatttcagcagcctaacagccaccccttcccccacagccctaattcaagctaccccaactcccccgggtccagtagctctacatacccacactctccaacctcgtcagaccccggctctcctttccagatgcctgccgatacccctccaccagcctacctgccaccagaagatcctatgacccaggatggctcacagcccatggacaccaacatgatggccccgcccctcccttctgagattaatcgcggggacgtccaagccgttgcctacgaagagcccaagcactggtgttccatcgtgtattacgagctaaacaacagggtaggcgaagctttccacgcctcaagcacgagcgtcctggttgatgggttcactgatccaagcaataataaaaaccgcttttgtttgggcttgctttccaatgtgaacagaaactccacaatagagaatacaagacgccacatcggcaagggtgtccatttgtactacgtcggcggcgaggtatatgcggagtgtctctcggacagctctatatttgtgcaatcacggaactgtaactatcaccatgggttccaccctacgaccgtctgtaagatcccgtctggatgcagcctgaagatatttaataaccaggagtttgcgcagctactggcccagagtgtgaatcacgggttcgagacggtgtacgagttaacgaagatgtgcacaatccggatgagtttcgttaaggggtggggagccgaataccatcgacaggacgttacttccactccctgctggatcgagatccacctgcacggccccttgcagtggctcgacaaagttctgacccaaatgggctcccctcacaaccctatttcctctgtgtcctag

SEQ ID NO: 160153 - DNA, 1398 bp, Artificial Sequence
  derived and/or modified sequence
atgaacgtgaccagcctgttcagcttcaccagccccgccgtgaagcgccttttgggatggaagcagggcgatgaggaggagaaatgggcagagaaagcagtggacgccctggtcaaaaagcttaagaagaagaaaggggctatggaagagctggaaaaggctttgtcatgccccggtcagcccagcaactgcgtgactattccacggagccttgatggacggctccaggtgtcccataggaaaggtttgccacatgtgatctattgccgtgtgtggagatggccagaccttcagtcgcaccacgaactcaaacctctggagtgctgtgagttccccttcggcagcaagcagaaggaggtctgcatcaacccttatcattacaaacgcgttgaatccccagtcctgccacctgtgcttgtaccaagacattcagagtacaaccctcagcactctctactggctcaattccgcaatctggggcaaaacgagccccatatgccactcaacgccacattcccagacagctttcagcagcctaactctcatccattcccacactcccccaactcatcttaccctaactcgcctggttcgagcagtagcacttatcctcacagtccaaccagctcagaccccggctctcccttccagatgccagcggacactccaccaccggcctatcttccccctgaagacccaatgactcaggatggctctcagccaatggacacaaatatgatggctcccccactgccaagcgagattaatcgaggcgacgtgcaggccgtggcttatgaggaacccaagcactggtgctccatcgtgtattatgaattgaacaaccgagtaggcgaagcgtttcacgccagctcaacctctgttctggtggatggattcaccgacccctctaataacaagaataggttctgcctagggttgctgtcaaacgtgaatcgcaattccacgattgagaatacccgccgccatattggcaaaggggtccatctatactacgtcggtggggaggtatatgcggaatgtctctcggattccagcattttcgtgcagagccggaattgcaattatcaccacggcttccatcctacgaccgtgtgcaagattcctagtggctgctccttgaaaatttttaacaaccaggagtttgctcaactgctggctcagtccgtgaatcacggcttcgagactgtttacgagctgacaaagatgtgcactattagaatgagctttgttaagggctggggagctgaataccaccgacaggacgtcacctccaccccttgctggattgagatccatcttcacggccctctgcagtggctggataaagtactgactcagatgggctctccgcacaaccccatttcttccgtgagctag

SEQ ID NO: 160154 - DNA, 1398 bp, Artificial Sequence
  derived and/or modified sequence
atgaacgtaacctctcttttttccttcacctccccagccgtgaaacgtttgctgggctggaagcagggagacgaggaagagaaatgggccgagaaggcagttgatgcgctggtgaaaaagctgaaaaaaaaaaagggagccatggaagagctggagaaagctctgagctgcccaggacagcctagcaactgcgttactattcccagaagtcttgatggccgtctgcaggtgtcacaccgaaaaggcctccctcacgtgatttattgtcgcgtgtggcgctggccagaccttcagtcacatcacgagcttaagcctctcgaatgctgcgaatttcctttcgggagtaagcagaaagaagtgtgtatcaacccttatcactataagcgcgttgaatctccggtgctgcccccagtgctggtacccagacactccgagtataacccccaacattctctacttgcacaattcaggaacttaggtcagaatgagcctcatatgcccttgaacgcgaccttccccgactctttccaacagcccaattcacacccctttcctcattcgccgaactcaagttacccgaactccccgggttcctcaagcagcacatacccccattccccaacttcatccgatccaggttcaccatttcagatgccagccgacacccctccccctgcgtaccttccaccagaggacccaatgacacaggatggttcacaacccatggataccaacatgatggcgccacccctgccttccgaaattaatagaggcgacgttcaggccgtcgcctacgaggagcccaagcactggtgttcaatcgtgtattatgaactcaataacagagtgggtgaggcctttcatgccagttccacctccgtgctcgtggacggtttcactgacccttctaacaataagaatagattttgcctaggactgcttagcaatgtgaacagaaattctacaatcgagaatacccgtcgccacatcgggaagggtgtacacttgtactacgtgggcggagaagtttatgctgaatgtctatctgattcgtccatctttgtgcagtctaggaattgcaattatcatcacggattccaccccactacagtgtgtaagatccccagcgggtgtagtctgaaaattttcaataaccaagagttcgctcagttgttggctcagagcgtgaatcacggattcgaaacagtgtatgagttaaccaagatgtgtaccatccgcatgagtttcgttaaaggttggggtgccgagtaccaccggcaagacgtgactagtacaccatgctggatcgaaatacacctgcacggaccgctgcagtggctggataaagttctaacacagatggggagcccacacaatcccataagcagcgtgtcctag

SEQ ID NO: 160155 - DNA, 1398 bp, Artificial Sequence
  derived and/or modified sequence
atgaatgtgacaagtttgttctcctttacatcccctgcagtcaagcggctgctcgggtggaagcagggagacgaggaggagaaatgggctgagaaggctgtagatgcacttgttaagaaattaaagaaaaaaaagggtgcaatggaagaacttgaaaaagcccttagttgtccgggtcaacccagcaactgtgtgacaatcccgagatctctggatggtaggctacaggtgtcccatcggaaaggcctccctcatgtgatttactgccgggtttggcggtggcctgatctgcagtctcatcacgaattgaagcccctggagtgctgtgagttccccttcgggtctaagcaaaaagaagtgtgtatcaatccctaccattacaagagggtggagtcccccgtgctgccaccagtacttgttcctcggcactcagaatataacccacagcactccctgctcgctcaattccggaacctcggtcagaatgaaccacacatgccgctgaatgctacttttccggattcttttcagcagccaaattctcatccctttccgcactcacccaattcttcatatccgaattctcccggtagtagtagcagtacttatcctcactctcccacctccagcgatccaggctcaccctttcagatgcccgcagataccccccctcccgcatatttgccacctgaggaccctatgacacaggatggttcccagccaatggataccaatatgatggcccctcctttgccatccgaaatcaaccggggagatgtgcaggccgtggcctatgaggaacccaaacattggtgtagcatcgtctactatgaacttaacaatagggtcggagaagcttttcacgcgagcagcacttccgtcctcgtggacggattcaccgaccctagtaataacaaaaacagattctgcctaggtttactttccaacgttaaccgtaactctactatcgaaaacaccaggaggcatatcgggaagggggtccatctctattatgtcggaggcgaggtgtacgccgagtgtcttagcgatagctcaatctttgtgcagtcacgcaattgcaattatcatcatgggtttcatcccacaactgtgtgtaagattccatcgggttgcagcttgaaaatctttaacaatcaagaattcgcccagctgctggctcagagcgtcaaccacggattcgagaccgtttacgagctcaccaagatgtgcaccatacgtatgtccttcgtcaaaggctggggcgcagaataccatcgacaggacgtgacaagcaccccctgctggatcgaaatccacttgcatggcccactccagtggctggataaggttcttacacagatgggtagtccacacaacccgatttcatcggtttcttag

SEQ ID NO: 160156 - DNA, 33 bp, Artificial Sequence
  derived and/or modified sequence
atgaatgtcacaagcttattctccttcacctag

SEQ ID NO: 160157 - DNA, 1398 bp, Artificial Sequence
  derived and/or modified sequence
atgaacgtcacgtcactgttctctttcacttcccctgccgttaagagactgctgggctggaaacagggcgacgaggaggagaaatgggccgaaaaagccgttgacgcgctcgttaaaaagttaaagaaaaaaaagggagcaatggaggaactggaaaaggccctgtcctgccctggacaacccagtaactgcgtgactatccctcgatcactggacggcaggctgcaggtgagccataggaaagggctcccacacgtcatttactgccgagtctggcgctggcctgatctccagtcccaccatgagctgaaacccctggaatgctgcgagtttccctttggcagcaagcagaaagaggtctgtatcaatccatatcattataaacgcgtggaatcccctgtgctccctccagtactggtgccacggcactccgagtacaatccccagcattccctgctagctcagtttaggaacctcggacagaatgagcctcacatgcctctgaacgccacttttcccgactcattccagcagccaaacagccaccctttcccacatagtcccaacagcagctaccccaacagccctggttctagttcatctacttatccccacagcccgacaagcagcgatcccggatccccttttcagatgcctgcagataccccccctcccgcttacctaccgcctgaagaccctatgacacaggacgggtctcagccaatggacacgaatatgatggctcctccactcccatctgagatcaaccgcggtgacgtacaggccgtggcttacgaggagccaaaacattggtgttcaatcgtatactacgaactgaataatagggtcggcgaggcattccacgcctcctccactagtgtgctggtagacggatttactgaccccagcaataacaaaaaccggttctgtttaggactgctgtccaatgtgaaccggaattctactatagagaacacccggagacatatcggaaagggagtgcatctgtattacgtgggcggagaggtctatgctgagtgtctctccgacagcagcatcttcgtacagtctaggaactgcaactatcaccatggttttcaccccactaccgtgtgtaaaattcccagcgggtgttctctgaaaatttttaacaaccaggagtttgcccagcttctcgctcagtccgtaaatcacggatttgagaccgtgtatgagctaacaaaaatgtgcacgattcggatgagttttgtcaagggatggggcgcagaataccaccgccaagacgtgacatcgacaccttgttggatcgaaattcacttacacggtcccctgcagtggttggacaaagttctgactcagatgggctcaccacataatccaattagctccgttagttag

SEQ ID NO: 160158 - DNA, 1966 bp, Artificial Sequence
  derived and/or modified sequence
gggtattggcagctgaggagtggaggctgggcagctccgactccctgacgccagcgcgaccagatcaatccaggctccaggagaaagcaggcgggcgggcggagaaaggagaggccgagcggctcaacccgggccgaggctcggggagcggagagtggcgcagcgcccggccgtccggacccgggccgcgagaccccgctcgcccggccactcgtgctcccacacggacgggcgcgccgccaacccggtgctgactgggttacttttttaaacactaggaatggtaatttctactcttctggacttcaaactaagaagttaaagagacttctctgtaaataaacaaatctcttctgctgtccttttgcatttggagacagctttatttcaccatatccaaggagtataactagtgctgtcattatgaatgtgacaagtttattttcctttacaagtccagctgtgaagagacttcttgggtggaaacagggcgatgaagaagaaaaatgggcagagaaagctgttgatgctttggtgaaaaaactgaagaaaaagaaaggtgccatggaggaactggaaaaggccttgagctgcccagggcaaccgagtaactgtgtcaccattccccgctctctggatggcaggctgcaagtctcccaccggaagggactgcctcatgtcatttactgccgtgtgtggcgctggcccgatcttcagagccaccatgaactaaaaccactggaatgctgtgagtttccttttggttccaagcagaaggaggtctgcatcaatccctaccactataagagagtagaaagccctgtacttcctcctgtgctggttccaagacacagcgaatataatcctcagcacagcctcttagctcagttccgtaacttaggacaaaatgagcctcacatgccactcaacgccacttttccagattctttccagcaacccaacagccacccgtttcctcactctcccaatagcagttacccaaactctcctgggagcagcagcagcacctaccctcactctcccaccagctcagacccaggaagccctttccagatgccagctgatacgcccccacctgcttacctgcctcctgaagaccccatgacccaggatggctctcagccgatggacacaaacatgatggcgcctcccctgccctcagaaatcaacagaggagatgttcaggcggttgcttatgaggaaccaaaacactggtgctctattgtctactatgagctcaacaatcgtgtgggtgaagcgttccatgcctcctccacaagtgtgttggtggatggtttcactgatccttccaacaataagaaccgtttctgccttgggctgctctccaatgttaaccggaattccactattgaaaacaccaggcggcatattggaaaaggagttcatctttattatgttggaggggaggtgtatgccgaatgccttagtgacagtagcatctttgtgcaaagtcggaactgcaactaccatcatggatttcatcctactactgtttgcaagatccctagtgggtgtagtctgaaaatttttaacaaccaagaatttgctcagttattggcacagtctgtgaaccatggatttgagacagtctatgagcttacaaaaatgtgtactatacgtatgagctttgtgaagggctggggagcagaataccaccgccaggatgttactagcaccccctgctggattgagatacatctgcacggccccctccagtggctggataaagttcttactcaaatgggttcacctcataatcctatttcatctgtatcttaaatggccccaggcatctgcctctggaaaactattgagccttgcatgtacttgaaggatggatgagtcagacacgattgagaactgacaaaggagccttgataatacttgacctctgtgaccaactgttggattcagaaatttaaac

SEQ ID NO: 160159 - DNA, 1658 bp, Artificial Sequence
  derived and/or modified sequence
cactgcatgtgtattcgtgagttcgcggttgaacaactgttcctttactctgctccctgtctttgtgctgactgggttacttttttaaacactaggaatggtaatttctactcttctggacttcaaactaagaagttaaagagacttctctgtaaataaacaaatctcttctgctgtccttttgcatttggagacagctttatttcaccatatccaaggagtataactagtgctgtcattatgaatgtgacaagtttattttcctttacaagtccagctgtgaagagacttcttgggtggaaacagggcgatgaagaagaaaaatgggcagagaaagctgttgatgctttggtgaaaaaactgaagaaaaagaaaggtgccatggaggaactggaaaaggccttgagctgcccagggcaaccgagtaactgtgtcaccattccccgctctctggatggcaggctgcaagtctcccaccggaagggactgcctcatgtcatttactgccgtgtgtggcgctggcccgatcttcagagccaccatgaactaaaaccactggaatgctgtgagtttccttttggttccaagcagaaggaggtctgcatcaatccctaccactataagagagtagaaagccctgtacttcctcctgtgctggttccaagacacagcgaatataatcctcagcacagcctcttagctcagttccgtaacttaggacaaaatgagcctcacatgccactcaacgccacttttccagattctttccagcaacccaacagccacccgtttcctcactctcccaatagcagttacccaaactctcctgggagcagcagcagcacctaccctcactctcccaccagctcagacccaggaagccctttccagatgccagctgatacgcccccacctgcttacctgcctcctgaagaccccatgacccaggatggctctcagccgatggacacaaacatgatggcgcctcccctgccctcagaaatcaacagaggagatgttcaggcggttgcttatgaggaaccaaaacactggtgctctattgtctactatgagctcaacaatcgtgtgggtgaagcgttccatgcctcctccacaagtgtgttggtggatggtttcactgatccttccaacaataagaaccgtttctgccttgggctgctctccaatgttaaccggaattccactattgaaaacaccaggcggcatattggaaaaggagttcatctttattatgttggaggggaggtgtatgccgaatgccttagtgacagtagcatctttgtgcaaagtcggaactgcaactaccatcatggatttcatcctactactgtttgcaagatccctagtgggtgtagtctgaaaatttttaacaaccaagaatttgctcagttattggcacagtctgtgaaccatggatttgagacagtctatgagcttacaaaaatgtgtactatacgtatgagctttgtgaagggctggggagcagaataccaccgccaggatgttactagcaccccctgctggattgagatacatctgcacggccccctccagtggctggataaagttcttactcaaatgggttcacctcataatcctatttcatctgtatcttaaatggccccaggcatctgcct

SEQ ID NO: 160160 - DNA, 2085 bp, Artificial Sequence
  derived and/or modified sequence
atgtgtattcgtgagttcgcggttgaacaactgttcctttactctgctccctgtctttgttagtgtttctcggggttgtttctgtaggaaggtgggggtggtgggcgtgagagacagatgtgggcttgtttttctagttgctgaaactgtatgaaggctttaaagggagaacgttttcttgatgtgctttaggaggggaggaggaacaaatgcctgccagatctcacagctacagtagctgagcttttgtttattttgaagagcatgcaatttttaaatacacggtgcaagataaccagtaaaggcgcgttccttctgaaaattgaggccggtctcagaaccatctcctgagaaagcatccttttcgtgctgactgggttacttttttaaacactaggaatggtaatttctactcttctggacttcaaactaagaagttaaagagacttctctgtaaataaacaaatctcttctgctgtccttttgcatttggagacagctttatttcaccatatccaaggagtataactagtgctgtcattatgaatgtgacaagtttattttcctttacaagtccagctgtgaagagacttcttgggtggaaacagggcgatgaagaagaaaaatgggcagagaaagctgttgatgctttggtgaaaaaactgaagaaaaagaaaggtgccatggaggaactggaaaaggccttgagctgcccagggcaaccgagtaactgtgtcaccattccccgctctctggatggcaggctgcaagtctcccaccggaagggactgcctcatgtcatttactgccgtgtgtggcgctggcccgatcttcagagccaccatgaactaaaaccactggaatgctgtgagtttccttttggttccaagcagaaggaggtctgcatcaatccctaccactataagagagtagaaagccctgtacttcctcctgtgctggttccaagacacagcgaatataatcctcagcacagcctcttagctcagttccgtaacttaggacaaaatgagcctcacatgccactcaacgccacttttccagattctttccagcaacccaacagccacccgtttcctcactctcccaatagcagttacccaaactctcctgggagcagcagcagcacctaccctcactctcccaccagctcagacccaggaagccctttccagatgccagctgatacgcccccacctgcttacctgcctcctgaagaccccatgacccaggatggctctcagccgatggacacaaacatgatggcgcctcccctgccctcagaaatcaacagaggagatgttcaggcggttgcttatgaggaaccaaaacactggtgctctattgtctactatgagctcaacaatcgtgtgggtgaagcgttccatgcctcctccacaagtgtgttggtggatggtttcactgatccttccaacaataagaaccgtttctgccttgggctgctctccaatgttaaccggaattccactattgaaaacaccaggcggcatattggaaaaggagttcatctttattatgttggaggggaggtgtatgccgaatgccttagtgacagtagcatctttgtgcaaagtcggaactgcaactaccatcatggatttcatcctactactgtttgcaagatccctagtgggtgtagtctgaaaatttttaacaaccaagaatttgctcagttattggcacagtctgtgaaccatggatttgagacagtctatgagcttacaaaaatgtgtactatacgtatgagctttgtgaagggctggggagcagaataccaccgccaggatgttactagcaccccctgctggattgagatacatctgcacggccccctccagtggctggataaagttcttactcaaatgggttcacctcataatcctatttcatctgtatcttaaatggccccaggcatctgcctctggaaaactattgagccttgcatgtacttgaaggatggatgagtcagacacgattgagaactgacaaaggagccttgataatacttgacctctgtgaccaactgttggattcagaaatttaaac

SEQ ID NO: 160161 - DNA, 1398 bp, Artificial Sequence
  derived and/or modified sequence
atgaacgtgaccagcctgttcagcttcaccagccccgccgtgaagagactgctgggctggaagcagggcgacgaggaggagaagtgggccgagaaggccgtggacgccctggtgaagaagctgaagaagaagaagggcgccatggaggagctggagaaggccctgagctgccccggccagcccagcaactgcgtgaccatccccagaagcctggacggcagactgcaggtgagccacagaaagggcctgccccacgtgatctactgcagagtgtggagatggcccgacctgcagagccaccacgagctgaagcccctggagtgctgcgagttccccttcggcagcaagcagaaggaggtgtgcatcaacccctaccactacaagagagtggagagccccgtgctgccccccgtgctggtgcccagacacagcgagtacaacccccagcacagcctgctggcccagttcagaaacctgggccagaacgagccccacatgcccctgaacgccaccttccccgacagcttccagcagcccaacagccaccccttcccccacagccccaacagcagctaccccaacagccccggcagcagcagcagcacctacccccacagccccaccagcagcgaccccggcagccccttccagatgcccgccgacacccccccccccgcctacctgccccccgaggaccccatgacccaggacggcagccagcccatggacaccaacatgatggccccccccctgcccagcgagatcaacagaggcgacgtgcaggccgtggcctacgaggagcccaagcactggtgcagcatcgtgtactacgagctgaacaacagagtgggcgaggccttccacgccagcagcaccagcgtgctggtggacggcttcaccgaccccagcaacaacaagaacagattctgcctgggcctgctgagcaacgtgaacagaaacagcaccatcgagaacaccagaagacacatcggcaagggcgtgcacctgtactacgtgggcggcgaggtgtacgccgagtgcctgagcgacagcagcatcttcgtgcagagcagaaactgcaactaccaccacggcttccaccccaccaccgtgtgcaagatccccagcggctgcagcctgaagatcttcaacaaccaggagttcgcccagctgctggcccagagcgtgaaccacggcttcgagaccgtgtacgagctgaccaagatgtgcaccatcagaatgagcttcgtgaagggctggggcgccgagtaccacagacaggacgtgaccagcaccccctgctggatcgagatccacctgcacggccccctgcagtggctggacaaggtgctgacccagatgggcagcccccacaaccccatcagcagcgtgagctag

SEQ ID NO: 160162 - DNA, 33 bp, Artificial Sequence
  derived and/or modified sequence
atgaacgtgaccagcctgttcagcttcacctag

SEQ ID NO: 160163 - protein, 425 aa, Artificial Sequence
  derived and/or modified sequence
MSSILPFTPPIVKRLLGWKKGEQNGQEEKWCEKAVKSLVKKLKKTGQLDELEKAITTQNVNTKCITIPRSLDGRLQVSHRKGLPHVIYCRLWRWPDLHSHHELRAMELCEFAFNMKKDEVCVNPYHYQRVETPVLPPVLVPRHTEIPAEFPPLDDYSHSIPENTNFPAGIEPQSNIPETPPPGYLSEDGETSDHQMNHSMDAGSPNLSPNPMSPAHNNLDLQPVTYCEPAFWCSISYYELNQRVGETFHASQPSMTVDGFTDPSNSERFCLGLLSNVNRNAAVELTRRHIGRGVRLYYIGGEVFAECLSDSAIFVQSPNCNQRYGWHPATVCKIPPGCNLKIFNNQEFAALLAQSVNQGFEAVYQLTRMCTIRMSFVKGWGAEYRRQTVTSTPCWIELHLNGPLQWLDKVLTQMGSPSIRCSSVS

SEQ ID NO: 160164 - protein, 320 aa, Artificial Sequence
  derived and/or modified sequence
MELCEFAFNMKKDEVCVNPYHYQRVETPVLPPVLVPRHTEIPAEFPPLDDYSHSIPENTNFPAGIEPQSNIPETPPPGYLSEDGETSDHQMNHSMDAGSPNLSPNPMSPAHNNLDLQPVTYCEPAFWCSISYYELNQRVGETFHASQPSMTVDGFTDPSNSERFCLGLLSNVNRNAAVELTRRHIGRGVRLYYIGGEVFAECLSDSAIFVQSPNCNQRYGWHPATVCKIPPGCNLKIFNNQEFAALLAQSVNQGFEAVYQLTRMCTIRMSFVKGWGAEYRRQTVTSTPCWIELHLNGPLQWLDKVLTQMGSPSIRCSSVS

SEQ ID NO: 160165 - DNA, 6256 bp, Artificial Sequence
  derived and/or modified sequence
gcggccgccgcctccgccccgcgttcggggccttcccgaccctgcactgctgccgtccgcccgcccggccgctcttctcttcgccgtgggagccgctccgggcgcagggccgcgcgccgagccccgcaggctgcagcgccgcggcccggcccggcgccccggcaacttcgccgagagttgaggcgaagtttgggcgaccgcggcaggccccggccgagctcccctctgcgcccccggcgtcccgtcgagcccagccccgccgggggcgctcctcgccgcccgcgcgccctccccagccatgtcgtccatcctgcctttcactcccccgatcgtgaagcgcctgctgggctggaagaagggcgagcagaacgggcaggaggagaaatggtgcgagaaggcggtcaagagcctggtcaagaaactcaagaagacggggcagctggacgagctggagaaggccatcaccacgcagaacgtcaacaccaagtgcatcaccatccccaggtccctggatggccggttgcaggtgtcccatcggaaggggctccctcatgtcatctactgccgcctgtggcgatggccagacctgcacagccaccacgagctacgggccatggagctgtgtgagttcgccttcaatatgaagaaggacgaggtctgcgtgaatccctaccactaccagagagtagagacaccagttctacctcctgtgttggtgccacgccacacagagatcccggccgagttccccccactggacgactacagccattccatccccgaaaacactaacttccccgcaggcatcgagccccagagcaatattccagagaccccaccccctggctacctgagtgaagatggagaaaccagtgaccaccagatgaaccacagcatggacgcaggttctccaaacctatccccgaatccgatgtccccagcacataataacttggacctgcagccagttacctactgcgagccggccttctggtgctccatctcctactacgagctgaaccagcgcgtcggggagacattccacgcctcgcagccatccatgactgtggatggcttcaccgacccctccaattcggagcgcttctgcctagggctgctctccaatgtcaacaggaatgcagcagtggagctgacacggagacacatcggaagaggcgtgcggctctactacatcggaggggaggtcttcgcagagtgcctcagtgacagcgctatttttgtccagtctcccaactgtaaccagcgctatggctggcacccggccaccgtctgcaagatcccaccaggatgcaacctgaagatcttcaacaaccaggagttcgctgccctcctggcccagtcggtcaaccagggctttgaggctgtctaccagttgacccgaatgtgcaccatccgcatgagcttcgtcaaaggctggggagcggagtacaggagacagactgtgaccagtaccccctgctggattgagctgcacctgaatgggcctttgcagtggcttgacaaggtcctcacccagatgggctccccaagcatccgctgttccagtgtgtcttagagacatcaagtatggtaggggagggcaggcttggggaaaatggccatgcaggaggtggagaaaattggaactctactcaacccattgttgtcaaggaagaagaaatctttctccctcaactgaaggggtgcacccacctgttttctgaaacacacgagcaaacccagaggtggatgttatgaacagctgtgtctgccaaacacatttaccctttggccccactttgaagggcaagaaatggcgtctgctctggtggcttaagtgagcagaacaggtagtattacaccaccggccccctccccccagactctttttttgagtgacagctttctgggatgtcacagtccaaccagaaacacccctctgtctaggactgcagtgtggagttcaccttggaagggcgttctaggtaggaagagcccgcagggccatgcagacctcatgcccagctctctgacgcttgtgacagtgcctcttccagtgaacattcccagcccagccccgccccgccccgccccaccactccagcagaccttgccccttgtgagctggatagacttgggatggggagggagggagttttgtctgtctccctcccctctcagaacatactgattgggaggtgcgtgttcagcagaacctgcacacaggacagcgggaaaaatcgatgagcgccacctctttaaaaactcacttacgtttgtcctttttcactttgaaaagttggaaggatctgctgaggcccagtgcatatgcaatgtatagtgtctattatcacattaatctcaaagagattcgaatgacggtaagtgttctcatgaagcaggaggcccttgtcgtgggatggcatttggtctcaggcagcaccacactgggtgcgtctccagtcatctgtaagagcttgctccagattctgatgcatacggctatattggtttatgtagtcagttgcattcattaaatcaactttatcatatgctcttttaaatgtttggtttatatattttctttaaaaatcctgggctggcacattgactgggaaacctgagtgagacccagcaactgcttctctcccttctctctcctgaggtgaagcttttccaggttttgttgaagagatacctgccagcacttctgcaagctgaaatttacagaagcaaattcaccagaagggaaacatctcaggccaacataggcaaatgaaaagggctattaaaatatttttacacctttgaaaattgcaggcttggtacaaagaggtctgtcatcttccccctgggatataagatgatctagctcccggtagaggatcaccggtgacaactatagcagttgtattgtgtaacaagtactgctcccagcagcaattagggagaaaactagtctaaattatttcaactggaaaaaagaaaaaagagtcctcttcttttcccagccttttgcagaacacagtagacagaactgccaccttcaattggtactttattctttgctgctgtttttgtataaaatgacctatcccacgtttttgcatgaatttatagcaggaaaaatcaagggatttcctatggaagtcctgctttattccaggtgaagggaaggaagtgtatatacttttggcaagtcatacagctcaaatgtgatgagatttctgatgttagagggagatggagaggcttcctgatgcctcatctgcagggtcctgtgcctctgaagttctagccatgaggtttccaggtaggacagctgctccccaagcctcctgaggacacaggaagagacggaaggagcaccttgacagacttgtgtgagtcttctcgaaggagggttgactcagaacccagagacaatacaaaacccctcacttcctctgagagggccaaatgctgtgagtctgaagtatgtgcctggtgtgaaatgatctatggcctgtttcttacacaggaagccccctgaacctcctgtacatgtgttcatgttcccagccagctctgagacccaggaaccaaatattccattttggcttctgctagagcagtcatggttcctctcctaaaagccatgggcagcagtttccgagggcctgcatgatccacctgctgcacgatcctatgagggcttcctgtggcacacagccctctgggtgcttgggaactagcttcaggcacagcctgattctggtgatccagtgatctatggaagtcgtgtcttactccaggtgaagggggaaaaaaaaagcctatactttggcaggttatgaactttgaatgtgatgaaatgacacgtttggctgcatttggatggtgtcttagaaccctcattgctcagacctgaaggctacttctaggagcatgaagtttgagttttgtgtttttccaaaggatacttccttggccctttttctttattgactagaccaccagaggaggatgtgtgggattgtaggcaaacccacctgtggcatcactgaaaataaatttgatcatacctaagaggttaggaaatggtgccattcccaccttagagtgctacataggtgctttgggcgtatgtaacattagtgtccttccttgaagccacaagctagttttcttagttttaaaatcctgttgtatgaatggcatttgtatattaaaacacttttttaaaggacagttgaaaagggcaagaggaaaccagggcagttctagaggagtgctggtgactggatagcagttttaagtggcgttcacctagtcaacacgaccgcgtgtgttgcccctgccctgggctccccgccatgacatcttcaccttgcagcttgtgctgagactgacccaagtgcagctagcactgggacacagatccttgtcttcagcaccttccaaggagccaacttttattccctttcctctctcccctccccacctcgcttcttcccaatttagtaacttagatgcttccagcacatacgtaggtagctaccccagccggtttggattacaggcctgtgctggaacatcatctcagttggccaccttcctggcaggctgtagacctgacattttgagacaagcctagagtcaggagcagggactttgactcttaggaagagcacacatgagggcaaggctgctggcagacgtctccattgtccttatgttgtctgtgttgtatttttttttttttattgaccatggtgattatttttttaaaccatcgttaatatactgaagtgagctatagcacatatcatgtgcttagtttgtttatttttctccatctccccttggcttcctagagtttggacatattccaggctaaatgcttttactcaagactacagaaaggtttgaagtagtgtgtgcatggcatgcacgtatgtaagtaatctggggaagaagcaaagatctgtttcattcttagcctcaggcctcatgagggtctccacagggccggagctcaggttacaccactccttcgtccttacaggagatgtagggagaagaatctgcaggctgcttgtaggactgttcaccaagggggataccagcagcaagagagtgcacccgtttagccctggaccctgtttcttactgtgtgacttggctagagttgggagttcccccaaaataaacgtgtccccattttaccagaaccaaacctcaacacagcgaagctgtactgtctttgtgtggcaaagatgttcccttgtaggcccctttcaggtaaccgtcttcacaatgtattttcatcacagtttaaggagcatcagccgcttctcaagtgggtagggaaagcagaaaaacgtacgcaagaggacatggatccaaaatgatgatgaagcatctcccatggggaggtgatggtggggagatgatgggctaaacaggcaacttttcaaaaacacagctatcatagaaaagaaacttgcctcatgtaaactggattgagaaattctcagtgattctgcaatggatttttttttaatgcagaagtaatgtatactctagtattctggtgtttttatatttatgtaataatttcttaaaaccattcagacagataactatttaattttttttaagaaagttggaaaggtctctcctcccaaggacagtggctggaagagttggggcacagccagttctgaatgttggtggagggtgtagtggctttttggctcagcatccagaaacaccaaaccaggctggctaaacaagtggccgcgtgtaaaaacagacagctctgagtcaaatctgggcccttccacaagggtcctctgaaccaagccccactcccttgctaggggtgaaagcattacagagagatggagccatctatccaagaagccttcactcaccttcactgctgctgttgcaactcggctgttctggactctgatgtgtgtggagggatggggaatagaacattgactgtgttgattaccttcactattcggccagcctgaccttttaataactttgtaaaaagcatgtatgtatttatagtgttttagatttttctaacttttatatcttaaaagcagagcacctgtttaagcattgtacccctattgttaaagatttgtgtcctctcattccctctcttcctcttgtaagtgcccttctaataaacttttcatggaaaagctcctgtgccaggagctcagtctgaaaaaaaaaaaaaaaaaaaaaaaaa

SEQ ID NO: 160166 - DNA, 1278 bp, Artificial Sequence
  derived and/or modified sequence
atgagcagcatcctgcccttcaccccccccatcgtgaagagactgctgggctggaagaagggcgagcagaacggccaggaggagaagtggtgcgagaaggccgtgaagagcctggtgaagaagctgaagaagaccggccagctggacgagctggagaaggccatcaccacccagaacgtgaacaccaagtgcatcaccatccccagaagcctggacggcagactgcaggtgagccacagaaagggcctgccccacgtgatctactgcagactgtggagatggcccgacctgcacagccaccacgagctgagagccatggagctgtgcgagttcgccttcaacatgaagaaggacgaggtgtgcgtgaacccctaccactaccagagagtggagacccccgtgctgccccccgtgctggtgcccagacacaccgagatccccgccgagttcccccccctggacgactacagccacagcatccccgagaacaccaacttccccgccggcatcgagccccagagcaacatccccgagacccccccccccggctacctgagcgaggacggcgagaccagcgaccaccagatgaaccacagcatggacgccggcagccccaacctgagccccaaccccatgagccccgcccacaacaacctggacctgcagcccgtgacctactgcgagcccgccttctggtgcagcatcagctactacgagctgaaccagagagtgggcgagaccttccacgccagccagcccagcatgaccgtggacggcttcaccgaccccagcaacagcgagagattctgcctgggcctgctgagcaacgtgaacagaaacgccgccgtggagctgaccagaagacacatcggcagaggcgtgagactgtactacatcggcggcgaggtgttcgccgagtgcctgagcgacagcgccatcttcgtgcagagccccaactgcaaccagagatacggctggcaccccgccaccgtgtgcaagatcccccccggctgcaacctgaagatcttcaacaaccaggagttcgccgccctgctggcccagagcgtgaaccagggcttcgaggccgtgtaccagctgaccagaatgtgcaccatcagaatgagcttcgtgaagggctggggcgccgagtacagaagacagaccgtgaccagcaccccctgctggatcgagctgcacctgaacggccccctgcagtggctggacaaggtgctgacccagatgggcagccccagcatcagatgcagcagcgtgagctag

SEQ ID NO: 160167 - DNA, 1278 bp, Artificial Sequence
  derived and/or modified sequence
atgagcagtatccttccgtttaccccccctatcgtgaagcgcctacttggctggaagaagggtgagcaaaatgggcaggaggagaaatggtgcgaaaaggcagtcaagtcgcttgtgaagaagcttaagaaaacaggccagctcgacgagttagagaaggccatcaccactcagaacgtgaatactaagtgcatcacaatacctcgtagcctggacggcaggctgcaagtgtctcatcgcaaaggtttgccacatgtgatatattgccgcctgtggcggtggccagacctgcactctcatcacgaacttcgggcaatggaactttgcgagttcgcctttaacatgaagaaggacgaggtgtgcgtgaacccctatcactatcagcgggttgagacacctgtactgcctcctgtccttgtgcctaggcacacggaaattcccgcagagttcccaccactggatgactattctcatagtatccctgagaatacaaactttcctgcaggaattgagcctcagtctaacattcccgagactccaccaccaggctacttatccgaggatggggagacatccgaccatcagatgaatcattccatggacgcagggtccccaaatctctctccaaatccgatgagccctgcccacaataaccttgatttgcaacccgtcacctattgcgaacccgccttctggtgtagtatatcttactacgagctcaaccagagggttggtgaaacttttcacgcttcccagccgtcaatgactgtggacggctttacagatccctctaattctgagcggttctgcctggggctgctatcaaatgtgaatagaaacgcagccgtggaactcacaaggagacatattggcaggggggtaaggctgtattacatcgggggtgaagtctttgctgaatgcctcagcgatagcgcaatcttcgttcagtcgcctaattgcaatcagcggtatggctggcacccggcaactgtatgcaagattccacctggttgcaacctgaaaattttcaacaatcaggagtttgccgctcttctggcacagagtgtcaaccaaggctttgaagccgtttaccaactcacccgcatgtgtactatcagaatgagcttcgtgaagggatggggcgccgagtatcggcgccagacagtgacgtcaactccatgctggatcgagttgcatttgaacgggcccctacagtggctcgataaagtactgacccaaatgggcagtccgtctattagatgctcctctgtcagctag

SEQ ID NO: 160168 - DNA, 1278 bp, Artificial Sequence
  derived and/or modified sequence
atgagcagtattttgccatttactccgccaatcgttaaacgcttgcttgggtggaagaagggagagcaaaacggacaggaggagaaatggtgtgagaaagcagtgaaaagcctagtcaaaaagctgaaaaaaaccggccagctcgatgaactggagaaagccatcacgacccagaacgtgaacaccaaatgcataactattccgcgaagcctcgacggacgcctccaggttagccatcgcaaaggtctgcctcacgtgatctactgccggctgtggagatggccagatctccactcccaccatgaacttagggcgatggagttatgcgagttcgctttcaacatgaaaaaggacgaggtttgtgtgaatccctaccactaccagagagtggaaaccccagtgcttcccccggtgttagtgcctcggcatactgaaattcccgccgagttccctccactagacgattatagtcatagcattccagagaatactaatttcccagccggcatcgaaccccagtcgaacattcccgagacccccccccctggatatctgtccgaagacggagagacttcagaccaccagatgaatcacagcatggacgctggctcccctaacctgtctccaaacccgatgagccccgcacacaacaacctggatctccagccggtgacttattgtgagcctgccttctggtgtagcatatcttactacgaactgaatcaacgggtcggagagacgttccacgcaagccagcccagcatgacggttgacgggtttacagatcccagtaattctgaaaggttctgcttaggtctgctcagcaacgttaacagaaatgcggcagttgaattaacacgaaggcatatcggcagaggagtcaggctctattacattggtggcgaggtgttcgcagagtgcctgtccgactcggccattttcgtacagagtcctaactgtaaccagaggtacgggtggcatcccgccaccgtatgtaagattccacctggctgcaacctgaagattttcaataaccaggagtttgcagccctcctggctcagagcgtgaatcaaggttttgaggcggtataccaacttactagaatgtgtaccataaggatgagctttgtcaaaggatggggcgcggaatataggcgccagacggtcactagcactccgtgctggatcgaattacatctaaacggtcctctgcagtggctggataaagtgctgacccagatgggaagcccttccattagatgcagtagtgtgtcatag

SEQ ID NO: 160169 - DNA, 1278 bp, Artificial Sequence
  derived and/or modified sequence
atgagcagcatcctgcccttcaccccacccatcgtgaagaggctgctgggctggaagaagggggagcagaatggccaggaggagaagtggtgtgagaaggctgtgaagagcctggtgaagaagctgaagaagacaggccagctggatgagctggagaaggccatcaccacccagaatgtgaacaccaagtgcatcaccatccccaggagcctggatggccgcctgcaggtgagccacaggaagggcctgccccacgtgatctactgccgcctgtggcgctggccagacctgcacagccaccacgagctgcgggccatggagctgtgtgaatttgccttcaacatgaagaaggatgaggtgtgtgtgaacccctaccactaccagagggtggagacccctgtgctgccccctgtgctggtgcccaggcacacagagatcccagctgagttcccccccctggatgactacagccacagcatccctgagaacaccaacttccctgctggcatcgagccccagagcaacatccctgagaccccacctcctggctacctgtctgaagatggagagaccagtgaccaccagatgaaccacagcatggatgctggcagccccaacctgagccccaaccccatgagccctgcccacaacaacctggacctgcagcctgtgacctactgtgagcccgccttctggtgcagcatctcctactatgagctgaaccagagggtgggggagaccttccacgccagccagcccagcatgacagtggatggcttcacagaccccagcaacagcgagcgcttctgcctgggcctgctgagcaatgtgaacagaaatgctgctgtggagctgaccaggaggcacatcggccggggcgtgcggctgtactacatcggcggggaggtgtttgctgagtgcctgagtgacagcgccatctttgtgcagagccccaactgcaaccagagatatggctggcacccagccaccgtgtgcaagatccccccaggctgcaacctgaagatcttcaacaaccaggagtttgctgccctgctggcccagagcgtgaaccagggctttgaggccgtgtaccagctgaccaggatgtgcaccatccgcatgagctttgtgaagggctggggcgctgagtaccgccggcagacagtgaccagcaccccctgctggattgagctgcacctgaatggccccctgcagtggctggacaaggtgctgacccagatgggcagccccagcatccgctgcagctctgtgtcctag

SEQ ID NO: 160170 - DNA, 1278 bp, Artificial Sequence
  derived and/or modified sequence
atgagcagcatcctgcccttcaccccccccatcgtgaagcggctgcttggttggaaaaagggggaacagaatggccaggaggagaagtggtgcgaaaaagctgtgaaatctttagtaaagaaactcaaaaaaaccgggcagctggacgagctcgagaaagcgattaccacccagaacgtgaacactaagtgcataaccataccccggtccctggatgggaggttgcaagtctctcatcgtaaaggcctgccacatgtgatttattgccgcttatggaggtggccggatctgcactcacaccacgagctcagggctatggaactgtgtgaatttgcttttaatatgaaaaaagatgaagtctgtgtgaacccttaccactatcagcgggtagaaacaccggtcctacccccagtcctcgtgccacgacacactgaaatccctgccgagtttcctcccctagacgactatagccactccatcccagaaaacaccaatttcccagcaggcattgaaccacaaagcaacattcctgagacaccacctcccgggtacctgagcgaggacggagagacctctgatcatcagatgaaccattccatggacgccggctcccctaatctgtcccccaatcccatgtcaccagcccacaataatttggacttgcagcccgtcacatactgcgagcctgccttctggtgttcgatcagttattacgagcttaaccagcgggtgggcgaaactttccacgctagtcaacctagtatgacggttgatggctttaccgacccatctaatagcgagcggttttgcttaggtttgctatctaatgtgaaccgaaatgcagcagttgaactgacccgtagacatataggtagaggagtgcgtttatattatatcgggggcgaggtgttcgctgagtgtctatctgactcggccatctttgtgcaaagtccaaattgtaatcagaggtatgggtggcaccccgcaaccgtttgcaagatcccacctggatgtaacctgaaaatctttaacaatcaggagtttgcagctctgctcgcacagtctgtgaatcagggtttcgaggccgtgtaccagcttacaagaatgtgcactatccgaatgagcttcgtaaaaggctggggggctgagtatagaaggcagacagtcactagcaccccttgttggattgaactgcatctcaatggtcctttacagtggcttgacaaagtgctaacgcagatgggctcacccagtatccggtgcagctccgtatcctag

SEQ ID NO: 160171 - DNA, 1278 bp, Artificial Sequence
  derived and/or modified sequence
atgagcagcatcctgcccttcaccccccccatcgtgaagcggctgctcggctggaaaaagggcgaacagaatgggcaagaggaaaaatggtgtgaaaaagcagtaaaaagcctggtgaagaagctgaagaagacaggccagctggatgaactggaaaaagcaatcaccacacagaacgttaacactaagtgtatcactatcccgagatcacttgacgggcgcttgcaagtgagtcatcgcaagggtctgccgcacgtcatttattgcagattatggcggtggccagatctgcatagtcaccacgagctgagagctatggaattgtgtgaatttgcttttaacatgaaaaaggacgaggtgtgtgtaaatccctaccactaccagcgggtcgagacccccgttctcccccccgtgttagtcccccgacacacggaaatcccagctgagttccccccactcgatgattattcccacagtatacctgagaatacaaatttcccagccggaatcgagcctcagtctaatataccagaaacaccacccccaggctatctgtccgaggacggagaaaccagtgatcaccaaatgaatcattccatggatgccggaagtccaaacttgtcacctaatcctatgtcacctgctcacaacaacctggatctgcagcctgttacctattgcgaacctgccttttggtgttccatcagctattatgagctgaatcagagagtcggagaaactttccatgcatctcagccctccatgacggtggacggctttacagatccatccaatagtgagagattctgtttaggacttttgtctaatgtcaatcggaacgctgctgtcgagctgactcggagacatattgggaggggcgtccgactgtactatatcggcggagaggtatttgcagaatgcttgtccgattctgccatcttcgttcaatctcctaactgcaaccagagatatggctggcatcccgccaccgtctgtaagattccacctggatgcaatttgaagatcttcaataatcaggaatttgcagccttgctcgcccagtccgtgaaccaagggttcgaggctgtctatcagttgacgcgaatgtgtacaataagaatgtcttttgtaaagggctggggtgctgaataccgtcgccagacagtcacctccacaccttgttggatcgaactgcaccttaacggaccgctgcaatggctggacaaggttctgacgcagatgggctcacccagtattcggtgctcctctgtctcatag

SEQ ID NO: 160172 - DNA, 1278 bp, Artificial Sequence
  derived and/or modified sequence
atgtcctctatcctcccatttacccccccaatagttaaaaggttgcttggctggaagaaaggcgagcaaaacggacaggaggaaaaatggtgtgaaaaggccgttaagtcgctggtgaaaaagctgaagaaaacgggccagctggatgaactcgaaaaggccattacaacacagaatgtaaataccaaatgtatcacaataccccgatcccttgatggaaggctgcaggtcagccatcgcaagggcttaccacatgtaatttactgccgcttatggcgctggcccgacttacattcccaccatgagctgcgagccatggagctgtgtgaatttgcgttcaatatgaagaaggatgaggtgtgtgtgaacccataccattaccagagagtcgaaacacccgtcctgccccctgtgctggtgcctcggcacactgagataccagccgaatttcctcccctggatgattattctcatagtattcccgaaaacaccaacttccccgctggaatcgagccgcaatccaatataccagagacaccccctccaggatatctgtccgaagatggcgagacaagtgaccaccagatgaatcacagtatggatgccggtagccctaatctttccccgaatccaatgagcccggctcacaataacttagatttacagccagtgacctactgtgagccagctttctggtgctctatatcatactacgaactgaaccaaagagtcggcgaaaccttccacgcatctcagccgtccatgacggttgatggttttactgatcccagcaattctgaacgcttttgtttagggcttctttcgaacgttaatcggaatgcagcggtggagttaacgaggagacatatcggtaggggggtccgattatactacattggaggcgaggttttcgctgaatgcttgtccgatagtgcaatctttgttcagtctccgaattgcaaccagagatacgggtggcacccagctactgtatgtaagataccgccaggttgcaatctgaaaatattcaacaatcaggaatttgccgcacttctggcccagtccgtcaaccagggttttgaggctgtgtaccagttgactcggatgtgtaccattcggatgtcttttgttaaaggttggggcgctgaataccgcagacagaccgttacatcaaccccctgttggatagagcttcatctgaacgggcctctccagtggcttgacaaggtgctcacacagatggggtcaccaagcatacgatgctcctctgtgtcttag

SEQ ID NO: 160173 - DNA, 1278 bp, Artificial Sequence
  derived and/or modified sequence
atgtcctccatcttgccattcaccccccctatcgtgaaaagactgctgggctggaagaagggagagcagaacgggcaggaggagaaatggtgtgagaaagcggtgaagtcccttgtgaagaagctcaaaaaaaccgggcagttggatgaacttgagaaggctattacgacacagaacgtcaacacaaagtgtatcacaattcccaggtccctggatggtcgcctgcaggtgtcgcaccgaaaaggccttccccatgtaatctactgccgcctgtggcgctggcctgatttgcattcccatcatgaactgagggccatggagctctgtgagttcgcgttcaacatgaaaaaagatgaggtatgtgtgaacccgtatcattaccaacgcgtcgagacgcctgttctcccgcctgtgctggttcccaggcatacggagatccctgcggaattcccccctttagacgactactcccactcgatcccagaaaatactaatttcccagcaggaattgaaccgcagtcaaacatcccagaaacacctcctcctgggtatctctccgaggacggtgaaacctcggatcatcagatgaaccattctatggacgctgggtccccgaatctgtctccaaaccctatgagtcccgctcacaataacctggatttgcagccagtaacatactgtgaacctgccttctggtgttctattagttattacgagttgaatcaacgggtcggtgaaacttttcacgccagccagcccagtatgacagtggacggatttactgatccatcaaattccgagcggttctgcttgggcttgttaagtaacgttaaccgaaacgcggctgtggagctgacgagacgccacattggaagaggagtccgcttgtattacatcggaggcgaggtgttcgccgaatgcttgtccgactccgccatcttcgtgcagtctcccaactgtaatcagaggtatggatggcaccccgctaccgtgtgcaaaatcccccctggttgtaatctcaaaatattcaacaaccaagagttcgctgctctactcgcgcagagtgtcaaccaggggtttgaagccgtgtaccagctgactcgcatgtgcaccatccggatgagttttgtgaaaggctggggagcagaatataggagacagaccgtgacctctacaccttgctggattgagttgcacttaaacggtccactccagtggctggacaaagtactaactcaaatgggaagcccatctattcggtgcagctcagtgtcttag

SEQ ID NO: 160174 - DNA, 6247 bp, Artificial Sequence
  derived and/or modified sequence
acttggagtctcgcggccgccgcctccgccccgcgttcggggccttcccgaccctgcactgctgccgtccgcccgcccggccgctcttctcttcgccgtgggagccgctccgggcgcagggccgcgcgccgagccccgcaggctgcagcgccgcggcccggcccggcgccccggcaacttcgccgagagttgaggcgaagtttgggcgaccgcggcaggccccggccgagctcccctctgcgcccccggcgtcccgtcgagcccagccccgccgggggcgctcctcgccgcccgcgcgccctccccagccatgtcgtccatcctgcctttcactcccccgatcgtgaagcgcctgctgggctggaagaagggcgagcagaacgggcaggaggagaaatggtgcgagaaggcggtcaagagcctggtcaagaaactcaagaagacggggcagctggacgagctggagaaggccatcaccacgcagaacgtcaacaccaagtgcatcaccatccccaggtccctggatggccggttgcaggtgtcccatcggaaggggctccctcatgtcatctactgccgcctgtggcgatggccagacctgcacagccaccacgagctacgggccatggagctgtgtgagttcgccttcaatatgaagaaggacgaggtctgcgtgaatccctaccactaccagagagtagagacaccagttctacctcctgtgttggtgccacgccacacagagatcccggccgagttccccccactggacgactacagccattccatccccgaaaacactaacttccccgcaggcatcgagccccagagcaatattccagagaccccaccccctggctacctgagtgaagatggagaaaccagtgaccaccagatgaaccacagcatggacgcaggttctccaaacctatccccgaatccgatgtccccagcacataataacttggacctgcagccagttacctactgcgagccggccttctggtgctccatctcctactacgagctgaaccagcgcgtcggggagacattccacgcctcgcagccatccatgactgtggatggcttcaccgacccctccaattcggagcgcttctgcctagggctgctctccaatgtcaacaggaatgcagcagtggagctgacacggagacacatcggaagaggcgtgcggctctactacatcggaggggaggtcttcgcagagtgcctcagtgacagcgctatttttgtccagtctcccaactgtaaccagcgctatggctggcacccggccaccgtctgcaagatcccaccaggatgcaacctgaagatcttcaacaaccaggagttcgctgccctcctggcccagtcggtcaaccagggctttgaggctgtctaccagttgacccgaatgtgcaccatccgcatgagcttcgtcaaaggctggggagcggagtacaggagacagactgtgaccagtaccccctgctggattgagctgcacctgaatgggcctttgcagtggcttgacaaggtcctcacccagatgggctccccaagcatccgctgttccagtgtgtcttagagacatcaagtatggtaggggagggcaggcttggggaaaatggccatgcaggaggtggagaaaattggaactctactcaacccattgttgtcaaggaagaagaaatctttctccctcaactgaaggggtgcacccacctgttttctgaaacacacgagcaaacccagaggtggatgttatgaacagctgtgtctgccaaacacatttaccctttggccccactttgaagggcaagaaatggcgtctgctctggtggcttaagtgagcagaacaggtagtattacaccaccggccccctccccccagactctttttttgagtgacagctttctgggatgtcacagtccaaccagaaacacccctctgtctaggactgcagtgtggagttcaccttggaagggcgttctaggtaggaagagcccgcagggccatgcagacctcatgcccagctctctgacgcttgtgacagtgcctcttccagtgaacattcccagcccagccccgccccgccccgccccaccactccagcagaccttgccccttgtgagctggatagacttgggatggggagggagggagttttgtctgtctccctcccctctcagaacatactgattgggaggtgcgtgttcagcagaacctgcacacaggacagcgggaaaaatcgatgagcgccacctctttaaaaactcacttacgtttgtcctttttcactttgaaaagttggaaggatctgctgaggcccagtgcatatgcaatgtatagtgtctattatcacattaatctcaaagagattcgaatgacggtaagtgttctcatgaagcaggaggcccttgtcgtgggatggcatttggtctcaggcagcaccacactgggtgcgtctccagtcatctgtaagagcttgctccagattctgatgcatacggctatattggtttatgtagtcagttgcattcattaaatcaactttatcatatgctcttttaaatgtttggtttatatattttctttaaaaatcctgggctggcacattgactgggaaacctgagtgagacccagcaactgcttctctcccttctctctcctgaggtgaagcttttccaggttttgttgaagagatacctgccagcacttctgcaagctgaaatttacagaagcaaattcaccagaagggaaacatctcaggccaacataggcaaatgaaaagggctattaaaatatttttacacctttgaaaattgcaggcttggtacaaagaggtctgtcatcttccccctgggatataagatgatctagctcccggtagaggatcaccggtgacaactatagcagttgtattgtgtaacaagtactgctcccagcagcaattagggagaaaactagtctaaattatttcaactggaaaaaagaaaaaagagtcctcttcttttcccagccttttgcagaacacagtagacagaactgccaccttcaattggtactttattctttgctgctgtttttgtataaaatgacctatcccacgtttttgcatgaatttatagcaggaaaaatcaagggatttcctatggaagtcctgctttattccaggtgaagggaaggaagtgtatatacttttggcaagtcatacagctcaaatgtgatgagatttctgatgttagagggagatggagaggcttcctgatgcctcatctgcagggtcctgtgcctctgaagttctagccatgaggtttccaggtaggacagctgctccccaagcctcctgaggacacaggaagagacggaaggagcaccttgacagacttgtgtgagtcttctcgaaggagggttgactcagaacccagagacaatacaaaacccctcacttcctctgagagggccaaatgctgtgagtctgaagtatgtgcctggtgtgaaatgatctatggcctgtttcttacacaggaagccccctgaacctcctgtacatgtgttcatgttcccagccagctctgagacccaggaaccaaatattccattttggcttctgctagagcagtcatggttcctctcctaaaagccatgggcagcagtttccgagggcctgcatgatccacctgctgcacgatcctatgagggcttcctgtggcacacagccctctgggtgcttgggaactagcttcaggcacagcctgattctggtgatccagtgatctatggaagtcgtgtcttactccaggtgaagggggaaaaaaaaagcctatactttggcaggttatgaactttgaatgtgatgaaatgacacgtttggctgcatttggatggtgtcttagaaccctcattgctcagacctgaaggctacttctaggagcatgaagtttgagttttgtgtttttccaaaggatacttccttggccctttttctttattgactagaccaccagaggaggatgtgtgggattgtaggcaaacccacctgtggcatcactgaaaataaatttgatcatacctaagaggttaggaaatggtgccattcccaccttagagtgctacataggtgctttgggcgtatgtaacattagtgtccttccttgaagccacaagctagttttcttagttttaaaatcctgttgtatgaatggcatttgtatattaaaacacttttttaaaggacagttgaaaagggcaagaggaaaccagggcagttctagaggagtgctggtgactggatagcagttttaagtggcgttcacctagtcaacacgaccgcgtgtgttgcccctgccctgggctccccgccatgacatcttcaccttgcagcttgtgctgagactgacccaagtgcagctagcactgggacacagatccttgtcttcagcaccttccaaggagccaacttttattccctttcctctctcccctccccacctcgcttcttcccaatttagtaacttagatgcttccagcacatacgtaggtagctaccccagccggtttggattacaggcctgtgctggaacatcatctcagttggccaccttcctggcaggctgtagacctgacattttgagacaagcctagaggagtcaggagcagggactttgactcttaggaagagcacacatgagggcaaggctgctggcagacgtctccattgtccttatgttgtctgtgttgtatttttttttttttattgaccatggtgattatttttttaaaccatcgttaatatactgaagtgagctatagcacatatcatgtgcttagtttgtttatttttctccatctccccttggcttcctagagtttggacatattccaggctaaatgcttttactcaagactacagaaaggtttgaagtagtgtgtgcatggcatgcacgtatgtaagtaatctggggaagaagcaaagatctgtttcattcttagcctcaggcctcatgagggtctccacagggccggagctcaggttacaccactccttcgtccttacaggagatgtagggagaagaatctgcaggctgcttgtaggactgttcaccaagggggataccagcagcaagagagtgcacccgtttagccctggaccctgtttcttactgtgtgacttggctagagttgggagttcccccaaaataaacgtgtccccattttaccagaaccaaacctcaacacagcgaagctgtactgtctttgtgtggcaaagatgttcccttgtaggcccctttcaggtaaccgtcttcacaatgtattttcatcacagtttaaggagcatcagccgcttctcaagtgggtagggaaagcagaaaaacgtacgcaagaggacatggatccaaaatgatgatgaagcatctcccatggggaggtgatggtggggagatgatgggctaaacaggcaacttttcaaaaacacagctatcatagaaaagaaacttgcctcatgtaaactggattgagaaattctcagtgattctgcaatggatttttttttaatgcagaagtaatgtatactctagtattctggtgtttttatatttatgtaataatttcttaaaaccattcagacagataactatttaattttttttaagaaagttggaaaggtctctcctcccaaggacagtggctggaagagttggggcacagccagttctgaatgttggtggagggtgtagtggctttttggctcagcatccagaaacaccaaaccaggctggctaaacaagtggccgcgtgtaaaaacagacagctctgagtcaaatctgggcccttccacaagggtcctctgaaccaagccccactcccttgctaggggtgaaagcattacagagagatggagccatctatccaagaagccttcactcaccttcactgctgctgttgcaactcggctgttctggactctgatgtgtgtggagggatggggaatagaacattgactgtgttgattaccttcactattcggccagcctgaccttttaataactttgtaaaaagcatgtatgtatttatagtgttttagatttttctaacttttatatcttaaaagcagagcacctgtttaagcattgtacccctattgttaaagatttgtgtcctctcattccctctcttcctcttgtaagtgcccttctaataaacttttcatggaaaagctcctgtgccaggagctcagtctga

SEQ ID NO: 160175 - DNA, 1518 bp, Artificial Sequence
  derived and/or modified sequence
acttggagtctcgcggccgccgcctccgccccgcgttcggggccttcccgaccctgcactgctgccgtccgcccgcccggccgctcttctcttcgccgagagttgaggcgaagtttgggcgaccgcggcaggccccggccgagctcccctctgcgcccccggcgtcccgtcgagcccagccccgccgggggcgctcctcgccgcccgcgcgccctccccagccatgtcgtccatcctgcctttcactcccccgatcgtgaagcgcctgctgggctggaagaagggcgagcagaacgggcaggaggagaaatggtgcgagaaggcggtcaagagcctggtcaagaaactcaagaagacggggcagctggacgagctggagaaggccatcaccacgcagaacgtcaacaccaagtgcatcaccatccccaggtccctggatggccggttgcaggtgtcccatcggaaggggctccctcatgtcatctactgccgcctgtggcgatggccagacctgcacagccaccacgagctacgggccatggagctgtgtgagttcgccttcaatatgaagaaggacgaggtctgcgtgaatccctaccactaccagagagtagagacaccagttctacctcctgtgttggtgccacgccacacagagatcccggccgagttccccccactggacgactacagccattccatccccgaaaacactaacttccccgcaggcatcgagccccagagcaatattccagagaccccaccccctggctacctgagtgaagatggagaaaccagtgaccaccagatgaaccacagcatggacgcaggttctccaaacctatccccgaatccgatgtccccagcacataataacttggacctgcagccagttacctactgcgagccggccttctggtgctccatctcctactacgagctgaaccagcgcgtcggggagacattccacgcctcgcagccatccatgactgtggatggcttcaccgacccctccaattcggagcgcttctgcctagggctgctctccaatgtcaacaggaatgcagcagtggagctgacacggagacacatcggaagaggcgtgcggctctactacatcggaggggaggtcttcgcagagtgcctcagtgacagcgctatttttgtccagtctcccaactgtaaccagcgctatggctggcacccggccaccgtctgcaagatcccaccaggatgcaacctgaagatcttcaacaaccaggagttcgctgccctcctggcccagtcggtcaaccagggctttgaggctgtctaccagttgacccgaatgtgcaccatccgcatgagcttcgtcaaaggctggggagcggagtacaggagacagactgtgaccagtaccccctgctggattgagctgcacctgaatgggcctttgcagtggcttgacaaggtcctcacccagatgggctccccaagcatccgctgttccagtgtgtcttagagacatcaagtatggta

SEQ ID NO: 160176 - protein, 426 aa, Artificial Sequence
  derived and/or modified sequence
MFRTKRSALVRRLWRSRAPGGEDEEEGAGGGGGGGELRGEGATDSRAHGAGGGGPGRAGCCLGKAVRGAKGHHHPHPPAAGAGAAGGAEADLKALTHSVLKKLKERQLELLLQAVESRGGTRTACLLLPGRLDCRLGPGAPAGAQPAQPPSSYSLPLLLCKVFRWPDLRHSSEVKRLCCCESYGKINPELVCCNPHHLSRLCELESPPPPYSRYPMDFLKPTADCPDAVPSSAETGGTNYLAPGGLSDSQLLLEPGDRSHWCVVAYWEEKTRVGRLYCVQEPSLDIFYDLPQGNGFCLGQLNSDNKSQLVQKVRSKIGCGIQLTREVDGVWVYNRSSYPIFIKSATLDNPDSRTLLVHKVFPGFSIKAFDYEKAYSLQRPNDHEFMQQPWTGFTVQISFVKGWGQCYTRQFISSCPCWLEVIFNSR

SEQ ID NO: 160177 - protein, 211 aa, Artificial Sequence
  derived and/or modified sequence
MDFLKPTADCPDAVPSSAETGGTNYLAPGGLSDSQLLLEPGDRSHWCVVAYWEEKTRVGRLYCVQEPSLDIFYDLPQGNGFCLGQLNSDNKSQLVQKVRSKIGCGIQLTREVDGVWVYNRSSYPIFIKSATLDNPDSRTLLVHKVFPGFSIKAFDYEKAYSLQRPNDHEFMQQPWTGFTVQISFVKGWGQCYTRQFISSCPCWLEVIFNSR

SEQ ID NO: 160178 - DNA, 3103 bp, Artificial Sequence
  derived and/or modified sequence
cggagagccgcgcagggcgcgggccgcgcggggtggggcagccggagcgcaggcccccgatccccggcgggcgcccccgggcccccgcgcgcgccccggcctccgggagactggcgcatgccacggagcgcccctcgggccgccgccgctcctgcccgggcccctgctgctgctgctgtcgcctgcgcctgctgccccaactcggcgcccgacttcttcatggtgtgcggaggtcatgttcgctccttagcaggcaaacgacttttctcctcgcctcctcgccccgcatgttcaggaccaaacgatctgcgctcgtccggcgtctctggaggagccgtgcgcccggcggcgaggacgaggaggagggcgcagggggaggtggaggaggaggcgagctgcggggagaaggggcgacggacagccgagcgcatggggccggtggcggcggcccgggcagggctggatgctgcctgggcaaggcggtgcgaggtgccaaaggtcaccaccatccccacccgccagccgcgggcgccggcgcggccgggggcgccgaggcggatctgaaggcgctcacgcactcggtgctcaagaaactgaaggagcggcagctggagctgctgctccaggccgtggagtcccgcggcgggacgcgcaccgcgtgcctcctgctgcccggccgcctggactgcaggctgggcccgggggcgcccgccggcgcgcagcctgcgcagccgccctcgtcctactcgctccccctcctgctgtgcaaagtgttcaggtggccggatctcaggcattcctcggaagtcaagaggctgtgttgctgtgaatcttacgggaagatcaaccccgagctggtgtgctgcaacccccatcaccttagccgactctgcgaactagagtctcccccccctccttactccagatacccgatggattttctcaaaccaactgcagactgtccagatgctgtgccttcctccgctgaaacagggggaacgaattatctggcccctggggggctttcagattcccaacttcttctggagcctggggatcggtcacactggtgcgtggtggcatactgggaggagaagacgagagtggggaggctctactgtgtccaggagccctctctggatatcttctatgatctacctcaggggaatggcttttgcctcggacagctcaattcggacaacaagagtcagctggtgcagaaggtgcggagcaaaatcggctgcggcatccagctgacgcgggaggtggatggtgtgtgggtgtacaaccgcagcagttaccccatcttcatcaagtccgccacactggacaacccggactccaggacgctgttggtacacaaggtgttccccggtttctccatcaaggctttcgactacgagaaggcgtacagcctgcagcggcccaatgaccacgagtttatgcagcagccgtggacgggctttaccgtgcagatcagctttgtgaagggctggggtcagtgctacacccgccagttcatcagcagctgcccgtgctggctagaggtcatcttcaacagccggtagccgcgtgcggaggggacagagcgtgagctgagcaggccacacttcaaactactttgctgctaatattttcctcctgagtgcttgcttttcatgcaaactctttggtcgttttttttttgtttgttggttggttttcttcttctcgtcctcgtttgtgttctgttttgtttcgctctttgagaaatagcttatgaaaagaattgttgggggtttttttggaagaaggggcaggtatgatcggcaggacaccctgataggaagaggggaagcagaaatccaagcaccaccaaacacagtgtatgaaggggggcggtcatcatttcacttgtcaggagtgtgtgtgagtgtgagtgtgcggctgtgtgtgcacgcgtgtgcaggagcggcagatggggagacaacgtgctctttgttttgtgtctcttatggatgtccccagcagagaggtttgcagtcccaagcggtgtctctcctgccccttggacacgctcagtggggcagaggcagtacctgggcaagctggcggctggggtcccagcagctgccaggagcacggctctgtccccagcctgggaaagcccctgcccctcctctccctcatcaaggacacgggcctgtccacaggcttctgagcagcgagcctgctagtggccgaaccagaaccaattattttcatccttgtcttattcccttcctgccagcccctgccattgtagcgtctttcttttttggccatctgctcctggatctccctgagatgggcttcccaagggctgccggggcagccccctcacagtattgctcacccagtgccctctcccctcagcctctcccctgcctgccctggtgacatcaggtttttcccggacttagaaaaccagctcagcactgcctgctcccatcctgtgtgttaagctctgctattaggccagcaagcggggatgtccctgggagggacatgcttagcagtccccttccctccaagaaggatttggtccgtcataacccaaggtaccatcctaggctgacacctaactcttctttcatttcttctacaactcatacactcgtatgatacttcgacactgttcttagctcaatgagcatgtttagactttaacataagctatttttctaactacaaaggtttaaatgaacaagagaagcattctcattggaaatttagcattgtagtgctttgagagagaaaggactcctgaaaaaaaacctgagatttattaaagaaaaaaatgtattttatgttatatataaatatattattacttgtaaatataaagacgttttataagcatcattatttatgtattgtgcaatgtgtataaacaagaaaaataaagaaaagatgcactttgctttaatataaatgcaaataacaaatgccaaattaaaaaagataaacacaagattggtgttttttcctatgggtgttatcacctagctgaatgtttttctaaaggagtttatgttccattaaacgatttttaaaatgtacacttgaaaaaaaaaaaaaaaaa

SEQ ID NO: 160179 - DNA, 1281 bp, Artificial Sequence
  derived and/or modified sequence
atgttcagaaccaagagaagcgccctggtgagaagactgtggagaagcagagcccccggcggcgaggacgaggaggagggcgccggcggcggcggcggcggcggcgagctgagaggcgagggcgccaccgacagcagagcccacggcgccggcggcggcggccccggcagagccggctgctgcctgggcaaggccgtgagaggcgccaagggccaccaccacccccacccccccgccgccggcgccggcgccgccggcggcgccgaggccgacctgaaggccctgacccacagcgtgctgaagaagctgaaggagagacagctggagctgctgctgcaggccgtggagagcagaggcggcaccagaaccgcctgcctgctgctgcccggcagactggactgcagactgggccccggcgcccccgccggcgcccagcccgcccagccccccagcagctacagcctgcccctgctgctgtgcaaggtgttcagatggcccgacctgagacacagcagcgaggtgaagagactgtgctgctgcgagagctacggcaagatcaaccccgagctggtgtgctgcaacccccaccacctgagcagactgtgcgagctggagagccccccccccccctacagcagataccccatggacttcctgaagcccaccgccgactgccccgacgccgtgcccagcagcgccgagaccggcggcaccaactacctggcccccggcggcctgagcgacagccagctgctgctggagcccggcgacagaagccactggtgcgtggtggcctactgggaggagaagaccagagtgggcagactgtactgcgtgcaggagcccagcctggacatcttctacgacctgccccagggcaacggcttctgcctgggccagctgaacagcgacaacaagagccagctggtgcagaaggtgagaagcaagatcggctgcggcatccagctgaccagagaggtggacggcgtgtgggtgtacaacagaagcagctaccccatcttcatcaagagcgccaccctggacaaccccgacagcagaaccctgctggtgcacaaggtgttccccggcttcagcatcaaggccttcgactacgagaaggcctacagcctgcagagacccaacgaccacgagttcatgcagcagccctggaccggcttcaccgtgcagatcagcttcgtgaagggctggggccagtgctacaccagacagttcatcagcagctgcccctgctggctggaggtgatcttcaacagcagatag

SEQ ID NO: 160180 - DNA, 1281 bp, Artificial Sequence
  derived and/or modified sequence
atgttccgaacaaaaagatccgcgctggtgcgccgcctgtggcgctcgcgtgcgccgggcggagaggacgaagaggaaggcgccggtggagggggaggggggggagagcttcgcggagagggtgcgaccgactcacgcgctcacggcgcgggagggggaggccccggacgcgccggatgttgcctcgggaaagctgtaagaggggccaaaggacatcatcacccccatcctcctgccgccggcgccggtgccgccggaggggccgaggccgatttaaaagcactgacccattccgtgctgaagaagctgaaggaaagacagctggagctgctgttacaagcagtggaatctagagggggcacacgaaccgcttgcctgttgctccccggcagactggattgccgcttggggcctggagcacccgccggtgcgcaaccggcccagcccccttcaagttattcactcccactcttgctgtgcaaggtttttagatggcctgaccttcgacactcctccgaggtgaagcgcctctgctgctgcgagtcttatggcaagatcaaccctgaattagtttgttgtaaccctcatcacctgtctcgcttgtgtgagttggaaagcccacctccaccttactctcgctacccaatggacttcctcaaacccactgcggactgtcctgacgcggtcccctcaagcgctgagactgggggtacaaactacctggctccgggaggcctgtccgattcacagttactgctggaaccaggtgatcggtcccactggtgcgtggtagcctattgggaggagaagacaagggtggggcgattgtattgtgtgcaggagccatcgctggatatcttctacgatctcccccaaggaaatggtttctgtctcggacagctgaattcagataataaaagccagcttgtccagaaagtccggtctaagattggctgtggcatccagcttacccgggaggtggacggcgtatgggtctacaatcggagctcgtacccaattttcattaaaagcgctaccctcgacaatcccgattctcgaacactgctcgttcataaggtcttcccgggcttttccataaaagcctttgactatgagaaagcgtacagcctccagagacccaacgaccacgaatttatgcagcagccttggacaggatttactgtgcaaatcagctttgtcaaaggctgggggcagtgctacaccaggcaatttattagcagctgcccgtgttggcttgaagttatcttcaatagtagatag

SEQ ID NO: 160181 - DNA, 1281 bp, Artificial Sequence
  derived and/or modified sequence
atgttccgcaccaagaggtctgccctggtgcggcggctgtggaggagccgggcccctggaggagaagatgaggaggagggcgctgggggcggcggcggcggcggggagctgcggggggagggcgccacagacagccgggcccacggggccggcggcggcggccctggccgggccggctgctgcctgggcaaggctgtgcggggggccaagggccaccaccacccccaccccccagctgctggggccggggctgctggaggagctgaggccgacctgaaggccctgacccacagcgtgctgaagaagctgaaggagcggcagctggagctgctgctgcaggccgtggagagcagaggaggcaccaggacagcctgcctgctgctgcccggccgcctggactgccgcctgggccctggggccccagctggggcccagcctgcccagccccccagcagctacagcctgcccctgctgctgtgcaaggtgttccgctggccagacctgcggcacagcagcgaggtgaagaggctgtgctgctgtgagagctatggcaagatcaaccctgagctggtgtgctgcaacccccaccacctgagccggctgtgtgagctggagagccccccaccaccctacagccgctaccccatggacttcctgaagcccacagctgactgcccagatgctgtgcccagcagcgctgagactggaggcaccaactacctggcccctgggggcctgagtgacagccagctgctgctggagcccggggacaggagccactggtgtgtggtggcctactgggaggagaagaccagggtgggccgcctgtactgtgtgcaggagcccagcctggacatcttctatgacctgccccagggcaatggcttctgcctgggccagctgaacagcgacaacaagagccagctggtgcagaaggtgcgcagcaagattggctgcggcatccagctgacccgggaggtggatggagtgtgggtgtacaacagaagcagctaccccatcttcatcaagagcgccaccctggacaacccagacagcaggaccctgctggtgcacaaggtgtttcctggcttcagcatcaaggcctttgattatgagaaggcctacagcctgcagaggcccaatgaccacgagttcatgcagcagccctggacaggcttcaccgtgcagatcagctttgtgaagggctggggccagtgctacacccggcagttcatcagcagctgcccctgctggctggaggtgatcttcaacagcaggtag

SEQ ID NO: 160182 - DNA, 1281 bp, Artificial Sequence
  derived and/or modified sequence
atgttccggaccaagcggagcgccctggtgcggcggctgtggcggagcagggcacccggcggcgaggacgaggaagaaggcgctggaggggggggcggtggtggcgagctgcggggggagggggcgacagactccagggcccacggagctggagggggaggacctgggagagcagggtgctgtctcggcaaagccgtgaggggagccaaaggccaccaccatccacatcctccggcagctggagctggtgctgcaggcggggccgaggccgacctgaaggccctaacacattcagtgctgaagaaattgaaagagcggcagctagaattactgttgcaggctgtcgaaagccgagggggcacccggactgcttgtttgcttctccccggcaggctggactgcaggctggggcccggcgcccctgccggagcccaaccagcccaaccgccttcaagctattccctcccactcttgctgtgtaaagttttccgatggccggatctacgccacagcagcgaggtgaagagactgtgctgttgcgaaagctatggaaaaatcaaccccgaattggtctgctgtaatccacaccacctgtccagattgtgtgagttggagtctcccccacctccatacagtcggtaccccatggactttcttaagcctaccgctgattgtcctgatgcagttccttcatccgctgagacgggaggcacgaattatctggcaccaggtggattatctgattcacagctgcttctcgagcccggcgaccgatcacactggtgtgtggtggcctactgggaagagaaaacacgtgttggcaggctgtattgcgtccaggagcctagtctcgacatcttctacgacttaccacaggggaatggcttctgcctgggccagctgaattccgataacaagtcacaattagtccagaaagtgcggagcaaaattggatgtggcattcaactgacgcgagaggttgacggagtgtgggtttacaacaggagcagctaccctatatttataaaatctgctacacttgataaccccgacagcaggacacttctggtccataaagtgttcccaggattctccatcaaggcattcgattacgaaaaggcctactcattgcagcgccccaatgatcatgagtttatgcaacagccctggactggattcacagtacagatctccttcgtgaaagggtgggggcagtgctacacccggcagtttatctcgtcgtgtccatgctggctagaggtgatttttaatagccgctag

SEQ ID NO: 160183 - DNA, 1281 bp, Artificial Sequence
  derived and/or modified sequence
atgtttagaacaaagcggagcgctctggtgcgtcggttatggcggtcccgggctccaggcggagaggatgaggaggagggagcaggtggaggtgggggaggtggtgaactgagaggcgaaggcgcaaccgactcgagggctcacggtgcgggaggaggaggcccaggtcgcgctgggtgctgcctcggcaaggcggtgagaggagcaaaaggacaccatcatccccaccctcccgctgcgggtgctggcgctgctggtggcgctgaagcggacttgaaggctttaactcacagcgtgctgaagaagctgaaagagagacagctggagctccttttacaggcagttgagtccaggggcggaacaagaaccgcgtgcctgctgctgcctggcaggctggactgcagacttggccctggagcccctgctggcgctcagcccgcacaacccccttcctcctatagccttccgctgctgctgtgcaaagtctttagatggccggaccttaggcacagtagcgaggttaaacgcctctgctgttgcgagtcctatggcaagattaatccagagcttgtttgttgtaacccacatcatctttccagattgtgcgaactagagtcccccccaccgccatacagtagatacccaatggatttcttaaaaccgaccgccgactgccctgatgccgtgcccagctcagcggagaccggcggaaccaactatctggcccctggagggctttctgacagccagcttctgctggaaccgggagacaggagccactggtgcgtagtggcctactgggaagaaaaaactagagtcgggaggctgtactgtgtacaagagccatccttggatatcttttacgaccttccacagggcaatggattctgtctgggccaactgaattcagacaacaaatctcagttggttcagaaggtacgcagtaaaatcgggtgcggtattcagcttactcgggaggttgacggcgtctgggtgtacaataggagcagctatcctatcttcattaagagcgctacgctggataatcctgactcaagaacgctgcttgtgcacaaggtcttcccaggctttagcattaaggcattcgattacgaaaaagcatacagcctacagcgccctaacgatcacgaattcatgcagcagccttggaccggctttaccgtacagatttcattcgttaaagggtggggacagtgctatacccgacagtttatctcctcttgcccatgctggcttgaggtgatattcaattcaaggtag

SEQ ID NO: 160184 - DNA, 3087 bp, Artificial Sequence
  derived and/or modified sequence
cggagagccgcgcagggcgcgggccgcgcggggtggggcagccggagcgcaggcccccgatccccggcgggcgcccccgggcccccgcgcgcgccccggcctccgggagactggcgcatgccacggagcgcccctcgggccgccgccgctcctgcccgggcccctgctgctgctgctgtcgcctgcgcctgctgccccaactcggcgcccgacttcttcatggtgtgcggaggtcatgttcgctccttagcaggcaaacgacttttctcctcgcctcctcgccccgcatgttcaggaccaaacgatctgcgctcgtccggcgtctctggaggagccgtgcgcccggcggcgaggacgaggaggagggcgcagggggaggtggaggaggaggcgagctgcggggagaaggggcgacggacagccgagcgcatggggccggtggcggcggcccgggcagggctggatgctgcctgggcaaggcggtgcgaggtgccaaaggtcaccaccatccccacccgccagccgcgggcgccggcgcggccgggggcgccgaggcggatctgaaggcgctcacgcactcggtgctcaagaaactgaaggagcggcagctggagctgctgctccaggccgtggagtcccgcggcgggacgcgcaccgcgtgcctcctgctgcccggccgcctggactgcaggctgggcccgggggcgcccgccggcgcgcagcctgcgcagccgccctcgtcctactcgctccccctcctgctgtgcaaagtgttcaggtggccggatctcaggcattcctcggaagtcaagaggctgtgttgctgtgaatcttacgggaagatcaaccccgagctggtgtgctgcaacccccatcaccttagccgactctgcgaactagagtctcccccccctccttactccagatacccgatggattttctcaaaccaactgcagactgtccagatgctgtgccttcctccgctgaaacagggggaacgaattatctggcccctggggggctttcagattcccaacttcttctggagcctggggatcggtcacactggtgcgtggtggcatactgggaggagaagacgagagtggggaggctctactgtgtccaggagccctctctggatatcttctatgatctacctcaggggaatggcttttgcctcggacagctcaattcggacaacaagagtcagctggtgcagaaggtgcggagcaaaatcggctgcggcatccagctgacgcgggaggtggatggtgtgtgggtgtacaaccgcagcagttaccccatcttcatcaagtccgccacactggacaacccggactccaggacgctgttggtacacaaggtgttccccggtttctccatcaaggctttcgactacgagaaggcgtacagcctgcagcggcccaatgaccacgagtttatgcagcagccgtggacgggctttaccgtgcagatcagctttgtgaagggctggggccagtgctacacccgccagttcatcagcagctgcccgtgctggctagaggtcatcttcaacagccggtagccgcgtgcggaggggacagagcgtgagctgagcaggccacacttcaaactactttgctgctaatattttcctcctgagtgcttgcttttcatgcaaactctttggtcgttttttttttgtttgttggttggttttcttcttctcgtcctcgtttgtgttctgttttgtttcgctctttgagaaatagcttatgaaaagaattgttgggggtttttttggaagaaggggcaggtatgatcggcaggacaccctgataggaagaggggaagcagaaatccaagcaccaccaaacacagtgtatgaaggggggcggtcatcatttcacttgtcaggagtgtgtgtgagtgtgagtgtgcggctgtgtgtgcacgcgtgtgcaggagcggcagatggggagacaacgtgctctttgttttgtgtctcttatggatgtccccagcagagaggtttgcagtcccaagcggtgtctctcctgccccttggacacgctcagtggggcagaggcagtacctgggcaagctggcggctggggtcccagcagctgccaggagcacggctctgtccccagcctgggaaagcccctgcccctcctctccctcatcaaggacacgggcctgtccacaggcttctgagcagcgagcctgctagtggccgaaccagaaccaattattttcatccttgtcttattcccttcctgccagcccctgccattgtagcgtctttcttttttggccatctgctcctggatctccctgagatgggcttcccaagggctgccggggcagccccctcacagtattgctcacccagtgccctctcccctcagcctctcccctgcctgccctggtgacatcaggtttttcccggacttagaaaaccagctcagcactgcctgctcccatcctgtgtgttaagctctgctattaggccagcaagcggggatgtccctgggagggacatgcttagcagtccccttccctccaagaaggatttggtccgtcataacccaaggtaccatcctaggctgacacctaactcttctttcatttcttctacaactcatacactcgtatgatacttcgacactgttcttagctcaatgagcatgtttagactttaacataagctatttttctaactacaaaggtttaaatgaacaagagaagcattctcattggaaatttagcattgtagtgctttgagagagaaaggactcctgaaaaaaaacctgagatttattaaagaaaaaaatgtattttatgttatatataaatatattattacttgtaaatataaagacgttttataagcatcattatttatgtattgtgcaatgtgtataaacaagaaaaataaagaaaagatgcactttgctttaatataaatgcaaataacaaatgccaaattaaaaaagataaacacaagattggtgtttttttctatgggtgttatcacctagctgaatgtttttctaaaggagtttatgttccattaaacgatttttaaaatgtacacttga

SEQ ID NO: 160185 - DNA, 2292 bp, Artificial Sequence
  derived and/or modified sequence
agtaaatacggagaatcacgtcgaacaccagtggcccagatactgtcgtggccgcgcacctttggagttttggggcaaagagagttggatggaaggccgaactggagtctcccccccctccttactccagatacccgatggattttctcaaaccaactgcagactgtccagatgctgtgccttcctccgctgaaacagggggaacgaattatctggcccctggggggctttcagattcccaacttcttctggagcctggggatcggtcacactggtgcgtggtggcatactgggaggagaagacgagagtggggaggctctactgtgtccaggagccctctctggatatcttctatgatctacctcaggggaatggcttttgcctcggacagctcaattcggacaacaagagtcagctggtgcagaaggtgcggagcaaaatcggctgcggcatccagctgacgcgggaggtggatggtgtgtgggtgtacaaccgcagcagttaccccatcttcatcaagtccgccacactggacaacccggactccaggacgctgttggtacacaaggtgttccccggtttctccatcaaggctttcgactacgagaaggcgtacagcctgcagcggcccaatgaccacgagtttatgcagcagccgtggacgggctttaccgtgcagatcagctttgtgaagggctggggccagtgctacacccgccagttcatcagcagctgcccgtgctggctagaggtcatcttcaacagccggtagccgcgtgcggaggggacagagcgtgagctgagcaggccacacttcaaactactttgctgctaatattttcctcctgagtgcttgcttttcatgcaaactctttggtcgttttttttttgtttgttggttggttttcttcttctcgtcctcgtttgtgttctgttttgtttcgctctttgagaaatagcttatgaaaagaattgttgggggtttttttggaagaaggggcaggtatgatcggcaggacaccctgataggaagaggggaagcagaaatccaagcaccaccaaacacagtgtatgaaggggggcggtcatcatttcacttgtcaggagtgtgtgtgagtgtgagtgtgcggctgtgtgtgcacgcgtgtgcaggagcggcagatggggagacaacgtgctctttgttttgtgtctcttatggatgtccccagcagagaggtttgcagtcccaagcggtgtctctcctgccccttggacacgctcagtggggcagaggcagtacctgggcaagctggcggctggggtcccagcagctgccaggagcacggctctgtccccagcctgggaaagcccctgcccctcctctccctcatcaaggacacgggcctgtccacaggcttctgagcagcgagcctgctagtggccgaaccagaaccaattattttcatccttgtcttattcccttcctgccagcccctgccattgtagcgtctttcttttttggccatctgctcctggatctccctgagatgggcttcccaagggctgccggggcagccccctcacagtattgctcacccagtgccctctcccctcagcctctcccctgcctgccctggtgacatcaggtttttcccggacttagaaaaccagctcagcactgcctgctcccatcctgtgtgttaagctctgctattaggccagcaagcggggatgtccctgggagggacatgcttagcagtccccttccctccaagaaggatttggtccgtcataacccaaggtaccatcctaggctgacacctaactcttctttcatttcttctacaactcatacactcgtatgatacttcgacactgttcttagctcaatgagcatgtttagactttaacataagctatttttctaactacaaaggtttaaatgaacaagagaagcattctcattggaaatttagcattgtagtgctttgagagagaaaggactcctgaaaaaaaacctgagatttattaaagaaaaaaatgtattttatgttatatataaatatattattacttgtaaatataaagacgttttataagcatcattatttatgtattgtgcaatgtgtataaacaagaaaaataaagaaaagatgcactttgctttaatataaatgcaaataacaaatgccaaattaaaaaagataaacacaagattggtgtttttttctatgggtgttatcacctagctgaatgtttttctaaaggagtttatgttccattaaacgatttttaaaatgtacacttga

SEQ ID NO: 160186 - DNA, 1152 bp, Artificial Sequence
  derived and/or modified sequence
agtaaatacggagaatcacgtcgaacaccagtggcccagatactgtcgtggccgcgcacctttggagttttggggcaaagagagttggatggaaggccgaactggagtctcccccccctccttactccagatacccgatggattttctcaaaccaactgcagactgtccagatgctgtgccttcctccgctgaaacagggggaacgaattatctggcccctggggggctttcagattcccaacttcttctggagcctggggatcggtcacactggtgcgtggtggcatactgggaggagaagacgagagtggggaggctctactgtgtccaggagccctctctggatatcttctatgatctacctcaggggaatggcttttgcctcggacagctcaattcggacaacaagagtcagctggtgcagaaggtgcggagcaaaatcggctgcggcatccagctgacgcgggaggtggatggtgtgtgggtgtacaaccgcagcagttaccccatcttcatcaagtccgccacactggacaacccggactccaggacgctgttggtacacaaggtgttccccggtttctccatcaaggctttcgactacgagaaggcgtacagcctgcagcggcccaatgaccacgagtttatgcagcagccgtggacgggctttaccgtgcagatcagctttgtgaagggctggggccagtgctacacccgccagttcatcagcagctgcccgtgctggctagaggtcatcttcaacagccggtagccgcgtgcggaggggacagagcgtgagctgagcaggccacacttcaaactactttgctgctaatattttcctcctgagtgcttgcttttcatgcaaactctttggtcgttttttttttgtttgttggttggttttcttcttctcgtcctcgtttgtgttctgttttgtttcgctctttgagaaatagcttatgaaaagaattgttgggggtttttttggaagaaggggcaggtatgatcggcaggacaccctgataggaagaggggaagcagaaatccaagcaccaccaaacacagtgtatgaaggggggcggtcatcatttcacttgtcaggagtgtgtgtgagtgtgagtgtgcggctgtgtgtgcacgcgtgtgca

SEQ ID NO: 160187 - protein, 430 aa, Artificial Sequence
  derived and/or modified sequence
MHSTTPISSLFSFTSPAVKRLLGWKQGDEEEKWAEKAVDSLVKKLKKKKGAMDELERALSCPGQPSKCVTIPRSLDGRLQVSHRKGLPHVIYCRVWRWPDLQSHHELKPLECCEFPFGSKQKEVCINPYHYRRVETPVLPPVLVPRHSEYNPQLSLLAKFRSASLHSEPLMPHNATYPDSFQQPPCSALPPSPSHAFSQSPCTASYPHSPGSPSEPESPYQHSDFRPVCYEEPQHWCSVAYYELNNRVGETFQASSRSVLIDGFTDPSNNRNRFCLGLLSNVNRNSTIENTRRHIGKGVHLYYVGGEVYAECVSDSSIFVQSRNCNYQHGFHPATVCKIPSGCSLKVFNNQLFAQLLAQSVHHGFEVVYELTKMCTIRMSFVKGWGAEYHRQDVTSTPCWIEIHLHGPLQWLDKVLTQMGSPHNPISSVS

SEQ ID NO: 160188 - DNA, 5481 bp, Artificial Sequence
  derived and/or modified sequence
cgcactaatacgggcgatgaggcttcgcggctccagtctgactgacgccggctggggccgccgccgccgccgccgccgccgccgctgctgcagccgctgtctcggtccccgccgccgccgccgggccctgcaggcgctgggcgcgcgcagccaggcaagttggccaccctgttcaagggcttaggagaaagtcaacacacttcgcaacttgaattggtcccagctgctcccagaagaacgggcgggttggtccctatgccacccctggagagctactcgccgcccactttgccgtgaagggctgtgcggttcccgtgcgcgccggagcctgctgtggcctcttatgcactccaccacccccatcagctccctcttctccttcaccagccccgcagtgaagagactgctaggctggaagcaaggagatgaagaggaaaagtgggcagagaaggcagtggactctctagtgaagaagttaaagaagaagaagggagccatggacgagctggagagggctctcagctgcccggggcagcccagcaaatgcgtcacgattccccgctccctggacgggcggctgcaggtgtcccaccgcaagggcctgccccatgtgatttactgtcgcgtgtggcgctggccggatctgcagtcccaccacgagctgaagccgctggagtgctgtgagttcccatttggctccaagcagaaagaagtgtgcattaacccttaccactaccgccgggtggagactccagtactgcctcctgtgctcgtgccaagacacagtgaatataacccccagctcagcctcctggccaagttccgcagcgcctccctgcacagtgagccactcatgccacacaacgccacctatcctgactctttccagcagcctccgtgctctgcactccctccctcacccagccacgcgttctcccagtccccgtgcacggccagctaccctcactccccaggaagtccttctgagccagagagtccctatcaacactcagactttcgaccagtttgttacgaggagccccagcactggtgctcggtcgcctactatgaactgaacaaccgagttggggagacattccaggcttcctcccgaagtgtgctcatagatgggttcaccgacccttcaaataacaggaacagattctgtcttggacttctttctaatgtaaacagaaactcaacgatagaaaataccaggagacatataggaaagggtgtgcacttgtactacgtcgggggagaggtgtatgccgagtgcgtgagtgacagcagcatctttgtgcagagccggaactgcaactatcaacacggcttccacccagctaccgtctgcaagatccccagcggctgcagcctcaaggtcttcaacaaccagctcttcgctcagctcctggcccagtcagttcaccacggctttgaagtcgtgtatgaactgaccaagatgtgtactatccggatgagttttgttaagggttggggtgctgagtatcatcgccaggatgtcaccagcaccccctgctggattgagattcatcttcatgggccactgcagtggctggacaaagttctgactcagatgggctctccacataaccccatttcttcagtgtcttaacagtcatgtcttaagctgcatttccataggatagaggctattgcagggagtggcttgtatcatttcagatttgcaactgaagtttctaaaaacatgtgtaaatacatagaatgtatactgttcttattttttttaatcaccgtttgttttgtgctttctagttaacctgatgccagtacagtgcaattggaaaagcaggactttggtgcctgtgctataagcagcagattttgtgggaggaaacacttgagaggcgatattgtcaacagtatttgaagggtgttagcagaataaaagacagctttagtcagccgtgtcattataaagcatgttgtgtggcctcacagaaacattgaaactgtttatacagcaaaagtcaggtattagcagcactaaagcaaatatcactcagatgaaacaaagcagtgaaacccctacagtttaaatgatgtcacttttagtgctgttggcaagaaaaaaaaaacaacaaacttgtacaatgaattaatgagataggccatagaaactttatttctaaggttgacatacctatagctgggctcctgtgctcatattcagtggtacattttaaacaaactgtgatcggaaaagaaaaaaaactgtgaagccaaaagtcatgttccctcagtctaccactgtaaaaacagagtctaatatgggaaaataaatatgaaaatagcatgaaatgctgtttcccagattgcaagataagaccagaacttggtccaagagccagccacccagggagactcctgctttccacagaggagaccaggttcctgtcgtgctggttgttcgtgtcaggcagtcctgcaaactttgagtctgcgcagcgtgccagaatagcttgtgtttcagtcctgtgtcaagaagcaggtgaaaccaaaggttggagaaaagcatcacacgtcgacttacactttctcatttcccacgttccagtctcctgggaagggcactctttcgccacgttttcctgcctcttggcaaatattaactctttgcagatcactaaagcaacagtaaagactttgagaaaatctagacacattattggatcaatgagttatttaacctagtgtctagtgattatctaacctggaaataaattcccaaggaaagtgataataatttcataatcatctgcaatttctggggaacagtggtactgaataataagacatcttttaaaaatatacacaatattaaaaacctgttcttattttactttagatgagggaggaaaatcccccaaatttctaggtactttcatatatatacttgccatgcactaaacactgcattgcttggaaaaatatttcacaccctctttaaaaatgtacaatttaagatggcagttatgcttgtaacagacagcacttcagtaatccaagaagtttcttcatttatacattttatctcaactctttctagcattagtgcacatggtagtttttctaattaaattgtattcaaggtagaaatgatcatgtgagaaagatatatgattgagctactactgtcacctcttacagttactagtgttagctaatagaaactttcatatatacacatagaaaagaattattacattttacattgaaaaatgtaatatatggcccatgtagtgtatagaaaaatctgtagtttattggttcatcaactatgtattgtgcacctacctatgggtgtcaggtacaatgttaggtactgtagaatcaaatgtaaataagagacagtcccagccctcagggagccgagaacctaatagtgaatctgtttgtacagacatcttcatgtttcagaacttttaaaacaaaacaaaataatgtaatctatcatcttttgcttgaaagaatgtgattgatttcttatctctgttttgaaattatttccttactcttctgcaaagtcaggtaatggattccttgtataaatgctacttttcttccatgtctcaaagttgttttttttcctcccctttcttccctgttttccaataattctccatgtccccttttcttagaaaaggcattaatatggtgaatcttgtatgggaaccattccatgggagaacttcaacacagtttttgctccagagatcaaacatagctttcgtgatctctctaccagctatctaacttatcctctggtaatctttttttttttttttttttttttgagatggagtctcgctgtgtcaccaggccagagtgcagtggcgtgatcttggctcactgcaacctctgcctcccgggttcgagtgattctcctgcctcagcctcccaagtagttgggactacaggctaccacgcccagctaatttttatatttttagtagagacggggtttcaccatggtagccagaatggtctctatctcttgaccttgtgatccgcccgcctcagcctcccaaagtgctgggattacaggcgtgagccactgcgcccggcttcctctggtaatcttacacctttacagaattaatctaaactggtggctcataaatgacattaaaaacaaaaaaaaaatctggatgcagtggctcattcctatagtcccagcactttgggaggccaaggcgggaggatcatctgagcccaggagtttggggctgtagtgaactatgatcatacaacttcattctagcctgggtgacaaagtgacaccctgtctctaaacaaaaatcaagaaacaaaaaacttgtatttccctgcagctttgggaagccagaacacaatattgcagtgaatctgaattttctgtgacaaataaattattaaattggcacatatgatcatcaccagtcatgtctcatcaaaagcctttattatgatgcttgtacattttgaagaatttagaattaatgagaagttaaccctttagtcattgtaacacaatcatattttaatcagctttttcttttgctaccaagagtttcaaaaaataaatgcagtatttgatttcaggctgctaaatgggctcatttagcattcattccttgatgtagacattaaaaaaaaaactgaatagcattctttccaggataactaataaagcagacatgctaagcctataaatacatcagcactgcagcacacgtttaaggttgccacggacaaggatcacacaatagagaacactgtagtaacatttcggtctgctcacaagacccagaacattgatcagtttttgttgttggtttattatttttctgttaaaaaattgtgaaaagtttgttttagctagatgatattttaatagctgcgagtgctttggaactataaagatgtcactacttaacacatataccttatgttttgttttgttttgttttacactcagtataaatcaggagaagttagccaaccatctagcatttagaatcctcttttttattgtcttctaaggatatggatgttcccataacagcaacaaaacagcaacaaaaacatttcataaatatcacttgatagactgtaagcacctgcttaactttgtgtcccaaatatttagtgtgtatatatatatatatatatacacacacacacacatatatattcaacaaataaagcaaaatataacatgcatttcacattttgtctttccctgttacgattttaatagcagaactgtatgacaagtttaggtgatcctagcatatgttaaattcaaattaatgtaaaacagattaacaacaacaaagaaactgtctatttgagtgaagtcatgctttctattataataacttggcttcggttatccatcaaatgcacacttatactgttatctgattgtttataataaagaatactgtacttata

SEQ ID NO: 160189 - DNA, 1293 bp, Artificial Sequence
  derived and/or modified sequence
atgcacagcacaacacctatctcttccctatttagctttacttcaccagcagtaaagcggctccttggctggaagcaaggcgacgaggaggagaagtgggccgaaaaagccgtggactctttggttaagaagctgaagaagaaaaaaggtgctatggacgaactggagcgcgcactgtcttgtcctggccagccgtccaaatgcgtcacaatccccagatctctggatgggcggctgcaggtgtctcacaggaagggcctgccacatgtcatttattgtcgagtctggcggtggccggatctccaatcacaccatgagctgaaacccctcgaatgttgcgaatttcccttcgggtctaaacaaaaggaggtgtgcattaatccataccattatagacgcgtcgaaacacccgtcctgccaccagtattggtaccccgacattcagaatataatcctcagctgtctttgctggccaaattccgatctgccagcctgcacagcgagcctctgatgccacacaatgccacgtaccctgactcctttcaacagcctccatgtagcgcattaccaccttccccctctcacgccttttctcagtctccttgcaccgcatcctatccacactcacccggaagtccgagcgagcccgaatctccctatcagcatagcgactttcgcccagtttgttatgaggagcctcagcactggtgtagtgtggcctactatgagctgaacaaccgagtgggcgagacattccaggctagcagccggtccgtgctcattgacgggttcacggatccaagcaacaaccgcaatcggttctgcttgggacttctgtccaatgtgaaccggaattcaacaattgagaatacacgacgacacataggaaagggggtgcacctatactacgtgggcggagaagtttacgccgaatgcgtctcagatagctccattttcgttcagtctcgtaactgcaattatcaacatggattccaccctgccaccgtctgcaaaatccctagtggatgctcccttaaggtctttaacaatcagctttttgcccagcttcttgcacagagcgttcaccacggttttgaagtggtgtatgagctgactaaaatgtgcactattcgaatgtccttcgttaaaggctggggtgctgagtaccatagacaggatgtgacctccactccatgctggatcgagattcatctccatggccctctgcagtggcttgataaggtattaacccagatggggtcaccacataatcccatcagttccgtgtcttag

SEQ ID NO: 160190 - DNA, 1293 bp, Artificial Sequence
  derived and/or modified sequence
atgcacagcaccacccccatcagcagcctcttctccttcaccagccctgctgtgaagaggctgctgggctggaagcagggagatgaggaggagaagtgggccgagaaggctgtggacagcctggtgaagaagctgaagaagaagaagggggccatggatgagctggagcgggccctgagctgccccggccagcccagcaaatgtgtgaccatccccaggagcctggatggccgcctgcaggtgagccacaggaagggcctgccccacgtgatctactgccgggtgtggcgctggccagacctgcagagccaccacgagctgaagcccctggagtgctgtgagttccccttcggcagcaagcagaaggaggtgtgcatcaacccctaccactaccgccgggtggagacccctgtgctgccccctgtgctggtgcccaggcacagcgagtacaacccccagctgagcctgctggccaagttccgcagcgccagcctgcacagcgagcccctgatgccccacaatgccacctacccagacagcttccagcagcccccctgcagcgccctgccccccagccccagccacgccttcagccagagcccctgcacagccagctacccccacagccctggcagccccagcgagcctgagagcccctaccagcacagcgacttccggcctgtgtgctatgaggagccccagcactggtgcagcgtggcctactatgagctgaacaacagagtgggggagaccttccaggccagcagccgctctgtgctgattgatggcttcacagaccccagcaacaacagaaaccgcttctgcctgggcctgctgagcaatgtgaacagaaacagcaccatcgagaacacccggcggcacatcggcaaaggagtgcacctgtactacgtgggcggggaggtgtatgcagaatgtgtgtctgacagcagcatctttgtgcagagcaggaactgcaactaccagcacggcttccacccagccaccgtgtgcaagatccccagcggctgcagcctgaaggtgttcaacaaccagctgtttgcccagctgctggcccagagcgtgcaccacggctttgaggtggtgtatgagctgaccaagatgtgcaccatccgcatgagctttgtgaagggctggggcgctgagtaccaccggcaggatgtgaccagcaccccctgctggattgagatccacctgcacggccccctgcagtggctggacaaggtgctgacccagatgggcagcccccacaaccccatcagctctgtgtcctag

SEQ ID NO: 160191 - DNA, 1293 bp, Artificial Sequence
  derived and/or modified sequence
atgcacagcaccacccccatcagcagcctgttcagcttcaccagccctgccgtaaagcgtctcctaggttggaagcagggagatgaggaggaaaagtgggcagagaaggccgtcgattcgctggtgaagaaattgaaaaagaagaagggagctatggatgagcttgaacgcgctctgtcctgtcctgggcagccatccaaatgtgttactatccctcggtcacttgatggaaggctgcaagtctcccaccgcaaggggctaccacatgtgatttactgccgtgtttggcgctggcccgacttgcagtcccaccacgagctaaagccgcttgagtgttgcgagtttcccttcgggtcaaaacagaaagaggtgtgcattaacccttaccactacagacgcgttgagactcccgtgctgccgcctgtgctcgttccacggcattcagagtacaacccacaactgtcattgttggctaagttccgctctgctagccttcactcagaaccgctgatgcctcataatgccacctaccccgattccttccagcaacccccctgcagcgctctccccccctctccttcgcatgctttcagtcaatctccttgcacagcctcctacccccatagccccggcagcccctccgaacccgaaagcccctaccagcattccgactttaggccagtgtgctatgaagagcctcagcattggtgctctgtggcttactatgaactgaataaccgggtgggtgagaccttccaagcgtcctctaggtccgtactgattgacgggttcactgaccccagtaataatcggaatcgcttttgcctgggcctgttatcaaatgtaaaccgaaattcgaccatagaaaacactaggaggcacatcggaaagggggtgcacctgtattatgttgggggggaagtttatgccgagtgcgtgtccgactcctcaatcttcgtgcagtcccggaattgtaattatcagcatgggtttcaccccgccactgtttgcaagatccccagcgggtgttccctgaaggtatttaacaatcagctgtttgcacaacttctcgcgcaatccgtgcaccatggatttgaggtggtttatgagcttacgaaaatgtgcacaatacgaatgtcattcgtgaaggggtggggagcggaatatcaccggcaggatgtcacttcgaccccttgctggatcgagatacatctgcacgggcctctgcagtggctcgataaggtactgactcaaatgggcagcccccacaacccgatctcctccgtgtcctag

SEQ ID NO: 160192 - DNA, 1293 bp, Artificial Sequence
  derived and/or modified sequence
atgcactcaacaaccccaatcagctctctcttctcttttacatcgcccgcagttaagagactgctaggctggaaacagggcgatgaagaagaaaagtgggccgagaaggctgtggattcgctcgtgaaaaagcttaaaaagaagaaaggggctatggatgaattggagagagcgctcagttgccctgggcagccaagtaaatgtgtgaccatcccgagaagcctggacggtaggctgcaggttagtcacagaaaggggttaccccacgtgatctactgccgcgtttggcgatggccagaccttcagtcacaccacgagctcaagcccctggagtgttgcgaattccccttcggctcgaagcaaaaggaggtttgtattaacccttaccactacaggagggtggagactccagtccttccgcctgtgctggtgccaagacatagcgagtacaatcctcaattgtccctcctggctaaattccgctccgcctcactgcattcagaaccactcatgccacacaatgctacctatcctgactcattccagcagcctccctgttctgctctgcctcccagccccagccacgcgttttcacagagtccgtgcaccgccagctaccctcacagcccaggttcaccctcagaacctgagagtccataccagcacagcgacttccgacctgtgtgctacgaagagccgcagcattggtgcagcgtcgcatactatgagttgaataacagagtgggagagacttttcaggcctctagcagatccgtgcttatcgatggctttacagatcctagtaacaaccgcaataggttttgtttgggtctacttagcaacgtgaatagaaattcgaccatcgagaacactagaaggcatattggtaagggcgttcatttgtactatgttggtggggaggtctacgccgagtgcgtctctgactctagtatcttcgtgcagtctcggaattgtaattaccagcatggctttcatccagccaccgtctgcaagatcccttcaggttgcagcctgaaagtgttcaataatcagctgttcgcccagctcttggcccagagcgtgcatcacggctttgaagtagtctatgaactcacaaagatgtgcactattcggatgtcctttgtgaagggctggggggcagaataccatagacaagacgtgacatcaacaccctgctggatcgagatccatctccatgggcctctgcagtggcttgataaggtacttactcaaatgggaagtccgcacaaccctataagcagtgtatcttag

SEQ ID NO: 160193 - DNA, 5447 bp, Artificial Sequence
  derived and/or modified sequence
agtctgactgacgccggctggggccgccgccgccgccgccgccgccgccgctgctgcagccgctgtctcggtccccgccgccgccgccgggccctgcaggcgctgggcgcgcgcagccaggcaagttggccaccctgttcaagggcttaggagaaagtcaacacacttcgcaacttgaattggtcccagctgctcccagaagaacgggcgggttggtccctatgccacccctggagagctactcgccgcccactttgccgtgaagggctgtgcggttcccgtgcgcgccggagcctgctgtggcctcttatgcactccaccacccccatcagctccctcttctccttcaccagccccgcagtgaagagactgctaggctggaagcaaggagatgaagaggaaaagtgggcagagaaggcagtggactctctagtgaagaagttaaagaagaagaagggagccatggacgagctggagagggctctcagctgcccggggcagcccagcaaatgcgtcacgattccccgctccctggacgggcggctgcaggtgtcccaccgcaagggcctgccccatgtgatttactgtcgcgtgtggcgctggccggatctgcagtcccaccacgagctgaagccgctggagtgctgtgagttcccatttggctccaagcagaaagaagtgtgcattaacccttaccactaccgccgggtggagactccagtactgcctcctgtgctcgtgccaagacacagtgaatataacccccagctcagcctcctggccaagttccgcagcgcctccctgcacagtgagccactcatgccacacaacgccacctatcctgactctttccagcagcctccgtgctctgcactccctccctcacccagccacgcgttctcccagtccccgtgcacggccagctaccctcactccccaggaagtccttctgagccagagagtccctatcaacactcagactttcgaccagtttgttacgaggagccccagcactggtgctcggtcgcctactatgaactgaacaaccgagttggggagacattccaggcttcctcccgaagtgtgctcatagatgggttcaccgacccttcaaataacaggaacagattctgtcttggacttctttctaatgtaaacagaaactcaacgatagaaaataccaggagacatataggaaagggtgtgcacttgtactacgtcgggggagaggtgtatgccgagtgcgtgagtgacagcagcatctttgtgcagagccggaactgcaactatcaacacggcttccacccagctaccgtctgcaagatccccagcggctgcagcctcaaggtcttcaacaaccagctcttcgctcagctcctggcccagtcagttcaccacggctttgaagtcgtgtatgaactgaccaagatgtgtactatccggatgagttttgttaagggttggggtgctgagtatcatcgccaggatgtcaccagcaccccctgctggattgagattcatcttcatgggccactgcagtggctggacaaagttctgactcagatgggctctccacataaccccatttcttcagtgtcttaacagtcatgtcttaagctgcatttccataggatagaggctattgcagggagtggcttgtatcatttcagatttgcaactgaagtttctaaaaacatgtgtaaatacatagaatgtatactgttcttattttttttaatcaccgtttgttttgtgctttctagttaacctgatgccagtacagtgcaattggaaaagcaggactttggtgcctgtgctataagcagcagattttgtgggaggaaacacttgagaggcgatattgtcaacagtatttgaagggtgttagcagaataaaagacagctttagtcagccgtgtcattataaagcatgttgtgtggcctcacagaaacattgaaactgtttatacagcaaaagtcaggtattagcagcactaaagcaaatatcactcagatgaaacaaagcagtgaaacccctacagtttaaatgatgtcacttttagtgctgttggcaagaaaaaaaaaacaacaaacttgtacaatgaattaatgagataggccatagaaactttatttctaaggttgacatacctatagctgggctcctgtgctcatattcagtggtacattttaaacaaactgtgatcggaaaagaaaaaaaactgtgaagccaaaagtcatgttccctcagtctaccactgtaaaaacagagtctaatatgggaaaataaatatgaaaatagcatgaaatgctgtttcccagattgcaagataagaccagaacttggtccaagagccagccacccagggagactcctgctttccacagaggagaccaggttcctgtcgtgctggttgttcgtgtcaggcagtcctgcaaactttgagtctgcgcagcgtgccagaatagcttgtgtttcagtcctgtgtcaagaagcaggtgaaaccaaaggttggagaaaagcatcacacgtcgacttacactttctcatttcccacgttccagtctcctgggaagggcactctttcgccacgttttcctgcctcttggcaaatattaactctttgcagatcactaaagcaacagtaaagactttgagaaaatctagacacattattggatcaatgagttatttaacctagtgtctagtgattatctaacctggaaataaattcccaaggaaagtgataataatttcataatcatctgcaatttctggggaacagtggtactgaataataagacatcttttaaaaatatacacaatattaaaaacctgttcttattttactttagatgagggaggaaaatcccccaaatttctaggtactttcatatatatacttgccatgcactaaacactgcattgcttggaaaaatatttcacaccctctttaaaaatgtacaatttaagatggcagttatgcttgtaacagacagcacttcagtaatccaagaagtttcttcatttatacattttatctcaactctttctagcattagtgcacatggtagtttttctaattaaattgtattcaaggtagaaatgatcatgtgagaaagatatatgattgagctactactgtcacctcttacagttactagtgttagctaatagaaactttcatatatacacatagaaaagaattattacattttacattgaaaaatgtaatatatggcccatgtagtgtatagaaaaatctgtagtttattggttcatcaactatgtattgtgcacctacctatgggtgtcaggtacaatgttaggtactgtagaatcaaatgtaaataagagacagtcccagccctcagggagccgagaacctaatagtgaatctgtttgtacagacatcttcatgtttcagaacttttaaaacaaaacaaaataatgtaatctatcatcttttgcttgaaagaatgtgattgatttcttatctctgttttgaaattatttccttactcttctgcaaagtcaggtaatggattccttgtataaatgctacttttcttccatgtctcaaagttgttttttttcctcccctttcttccctgttttccaataattctccatgtccccttttcttagaaaaggcattaatatggtgaatcttgtatgggaaccattccatgggagaacttcaacacagtttttgctccagagatcaaacatagctttcgtgatctctctaccagctatctaacttatcctctggtaatctttttttttttttttttttttttgagatggagtctcgctgtgtcaccaggccagagtgcagtggcgtgatcttggctcactgcaacctctgcctcccgggttcgagtgattctcctgcctcagcctcccaagtagttgggactacaggctaccacgcccagctaatttttatatttttagtagagacggggtttcaccatggtagccagaatggtctctatctcttgaccttgtgatccgcccgcctcagcctcccaaagtgctgggattacaggcgtgagccactgcgcccggcttcctctggtaatcttacacctttacagaattaatctaaactggtggctcataaatgacattaaaaacaaaaaaaaaatctggatgcagtggctcattcctatagtcccagcactttgggaggccaaggcgggaggatcatctgagcccaggagtttggggctgtagtgaactatgatcatacaacttcattctagcctgggtgacaaagtgacaccctgtctctaaacaaaaatcaagaaacaaaaaacttgtatttccctgcagctttgggaagccagaacacaatattgcagtgaatctgaattttctgtgacaaataaattattaaattggcacatatgatcatcaccagtcatgtctcatcaaaagcctttattatgatgcttgtacattttgaagaatttagaattaatgagaagttaaccctttagtcattgtaacacaatcatattttaatcagctttttcttttgctaccaagagtttcaaaaaataaatgcagtatttgatttcaggctgctaaatgggctcatttagcattcattccttgatgtagacattaaaaaaaaaactgaatagcattctttccaggataactaataaagcagacatgctaagcctataaatacatcagcactgcagcacacgtttaaggttgccacggacaaggatcacacaatagagaacactgtagtaacatttcggtctgctcacaagacccagaacattgatcagtttttgttgttggtttattatttttctgttaaaaaattgtgaaaagtttgttttagctagatgatattttaatagctgcgagtgctttggaactataaagatgtcactacttaacacatataccttatgttttgttttgttttgttttacactcagtataaatcaggagaagttagccaaccatctagcatttagaatcctcttttttattgtcttctaaggatatggatgttcccataacagcaacaaaacagcaacaaaaacatttcataaatatcacttgatagactgtaagcacctgcttaactttgtgtcccaaatatttagtgtgtatatatatatatatatatacacacacacacacatatatattcaacaaataaagcaaaatataacatgcatttcacattttgtctttccctgttacgattttaatagcagaactgtatgacaagtttaggtgatcctagcatatgttaaattcaaattaatgtaaaacagattaacaacaacaaagaaactgtctatttgagtgaagtcatgctttctattataataacttggcttcggttatccatcaaatgcacacttatactgttatctgattgtttataataaagaatactgtacttata

SEQ ID NO: 160194 - DNA, 1293 bp, Artificial Sequence
  derived and/or modified sequence
atgcacagcaccacccccatcagcagcctgttcagcttcaccagccccgccgtgaagagactgctgggctggaagcagggcgacgaggaggagaagtgggccgagaaggccgtggacagcctggtgaagaagctgaagaagaagaagggcgccatggacgagctggagagagccctgagctgccccggccagcccagcaagtgcgtgaccatccccagaagcctggacggcagactgcaggtgagccacagaaagggcctgccccacgtgatctactgcagagtgtggagatggcccgacctgcagagccaccacgagctgaagcccctggagtgctgcgagttccccttcggcagcaagcagaaggaggtgtgcatcaacccctaccactacagaagagtggagacccccgtgctgccccccgtgctggtgcccagacacagcgagtacaacccccagctgagcctgctggccaagttcagaagcgccagcctgcacagcgagcccctgatgccccacaacgccacctaccccgacagcttccagcagcccccctgcagcgccctgccccccagccccagccacgccttcagccagagcccctgcaccgccagctacccccacagccccggcagccccagcgagcccgagagcccctaccagcacagcgacttcagacccgtgtgctacgaggagccccagcactggtgcagcgtggcctactacgagctgaacaacagagtgggcgagaccttccaggccagcagcagaagcgtgctgatcgacggcttcaccgaccccagcaacaacagaaacagattctgcctgggcctgctgagcaacgtgaacagaaacagcaccatcgagaacaccagaagacacatcggcaagggcgtgcacctgtactacgtgggcggcgaggtgtacgccgagtgcgtgagcgacagcagcatcttcgtgcagagcagaaactgcaactaccagcacggcttccaccccgccaccgtgtgcaagatccccagcggctgcagcctgaaggtgttcaacaaccagctgttcgcccagctgctggcccagagcgtgcaccacggcttcgaggtggtgtacgagctgaccaagatgtgcaccatcagaatgagcttcgtgaagggctggggcgccgagtaccacagacaggacgtgaccagcaccccctgctggatcgagatccacctgcacggccccctgcagtggctggacaaggtgctgacccagatgggcagcccccacaaccccatcagcagcgtgagctag

SEQ ID NO: 160195 - protein, 623 aa, Artificial Sequence
  derived and/or modified sequence
MNRYTTMRQLGDGTYGSVLMGKSNESGELVAIKRMKRKFYSWDECMNLREVKSLKKLNHANVIKLKEVIRENDHLYFIFEYMKENLYQLMKDRNKLFPESVIRNIMYQILQGLAFIHKHGFFHRDMKPENLLCMGPELVKIADFGLARELRSQPPYTDYVSTRWYRAPEVLLRSSVYSSPIDVWAVGSIMAELYMLRPLFPGTSEVDEIFKICQVLGTPKKSDWPEGYQLASSMNFRFPQCVPINLKTLIPNASNEAIQLMTEMLNWDPKKRPTASQALKHPYFQVGQVLGPSSNHLESKQSLNKQLQPLESKPSLVEVEPKPLPDIIDQVVGQPQPKTSQQPLQPIQPPQNLSVQQPPKQQSQEKPPQTLFPSIVKNMPTKPNGTLSHKSGRRRWGQTIFKSGDSWEELEDYDFGASHSKKPSMGVFKEKRKKDSPFRLPEPVPSGSNHSTGENKSLPAVTSLKSDSELSTAPTSKQYYLKQSRYLPGVNPKKVSLIASGKEINPHTWSNQLFPKSLGPVGAELAFKRSNAGNLGSYATYNQSGYIPSFLKKEVQSAGQRIHLAPLNATASEYTWNTKTGRGQFSGRTYNPTAKNLNIVNRAQPIPSVHGRTDWVAKYGGHR

SEQ ID NO: 160196 - protein, 288 aa, Artificial Sequence
  derived and/or modified sequence
MNRYTTMRQLGDGTYGSVLMGKSNESGELVAIKRMKRKFYSWDECMNLREVKSLKKLNHANVIKLKEVIRENDHLYFIFEYMKENLYQLMKDRNKLFPESVIRNIMYQILQGLAFIHKHGFFHRDMKPENLLCMGPELVKIADFGLARELRSQPPYTDYVSTRWYRAPEVLLRSSVYSSPIDVWAVGSIMAELYMLRPLFPGTSEVDEIFKICQVLGTPKKSDWPEGYQLASSMNFRFPQCVPINLKTLIPNASNEAIQLMTEMLNWDPKKRPTASQPCFLVEVERPN

SEQ ID NO: 160197 - protein, 457 aa, Artificial Sequence
  derived and/or modified sequence
MNRYTTMRQLGDGTYGSVLMGKSNESGELVAIKRMKRKFYSWDECMNLREVKSLKKLNHANVIKLKEVIRENDHLYFIFEYMKENLYQLMKDRNKLFPESVIRNIMYQILQGLAFIHKHGFFHRDMKPENLLCMGPELVKIADFGLARELRSQPPYTDYVSTRWYRAPEVLLRSSVYSSPIDVWAVGSIMAELYMLRPLFPGTSEVDEIFKICQVLGTPKKSDWPEGYQLASSMNFRFPQCVPINLKTLIPNASNEAIQLMTEMLNWDPKKRPTASQALKHPYFQVGQVLGPSSNHLESKQSLNKQLQPLESKPSLVEVEPKPLPDIIDQVVGQPQPKTSQQPLQPIQPPQNLSVQQPPKQQSQEKPPQTLFPSIVKNMPTKPNGTLSHKSGRRRWGQTIFKSGDSWEELEDYDFGASHSKKPSMGVFKEKRKKDSPFRQQVKMAVISLSAHQFPTL

SEQ ID NO: 160198 - DNA, 1872 bp, Artificial Sequence
  derived and/or modified sequence
atgaacaggtacacgactatgcgtcagctgggagatgggacatatggatctgtcctgatgggaaagtccaacgaatccggggagcttgtagccatcaagcggatgaagcgaaagttctattcttgggacgaatgtatgaacttacgggaggtgaagtccctgaaaaaactgaaccacgcaaatgtgataaaattaaaggaagttatccgcgagaacgatcatctttactttatttttgagtatatgaaagagaatctgtaccaactgatgaaagaccgaaacaaactttttcccgagtccgtaatcaggaatataatgtatcagatactgcaaggcttagccttcatccacaagcatgggttctttcatcgggacatgaagcccgagaacttactgtgcatggggcccgaactcgtcaagatagcagacttcggcttagctcgagaattgcgatcccagcccccatacaccgactacgtgagcacgcgctggtatagagcccctgaagttctgctgaggtcttcagtgtactcatccccaattgatgtctgggccgtggggtccataatggcagagctgtacatgctgcgcccgttatttcccgggacctcagaagtagatgagatcttcaagatatgtcaggtccttggaacaccaaagaagtcagattggcccgaaggctatcagctcgccagtagtatgaacttcaggttcccccaatgtgtgccgatcaacctaaagacactgatacctaatgcaagtaatgaagcaattcaacttatgacggaaatgctgaattgggatcccaagaaaagacctaccgcctctcaggcgcttaagcatccatactttcaggtcggacaggtgctaggcccaagtagcaaccatttagaatctaaacagagcctgaacaaacagctccagcctttggaaagtaagccgagtctggtcgaagtagagcccaagcctctacccgacattattgatcaagtggtggggcagccccagcccaaaacgagtcagcagccactgcagcccattcagcccccccaaaacttatcggtgcaacagccgccaaaacaacagtcccaggaaaagccccctcagaccctcttcccatctatcgtcaagaacatgccaaccaaacccaacggaacgctgagtcacaaaagcggacgccgcagatggggtcagactatattcaaatccggagatagttgggaggaacttgaagactacgactttggggcaagccatagcaagaaaccaagcatgggtgtcttcaaggaaaaacggaagaaagactcgcctttcagactccctgaacctgtcccatctggttcgaaccatagcaccggagaaaacaaaagtcttcctgcggtcaccagcctcaagtctgattccgagctatccactgcccctacgagtaagcagtattatctgaagcaaagtagatacctccccggggttaaccctaagaaagtgagcctcattgctagcggaaaagaaataaacccccatacttggagcaatcagctatttccgaaatctctgggtcccgtgggtgccgagttggcatttaaacgatctaatgctggtaatctggggtcatatgcaacatacaaccagtccggctacatccctagcttcctgaagaaggaggttcagtctgcgggccagaggatccacttagctcccttgaacgcgaccgccagcgaatacacttggaacacgaagacgggccggggacagtttagtggacgtacttacaatccaaccgctaaaaatcttaacatagtgaacagagctcaacctataccatcagtccacggacgaaccgactgggtggctaaatacggaggacatcgatag

SEQ ID NO: 160199 - DNA, 1872 bp, Artificial Sequence
  derived and/or modified sequence
atgaacaggtatacgacaatgaggcagcttggcgacgggacttacggtagtgtgctgatgggtaagagcaatgaaagtggcgagttagttgccataaagcgcatgaaacgaaaattctattcttgggacgaatgtatgaatctcagagaagtgaagtctctgaagaaactgaaccatgccaatgttattaaactgaaagaagttatccgggaaaatgatcatctatacttcatcttcgagtacatgaaagagaacctctaccagctgatgaaggaccgtaataaactgtttcccgagagtgtgatccgtaatatcatgtatcaaattctccagggcctggcctttattcacaagcacgggttcttccatcgcgatatgaaacccgagaatctgctgtgcatggggccagaactggtaaagatcgcagactttgggctggcacgagagttgagatcacaaccaccatacactgactacgtgtcaactaggtggtacagagcacctgaagtactgttgcgatctagcgtctactcctcacccatagatgtgtgggctgttggatccattatggcagagctgtatatgcttaggcccctgttccctggcaccagcgaagttgatgaaattttcaaaatctgtcaggtattggggactccaaagaaatcagactggcctgaaggctaccagctggcatcgtctatgaacttccgtttcccccagtgtgtcccgattaatctcaaaacccttatcccaaacgcttcaaacgaagctattcaactaatgaccgaaatgctgaactgggatcctaagaaacgccccacagcctcccaggccctgaaacacccttacttccaggttggccaggtcctcgggccttcctccaaccacctagagtcaaagcagtccctgaacaaacagctgcagcccctggaatccaagccctccttagtggaggtggaacctaagcctctgcctgacatcatcgaccaggtggtgggacaacctcagcctaagacttcacagcagcctcttcagcccattcagccgccacagaacctctccgtccagcagccccctaagcagcaatctcaggaaaaaccgcctcagaccctcttcccttccatcgtgaaaaatatgcctactaaaccaaacggcaccttgagccacaagtcaggccggaggcgctggggtcagacaattttcaaatctggcgattcctgggaagagctcgaggattacgatttcggcgcctcacatagcaagaagccctctatgggagtatttaaggagaaaagaaagaaagattcacctttccgactgcctgagcctgtgccctccggatcaaatcactcgacaggggaaaacaaatccttgcccgctgtgacctccctcaagtcagatagtgagcttagtaccgctccaacatctaagcagtactatctaaagcagtcccggtacctgcccggcgtaaaccctaagaaggtgagcctcattgcgtccggcaaggaaattaaccctcacacatggagtaatcagctctttcctaaaagtctgggcccagtgggagcagagctggcttttaagcgatcgaatgccggcaatttaggctcctatgcaacttataaccagtctgggtacatcccatccttcctcaagaaagaagtccagtccgccggccagaggatccatctggctcctcttaacgccacagcctctgagtacacctggaacacaaagaccggtcgggggcaatttagcggcagaacttataacccaactgctaagaacttgaatatagtgaatcgggcccaacccataccctccgtccatggccgcaccgactgggtagccaagtacggcggacaccggtag

SEQ ID NO: 160200 - DNA, 1872 bp, Artificial Sequence
  derived and/or modified sequence
atgaaccgctacaccaccatgaggcagctgggagatggcacctacggctctgtgctgatgggcaagagcaatgaaagtggagagctggtggccatcaagaggatgaagaggaagttctacagctgggatgagtgcatgaacctgcgggaggtgaagagcctgaagaagctgaaccacgccaacgtcatcaagctgaaggaggtgatcagagaaaatgaccacctgtacttcatctttgagtacatgaaggagaacctgtaccagctgatgaaggacaggaacaagctgtttcctgagagcgtcatccggaacatcatgtaccagatcctgcagggcctggccttcatccacaagcacggcttcttccaccgggacatgaagccagagaacctgctgtgcatgggccctgagctggtgaagattgctgactttggcctggcccgggagctgcggagccagcccccctacacagattatgtgtccacccgctggtaccgggcccctgaggtgctgctgcggagctctgtgtacagcagccccattgatgtgtgggccgtgggcagcatcatggccgagctgtacatgctgcggcccctcttccctggcaccagcgaggtggatgagatcttcaagatctgccaggtgctgggcacccccaagaagagtgactggccagagggctaccagctggccagctccatgaacttccgcttcccccagtgtgtgcccatcaacctgaagaccctcatccccaatgccagcaatgaggccatccagctgatgacagagatgctgaactgggaccccaagaagaggcccacagccagccaggccctgaagcacccctacttccaggtgggccaggtgctgggccccagcagcaaccacctggagagcaagcagagcctgaacaagcagctgcagcccctggagagcaagcccagcctggtggaggtggagcccaagcccctgcctgacatcatcgaccaggtggtgggccagccccagcccaagaccagccagcagcccctgcagcccatccagcccccccagaacctgtctgtgcagcagccccccaagcagcagagccaggagaagccaccccagaccctcttccccagcatcgtgaagaacatgcccaccaagcccaacggcaccctgagccacaagtctggaagaagacgctggggccagaccatcttcaagagcggggacagctgggaggagctggaggactatgactttggagccagccacagcaagaagcccagcatgggcgtcttcaaggagaagaggaagaaggacagccccttccggctgcctgagcctgtgcccagcggcagcaaccacagcactggagagaacaagagcctgcctgctgtgaccagcctgaagagtgacagcgagctgagcacagcccccaccagcaagcagtactacctgaagcagagccgctacctgcccggggtgaaccccaagaaggtgtccctcatcgccagcggcaaggagatcaacccccacacctggagcaaccagctgttccccaagagcctgggccctgtgggcgctgagctggccttcaagaggagcaatgccggcaacctgggcagctatgccacctacaaccagagcggctacatccccagcttcctgaagaaggaggtgcagagcgctggccagaggatccacctggcccccctgaatgccacagccagcgagtacacctggaacaccaagacaggccggggccagttcagcggccgcacctacaaccccacagccaagaacctgaacatcgtgaacagagcccagcccatccccagcgtgcacggccgcacagactgggtggccaagtatggaggccacaggtag

SEQ ID NO: 160201 - DNA, 3984 bp, Artificial Sequence
  derived and/or modified sequence
gcaggcgcggacaggtaatccccagcgggctgcagggccaccaccctctgtccgacccagccggagcccgacctgcgaggctggccgggcatgtcccctcggcgccctgtgctaccagggccaatctccgcccggagaccggtccctgacgccgggtgtttataagaatggaagtgttgtttccttgcccgattccttcatgctatatctcatgaacctctgtaatcttgggggagagactatatttaatgatgacaaacctgtcaccagtgtagcaacaacagtgtgaggacaaaagcaaataaaaattaagaagcgttcaaatttatattcaacaaggaagtcatttcaatcaacaacttctgctgcattatttttccaagatgaaccgatacacaaccatgagacagttgggggacggcacgtatgggagtgtgcttatgggcaagagtaatgaatccggggagctggtggccatcaaaaggatgaagagaaagttctattcttgggatgaatgcatgaacttgagagaagttaagtctctgaagaaacttaatcatgccaatgttattaaattgaaagaagttatcagagaaaatgaccatctttattttatatttgaatatatgaaagaaaacctctatcaattaatgaaagacagaaacaagttgttccctgaatcagtcatcagaaatattatgtatcaaatattgcaagggctggcttttatccataaacatggcttttttcatagggacatgaaaccagaaaacttgctttgtatgggtccagagcttgtgaaaattgctgattttggacttgcaagagaattaaggtcacagccaccatacactgattatgtatctaccagatggtatcgtgcccctgaagttttactgagatcttcagtttatagttctcccattgatgtgtgggctgttggaagtatcatggctgaactctatatgttaaggccacttttcccagggacaagtgaggtcgatgaaatctttaaaatttgccaagttttagggactcccaaaaaaagtgactggccagaaggataccagctggcatcctctatgaacttccgttttccccagtgtgttcctataaacttaaaaactcttattcccaatgccagtaatgaagctattcagctcatgaccgaaatgttgaattgggatccaaagaaacgaccgacagcaagccaggcattgaaacacccatattttcaagttggtcaggtattaggcccttcgtcaaatcatctggaatcaaaacagtctttaaataagcagctgcaaccattagaatcaaagccatctttagttgaggtagagcctaagcctctgccggatataatcgatcaggttgttggacaaccccagccaaaaactagccagcagccactgcagcccattcagccgccacagaacctgagcgtccagcaacctccaaagcaacagagtcaggagaaaccgccacaaacgctattcccgagcatcgtcaaaaacatgccaactaagccaaatggcacactgagtcataaaagtggtaggaggcgttggggtcagactatcttcaagtctggagatagctgggaagagttggaggactatgatttcggagcctcccattccaagaagccaagcatgggtgtttttaaagaaaaaaggaaaaaagattctccatttcggcttccagagccagtaccctcaggctccaaccactcgacaggggaaaacaagagcttacctgctgttacttccctaaaatctgattccgaattgtcaactgctccaacctctaaacagtactacttgaaacaatcaagatatcttccaggtgtgaatcccaagaaggtgtccttgatagccagtggaaaggaaataaacccccacacttggagcaaccagttattccccaagtcactgggacccgttggggcagaacttgctttcaaaaggagcaatgcaggaaatcttggaagttatgctacttacaatcagtcaggatatattccttcctttctcaaaaaagaagtgcagtcagctggccagaggatccacttagcacctctcaatgcaacggcttcagaatatacctggaacacaaaaactggtcgggggcagttttcaggacgtacttataatcctacagcaaaaaacctaaatattgtgaaccgtgcacagcccattccctcagtgcatgggaggacagactgggtggccaagtatggaggccaccggtaggagtctatggtgtgaaaccctacagcattgctccgtagagtacgtgcaagttccttgaccctgggaaatgtctacaaatgtctatttctactgagttctggaagaaatatgcaaaagtgggtacttggaagggcaaaaatcatcccctattttacttatttccaagaaatgcattttcttagcatcattgcccacagtgttgatatatgggtaggatgttacaaagtattgaataaactatttgccaaagtatgaagtatttgatctacaatttaataaatagtaaatccaataagaacccttaaaaaaaaacaacttccagaaaatgtttagagtgttttagttttcatttgttgtatgtgcccaaatggtttagtagttcttcactttgctgtggttggcttaagaggtttgtcttttgtttttgtacagcagttgggccaacctttgctggctgtcagctgtggttcttatttgactaaggctctgcgctgccattttgtcaatgacagaaagattgcaattatttgtttttctactttgaagctatgggagcgatggtaatttcaatcttgagcaggatatctttttttttttttttgaggcgatgtttcactcttgtgtccaggctggagtgcagtggcactatcttggcttactgcaacctccacctcctgggttcaagtgattctcctgcctcagcctcccgagtagctgggattagaggcgtgtgccaccatgcctggctaatttttgtagtattagtagagacagggtttcaccatgttggtcaggctcaggctggtctcaaactcctgacctcaggtgatccacctgcctcggcctcccaaagtgcagggcttacaggtgtgagccacagtgcccagctttttttttttttttttagaaataaatttatctttaacatagagaatatcaaagttatgccacttgattttagtggacggcttgtgttttgatcttgaccagtacagttcccatgaattcaaggtgacaatcaagcccaatggcttgatgacttcaatagtaaccaagtcaaggttctcttggctggacatcattaagaaagttctggaaactgtgtttgtttgatgctggttcattggacttttcaaattgttttgtttctgtgtccctaccagacacaaagatgaagtgtgccagctggttcccccaagccagctcatgctgctgaccactgactcagctctgaccttcacatttgctctgaagcaagtgcgttcagctgctggggcagtgatatcacatagtacatatattatttccttagtttatttccaaactggtattttaaatagacacttcgaactttgggctactctgtttaaatctgccactttctggactggaccttagtactgtaaattctttttaaagaataataatgttaccaactgctgagatttttatgtattttgtgactttgtaacaactgctattgtaataagtgtcatcttgtgggcattatacaaaggcatattataaaataataatgatatttttgtatagaagagtcaactgttcagatgtaagatgttgaaaaatgttaaaatctaaagagtaatttatcctagtggtaatggttatatgtatttgtacagtttaaattaatgtctcaaagctgtgcagtcttttgttactgggacacttttaaactctgaataggcattaaaaaaaatatggctaa

SEQ ID NO: 160202 - DNA, 3830 bp, Artificial Sequence
  derived and/or modified sequence
ggtgtttataagaatggaagtgttgtttccttgcccgattccttcatgctatatctcatgaacctctgtaatcttgggggagagactatatttaatgatgacaaacctgtcaccagtgtagcaacaacagtgtgaggacaaaagcaaataaaaattaagaagcgttcaaatttatattcaacaaggaagtcatttcaatcaacaacttctgctgcattatttttccaagatgaaccgatacacaaccatgagacagttgggggacggcacgtatgggagtgtgcttatgggcaagagtaatgaatccggggagctggtggccatcaaaaggatgaagagaaagttctattcttgggatgaatgcatgaacttgagagaagttaagtctctgaagaaacttaatcatgccaatgttattaaattgaaagaagttatcagagaaaatgaccatctttattttatatttgaatatatgaaagaaaacctctatcaattaatgaaagacagaaacaagttgttccctgaatcagtcatcagaaatattatgtatcaaatattgcaagggctggcttttatccataaacatggcttttttcatagggacatgaaaccagaaaacttgctttgtatgggtccagagcttgtgaaaattgctgattttggacttgcaagagaattaaggtcacagccaccatacactgattatgtatctaccagatggtatcgtgcccctgaagttttactgagatcttcagtttatagttctcccattgatgtgtgggctgttggaagtatcatggctgaactctatatgttaaggccacttttcccagggacaagtgaggtcgatgaaatctttaaaatttgccaagttttagggactcccaaaaaaagtgactggccagaaggataccagctggcatcctctatgaacttccgttttccccagtgtgttcctataaacttaaaaactcttattcccaatgccagtaatgaagctattcagctcatgaccgaaatgttgaattgggatccaaagaaacgaccgacagcaagccaggcattgaaacacccatattttcaagttggtcaggtattaggcccttcgtcaaatcatctggaatcaaaacagtctttaaataagcagctgcaaccattagaatcaaagccatctttagttgaggtagagcctaagcctctgccggatataatcgatcaggttgttggacaaccccagccaaaaactagccagcagccactgcagcccattcagccgccacagaacctgagcgtccagcaacctccaaagcaacagagtcaggagaaaccgccacaaacgctattcccgagcatcgtcaaaaacatgccaactaagccaaatggcacactgagtcataaaagtggtaggaggcgttggggtcagactatcttcaagtctggagatagctgggaagagttggaggactatgatttcggagcctcccattccaagaagccaagcatgggtgtttttaaagaaaaaaggaaaaaagattctccatttcggcttccagagccagtaccctcaggctccaaccactcgacaggggaaaacaagagcttacctgctgttacttccctaaaatctgattccgaattgtcaactgctccaacctctaaacagtactacttgaaacaatcaagatatcttccaggtgtgaatcccaagaaggtgtccttgatagccagtggaaaggaaataaacccccacacttggagcaaccagttattccccaagtcactgggacccgttggggcagaacttgctttcaaaaggagcaatgcaggaaatcttggaagttatgctacttacaatcagtcaggatatattccttcctttctcaaaaaagaagtgcagtcagctggccagaggatccacttagcacctctcaatgcaacggcttcagaatatacctggaacacaaaaactggtcgggggcagttttcaggacgtacttataatcctacagcaaaaaacctaaatattgtgaaccgtgcacagcccattccctcagtgcatgggaggacagactgggtggccaagtatggaggccaccggtaggagtctatggtgtgaaaccctacagcattgctccgtagagtacgtgcaagttccttgaccctgggaaatgtctacaaatgtctatttctactgagttctggaagaaatatgcaaaagtgggtacttggaagggcaaaaatcatcccctattttacttatttccaagaaatgcattttcttagcatcattgcccacagtgttgatatatgggtaggatgttacaaagtattgaataaactatttgccaaagtatgaagtatttgatctacaatttaataaatagtaaatccaataagaacccttaaaaaaaaacaacttccagaaaatgtttagagtgttttagttttcatttgttgtatgtgcccaaatggtttagtagttcttcactttgctgtggttggcttaagaggtttgtcttttgtttttgtacagcagttgggccaacctttgctggctgtcagctgtggttcttatttgactaaggctctgcgctgccattttgtcaatgacagaaagattgcaattatttgtttttctactttgaagctatgggagcgatggtaatttcaatcttgagcaggatatctttttttttttttttgaggcgatgtttcactcttgtgtccaggctggagtgcagtggcactatcttggcttactgcaacctccacctcctgggttcaagtgattctcctgcctcagcctcccgagtagctgggattagaggcgtgtgccaccatgcctggctaatttttgtagtattagtagagacagggtttcaccatgttggtcaggctcaggctggtctcaaactcctgacctcaggtgatccacctgcctcggcctcccaaagtgcagggcttacaggtgtgagccacagtgcccagctttttttttttttttttagaaataaatttatctttaacatagagaatatcaaagttatgccacttgattttagtggacggcttgtgttttgatcttgaccagtacagttcccatgaattcaaggtgacaatcaagcccaatggcttgatgacttcaatagtaaccaagtcaaggttctcttggctggacatcattaagaaagttctggaaactgtgtttgtttgatgctggttcattggacttttcaaattgttttgtttctgtgtccctaccagacacaaagatgaagtgtgccagctggttcccccaagccagctcatgctgctgaccactgactcagctctgaccttcacatttgctctgaagcaagtgcgttcagctgctggggcagtgatatcacatagtacatatattatttccttagtttatttccaaactggtattttaaatagacacttcgaactttgggctactctgtttaaatctgccactttctggactggaccttagtactgtaaattctttttaaagaataataatgttaccaactgctgagatttttatgtattttgtgactttgtaacaactgctattgtaataagtgtcatcttgtgggcattatacaaaggcatattataaaataataatgatatttttgtatagaagagtcaactgttcagatgtaagatgttgaaaaatgttaaaatctaaagagtaatttatcctagtggtaatggttatatgtatttgtacagtttaaattaatgtctcaaagctgtgcagtcttttgttactgggacacttttaaactctgaataggcattaaaaaaaatatggctaa

SEQ ID NO: 160203 - DNA, 2459 bp, Artificial Sequence
  derived and/or modified sequence
agggtgtttataagaatggaagtgttgtttccttgcccgattccttcatgctatatctcatgaacctctgtaatcttgggggagagactatatttaatgatgacaaacctgtcaccagtgtagcaacaacagtgtgaggacaaaagcaaataaaaattaagaagcgttcaaatttatattcaacaaggaagtcatttcaatcaacaacttctgctgcattatttttccaagatgaaccgatacacaaccatgagacagttgggggacggcacgtatgggagtgtgcttatgggcaagagtaatgaatccggggagctggtggccatcaaaaggatgaagagaaagttctattcttgggatgaatgcatgaacttgagagaagttaagtctctgaagaaacttaatcatgccaatgttattaaattgaaagaagttatcagagaaaatgaccatctttattttatatttgaatatatgaaagaaaacctctatcaattaatgaaagacagaaacaagttgttccctgaatcagtcatcagaaatattatgtatcaaatattgcaagggctggcttttatccataaacatggcttttttcatagggacatgaaaccagaaaacttgctttgtatgggtccagagcttgtgaaaattgctgattttggacttgcaagagaattaaggtcacagccaccatacactgattatgtatctaccagatggtatcgtgcccctgaagttttactgagatcttcagtttatagttctcccattgatgtgtgggctgttggaagtatcatggctgaactctatatgttaaggccacttttcccagggacaagtgaggtcgatgaaatctttaaaatttgccaagttttagggactcccaaaaaaagtgactggccagaaggataccagctggcatcctctatgaacttccgttttccccagtgtgttcctataaacttaaaaactcttattcccaatgccagtaatgaagctattcagctcatgaccgaaatgttgaattgggatccaaagaaacgaccgacagcaagccaggcattgaaacacccatattttcaagttggtcaggtattaggcccttcgtcaaatcatctggaatcaaaacagtctttaaataagcagctgcaaccattagaatcaaagccatctttagttgaggtagagcctaagcctctgccggatataatcgatcaggttgttggacaaccccagccaaaaactagccagcagccactgcagcccattcagccgccacagaacctgagcgtccagcaacctccaaagcaacagagtcaggagaaaccgccacaaacgctattcccgagcatcgtcaaaaacatgccaactaagccaaatggcacactgagtcataaaagtggtaggaggcgttggggtcagactatcttcaagtctggagatagctgggaagagttggaggactatgatttcggagcctcccattccaagaagccaagcatgggtgtttttaaagaaaaaaggaaaaaagattctccatttcgtcaacaggtgaagatggctgttatttccctctcagcacaccagtttcccacgttatgaatccaactgcagccgttgcaggacagatagaaacatgttacacacaagcttccagagccagtaccctcaggctccaaccactcgacaggggaaaacaagagcttacctgctgttacttccctaaaatctgattccgaattgtcaactgctccaacctctaaacagtactacttgaaacaatcaagatatcttccaggtgtgaatcccaagaaggtgtccttgatagccagtggaaaggaaataaacccccacacttggagcaaccagttattccccaagtcactgggacccgttggggcagaacttgctttcaaaaggagcaatgcaggaaatcttggaagttatgctacttacaatcagtcaggatatattccttcctttctcaaaaaagaagtgcagtcagctggccagaggatccacttagcacctctcaatgcaacggcttcagaatatacctggaacacaaaaactggtcgggggcagttttcaggacgtacttataatcctacagcaaaaaacctaaatattgtgaaccgtgcacagcccattccctcagtgcatgggaggacagactgggtggccaagtatggaggccaccggtaggagtctatggtgtgaaaccctacagcattgctccgtagagtacgtgcaagttccttgaccctgggaaatgtctacaaatgtctatttctactgagttctggaagaaatatgcaaaagtgggtacttggaagggcaaaaatcatcccctattttacttatttccaagaaatgcattttcttagcatcattgcccacagtgttgatatatgggtaggatgttacaaagtattgaataaactatttgccaaagt

SEQ ID NO: 160204 - DNA, 1872 bp, Artificial Sequence
  derived and/or modified sequence
atgaaccggtacaccaccatgcggcagctgggcgacggcacctacggttccgttcttatgggaaaatccaatgagagtggggaactggtcgctattaaaaggatgaaacggaagttttacagttgggatgaatgtatgaatctgcgcgaagtcaaatctttgaagaaattgaatcacgcaaatgtcattaaattgaaagaggtaatacgagagaatgaccatttgtatttcatcttcgagtacatgaaagaaaacttgtatcagctcatgaaagatcgtaataagctgttccccgagtcagtgattcggaatattatgtatcagatattacagggtcttgcgtttatccataaacacgggttctttcatcgcgatatgaaaccagaaaatctcctgtgcatgggccctgagctcgtcaaaatagccgactttgggctcgcacgtgagctgaggtctcagcccccttatacagactatgtgtccacccggtggtaccgtgcacctgaggttctcctgaggtcaagcgtgtattctagcccaatcgatgtatgggccgttggctcaattatggctgagctttatatgctcaggcctctattcccggggactagcgaggtggacgagatatttaaaatttgccaagtgcttggcactcctaagaaaagtgactggccagagggttaccagctagccagttcaatgaatttccggtttcctcaatgtgtgcccatcaacctaaaaacacttatccccaacgctagtaatgaagcaatccagttgatgaccgaaatgctgaactgggatcccaagaaacggcctaccgcgagccaagctctaaagcatccctacttccaggtgggacaggttctcggtccaagctctaaccacctggagagcaaacagtccctgaataagcagctgcaacctctcgaatcaaaaccttccctggtggaagtagagcccaaacccctccctgatatcattgatcaagtggtgggccaacctcaacctaagacgtcccagcagcctctgcaacccatccagcctccccaaaacttgagtgtacagcagcctccaaaacaacagtcccaagagaagccaccccagactttgtttcccagtatcgtaaaaaatatgcccaccaagcccaatggcactttaagccacaaaagtggtcggcgaagatggggccagacgattttcaagtccggagactcctgggaagaactggaggattacgacttcggcgcttcccacagcaagaagccatctatgggagtttttaaggaaaagaggaagaaggatagcccgtttcgccttcccgagcccgtgcctagtggctccaaccactctactggcgaaaacaaaagtcttccagcagtgacttcgctgaagagcgattctgagcttagtaccgctccgaccagcaagcagtattatctgaaacaaagccgctacttgcctggcgtaaaccctaaaaaagtgagcctgattgcctcagggaaggaaatcaatcctcacacatggagcaaccagctgtttcccaagtcattgggtcccgttggggcagaattggccttcaaaagatctaacgcaggtaatctgggctcatacgccacttacaaccagagcggttatattccatccttcctaaagaaagaggtgcaaagcgccggacagaggatccacctggcccccttgaatgctactgcctcagagtatacctggaacactaaaactggtcgcgggcagtttagcgggcggacctataatcctacagcaaaaaaccttaatattgtgaaccgggcacagcctataccttcagtacacggtcgaaccgattgggtggctaagtacggaggccaccggtag

SEQ ID NO: 160205 - DNA, 1872 bp, Artificial Sequence
  derived and/or modified sequence
atgaaccggtacaccaccatgcggcagctgggcgacggcacctacgggagtgttctaatggggaaatccaatgagtccggagagctggtggcaattaaacgaatgaaacgaaaattttactcctgggatgagtgtatgaaccttagggaagttaagtctctgaaaaaacttaaccacgcaaacgtgattaaattgaaagaagtgatccgcgagaacgatcacctgtactttatttttgaatacatgaaagagaacttataccagttgatgaaggacaggaataagttgtttccggaatctgtgatacgcaatatcatgtaccagatcctgcaggggcttgcctttattcataaacatgggttctttcatagagacatgaagcccgagaatttgctgtgtatgggccccgagttagtcaagatcgcagatttcggcctggcacgagaactgcgcagtcagccaccgtatactgattatgtcagcacgcgatggtatagggcccctgaggtgctcctgcgatcctctgtgtacagttccccaatcgacgtttgggcggtcggatcgatcatggcggagctctacatgctcagaccacttttcccaggcacctctgaggttgatgaaattttcaaaatatgccaggtattggggacccctaaaaaaagcgattggcccgaaggttatcagctggcttccagcatgaatttccggtttccccagtgcgtgccgattaacctcaagactctcatcccaaacgcatcaaacgaggctatccagctcatgacagagatgctgaactgggatccgaagaagcgacccacagctagccaggccctaaaacatccctacttccaggttgggcaggtgctgggcccaagtagcaaccaccttgagagtaagcagtcactgaacaagcagctccagcctttagaatctaaaccttccctggtcgaggttgaacccaaaccactccctgacatcatcgaccaagtggttggacagcctcagcccaagacatcccagcagcctctccagccaatccagcctccccagaacctctcagttcagcagcctccaaaacagcagtctcaagagaaacccccccagacattatttccatctatcgtcaagaatatgccaactaaaccaaacggcaccttgagtcacaaaagcggcaggaggagatggggtcagactatttttaagagcggcgattcttgggaagagctcgaggattatgacttcggggcgtcacattccaagaaaccgtcaatgggagtgttcaaggagaagcgtaaaaaagactcaccgttccgcttgcctgaacccgtcccatccgggagcaaccactcaacgggggaaaacaagtctctgcccgcagtgacatcccttaagtcagacagtgaactatccactgcgccgactagcaagcagtactatttgaagcagagcaggtacttacccggcgtgaaccctaagaaggtgagcttgattgccagtggaaaggagattaacccacacacatggagtaaccagctttttccaaaaagtctagggcccgttggggctgaactcgccttcaagcggagcaacgcaggcaatttaggaagctacgcaacatacaaccagtccggatatatcccaagctttctgaaaaaggaggtgcaatcggcaggacagcgcattcacctggctcccttgaatgccacagcctccgaatacacctggaatacaaaaacgggccgagggcagttcagcgggcgaacttataacccgacagctaagaatctcaacatagtaaatcgcgctcagcccattccctcggtgcatgggagaacagactgggtcgccaaatacggcggtcacagatag

SEQ ID NO: 160206 - DNA, 1872 bp, Artificial Sequence
  derived and/or modified sequence
atgaacaggtacacgaccatgagacagctgggcgatggaacatatgggagcgtcctgatgggaaaatctaacgaaagcggtgagctggtcgctatcaaacgcatgaagcggaagttctactcctgggacgaatgcatgaatctgcgtgaagttaaatccctaaagaaattaaatcacgcaaatgtgattaagttgaaggaagtgattagagagaatgaccacctttacttcatctttgagtatatgaaggagaacctttatcaactcatgaaggatcggaataagctttttcctgaatctgttataaggaatattatgtatcagattttgcagggcctggccttcatccacaagcacgggttcttccatcgagatatgaagcccgaaaatctgttgtgcatgggcccagagcttgtgaaaatcgcagatttcgggctggctcgggagctgaggtcccagcccccatacacggactatgtttccacccgttggtatagggcacctgaggttctccttcgaagttccgtatattcctcacccattgacgtatgggctgtcgggagcattatggcagagctgtacatgctccgccctctatttcccggtacaagcgaggtagacgagatcttcaaaatttgtcaggttctcggcaccccgaagaagtccgattggccggaaggataccagctggctagtagcatgaattttagatttccccagtgtgtccccatcaatctgaagacactaattcccaatgcatcaaacgaggccatccagctgatgaccgaaatgcttaactgggatcctaagaagcgcccaaccgcatcccaggccttgaaacacccatatttccaagtgggccaggtgctggggcctagcagcaaccacctcgaatctaaacagtcgctcaataaacagctgcagcccttggagtcaaagccctcactagttgaagtggagcccaaaccgctgcctgatataatcgatcaagtggtgggccagccgcaaccaaagacctctcagcagcctttacagcctatccagccccctcaaaacttgagcgtccagcagccccctaagcagcagagccaggaaaaaccacctcagacccttttcccaagcattgtgaagaatatgccgacaaaacctaacggaactcttagccacaaatctggcaggcgtcgatggggccagaccatcttcaagtctggcgatagttgggaagagttggaagattacgatttcggagcttcccacagcaaaaagccttccatgggagttttcaaggagaaacggaaaaaggattccccattccgtctccccgagccggtaccatccgggtccaaccattcaacaggcgagaataagtcactccccgctgtgacctccctgaaaagcgattcagagctgagcacagcccctacgtcaaaacagtactatcttaagcagtccaggtatcttcctggggtgaatccaaaaaaagtgagcttaattgctagcgggaaagagatcaatccccacacatggagtaatcagctgtttcccaagtccctgggtcctgttggcgcagaacttgcttttaaaaggtccaacgcagggaatctcggtagttacgctacatataatcaaagtgggtacatcccttcatttttgaaaaaggaggttcagtccgctggtcagcgaatccacttggccccactgaacgctacggcaagtgaatatacttggaatactaaaacggggcgagggcaattcagtggcaggacatacaacccaaccgctaaaaatctcaacattgtgaaccgcgcacaacctatcccgagcgtgcatggtcgcactgactgggtggccaagtatgggggacaccgctag

SEQ ID NO: 160207 - DNA, 1872 bp, Artificial Sequence
  derived and/or modified sequence
atgaatcggtacactaccatgagacagctcggtgacggcacatacggaagtgtcctgatgggaaaatcaaacgaatccggagagctggtagctattaagcggatgaaaaggaagttctactcctgggacgagtgcatgaatctgagggaagtgaaatcccttaaaaaactgaaccacgcaaacgtcatcaaactcaaagaggtcatcagagaaaatgaccatctgtactttatttttgagtacatgaaggaaaacctttatcaactcatgaaagaccggaacaagctgtttcctgagagcgtaatccgaaatattatgtaccagatccttcagggactggccttcatacataagcatggcttcttccacagagatatgaaaccggaaaacctgctctgtatgggccctgaattggtcaagatagctgatttcggcctggccagagagttaaggtctcagccaccctacaccgattatgtctctacgcgctggtatcgggctcctgaggttctgctaaggagctccgtatactccagtccaatcgacgtttgggccgtgggcagcattatggctgagctgtacatgctgcggccactgtttccaggaacctccgaagtggatgaaatcttcaagatatgtcaggtgctcggaacccccaagaaatcagactggcctgagggttaccaacttgcttctagtatgaactttcggttcccacagtgtgtgccgatcaatctcaagacactgatccccaatgcctcaaatgaagcaatacagctgatgactgaaatgctgaattgggatcccaagaaaagaccaacagcatcccaagctctgaaacatccatactttcaggttggtcaagttctcgggccatctagcaatcatttggagagcaagcagagtttgaataagcagttgcagccgctggaatctaaacctagtctcgtagaggttgagccaaaaccattaccagatatcatcgaccaggtcgtggggcagccgcagcccaagacctcccagcagcctttgcaaccaatccagcctccccaaaatctgtcagtacagcagcctccaaaacagcagagccaggaaaagccacctcagacactcttcccatcaatagtgaaaaatatgcctacaaagcctaacggaacactaagccataaatctgggcgaagacggtggggtcagaccatatttaagagcggagactcatgggaggagttggaagattatgacttcggcgctagccattctaagaagccttccatgggcgtgtttaaagagaaaaggaaaaaggacagcccattcaggcttcccgaacctgtaccctccggctccaatcatagcaccggcgagaataagtctctacctgccgttacttcgctgaagagcgactcagaactttctacagcacctacaagtaagcaatattacctgaagcagtcccgttatctgcccggtgtcaacccaaaaaaggtcagtctgatcgcgtccgggaaagagatcaacccacacacgtggtctaaccagctgttccccaaatcattaggccctgtcggcgctgaactcgcttttaaacggtctaacgctgggaacttaggctcctacgcgacctataaccagtccggatacattccatcttttctgaaaaaagaagtccagagcgctgggcagcggatccatcttgcgcctctgaacgctacagcttccgaatatacctggaataccaagaccggacgcggtcagttctccgggagaacatataatcccaccgcaaaaaaccttaatatcgtgaatcgggcacagcccattccgagcgtgcatgggaggaccgactgggtcgccaaatatggcggtcatagatag

SEQ ID NO: 160208 - DNA, 1872 bp, Artificial Sequence
  derived and/or modified sequence
atgaacagatacaccaccatgagacagctgggcgacggcacctacggcagcgtgctgatgggcaagagcaacgagagcggcgagctggtggccatcaagagaatgaagagaaagttctacagctgggacgagtgcatgaacctgagagaggtgaagagcctgaagaagctgaaccacgccaacgtgatcaagctgaaggaggtgatcagagagaacgaccacctgtacttcatcttcgagtacatgaaggagaacctgtaccagctgatgaaggacagaaacaagctgttccccgagagcgtgatcagaaacatcatgtaccagatcctgcagggcctggccttcatccacaagcacggcttcttccacagagacatgaagcccgagaacctgctgtgcatgggccccgagctggtgaagatcgccgacttcggcctggccagagagctgagaagccagcccccctacaccgactacgtgagcaccagatggtacagagcccccgaggtgctgctgagaagcagcgtgtacagcagccccatcgacgtgtgggccgtgggcagcatcatggccgagctgtacatgctgagacccctgttccccggcaccagcgaggtggacgagatcttcaagatctgccaggtgctgggcacccccaagaagagcgactggcccgagggctaccagctggccagcagcatgaacttcagattcccccagtgcgtgcccatcaacctgaagaccctgatccccaacgccagcaacgaggccatccagctgatgaccgagatgctgaactgggaccccaagaagagacccaccgccagccaggccctgaagcacccctacttccaggtgggccaggtgctgggccccagcagcaaccacctggagagcaagcagagcctgaacaagcagctgcagcccctggagagcaagcccagcctggtggaggtggagcccaagcccctgcccgacatcatcgaccaggtggtgggccagccccagcccaagaccagccagcagcccctgcagcccatccagcccccccagaacctgagcgtgcagcagccccccaagcagcagagccaggagaagcccccccagaccctgttccccagcatcgtgaagaacatgcccaccaagcccaacggcaccctgagccacaagagcggcagaagaagatggggccagaccatcttcaagagcggcgacagctgggaggagctggaggactacgacttcggcgccagccacagcaagaagcccagcatgggcgtgttcaaggagaagagaaagaaggacagccccttcagactgcccgagcccgtgcccagcggcagcaaccacagcaccggcgagaacaagagcctgcccgccgtgaccagcctgaagagcgacagcgagctgagcaccgcccccaccagcaagcagtactacctgaagcagagcagatacctgcccggcgtgaaccccaagaaggtgagcctgatcgccagcggcaaggagatcaacccccacacctggagcaaccagctgttccccaagagcctgggccccgtgggcgccgagctggccttcaagagaagcaacgccggcaacctgggcagctacgccacctacaaccagagcggctacatccccagcttcctgaagaaggaggtgcagagcgccggccagagaatccacctggcccccctgaacgccaccgccagcgagtacacctggaacaccaagaccggcagaggccagttcagcggcagaacctacaaccccaccgccaagaacctgaacatcgtgaacagagcccagcccatccccagcgtgcacggcagaaccgactgggtggccaagtacggcggccacagatag

SEQ ID NO: 160209 - protein, 653 aa, Artificial Sequence
  derived and/or modified sequence
MPVGGLLPLFSSPAGGVLGGGLGGGGGRKGSGPAALRLTEKFVLLLVFSAFITLCFGAIFFLPDSSKLLSGVLFHSSPALQPAADHKPGPGARAEDAAEGRARRREEGAPGDPEAALEDNLARIRENHERALREAKETLQKLPEEIQRDILLEKKKVAQDQLRDKAPFRGLPPVDFVPPIGVESREPADAAIREKRAKIKEMMKHAWNNYKGYAWGLNELKPISKGGHSSSLFGNIKGATIVDALDTLFIMEMKHEFEEAKSWVEENLDFNVNAEISVFEVNIRFVGGLLSAYYLSGEEIFRKKAVELGVKLLPAFHTPSGIPWALLNMKSGIGRNWPWASGGSSILAEFGTLHLEFMHLSHLSGNPIFAEKVMNIRTVLNKLEKPQGLYPNYLNPSSGQWGQHHVSVGGLGDSFYEYLLKAWLMSDKTDLEAKKMYFDAVQAIETHLIRKSSSGLTYIAEWKGGLLEHKMGHLTCFAGGMFALGADAAPEGMAQHYLELGAEIARTCHESYNRTFMKLGPEAFRFDGGVEAIATRQNEKYYILRPEVMETYMYMWRLTHDPKYRKWAWEAVEALENHCRVNGGYSGLRDVYLLHESYDDVQQSFFLAETLKYLYLIFSDDDLLPLEHWIFNSEAHLLPILPKDKKEVEIREE

SEQ ID NO: 160210 - protein, 879 aa, Artificial Sequence
  derived and/or modified sequence
MRLHLLLLLALCGAGTTAAELSYSLRGNWSICNGNGSLELPGAVPGCVHSALFQQGLIQDSYYRFNDLNYRWVSLDNWTYSKEFKIPFEISKWQKVNLILEGVDTVSKILFNEVTIGETDNMFNRYSFDITNVVRDVNSIELRFQSAVLYAAQQSKAHTRYQVPPDCPPLVQKGECHVNFVRKEQCSFSWDWGPSFPTQGIWKDVRIEAYNICHLNYFTFSPIYDKSAQEWNLEIESTFDVVSSKPVGGQVIVAIPKLQTQQTYSIELQPGKRIVELFVNISKNITVETWWPHGHGNQTGYNMTVLFELDGGLNIEKSAKVYFRTVELIEEPIKGSPGLSFYFKINGFPIFLKGSNWIPADSFQDRVTSELLRLLLQSVVDANMNTLRVWGGGIYEQDEFYELCDELGIMVWQDFMFACALYPTDQGFLDSVTAEVAYQIKRLKSHPSIIIWSGNNENEEALMMNWYHISFTDRPIYIKDYVTLYVKNIRELVLAGDKSRPFITSSPTNGAETVAEAWVSQNPNSNYFGDVHFYDYISDCWNWKVFPKARFASEYGYQSWPSFSTLEKVSSTEDWSFNSKFSLHRQHHEGGNKQMLYQAGLHFKLPQSTDPLRTFKDTIYLTQVMQAQCVKTETEFYRRSRSEIVDQQGHTMGALYWQLNDIWQAPSWASLEYGGKWKMLHYFAQNFFAPLLPVGFENENTFYIYGVSDLHSDYSMTLSVRVHTWSSLEPVCSRVTERFVMKGGEAVCLYEEPVSELLRRCGNCTRESCVVSFYLSADHELLSPTNYHFLSSPKEAVGLCKAQITAIISQQGDIFVFDLETSAVAPFVWLDVGSIPGRFSDNGFLMTEKTRTILFYPWEPTSKNELEQSFHVTSLTDIY

SEQ ID NO: 160211 - DNA, 2640 bp, Artificial Sequence
  derived and/or modified sequence
atgcgcttgcacctgctgctgctccttgcattgtgtggggcaggcactaccgccgctgaactcagttatagtctacgagggaactggagcatttgcaatgggaacggcagcctggagctgccaggtgctgtaccaggttgcgtccactctgccctctttcaacagggcttaatccaggacagctattaccgtttcaacgaccttaattatcggtgggtcagtcttgacaattggacctactccaaagaattcaaaatcccatttgagattagcaaatggcaaaaagttaatctgattctcgagggtgtggacaccgtgtcgaaaatcttgtttaacgaggtgaccataggtgaaactgataacatgttcaaccggtactccttcgatattaccaatgttgtcagagacgtaaactcaatcgagctgaggttccagtccgcagtgctctacgccgctcagcaatcaaaggctcatacccggtaccaagtgccgccagactgcccccctttagtccagaaaggcgagtgccatgtgaacttcgtgcggaaagaacagtgtagcttttcatgggactggggtccctctttccccacgcaaggtatctggaaggacgtgcggattgaagcttacaacatctgccacctgaactacttcactttctcacccatttatgataagagtgcgcaggaatggaacctagagattgaatccaccttcgatgtggtttcctccaagccagtggggggacaagtgattgtggcaattcctaagctccagacacagcagacttactcaattgagctccagcccggtaagagaatagttgaactgtttgtaaacatcagcaagaacataactgtggagacttggtggccacatggccatgggaatcaaaccggctacaacatgaccgttctgttcgagctggacgggggcctgaacatcgaaaagtccgccaaggtgtatttcaggacggtggaactcattgaagaacctattaaggggtctcccgggctgagcttctatttcaagattaacggcttcccgatttttctcaaaggaagtaattggatcccagctgactctttccaggatagggtgacgagcgagctgttacgccttctgctgcagtccgtggtggacgctaacatgaacacactgagagtgtggggcggggggatctatgagcaggatgaattctacgaactgtgtgacgagctcggaatcatggtatggcaggatttcatgtttgcttgcgcattatacccgacagatcagggctttctggactcggtgaccgcagaggtggcgtatcagatcaaaaggttgaagtcgcatcccagcataattatctggtccgggaataacgagaacgaagaggcactgatgatgaactggtatcacataagctttacagacaggcccatatatataaaggattacgttactctctacgtgaaaaacattcgggagttggtattagccggggacaaatcacggccattcatcacctcttccccaacaaatggcgcagaaaccgtggcagaagcctgggtgagtcagaatccgaattccaattattttggggacgtgcacttctacgattatatctccgactgctggaactggaaggtttttccaaaagccaggtttgcttctgaatacggctatcagtcctggccaagtttctctactttggagaaggtgtcatccactgaggactggagttttaactcaaaattttcactccacaggcagcaccatgagggcggcaacaagcaaatgctgtatcaggctggactccactttaagctgccccagagcaccgatccgctgcggacattcaaggacacaatctacctgactcaagtgatgcaagcacaatgcgttaagaccgagacagagttttaccgcaggtctcggagcgagatcgtggaccagcaaggtcacacgatgggagctctttactggcaactgaacgacatctggcaggccccctcatgggccagcctggagtatgggggtaaatggaagatgctgcattattttgcccagaatttttttgccccactgttgcccgttggtttcgagaacgagaacacattttacatctacggcgtgagcgatctgcactcagactatagcatgacactctcagttagagtgcacacctggagctccctcgagccggtctgttctcgggtaaccgaacgtttcgtgatgaaaggcggcgaggctgtgtgcctatacgaagaacctgtgagtgaactgcttcggcggtgcggcaactgcacccgggaaagctgtgtagtatctttttacctgagcgccgaccacgaattgctgtctcccaccaattaccacttcctgtccagccccaaggaggccgtgggcctgtgcaaagctcagatcacagcaattatttcccagcagggcgacatctttgtgttcgacctggaaacatctgcggtggctccattcgtatggcttgacgtcggctccatccccggaagattcagtgataatggattcctgatgaccgaaaagacacgaaccatactcttctacccttgggagccgactagcaagaacgagcttgaacagtctttccacgtgacttctttgacagacatctactag

SEQ ID NO: 160212 - DNA, 2640 bp, Artificial Sequence
  derived and/or modified sequence
atgaggctgcacctgctgctgctgctggccctgtgtggggccggcaccacagctgctgagctgagctacagcctgcggggcaactggagcatctgcaatggaaatggcagcctggagctgcctggagctgtgcccggctgtgtgcacagcgccctcttccagcagggcctcatccaggacagctactaccgcttcaatgacctgaactaccgctgggtgtccctggacaactggacctacagcaaggagttcaagatcccctttgagatcagcaagtggcagaaggtgaacctgatcctggagggcgtggacacagtgtccaagatcctcttcaatgaggtgaccatcggggagacagacaacatgttcaaccgctacagctttgacatcaccaacgtggtgagagatgtgaacagcattgagctgcgcttccagagcgctgtgctgtatgctgcccagcagagcaaggcccacacccgctaccaggtgcccccagactgcccccccctggtgcagaagggagaatgtcatgtgaactttgtgaggaaggagcagtgcagcttctcctgggactggggccccagcttccccacccagggcatctggaaggatgtgagaattgaggcctacaacatctgccacctgaactacttcaccttcagccccatctatgacaagagcgcccaggagtggaacctggagattgagagcacctttgatgtggtgagcagcaagcctgtgggcggccaggtgattgtggccatccccaagctgcagacccagcagacctacagcattgagctgcagcccgggaagagaattgtggagctgtttgtgaacatcagcaagaacatcaccgtggagacctggtggccccacggccacggcaaccagacaggctacaacatgacagtgctgtttgagctggatggcggcctgaacatcgagaagagcgccaaggtgtacttcagaacagtggagctgattgaggagcccatcaagggcagccctggcctgtccttctacttcaagatcaatggcttccccatcttcctgaagggcagcaactggatcccagctgacagcttccaggacagagtgaccagcgagctgctgcggctgctgctgcagagcgtggtggatgccaacatgaacaccctgcgggtgtggggcggcggcatctatgagcaggatgagttctatgagctgtgtgatgagctgggcatcatggtgtggcaggacttcatgtttgcctgtgccctgtaccccacagaccagggcttcctggacagcgtgacagctgaggtggcctaccagatcaagaggctgaagagccaccccagcatcatcatctggagcggcaacaatgaaaatgaggaggccctgatgatgaactggtaccacatctccttcacagaccggcccatctacatcaaggactatgtgaccctgtatgtgaagaacatccgggagctggtgctggccggggacaagagccggcccttcatcaccagcagccccaccaatggagctgagaccgtggccgaggcctgggtgtcccagaaccccaacagcaactactttggagatgtgcacttctatgactacatcagtgactgctggaactggaaggtgttccccaaggccaggtttgcctctgaatatggctaccagagctggcccagcttcagcaccctggagaaggtgagcagcacagaggactggagcttcaacagcaagttcagcctgcaccggcagcaccacgagggcggcaacaagcagatgctgtaccaggccggcctgcacttcaagctgccccagagcacagaccccctgcggaccttcaaggacaccatctacctgacccaggtgatgcaggcccagtgtgtgaagacagaaacagagttctaccgccgcagccgctctgagatcgtggaccagcagggccacaccatgggcgccctgtactggcagctgaatgacatctggcaggcccccagctgggccagcctggagtatggaggcaagtggaagatgctgcactactttgcccagaacttctttgcccccctgctgcctgtgggctttgaaaatgaaaacaccttctacatctatggagtgtctgacctgcacagcgactacagcatgaccctgtctgtgcgggtgcacacctggagcagcctggagcctgtgtgcagccgggtgacagaaagatttgtgatgaagggcggggaggccgtgtgcctgtatgaggagcctgtgtctgagctgctgcggcgctgtggcaactgcacccgggagagctgtgtggtgtccttctacctgtctgctgaccacgagctgctgagccccaccaactaccacttcctgagcagccccaaggaggccgtgggcctgtgcaaggcccagatcacagccatcatcagccagcagggcgacatctttgtgtttgacctggagaccagcgctgtggccccctttgtgtggctggatgtgggcagcatccctggccgcttcagtgacaatggcttcctgatgacagagaagaccaggaccatcctcttctacccctgggagcccaccagcaagaatgagctggagcagagcttccacgtgaccagcctgacagacatctactag

SEQ ID NO: 160213 - DNA, 2904 bp, Artificial Sequence
  derived and/or modified sequence
aaagcctcggctacttccgagggggtgagtggcttcaccgccggtcccttgcagcgctgcctttcgatctctccacatctcggtggcgcgggatctcaagatgcgcctccacctgctcctgctgctcgcgctgtgcggtgcaggcaccaccgccgcggagctcagttacagcttgcgtggcaactggagcatctgcaatgggaacggctcgctggagctgcccggggcggtccctggctgcgtgcacagcgccttgttccagcagggcctgatccaggattcttactacagatttaatgaccttaactacagatgggtctctttggataactggacctatagcaaagaatttaaaatcccctttgaaattagcaaatggcaaaaagtaaatttgattcttgagggagtggatacggtttcaaaaatcctgttcaatgaagtcactattggggaaacagacaatatgttcaatagatatagctttgatattaccaacgtggtcagggacgtgaactccattgagctgcgtttccagtcagcggtgttgtatgcagcacagcagagcaaagctcacactcgctaccaggttcccccagactgccctccacttgtgcagaagggtgaatgccatgtcaactttgttcggaaggagcaatgttcctttagttgggactgggggccttcctttcctacccagggaatctggaaagatgttagaattgaagcctataatatttgtcacctgaactacttcacattttccccaatatatgataagagtgcccaggagtggaatctggaaatagagtctacatttgatgttgtcagctcaaagccagttggtggtcaagtgatcgtagccatccctaagttgcaaacacaacagacatacagcattgaacttcaacctgggaaaaggattgttgagctatttgtgaacattagcaagaatattactgtagaaacttggtggcctcatggacatggaaaccagactgggtacaacatgactgttctttttgaactggatggaggcttaaatattgaaaaatcagctaaggtttattttaggacagtggaacttatagaagagcctataaaagggtctcctggtttgagtttctatttcaaaattaatggatttcccatatttctaaaaggctcaaactggatcccagcagattcattccaggaccgagtaacctctgagttgttacggctccttttacagtctgttgtggatgctaatatgaatactcttcgggtttggggaggaggaatttatgagcaggatgaattctatgaactctgtgatgaactaggaataatggtatggcaggattttatgtttgcctgtgccctttatccaactgatcagggcttcctggattcagtgacagcagaagttgcctaccagatcaagagactgaaatctcatccttctatcatcatatggagtggcaataatgaaaatgaggaggcgctgatgatgaattggtatcatatcagtttcactgaccggccaatctacatcaaggactatgtgacactctatgtgaaaaacatcagagagctcgtactggcaggagacaagagtcgtccttttattacgtccagtcctacaaatggggctgaaactgttgcagaagcctgggtctctcaaaaccctaatagcaattattttggtgatgtacatttttatgactatatcagtgattgctggaactggaaagttttcccaaaagctcgatttgcatctgaatatggatatcagtcctggccgtccttcagtacattagaaaaggtctcgtctacagaggactggtctttcaatagcaagttttcacttcatcgacaacatcacgaaggtggtaacaaacaaatgctttatcaggctggacttcatttcaaactcccccaaagcacagatccattacgcacatttaaagataccatctaccttactcaggtgatgcaggcccagtgtgtcaaaacagaaactgaattctaccgccgtagtcgcagcgagatagtggatcagcaagggcacacgatgggggcactttattggcagttgaatgacatctggcaagctccttcctgggcttctcttgagtacggaggaaagtggaaaatgcttcattactttgctcagaatttctttgctccactgttgccagtaggctttgagaatgaaaacacgttctatatctatggtgtgtcagatcttcactcggattattcgatgacactcagtgtgagagtccatacatggagctccctggagcccgtgtgctctcgtgtgactgaacgttttgtgatgaaaggaggagaggctgtctgcctttatgaggagccagtgtctgaattgctgaggagatgtgggaattgcacacgggaaagctgtgtggtttccttttacctttcagctgaccatgaactcctgagcccgaccaactaccacttcttgtcctcaccgaaggaggccgtggggctctgcaaggcgcagatcactgccatcatctctcagcaaggtgacatatttgtttttgacctggagacctcagctgtcgctccctttgtttggttggatgtaggaagcatcccagggagatttagtgacaatggtttcctcatgactgagaagacacgaactatattattttacccttgggagcccaccagcaagaatgagttggagcaatcttttcatgtgacctccttaacagatatttactgaaggaatctaggttgtattttcagtggacaatgggaataaagcatttctaaagcaccgactggagaggaaggcaacagagacaaggagagaagccgagagacatgtctgcgtgctgccacgcatttgagcgattgctctgtgaagagttgtacactgaacacttt

SEQ ID NO: 160214 - DNA, 2640 bp, Artificial Sequence
  derived and/or modified sequence
atgcggctgcacctgctgctgctgctggccctgtgcggcgccggcactacagccgccgagctctcttactcgttgcgcggcaactggtctatctgtaatggaaatggcagcctcgagttgcctggcgcagttccaggctgtgtgcacagtgccctcttccagcaagggttgatacaggatagctactaccgattcaatgacttaaactaccgctgggtctctctggacaactggacttacagtaaggaattcaagataccctttgaaatctcaaaatggcagaaagtgaatctgattttggaaggagtagacaccgtgtccaagatccttttcaacgaggttacaatcggtgagacggacaatatgtttaatagatacagcttcgacattaccaacgtggtgagagacgtgaatagcatagaactgcgctttcaatctgccgtcctgtacgccgcccagcagagtaaagctcacactcggtaccaggtgcctcccgactgcccacccctggtgcagaagggggaatgccacgtcaacttcgtacggaaagagcagtgttcatttagctgggattggggaccttctttccccacacaaggtatatggaaggacgtgcggatcgaagcctataacatctgccatctgaattactttaccttctcaccaatctatgacaagagtgctcaggagtggaaccttgaaattgagagtaccttcgacgtagtgtcctcgaagccagtcggaggccaagtcatcgtggcaattcccaaactccagacacagcagacctattctattgagttacagcctgggaagagaatagttgaactgttcgtgaacatttcgaaaaacataacagttgaaacctggtggccccatggacacggaaatcagactggatataatatgactgtgctatttgagcttgatggcggcttgaatatcgagaagtcagctaaggtctattttcgaaccgtcgaactgatcgaagaacccattaagggtagccccggtttatccttctacttcaaaataaacggcttccctattttcctaaaagggtctaactggattcctgccgactcattccaagatcgggtgacgtcagaactgctccgcctgctattacagagcgtggtggacgccaacatgaataccttaagagtatggggtgggggaatttatgagcaggacgagttttatgagctctgtgacgaattgggtatcatggtttggcaggattttatgttcgcttgtgccctctatccgactgaccagggctttctcgactctgtgaccgccgaagttgcatatcagattaaaagactgaaatctcacccctcgattattatctggtcaggaaacaatgagaatgaggaagctctcatgatgaactggtaccacatcagctttaccgatcggcctatctacatcaaggactacgtcactctctatgtaaagaatattcgtgagctggttcttgcgggcgacaagagtcggcccttcatcactagctcccccacaaacggcgcggaaacggtggctgaagcatgggtttcacagaacccaaactccaactacttcggcgacgtgcatttctatgactacatctccgattgttggaactggaaggtcttccctaaagcccggttcgcatctgaatatggctatcaaagttggccttccttctctacgctggaaaaagtgagttctactgaggattggtctttcaacagcaagttcagcctgcatagacaacatcatgaggggggcaataaacagatgctgtatcaggcaggactgcacttcaaactaccccagtcaactgacccattgcgcactttcaaggataccatttacttgacacaggtaatgcaggctcagtgcgttaaaacagaaacagagttttatcggcgtagccgcagcgagattgtcgaccagcagggccataccatgggcgccttgtactggcagctgaatgacatttggcaggcgccttcttgggcctcgctggaatatggaggcaagtggaagatgctgcactactttgctcaaaactttttcgcaccacttctgccggtggggttcgagaatgaaaacacattctatatctacggcgtctctgaccttcacagtgactatagtatgaccctttcagtgcgtgtccacacatggtcctctctggaaccagtttgttcaagagtcacagagaggttcgtgatgaaaggaggagaagcagtgtgcctatatgaggagccagtgtccgaactcttacggcggtgcggcaattgtacacgagaaagttgcgtggtcagcttttacttaagcgccgaccacgaactgctctcacctactaattatcatttcctgtcctcaccaaaggaagcagttggactgtgtaaagcgcagattaccgcaattattagtcagcagggagacatcttcgtgtttgaccttgagacttccgcagtggcacccttcgtgtggctcgacgtcgggtccattccggggcggttcagcgataatggatttctgatgacagagaagacacgaactattctgttctatccgtgggaacccactagcaaaaatgaactcgagcagtcctttcatgtgacctccctcacagacatttactag

SEQ ID NO: 160215 - DNA, 2640 bp, Artificial Sequence
  derived and/or modified sequence
atgaggctgcacctgttattattgctggcactgtgtggagctggaactacggcggctgaactttcctactcactgagaggtaactggagcatctgtaatggtaacggcagcctggaattaccgggagctgtacccggttgcgttcactctgccctgtttcagcagggactcattcaagacagttactatcgctttaacgatctgaattatcggtgggtgtcattagacaactggacgtattcaaaggagtttaagatcccattcgagataagtaagtggcagaaagtgaacctcattctggagggcgtggacaccgtgagtaagattctcttcaacgaggtcacgataggagagactgacaacatgtttaacaggtatagtttcgatattaccaacgtggtacgggacgtgaattctatcgagttgagatttcagagcgccgttttgtatgcggctcagcagtccaaggcacacaccagataccaggtgccccctgactgtcccccactggttcagaaaggagaatgtcatgtgaatttcgttagaaaagagcaatgcagcttttcctgggactggggtccgagcttccccacccaggggatttggaaggacgttcggatcgaggcgtacaacatctgtcacctgaattatttcactttcagtccgatctacgataaaagcgcacaagagtggaacctagagattgagtcaacattcgatgtagttagctccaagccagtaggcggacaagtgatcgtggccattccaaaactccagactcagcaaacgtatagtatcgagcttcaacccggaaaacggatcgtcgagctgtttgtgaatatttccaaaaatattactgtggagacctggtggccacacggacacggtaaccagaccgggtacaatatgactgttctgtttgagttggacggaggactgaatattgagaaatctgccaaggtgtacttccgaacagtggaactgatcgaggagccaattaagggcagtcctgggctctctttctatttcaagattaatgggtttcccattttcctaaaagggagcaactggataccagccgattcattccaggacagggtgacttcagagttgttgcgtttgcttttgcaatctgtcgtcgacgcaaacatgaacacccttcgcgtgtggggcggaggtatctatgagcaggacgagttctatgagctgtgtgacgagctgggcatcatggtgtggcaggacttcatgtttgcctgcgcgttgtacccgactgatcaggggttcctagacagtgtcacggccgaggtggcctaccagatcaaaaggctcaagtcacacccatcgatcataatctggtctggaaacaatgagaacgaagaagcgctgatgatgaactggtaccatatctcgtttaccgaccgtccaatatacattaaagattatgtgaccctgtatgtgaagaacattcgcgagctcgttttggcaggcgataagtcccgcccatttatcacctcttccccgacaaacggcgcagaaaccgtggctgaagcttgggtgtcccaaaatccaaattcaaattactttggagacgtccatttttacgactacatatcggactgttggaactggaaggtgtttcccaaagctagatttgcctctgaatacggctatcaatcctggccctcattcagtaccctggagaaagtatctagtaccgaagactggtctttcaactcaaaattttccctccacaggcagcaccatgagggtgggaataagcaaatgctgtaccaggcagggttgcactttaagctgccacaatctaccgatcctcttaggacattcaaggatacgatatatctcacccaggtcatgcaagcgcagtgtgtcaaaacagagaccgaattctaccgcaggagccggtctgaaattgttgaccagcaggggcacacaatgggagcactatattggcaactgaatgatatttggcaggctcccagttgggcttccttggaatacggaggaaaatggaagatgctgcactattttgcgcaaaatttttttgccccacttctgccagtgggctttgagaatgagaatacgttttacatctatggagtctctgaccttcactcagattattctatgacactctctgtcagagtacacacatggagcagtttggagcccgtgtgcagtcgggtgacagaaagattcgttatgaaaggaggtgaggcggtctgtctgtacgaggagcccgtgtccgagcttctgagacgctgcggtaactgtacaagagaatcttgcgtggtaagtttttacctgagtgctgaccacgagttgctctcccccactaactaccactttctgagcagccctaaagaagcagtgggcctctgcaaggcccagatcaccgcaatcatctcgcagcagggtgacatctttgtctttgacttggaaacatctgcagtggctccattcgtgtggctggacgtaggcagcattccaggtcggtttagcgataacggattcctgatgactgagaagactcgtactatcttattctacccatgggaaccaacaagcaaaaatgaattagagcagagctttcatgtgaccagcctgacggacatctactag

SEQ ID NO: 160216 - DNA, 2640 bp, Artificial Sequence
  derived and/or modified sequence
atgagactgcacctgctgctgctgctggccctgtgcggcgccggcaccaccgccgccgagctgagctacagcctgagaggcaactggagcatctgcaacggcaacggcagcctggagctgcccggcgccgtgcccggctgcgtgcacagcgccctgttccagcagggcctgatccaggacagctactacagattcaacgacctgaactacagatgggtgagcctggacaactggacctacagcaaggagttcaagatccccttcgagatcagcaagtggcagaaggtgaacctgatcctggagggcgtggacaccgtgagcaagatcctgttcaacgaggtgaccatcggcgagaccgacaacatgttcaacagatacagcttcgacatcaccaacgtggtgagagacgtgaacagcatcgagctgagattccagagcgccgtgctgtacgccgcccagcagagcaaggcccacaccagataccaggtgccccccgactgcccccccctggtgcagaagggcgagtgccacgtgaacttcgtgagaaaggagcagtgcagcttcagctgggactggggccccagcttccccacccagggcatctggaaggacgtgagaatcgaggcctacaacatctgccacctgaactacttcaccttcagccccatctacgacaagagcgcccaggagtggaacctggagatcgagagcaccttcgacgtggtgagcagcaagcccgtgggcggccaggtgatcgtggccatccccaagctgcagacccagcagacctacagcatcgagctgcagcccggcaagagaatcgtggagctgttcgtgaacatcagcaagaacatcaccgtggagacctggtggccccacggccacggcaaccagaccggctacaacatgaccgtgctgttcgagctggacggcggcctgaacatcgagaagagcgccaaggtgtacttcagaaccgtggagctgatcgaggagcccatcaagggcagccccggcctgagcttctacttcaagatcaacggcttccccatcttcctgaagggcagcaactggatccccgccgacagcttccaggacagagtgaccagcgagctgctgagactgctgctgcagagcgtggtggacgccaacatgaacaccctgagagtgtggggcggcggcatctacgagcaggacgagttctacgagctgtgcgacgagctgggcatcatggtgtggcaggacttcatgttcgcctgcgccctgtaccccaccgaccagggcttcctggacagcgtgaccgccgaggtggcctaccagatcaagagactgaagagccaccccagcatcatcatctggagcggcaacaacgagaacgaggaggccctgatgatgaactggtaccacatcagcttcaccgacagacccatctacatcaaggactacgtgaccctgtacgtgaagaacatcagagagctggtgctggccggcgacaagagcagacccttcatcaccagcagccccaccaacggcgccgagaccgtggccgaggcctgggtgagccagaaccccaacagcaactacttcggcgacgtgcacttctacgactacatcagcgactgctggaactggaaggtgttccccaaggccagattcgccagcgagtacggctaccagagctggcccagcttcagcaccctggagaaggtgagcagcaccgaggactggagcttcaacagcaagttcagcctgcacagacagcaccacgagggcggcaacaagcagatgctgtaccaggccggcctgcacttcaagctgccccagagcaccgaccccctgagaaccttcaaggacaccatctacctgacccaggtgatgcaggcccagtgcgtgaagaccgagaccgagttctacagaagaagcagaagcgagatcgtggaccagcagggccacaccatgggcgccctgtactggcagctgaacgacatctggcaggcccccagctgggccagcctggagtacggcggcaagtggaagatgctgcactacttcgcccagaacttcttcgcccccctgctgcccgtgggcttcgagaacgagaacaccttctacatctacggcgtgagcgacctgcacagcgactacagcatgaccctgagcgtgagagtgcacacctggagcagcctggagcccgtgtgcagcagagtgaccgagagattcgtgatgaagggcggcgaggccgtgtgcctgtacgaggagcccgtgagcgagctgctgagaagatgcggcaactgcaccagagagagctgcgtggtgagcttctacctgagcgccgaccacgagctgctgagccccaccaactaccacttcctgagcagccccaaggaggccgtgggcctgtgcaaggcccagatcaccgccatcatcagccagcagggcgacatcttcgtgttcgacctggagaccagcgccgtggcccccttcgtgtggctggacgtgggcagcatccccggcagattcagcgacaacggcttcctgatgaccgagaagaccagaaccatcctgttctacccctgggagcccaccagcaagaacgagctggagcagagcttccacgtgaccagcctgaccgacatctactag

SEQ ID NO: 160217 - protein, 2468 aa, Artificial Sequence
  derived and/or modified sequence
MATVVVEATEPEPSGSIANPAASTSPSLSHRFLDSKFYLLVVVGEIVTEEHLRRAIGNIELGIRSWDTNLIECNLDQELKLFVSRHSARFSPEVPGQKILHHRSDVLETVVLINPSDEAVSTEVRLMITDAARHKLLVLTGQCFENTGELILQSGSFSFQNFIEIFTDQEIGELLSTTHPANKASLTLFCPEEGDWKNSNLDRHNLQDFINIKLNSASILPEMEGLSEFTEYLSESVEVPSPFDILEPPTSGGFLKLSKPCCYIFPGGRGDSALFAVNGFNMLINGGSERKSCFWKLIRHLDRVDSILLTHIGDDNLPGINSMLQRKIAELEEEQSQGSTTNSDWMKNLISPDLGVVFLNVPENLKNPEPNIKMKRSIEEACFTLQYLNKLSMKPEPLFRSVGNTIDPVILFQKMGVGKLEMYVLNPVKSSKEMQYFMQQWTGTNKDKAEFILPNGQEVDLPISYLTSVSSLIVWHPANPAEKIIRVLFPGNSTQYNILEGLEKLKHLDFLKQPLATQKDLTGQVPTPVVKQTKLKQRADSRESLKPAAKPLPSKSVRKESKEETPEVTKVNHVEKPPKVESKEKVMVKKDKPIKTETKPSVTEKEVPSKEEPSPVKAEVAEKQATDVKPKAAKEKTVKKETKVKPEDKKEEKEKPKKEVAKKEDKTPIKKEEKPKKEEVKKEVKKEIKKEEKKEPKKEVKKETPPKEVKKEVKKEEKKEVKKEEKEPKKEIKKLPKDAKKSSTPLSEAKKPAALKPKVPKKEESVKKDSVAAGKPKEKGKIKVIKKEGKAAEAVAAAVGTGATTAAVMAAAGIAAIGPAKELEAERSLMSSPEDLTKDFEELKAEEVDVTKDIKPQLELIEDEEKLKETEPVEAYVIQKEREVTKGPAESPDEGITTTEGEGECEQTPEELEPVEKQGVDDIEKFEDEGAGFEESSETGDYEEKAETEEAEEPEEDGEEHVCVSASKHSPTEDEESAKAEADAYIREKRESVASGDDRAEEDMDEAIEKGEAEQSEEEADEEDKAEDAREEEYEPEKMEAEDYVMAVVDKAAEAGGAEEQYGFLTTPTKQLGAQSPGREPASSIHDETLPGGSESEATASDEENREDQPEEFTATSGYTQSTIEISSEPTPMDEMSTPRDVMSDETNNEETESPSQEFVNITKYESSLYSQEYSKPADVTPLNGFSEGSKTDATDGKDYNASASTISPPSSMEEDKFSRSALRDAYCSEVKASTTLDIKDSISAVSSEKVSPSKSPSLSPSPPSPLEKTPLGERSVNFSLTPNEIKVSAEAEVAPVSPEVTQEVVEEHCASPEDKTLEVVSPSQSVTGSAGHTPYYQSPTDEKSSHLPTEVIEKPPAVPVSFEFSDAKDENERASVSPMDEPVPDSESPIEKVLSPLRSPPLIGSESAYESFLSADDKASGRGAESPFEEKSGKQGSPDQVSPVSEMTSTSLYQDKQEGKSTDFAPIKEDFGQEKKTDDVEAMSSQPALALDERKLGDVSPTQIDVSQFGSFKEDTKMSISEGTVSDKSATPVDEGVAEDTYSHMEGVASVSTASVATSSFPEPTTDDVSPSLHAEVGSPHSTEVDDSLSVSVVQTPTTFQETEMSPSKEECPRPMSISPPDFSPKTAKSRTPVQDHRSEQSSMSIEFGQESPEQSLAMDFSRQSPDHPTVGAGVLHITENGPTEVDYSPSDMQDSSLSHKIPPMEEPSYTQDNDLSELISVSQVEASPSTSSAHTPSQIASPLQEDTLSDVAPPRDMSLYASLTSEKVQSLEGEKLSPKSDISPLTPRESSPLYSPTFSDSTSAVKEKTATCHSSSSPPIDAASAEPYGFRASVLFDTMQHHLALNRDLSTPGLEKDSGGKTPGDFSYAYQKPEETTRSPDEEDYDYESYEKTTRTSDVGGYYYEKIERTTKSPSDSGYSYETIGKTTKTPEDGDYSYEIIEKTTRTPEEGGYSYDISEKTTSPPEVSGYSYEKTERSRRLLDDISNGYDDSEDGGHTLGDPSYSYETTEKITSFPESEGYSYETSTKTTRTPDTSTYCYETAEKITRTPQASTYSYETSDLCYTAEKKSPSEARQDVDLCLVSSCEYKHPKTELSPSFINPNPLEWFASEEPTEESEKPLTQSGGAPPPPGGKQQGRQCDETPPTSVSESAPSQTDSDVPPETEECPSITADANIDSEDESETIPTDKTVTYKHMDPPPAPVQDRSPSPRHPDVSMVDPEALAIEQNLGKALKKDLKEKTKTKKPGTKTKSSSPVKKSDGKSKPLAASPKPAGLKESSDKVSRVASPKKKESVEKAAKPTTTPEVKAARGEEKDKETKNAANASASKSAKTATAGPGTTKTTKSSAVPPGLPVYLDLCYIPNHSNSKNVDVEFFKRVRSSYYVVSGNDPAAEEPSRAVLDALLEGKAQWGSNMQVTLIPTHDSEVMREWYQETHEKQQDLNIMVLASSSTVVMQDESFPACKIEL

SEQ ID NO: 160218 - DNA, 7407 bp, Artificial Sequence
  derived and/or modified sequence
atggccaccgtggtggtggaggccaccgagcccgagcccagcggcagcatcgccaaccccgccgccagcaccagccccagcctgagccacagattcctggacagcaagttctacctgctggtggtggtgggcgagatcgtgaccgaggagcacctgagaagagccatcggcaacatcgagctgggcatcagaagctgggacaccaacctgatcgagtgcaacctggaccaggagctgaagctgttcgtgagcagacacagcgccagattcagccccgaggtgcccggccagaagatcctgcaccacagaagcgacgtgctggagaccgtggtgctgatcaaccccagcgacgaggccgtgagcaccgaggtgagactgatgatcaccgacgccgccagacacaagctgctggtgctgaccggccagtgcttcgagaacaccggcgagctgatcctgcagagcggcagcttcagcttccagaacttcatcgagatcttcaccgaccaggagatcggcgagctgctgagcaccacccaccccgccaacaaggccagcctgaccctgttctgccccgaggagggcgactggaagaacagcaacctggacagacacaacctgcaggacttcatcaacatcaagctgaacagcgccagcatcctgcccgagatggagggcctgagcgagttcaccgagtacctgagcgagagcgtggaggtgcccagccccttcgacatcctggagccccccaccagcggcggcttcctgaagctgagcaagccctgctgctacatcttccccggcggcagaggcgacagcgccctgttcgccgtgaacggcttcaacatgctgatcaacggcggcagcgagagaaagagctgcttctggaagctgatcagacacctggacagagtggacagcatcctgctgacccacatcggcgacgacaacctgcccggcatcaacagcatgctgcagagaaagatcgccgagctggaggaggagcagagccagggcagcaccaccaacagcgactggatgaagaacctgatcagccccgacctgggcgtggtgttcctgaacgtgcccgagaacctgaagaaccccgagcccaacatcaagatgaagagaagcatcgaggaggcctgcttcaccctgcagtacctgaacaagctgagcatgaagcccgagcccctgttcagaagcgtgggcaacaccatcgaccccgtgatcctgttccagaagatgggcgtgggcaagctggagatgtacgtgctgaaccccgtgaagagcagcaaggagatgcagtacttcatgcagcagtggaccggcaccaacaaggacaaggccgagttcatcctgcccaacggccaggaggtggacctgcccatcagctacctgaccagcgtgagcagcctgatcgtgtggcaccccgccaaccccgccgagaagatcatcagagtgctgttccccggcaacagcacccagtacaacatcctggagggcctggagaagctgaagcacctggacttcctgaagcagcccctggccacccagaaggacctgaccggccaggtgcccacccccgtggtgaagcagaccaagctgaagcagagagccgacagcagagagagcctgaagcccgccgccaagcccctgcccagcaagagcgtgagaaaggagagcaaggaggagacccccgaggtgaccaaggtgaaccacgtggagaagccccccaaggtggagagcaaggagaaggtgatggtgaagaaggacaagcccatcaagaccgagaccaagcccagcgtgaccgagaaggaggtgcccagcaaggaggagcccagccccgtgaaggccgaggtggccgagaagcaggccaccgacgtgaagcccaaggccgccaaggagaagaccgtgaagaaggagaccaaggtgaagcccgaggacaagaaggaggagaaggagaagcccaagaaggaggtggccaagaaggaggacaagacccccatcaagaaggaggagaagcccaagaaggaggaggtgaagaaggaggtgaagaaggagatcaagaaggaggagaagaaggagcccaagaaggaggtgaagaaggagaccccccccaaggaggtgaagaaggaggtgaagaaggaggagaagaaggaggtgaagaaggaggagaaggagcccaagaaggagatcaagaagctgcccaaggacgccaagaagagcagcacccccctgagcgaggccaagaagcccgccgccctgaagcccaaggtgcccaagaaggaggagagcgtgaagaaggacagcgtggccgccggcaagcccaaggagaagggcaagatcaaggtgatcaagaaggagggcaaggccgccgaggccgtggccgccgccgtgggcaccggcgccaccaccgccgccgtgatggccgccgccggcatcgccgccatcggccccgccaaggagctggaggccgagagaagcctgatgagcagccccgaggacctgaccaaggacttcgaggagctgaaggccgaggaggtggacgtgaccaaggacatcaagccccagctggagctgatcgaggacgaggagaagctgaaggagaccgagcccgtggaggcctacgtgatccagaaggagagagaggtgaccaagggccccgccgagagccccgacgagggcatcaccaccaccgagggcgagggcgagtgcgagcagacccccgaggagctggagcccgtggagaagcagggcgtggacgacatcgagaagttcgaggacgagggcgccggcttcgaggagagcagcgagaccggcgactacgaggagaaggccgagaccgaggaggccgaggagcccgaggaggacggcgaggagcacgtgtgcgtgagcgccagcaagcacagccccaccgaggacgaggagagcgccaaggccgaggccgacgcctacatcagagagaagagagagagcgtggccagcggcgacgacagagccgaggaggacatggacgaggccatcgagaagggcgaggccgagcagagcgaggaggaggccgacgaggaggacaaggccgaggacgccagagaggaggagtacgagcccgagaagatggaggccgaggactacgtgatggccgtggtggacaaggccgccgaggccggcggcgccgaggagcagtacggcttcctgaccacccccaccaagcagctgggcgcccagagccccggcagagagcccgccagcagcatccacgacgagaccctgcccggcggcagcgagagcgaggccaccgccagcgacgaggagaacagagaggaccagcccgaggagttcaccgccaccagcggctacacccagagcaccatcgagatcagcagcgagcccacccccatggacgagatgagcacccccagagacgtgatgagcgacgagaccaacaacgaggagaccgagagccccagccaggagttcgtgaacatcaccaagtacgagagcagcctgtacagccaggagtacagcaagcccgccgacgtgacccccctgaacggcttcagcgagggcagcaagaccgacgccaccgacggcaaggactacaacgccagcgccagcaccatcagcccccccagcagcatggaggaggacaagttcagcagaagcgccctgagagacgcctactgcagcgaggtgaaggccagcaccaccctggacatcaaggacagcatcagcgccgtgagcagcgagaaggtgagccccagcaagagccccagcctgagccccagcccccccagccccctggagaagacccccctgggcgagagaagcgtgaacttcagcctgacccccaacgagatcaaggtgagcgccgaggccgaggtggcccccgtgagccccgaggtgacccaggaggtggtggaggagcactgcgccagccccgaggacaagaccctggaggtggtgagccccagccagagcgtgaccggcagcgccggccacaccccctactaccagagccccaccgacgagaagagcagccacctgcccaccgaggtgatcgagaagccccccgccgtgcccgtgagcttcgagttcagcgacgccaaggacgagaacgagagagccagcgtgagccccatggacgagcccgtgcccgacagcgagagccccatcgagaaggtgctgagccccctgagaagcccccccctgatcggcagcgagagcgcctacgagagcttcctgagcgccgacgacaaggccagcggcagaggcgccgagagccccttcgaggagaagagcggcaagcagggcagccccgaccaggtgagccccgtgagcgagatgaccagcaccagcctgtaccaggacaagcaggagggcaagagcaccgacttcgcccccatcaaggaggacttcggccaggagaagaagaccgacgacgtggaggccatgagcagccagcccgccctggccctggacgagagaaagctgggcgacgtgagccccacccagatcgacgtgagccagttcggcagcttcaaggaggacaccaagatgagcatcagcgagggcaccgtgagcgacaagagcgccacccccgtggacgagggcgtggccgaggacacctacagccacatggagggcgtggccagcgtgagcaccgccagcgtggccaccagcagcttccccgagcccaccaccgacgacgtgagccccagcctgcacgccgaggtgggcagcccccacagcaccgaggtggacgacagcctgagcgtgagcgtggtgcagacccccaccaccttccaggagaccgagatgagccccagcaaggaggagtgccccagacccatgagcatcagcccccccgacttcagccccaagaccgccaagagcagaacccccgtgcaggaccacagaagcgagcagagcagcatgagcatcgagttcggccaggagagccccgagcagagcctggccatggacttcagcagacagagccccgaccaccccaccgtgggcgccggcgtgctgcacatcaccgagaacggccccaccgaggtggactacagccccagcgacatgcaggacagcagcctgagccacaagatcccccccatggaggagcccagctacacccaggacaacgacctgagcgagctgatcagcgtgagccaggtggaggccagccccagcaccagcagcgcccacacccccagccagatcgccagccccctgcaggaggacaccctgagcgacgtggccccccccagagacatgagcctgtacgccagcctgaccagcgagaaggtgcagagcctggagggcgagaagctgagccccaagagcgacatcagccccctgacccccagagagagcagccccctgtacagccccaccttcagcgacagcaccagcgccgtgaaggagaagaccgccacctgccacagcagcagcagcccccccatcgacgccgccagcgccgagccctacggcttcagagccagcgtgctgttcgacaccatgcagcaccacctggccctgaacagagacctgagcacccccggcctggagaaggacagcggcggcaagacccccggcgacttcagctacgcctaccagaagcccgaggagaccaccagaagccccgacgaggaggactacgactacgagagctacgagaagaccaccagaaccagcgacgtgggcggctactactacgagaagatcgagagaaccaccaagagccccagcgacagcggctacagctacgagaccatcggcaagaccaccaagacccccgaggacggcgactacagctacgagatcatcgagaagaccaccagaacccccgaggagggcggctacagctacgacatcagcgagaagaccaccagcccccccgaggtgagcggctacagctacgagaagaccgagagaagcagaagactgctggacgacatcagcaacggctacgacgacagcgaggacggcggccacaccctgggcgaccccagctacagctacgagaccaccgagaagatcaccagcttccccgagagcgagggctacagctacgagaccagcaccaagaccaccagaacccccgacaccagcacctactgctacgagaccgccgagaagatcaccagaaccccccaggccagcacctacagctacgagaccagcgacctgtgctacaccgccgagaagaagagccccagcgaggccagacaggacgtggacctgtgcctggtgagcagctgcgagtacaagcaccccaagaccgagctgagccccagcttcatcaaccccaaccccctggagtggttcgccagcgaggagcccaccgaggagagcgagaagcccctgacccagagcggcggcgccccccccccccccggcggcaagcagcagggcagacagtgcgacgagaccccccccaccagcgtgagcgagagcgcccccagccagaccgacagcgacgtgccccccgagaccgaggagtgccccagcatcaccgccgacgccaacatcgacagcgaggacgagagcgagaccatccccaccgacaagaccgtgacctacaagcacatggaccccccccccgcccccgtgcaggacagaagccccagccccagacaccccgacgtgagcatggtggaccccgaggccctggccatcgagcagaacctgggcaaggccctgaagaaggacctgaaggagaagaccaagaccaagaagcccggcaccaagaccaagagcagcagccccgtgaagaagagcgacggcaagagcaagcccctggccgccagccccaagcccgccggcctgaaggagagcagcgacaaggtgagcagagtggccagccccaagaagaaggagagcgtggagaaggccgccaagcccaccaccacccccgaggtgaaggccgccagaggcgaggagaaggacaaggagaccaagaacgccgccaacgccagcgccagcaagagcgccaagaccgccaccgccggccccggcaccaccaagaccaccaagagcagcgccgtgccccccggcctgcccgtgtacctggacctgtgctacatccccaaccacagcaacagcaagaacgtggacgtggagttcttcaagagagtgagaagcagctactacgtggtgagcggcaacgaccccgccgccgaggagcccagcagagccgtgctggacgccctgctggagggcaaggcccagtggggcagcaacatgcaggtgaccctgatccccacccacgacagcgaggtgatgagagagtggtaccaggagacccacgagaagcagcaggacctgaacatcatggtgctggccagcagcagcaccgtggtgatgcaggacgagagcttccccgcctgcaagatcgagctgtag

SEQ ID NO: 160219 - DNA, 7407 bp, Artificial Sequence
  derived and/or modified sequence
atggctacagttgtggtcgaggctacagagccagagccgtcaggatctattgcaaacccagccgccagcacttccccgagtctgtctcaccggttcttagatagtaagttttacctactggtggtggtgggagagattgtgaccgaggaacacctgcgtcgtgcgattgggaatattgaattgggcatccgcagctgggacactaacttgatcgaatgcaacctggaccaggagttaaagctgttcgtgtccagacactcggctcgctttagtccagaggtgcctggccagaagattctgcatcaccgctccgacgtcttggagacagtagtcctcattaaccctagcgatgaggccgtctccaccgaggtcaggctaatgattacagacgcggctaggcataagctgctcgtccttacaggacaatgtttcgagaacaccggcgaactaatcttgcagtccggttctttctcctttcagaattttattgaaatcttcaccgaccaggagattggggagctgcttagcacaacgcatcctgccaacaaggccagtttaactcttttctgccccgaagagggagattggaagaattccaatttagatcggcataatctacaggattttattaacattaaacttaactctgcctccatcctgccggaaatggaggggttgagcgaatttactgagtacctctccgaatctgttgaggttccgtcacctttcgacattttagagcccccaactagcggcgggttcctcaagcttagcaaaccctgctgctatatcttcccggggggccgaggggactcggccctttttgcagttaacggcttcaatatgttaatcaatggaggctctgaacgaaagtcttgtttttggaaactcatccgccaccttgaccgtgtcgacagcatcctcctgacacacattggcgatgacaatctgccgggaataaattcaatgttgcagcggaaaatcgccgagctcgaggaggagcagagccagggaagcactactaatagcgactggatgaagaacttgatttcaccagacttgggggtggtatttctgaacgtgccggaaaacctgaaaaatcctgagccaaacatcaaaatgaagcgctccatagaagaggcatgctttacacttcagtatctcaacaagctgtccatgaagcccgaacctttattcagatccgtcgggaatacaatcgatcccgtgattctctttcagaagatgggcgtcggtaagctggaaatgtacgtcctgaaccctgtcaagtcctccaaggagatgcagtacttcatgcagcagtggacgggaacgaataaggataaggcggaatttattctccccaacggtcaggaggtggacctgcctatttcttatttgacctccgtaagctctctgattgtttggcacccagccaatcctgccgagaagattattagagtcctgtttccgggcaactccacacagtataacatactggaaggtttggaaaagctcaaacatctggacttcttaaagcaacctctagccacccaaaaagatctgaccggtcaagtgcccacccccgtggtaaagcagaccaagttaaagcagcgggccgatagccgagaaagtttgaagcctgcagctaaacccctaccaagcaaatctgtgagaaaggaatctaaggaggaaacccccgaggtaacaaaggtcaatcacgtggaaaagcccccaaaagtggaatccaaagaaaaagtgatggtcaagaaagataagcctattaagaccgagactaagccctctgtgaccgaaaaggaggtgcccagtaaggaagagccttctccagtcaaagcggaagtggctgagaaacaagctaccgatgtgaagcccaaggccgccaaagaaaaaaccgtcaagaaagagactaaagtgaaaccagaagataaaaaggaggagaaagagaagcccaagaaggaggtcgccaagaaagaagataagaccccaattaagaaagaggaaaaaccaaagaaagaggaggttaagaaggaagtgaagaaagagattaagaaggaagagaaaaaggagcccaaaaaggaggtgaagaaagagaccccacccaaggaggtgaaaaaggaggtgaagaaggaagagaaaaaagaagtgaaaaaagaggagaaggaacccaaaaaggagatcaaaaagctgcccaaagacgcaaaaaagtctagcacccccctctcagaggccaagaaacccgccgcactaaaacccaaggtgcctaagaaggaggaatcagtcaagaaagatagcgttgctgcaggaaaaccaaaggaaaagggcaagatcaaagtgatcaaaaaagagggtaaagcggccgaggctgtggctgcagcggtaggtacaggggcgactacagctgcagtgatggctgccgccgggattgcagccatcggaccagcgaaagagctcgaggccgaaagaagtcttatgagctcaccagaggacctcaccaaggacttcgaggagctaaaggccgaggaggtcgatgtcaccaaggatatcaaaccacaactcgaactgatcgaagatgaggaaaaactgaaagagaccgagcccgttgaagcatacgtgatccagaaagaacgcgaggttacaaagggccctgcagagtcccccgatgagggtattaccaccactgaaggcgagggcgaatgcgaacagacacctgaagaactggagcctgttgaaaaacagggagtggacgacattgaaaagttcgaggacgagggagcaggcttcgaagaaagctcggaaaccggggactatgaagagaaggcggagacagaggaagctgaggagccagaagaggatggtgaggagcacgtatgcgttagtgcatcaaaacactctcccactgaagacgaggaatccgccaaagcagaggctgacgcctacattagagaaaaacgggaatctgtggcttcaggcgacgatagggctgaggaggatatggatgaagcaatcgaaaaaggggaggctgagcaatccgaagaggaggctgacgaggaagacaaagctgaggacgctcgcgaggaggagtatgagccagaaaagatggaggccgaggactatgtcatggccgtcgtggataaggcagccgaggcaggcggcgctgaggaacaatatggatttctgacaactcccaccaaacagttaggcgcccagtcaccaggacgagaacctgcgagctctatacacgacgaaaccctccccggagggagtgagtccgaagcgactgcctctgacgaggagaaccgagaggaccagcctgaggagttcaccgccacctccggctacactcagtccactattgagatttcaagcgaacctactccaatggatgagatgtctacaccacgcgatgtcatgtcagacgagaccaacaatgaagagacggaaagccccagtcaggagtttgttaacatcacaaagtacgaaagctctctgtacagtcaggagtattctaagcctgccgacgtgacgccgctgaacggtttcagtgaaggttccaagactgatgctaccgacggaaaagattacaacgcgtctgccagtacgatctcacctccgagcagcatggaggaagataaatttagtaggagcgccctgcgggacgcctattgtagtgaggtaaaggctagcacgaccctcgacatcaaggattctatatccgcagtttcctccgagaaggtttctcccagcaagtcaccttccctgtcccctagccctccatcacctttggagaaaaccccactcggagagcggagcgttaacttctccttgacacctaacgagatcaaggtgagtgctgaagctgaagtcgccccagttagccccgaggtaacacaggaagtcgtcgaggaacattgcgcctcaccagaggataagacactagaagtggtgtccccgtctcagtccgttacaggaagcgcagggcataccccttactatcagtctcccactgatgagaagagcagccacctgccaacggaagttatagagaagccccccgcagtgccagtctctttcgaattttcagacgccaaagatgagaatgagagggccagcgtgtctccaatggatgagcctgtccccgatagtgaatcgccaatcgagaaagtactgtctcccttgcgctccccacccttgattggaagcgagtctgcgtacgagtcctttctatcggcagatgataaagcatcaggacgcggtgcagagagcccattcgaggagaaaagcggtaaacaaggttcgccagaccaggtgagcccagtaagcgaaatgacatccacttccctttaccaggacaagcaggaaggaaagagcaccgacttcgcccccatcaaagaggatttcgggcaagagaaaaagaccgacgacgtggaggcaatgtcatcacagccagctctggccctcgatgaacgcaagctgggggacgtgtcccctacccagattgacgtatcgcagtttgggtccttcaaggaggacaccaagatgagcatcagtgaaggtacagtgtcagacaagtcagctaccccagtggatgagggcgtagccgaggatacctacagccatatggaaggggtggctagcgtgtcaacagcatctgtggcaaccagcagctttcccgagcccacgacagatgatgtatctcccagcctccatgcagaggttggatccccccactctaccgaagttgacgacagtctgagtgtgagtgtcgtccagacacctacaaccttccaggagacagaaatgtcaccttcgaaggaggagtgtcccaggcctatgagtatcagtcctcctgacttttctcccaaaaccgctaaaagcaggaccccggtgcaagaccaccggagcgagcagtcgtccatgagcattgaattcggccaggaaagtcccgagcagtccctggccatggatttctctcgacagtctcccgaccatcctacagtaggcgcaggcgtcctacacatcactgagaacggccccaccgaggtcgattacagtccctctgatatgcaggattcgtctctctcccataaaatccctcccatggaagaaccttcctatacccaggataacgatctaagtgagctgattagtgtctctcaggtggaagcaagcccttcgacatctagcgcacatacacctagccagatcgcaagtccccttcaggaggacaccctgtccgatgtggcaccccctagggacatgtccctttacgccagtttgacatcagagaaagtacagtctttagagggagagaaactgagtcccaaatctgacatatcaccactgacaccaagggagtcatctcccctttacagcccaacctttagcgatagcacctctgctgtgaaggagaaaacagcaacttgccactcatcatctagccccccgatcgacgccgcctccgctgagccctacggatttagggctagcgtgctgttcgacacaatgcagcaccacttggcactgaatcgggatctctctacccctggcctagagaaggatagtggcgggaagaccccaggcgattttagttatgcgtatcaaaaacctgaagaaaccactagatccccagatgaggaggactatgattacgagagctatgaaaaaactacgcgtacctctgacgtggggggctactactacgaaaagatcgaacggacgacaaagtctccaagcgattctggctactcgtacgagactatagggaagacgaccaagaccccagaagatggcgactatagttatgagatcatagagaagacaacaaggaccccggaggaaggaggatactcgtacgatattagcgagaaaaccacgtctccgcctgaggtttccggctattcgtacgagaagacggaaagatcacgacgtctactggacgacatcagcaatgggtacgatgactctgaagatgggggtcacacacttggagacccttcttactcttatgaaacaacggaaaaaataacttccttcccggagtcagagggttattcatacgagacaagcacaaagaccactagaacgcccgatacaagcacttactgctacgagacggctgagaaaattacacgtacaccgcaggcctctacctattcctatgagaccagtgacctgtgctataccgctgagaaaaagagtccgtccgaagcccggcaggatgttgatctctgtttagtctcttcttgtgaatataaacaccctaaaacggagcttagccctagtttcattaaccccaaccccctcgagtggttcgcctctgaagaaccgactgaggaaagcgaaaagcctcttacacagagcgggggcgcgccacctccacccggtggcaagcaacagggccgccagtgcgatgagacccctcctacgagcgtctccgagtcagctcccagtcagacagatagcgacgttcctcctgagactgaagagtgtccttcaatcaccgccgatgctaacatcgatagtgaggacgaatctgagaccattcccacagacaaaaccgtgacatacaaacatatggacccaccacctgcacccgtgcaggaccgtagcccgtcaccacggcatccagatgtatctatggtggaccccgaggcccttgcgattgaacaaaaccttggaaaggcactgaaaaaagacctgaaggagaaaaccaagactaaaaagccaggaactaaaaccaagtcctccagcccggtgaaaaagtcagatggtaagtctaagcccctggcggcaagtcccaagcctgctggtcttaaggaaagttctgataaggtctctcgggtggcgtccccgaaaaaaaaagaatccgttgagaaagcggcaaagcctaccactacaccggaggttaaagccgcacggggggaagagaaggataaggaaacgaagaatgccgcgaatgcatcagccagtaaatccgcgaagactgccacagccggaccaggaacgacaaagaccacaaaatcgtcagcagttcccccaggtctaccggtatacctggatctatgctatattccaaatcacagcaactcaaaaaatgtcgatgtggaattcttcaaaagagttaggagctcctactacgtggtctctggcaatgatcccgctgcagaagaacccagtagggctgtccttgatgccctgcttgaaggaaaagcgcaatggggcagcaatatgcaggtgacattaatcccgacccacgattccgaagttatgcgtgagtggtatcaagagacgcacgagaagcagcaggatctgaatatcatggttctcgccagcagttcaactgtggtgatgcaggatgagtctttcccagcttgcaagattgagttgtag

SEQ ID NO: 160220 - DNA, 7407 bp, Artificial Sequence
  derived and/or modified sequence
atggccaccgtggtggtggaggccacagagcctgagcccagcggcagcatcgccaacccagctgccagcaccagccccagcctgagccaccgcttcctggacagcaagttctacctgctggtggtggtgggggagatcgtgacagaggagcacctgcggcgggccatcggcaacatcgagctgggcatccgctcctgggacaccaacctgattgagtgcaacctggaccaggagctgaagctgtttgtgagccgccacagcgcccgcttcagccctgaggtgcccggccagaagatcctgcaccacagaagtgatgtgctggagaccgtggtgctgatcaaccccagtgatgaagctgtgtccacagaggtgcggctgatgatcacagatgctgcccggcacaagctgctggtgctgaccggccagtgctttgaaaatactggagagctgatcctgcagagcggcagcttctccttccagaacttcatcgagatcttcacagaccaggagattggagagctgctgagcaccacccacccagccaacaaggccagcctgaccctcttctgcccagaggagggggactggaagaacagcaacctggacagacacaacctgcaggacttcatcaacatcaagctgaacagcgccagcatcctgcctgagatggagggcctgtctgagttcacagagtacctgtctgagagcgtggaggtgcccagcccctttgacatcctggagccccccaccagcggcggcttcctgaagctgagcaagccctgctgctacatcttccctgggggccgcggggacagcgccctgtttgctgtgaatggcttcaacatgctgatcaatggaggcagcgagaggaagagctgcttctggaagctgatccgccacctggacagagtggacagcatcctgctgacccacatcggagatgacaacctgcccggcatcaacagcatgctgcagaggaagattgctgagctggaggaggagcagagccagggcagcaccaccaacagcgactggatgaagaacctgatcagcccagacctgggcgtggtgttcctgaatgtgcctgagaacctgaagaaccctgagcccaacatcaagatgaagaggagcattgaggaggcctgcttcaccctgcagtacctgaacaagctgtccatgaagccagagcccctcttccgctctgtgggcaacaccatcgaccccgtcatcctcttccagaagatgggcgtgggcaagctggagatgtatgtgctgaaccctgtgaagagcagcaaggagatgcagtacttcatgcagcagtggacaggcaccaacaaggacaaggccgagttcatcctgcccaacggccaggaggtggacctgcccatctcctacctgacctctgtgagcagcctgattgtgtggcacccagccaacccagctgagaagatcatccgggtgctcttccctggcaacagcacccagtacaacatcctggagggcctggagaagctgaagcacctggacttcctgaagcagcccctggccacccagaaggacctgaccggccaggtgcccacccctgtggtgaagcagaccaagctgaagcagagagctgacagccgggagagcctgaagccagctgccaagcccctgcccagcaagtctgtgaggaaggagagcaaggaggagaccccagaggtgaccaaggtgaaccacgtggagaagccacccaaggtggagagcaaggagaaggtgatggtgaagaaggacaagcccatcaagacagagaccaagcccagcgtgacagagaaggaggtgcccagcaaggaggagcccagccctgtgaaggccgaggtggccgagaagcaggccacagatgtgaagcccaaggccgccaaggagaagacagtgaagaaggagaccaaggtgaagccagaggacaagaaggaggagaaggagaagcccaagaaggaggtggccaagaaggaggacaagacccccatcaagaaggaggagaagcccaagaaggaggaggtgaagaaggaggtgaagaaggagatcaagaaggaggagaagaaggagcccaagaaggaggtgaagaaggagaccccacccaaggaggtgaagaaggaggtgaagaaggaggagaagaaggaggtgaagaaggaggagaaggagcccaagaaggagatcaagaagctgcccaaggatgccaagaagagcagcacccccctgtctgaggccaagaagccagctgccctgaagcccaaggtgcccaagaaggaggagagcgtgaagaaggacagcgtggccgccggcaagcccaaggagaagggcaagatcaaggtgatcaagaaggagggcaaggctgctgaggccgtggccgctgctgtgggcactggagccaccacagctgctgtgatggctgctgctggcattgctgccatcggccctgccaaggagctggaggccgagaggagcctgatgagcagccctgaggacctgaccaaggactttgaggagctgaaggccgaggaggtggatgtgaccaaggacatcaagccccagctggagctgattgaagatgaggagaagctgaaggagacagagcctgtggaggcctacgtgatccagaaggagcgggaggtgaccaagggccctgctgagagcccagatgagggcatcaccaccacagaaggagagggggagtgtgagcagaccccagaggagctggagcctgtggagaagcagggcgtggatgacatcgagaagtttgaagatgagggcgccggctttgaggagagcagcgagactggagactatgaggagaaggccgagacagaggaggccgaggagcctgaggaggatggagaggagcacgtgtgtgtgtctgccagcaagcacagccccacagaagatgaggagagcgccaaggccgaggctgatgcctacatccgggagaagcgggagagcgtggccagcggagatgacagagctgaggaggacatggatgaggccatcgagaagggggaggccgagcagagcgaggaggaggctgatgaggaggacaaggcagaagatgcccgggaggaggagtatgagcctgagaagatggaggccgaggactatgtgatggctgtggtggacaaggctgctgaggccggcggcgctgaggagcagtatggcttcctgaccacccccaccaagcagctgggcgcccagagccctggccgggagcccgccagcagcatccatgatgagaccctgcccggcggcagcgagagcgaggccacagccagtgatgaggagaaccgggaggaccagcctgaggagttcaccgccaccagcggctacacccagagcaccatcgagatcagcagcgagcccacccccatggatgagatgagcaccccaagagatgtgatgtctgatgagaccaacaatgaggagacagagagccccagccaggagtttgtgaacatcaccaagtatgagagcagcctgtacagccaggagtacagcaagccagcagatgtgacccccctgaatggcttcagcgagggcagcaagacagatgccacagatggcaaggactacaatgccagcgccagcaccatcagcccccccagctccatggaggaggacaagttcagccgcagcgccctgagagatgcctactgcagcgaggtgaaggccagcaccaccctggacatcaaggacagcatctctgctgtgagcagcgagaaggtgagccccagcaagagccccagcctgagccccagcccccccagccccctggagaagacccccctgggggagaggtctgtgaacttcagcctgaccccaaatgagatcaaggtgtctgctgaggccgaggtggcccctgtgtccccagaggtgacccaggaggtggtggaggagcactgtgccagccctgaggacaagaccctggaggtggtgagccccagccagagcgtgacaggcagcgctggccacaccccctactaccagagccccacagatgagaagagcagccacctgcccacagaggtgattgagaagcccccagctgtgcctgtgtcctttgagttcagtgatgccaaggatgaaaatgaaagagcctctgtgagccccatggatgagcctgtgcctgattctgagagccccatcgagaaggtgctgagccccctgcggagccccccactcatcggcagcgagagcgcctatgagagcttcctgtctgcagatgacaaggccagcggcagaggagctgagagcccctttgaggagaagagcggcaagcagggcagcccagaccaggtgtcccctgtgtctgagatgaccagcaccagcctgtaccaggacaagcaggagggcaagagcacagactttgcccccatcaaggaggactttggccaggagaagaagacagatgatgtggaggccatgagcagccagcctgccctggccctggatgagaggaagctgggagatgtgagccccacccagattgatgtgtcccagtttggcagcttcaaggaggacaccaagatgagcatcagcgagggcaccgtgtctgacaagagcgccacccctgtggatgaaggagtggccgaggacacctacagccacatggagggcgtggcctctgtgtccacagcctctgtggccaccagcagcttccctgagcccaccacagatgatgtgagccccagcctgcacgccgaggtgggcagcccccacagcacagaggtggatgacagcctgtctgtgtctgtggtgcagacccccaccaccttccaggagacagagatgagccccagcaaggaggagtgcccccggcccatgagcatcagccccccagacttcagccccaagacagccaagagcaggacccctgtgcaggaccacaggtctgagcagagctccatgagcattgaatttggccaggagagccctgagcagagcctggccatggacttcagccggcagagcccagaccaccccaccgtgggcgctggggtgctgcacatcacagaaaatggccccacagaggtggactacagccccagcgacatgcaggacagcagcctgagccacaagatcccccccatggaggagcccagctacacccaggacaatgacctgtctgagctgatctctgtgtcccaggtggaggccagccccagcaccagcagcgcccacacccccagccagatcgccagccccctgcaggaggacaccctgagtgatgtggccccaccccgggacatgagcctgtatgccagcctgaccagcgagaaggtgcagagcctggagggggagaagctgagccccaagagtgacatcagccccctgaccccccgggagagcagccccctgtacagccccaccttcagtgacagcaccagcgctgtgaaggagaagacagccacctgccacagcagcagcagcccccccattgatgctgccagcgctgagccctacggcttccgggcctctgtgctgtttgacaccatgcagcaccacctggccctgaacagagacctgagcaccccaggcctggagaaggacagcggcggcaagacccctggggacttctcctatgcctaccagaagccagaggagaccaccaggagcccagatgaagaagattatgactatgagagctatgagaagaccaccaggaccagtgatgtgggcggctactactatgagaagattgaaagaaccaccaagagccccagcgacagcggctacagctatgagaccatcggcaagaccaccaagaccccagaagatggagactacagctatgagatcatcgagaagaccaccaggaccccagaggagggcggctacagctatgacatcagcgagaagaccaccagccccccagaggtgtctggctacagctatgagaagacagagaggagccggcggctgctggatgacatcagcaatggctatgatgacagtgaagatggcggccacaccctgggggaccccagctacagctatgagaccacagagaagatcaccagcttccctgagagcgagggctacagctatgagaccagcaccaagaccaccaggaccccagacaccagcacctactgctatgaaacagctgagaagatcaccaggaccccccaggccagcacctacagctatgagaccagtgacctgtgctacacagctgagaagaagagccccagcgaggcccggcaggatgtggacctgtgcctggtgagcagctgtgagtacaagcaccccaagacagagctgagccccagcttcatcaaccccaaccccctggagtggtttgccagcgaggagcccacagaggagagcgagaagcccctgacccagagcggcggggcccctcctcctcctgggggcaagcagcagggccggcagtgtgatgagaccccacccacctctgtgtctgagagcgcccccagccagacagacagtgatgtgcccccagagacagaggagtgccccagcatcacagcagatgccaacatcgacagtgaagatgagagcgagaccatccccacagacaagacagtgacctacaagcacatggaccccccaccagcccctgtgcaggacaggagccccagccccaggcacccagatgtgtccatggtggaccctgaggccctggccatcgagcagaacctgggcaaggccctgaagaaggacctgaaggagaagaccaagaccaagaagccaggcaccaagaccaagagcagcagccctgtgaagaagagtgatggcaagagcaagcccctggccgccagccccaagccagctggcctgaaggagagcagtgacaaggtgtcccgggtggccagccccaagaagaaggagagcgtggagaaggccgccaagcccaccaccaccccagaggtgaaggccgcccggggggaggagaaggacaaggagaccaagaatgctgccaatgccagcgccagcaagagcgccaagacagccacagctggccctggcaccaccaagaccaccaagagcagcgctgtgcccccaggcctgcctgtgtacctggacctgtgctacatccccaaccacagcaacagcaagaatgtggatgtggagttcttcaagagggtgcgcagcagctactacgtggtgtctggaaatgaccctgctgctgaggagcccagcagagctgtgctggatgccctgctggagggcaaggcccagtggggcagcaacatgcaggtgaccctcatccccacccatgacagcgaggtgatgagggagtggtaccaggagacccatgagaagcagcaggacctgaacatcatggtgctggccagcagcagcacagtggtgatgcaggatgagagcttccctgcctgcaagattgagctgtag

SEQ ID NO: 160221 - DNA, 12034 bp, Artificial Sequence
  derived and/or modified sequence
gtgaggatgtgccgggtggtcctttcctcctcctcttcctcctcctcccggctccctgcctagtctccatataaaagcggcgccgcctccccgccctctctcactccccgctcctctccgccgcgcactctccgcggcgctgggagagggcggagggggaggcggcgcgcggcgccagaggaggggggacgcagggggcggagcggagacagtaccttcggagataatcctttctcctgccgcagtggagaggagcggccggagcgagacacttcgccgaggcacagcagccggcaggatggcgaccgtggtggtggaagccaccgagccggagccgtccggcagcatcgccaacccggcggcgtccacctcgcctagcctgtcgcaccgcttccttgacagcaagttctacttgctggtggtcgtcggcgagatcgtgaccgaggagcacctgcggcgtgccatcggcaacatcgagctcggaatccgatcatgggacacaaacctgattgaatgcaacttggaccaagaactcaaactttttgtatctcgacactctgcaagattctctcctgaagtcccaggacaaaagatccttcatcaccgaagtgacgttttagaaacagtggtcctgatcaacccttctgatgaagcagtcagcaccgaggtgcgcttaatgatcactgatgctgcccgacacaagctgctcgtgctgaccgggcagtgctttgaaaataccggagagctcattctccagtccggctctttctccttccagaacttcatagagattttcaccgatcaagagatcggggagttactaagcaccacccatcctgccaacaaagccagcttaaccctgttctgtcctgaagaaggggactggaagaactccaatcttgacagacacaatctccaagacttcatcaatattaaactcaattcagcttctatcttgccagaaatggaaggactttctgagtttaccgagtatctctcagaatcagtggaagtcccatctccctttgacatcttggaacctcccacatcgggtggatttctgaagctctccaagccctgctgttatatttttccaggagggaggggcgattctgccttgtttgcagtgaatggtttcaatatgctcatcaatggcggatcagagagaaaatcctgcttctggaagctcatccgacacttagaccgagtggactccatcctgctcacccacattggggatgacaatttgcctggaataaacagcatgttacagcggaaaattgcagagctcgaggaagaacagtcccagggctccaccacaaatagtgactggatgaaaaacctcatctcccctgacttaggagttgtatttctcaatgtacctgaaaatctcaaaaatccagagccaaacatcaagatgaagagaagcatagaagaagcctgcttcactctccagtacctaaacaaattgtccatgaaaccagaacctctgtttagaagtgtaggcaatactattgatcctgtcattcttttccaaaaaatgggagtaggtaaacttgagatgtatgtgcttaatccagtcaagagcagcaaggaaatgcagtattttatgcagcagtggactggtaccaacaaagacaaggctgaattcattctgcctaatggtcaagaagtagatctcccgatttcctacttaacttcagtctcatctttgattgtgtggcatccagcaaaccctgcggagaaaatcatccgagtcctgtttcctgggaacagcacccagtacaacatcctggaagggttggaaaagctcaaacatctagactttctgaagcagccactggccacccaaaaggatctcactggccaggtgcccactcctgtggtgaaacaaacaaaactgaaacagagggctgatagccgagaaagtctgaagccagccgcaaaaccacttcctagcaaatccgtgcgcaaggagtcaaaagaagaaacccctgaggtcacaaaagtgaatcacgtggaaaagccacccaaagttgaaagcaaagaaaaggtaatggtgaaaaaagacaagccaataaaaacagagaccaaaccttcagtgactgaaaaggaggttcccagcaaagaagagccatctccagtgaaagccgaggtggctgagaagcaagccacagatgtcaaacccaaagctgccaaggagaagacggtgaaaaaggaaacaaaggtaaagcctgaagacaagaaagaggagaaagaaaagccaaagaaagaagtggctaaaaaggaggacaaaacacctatcaagaaggaggaaaaaccaaaaaaggaagaggtgaaaaaagaagtcaaaaaagagatcaagaaagaagagaaaaaagaacccaagaaagaggttaagaaagaaacaccgccaaaggaagtcaagaaggaagttaagaaggaagagaagaaggaagtgaaaaaggaagaaaaggaacccaaaaaagaaattaagaagctccctaaagacgcaaagaaatcatctactcctctgtctgaagcaaaaaaaccagctgctttaaaaccaaaagtacccaagaaggaagagtctgtcaagaaagattctgttgctgccggaaagccaaaggagaaggggaaaataaaagtcattaagaaggaaggcaaggccgcagaggctgtcgctgcagctgtcggcactggagccaccacagcagctgtcatggcggcagctggaatagcagccattggccctgccaaagaactcgaagctgagaggtcccttatgtcatctcctgaggatctaaccaaggactttgaagagttaaaggctgaagaggtcgatgtaacaaaggacatcaagcctcagctggagctaatcgaagacgaagagaaactgaaggaaactgagccagtcgaagcctacgtcatccagaaggagagagaagtcaccaaaggtcctgccgagtcccctgatgagggaatcactaccactgaaggggagggcgaatgtgaacagacacctgaggagctggagcccgtcgagaagcagggagtagacgacattgaaaaatttgaagatgaaggagccggttttgaagaatcttcagagactggagactatgaagagaaggcagaaactgaggaggctgaggagccagaagaggatggggaggaacacgtatgtgtgagcgcctccaagcacagccccactgaggatgaggaaagtgccaaggcggaggctgatgcatacatcagggagaagagggagtctgtggccagtggggatgaccgagccgaagaagacatggatgaggccattgagaaaggagaggctgaacaatctgaagaggaggctgatgaggaggacaaagctgaagatgccagagaggaggaatatgagccggaaaaaatggaagctgaagactatgtgatggctgtggtcgacaaggctgcagaggctggtggtgccgaggagcagtatggattcctcaccacaccaaccaagcaactaggagcccagtctcctggccgagaacctgcatcttcaattcatgatgagactttacctggaggctcagagagcgaggccaccgcttctgatgaggagaatcgagaagaccagcctgaggaattcactgccacctctggctacactcagtctactattgagatatccagtgagcccacccccatggatgagatgtctacccctcgagacgtgatgagtgatgagaccaacaatgaagagacggagtccccttctcaggaattcgtaaatatcaccaaatatgaatcttcattgtattctcaggaatactctaaacctgctgatgttacaccgctcaacggattttctgaaggatcaaaaacagatgccactgatggcaaggattacaatgcttcagcctctaccatatcaccaccctcttccatggaggaagacaaattcagcagatctgctttacgtgatgcttactgctctgaagtgaaagccagcaccactttggacatcaaagatagcatctcagctgtttcaagtgaaaaggtcagcccatcgaagagcccgtccctgagtccatctccaccatcacccttagaaaagacccccctgggtgaacgtagtgtgaacttctctctgacgcccaatgagattaaagtctctgcagaggcagaagtagccccggtgtctcctgaggtgacccaagaagtagttgaagaacattgtgctagtcctgaggacaagactctggaagtggtgtcaccatctcagtccgtgactggcagtgctggtcacacaccttactatcaatctcctactgacgagaaatccagtcatctccctacagaagtcattgaaaaaccaccagcagttccagtgagttttgaattcagtgatgccaaagatgagaatgaaagggcttcagtaagccccatggatgagcccgtgcctgactcagagtctcctattgaaaaagttttgtctcctttacgcagcccgcccctcattggatccgagtctgcttatgaaagttttctaagtgctgatgacaaggcttctggcagaggtgccgaaagtccttttgaagaaaagagtggaaaacaaggctctccagaccaagtaagtccagtttctgaaatgacttctactagtctttaccaagacaaacaggaagggaaaagcacagactttgcaccaataaaagaagactttggccaagaaaagaaaactgatgatgttgaagccatgagttctcaaccagcactggctctggatgaaaggaaattaggagatgtttctcccacacaaatagatgtcagtcagtttggatcttttaaagaagacactaagatgtccatttctgaaggtactgtctcagacaagtcagctactcctgttgatgagggcgtagcagaagacacgtactctcatatggagggtgtggcctcagtgtccacagcctcagtggctacgagctcatttccagagccaacaacagatgatgtgtctccatctctgcatgctgaggttggctccccacattccacagaagtagatgactccctttcagtgtctgttgtgcaaacacctaccacattccaggaaacagaaatgtctccatctaaagaagaatgcccaagaccgatgtcaatttctccaccagatttctcccctaaaactgcaaagtccaggacacccgttcaagatcacagatctgaacagtcctcaatgtctattgaatttggccaagaatctcctgagcaatcccttgctatggacttcagtcgacagtctccagatcaccctacagtgggtgcaggcgtgcttcacatcactgaaaatgggccaactgaagtggactacagtccttctgacatgcaggactccagtttatcacataagataccacctatggaggagccgtcctacacccaagataatgatctttctgagctcatctcagtatctcaggtagaggcctccccgtccacctcttctgctcataccccttctcagatcgcttctcctctccaagaagatactctatccgatgttgctcctcccagagatatgtccttatatgcctcactcacctctgaaaaagtgcaaagtctggaaggagagaagctctctccaaaatctgatatctctccactcaccccacgagagtcctctcctttatattcacctactttttcagattctacctctgcagtcaaagagaaaacagcaacttgccacagttcctcttctccaccaatagatgcagcatccgcagagccctatggcttccgtgcctcagtgttattcgatacaatgcaacaccatctagccttgaatagagatttgtccacacctggcctggagaaggacagtggagggaagacacctggtgactttagctatgcctatcaaaagcctgaggaaacaaccaggtccccagatgaagaagattatgactatgagtcttatgagaagaccacccggacctcagatgtgggtggctattactatgagaagatagagagaaccacaaaatctccaagtgacagtggctactcctatgagaccattgggaaaactaccaagacccctgaagatggtgactattcctatgaaattattgagaagaccacacggacccctgaagagggtgggtactcatatgacataagtgaaaagaccaccagcccccccgaagtgagtggttacagctatgaaaagactgagaggtctagaaggcttctggatgacatcagcaatggctatgatgactctgaggatggtggccacacacttggggaccccagctactcttatgaaaccactgagaaaattaccagtttccctgagtctgaaggttattcctatgagacatctacaaagacaacacgaacccctgatacttccacatactgttacgagactgcagagaaaatcactagaacccctcaggcatccacatattcctacgagacttcagacctatgctacactgcagaaaagaagtccccctcagaagcccgtcaggatgtcgatttatgcctcgtgtcctcttgtgaatacaagcaccccaagacagagctttcaccctctttcattaatcccaatcctcttgagtggtttgccagtgaagaacccactgaagaatctgaaaagcccctcactcaatcagggggagccccaccgcctccaggaggaaagcaacagggccgacagtgtgatgaaacccctcccacctcagtcagcgagtcagccccatcccagaccgactctgatgttcccccggagactgaagagtgcccctccatcacggccgatgccaatatcgactctgaagacgagtcggaaaccatccccacagacaaaactgtcacgtacaaacacatggacccacctccagctcccgtgcaagaccgcagcccttcgccacgccaccctgatgtgtccatggtggacccagaggccttggccattgagcagaacctgggcaaagctctaaagaaagatctgaaagagaagaccaaaaccaaaaagccaggtacaaagaccaagtcatcttcacctgtcaaaaagagtgatgggaagtctaagcccttggcagcttcaccaaaaccagcgggcttgaaagaatcctcggataaagtgtccagggtggcttctcctaagaagaaagaatctgtggaaaaggcagcaaaacccaccaccactcctgaggtcaaagctgcacgtggggaagagaaagacaaggagaccaagaatgctgccaatgcctctgcatccaagtcggccaagaccgccactgcaggaccaggaactaccaagacgaccaagtcatctgctgtgcccccaggcctccctgtgtatttggacctgtgctacattcctaaccacagcaatagtaagaatgttgatgtggaatttttcaagagagtgcggtcttcctactacgtggtgagtgggaatgaccctgctgctgaggagcccagccgggctgtcctggacgctttgttggaaggaaaggctcagtggggcagcaacatgcaggtgacactgatcccaactcatgactcagaagtgatgagggaatggtaccaggagacccatgagaaacagcaagatctcaacatcatggttttagcaagcagcagcacagtggttatgcaagatgaatccttccctgcatgcaagattgaactgtaaaaaccaaggccagccacaccacaggatctgaactttgtttccagaaattcttcaatttgaaatcaccttttctaaaaagtcaattcatctagttaagtcgctgaacaattacctgccaaatgctatactgtgtcatggtgatgcaagtcactaaatttctcagtttttgctgattgctaagggaaataacagtatttccacaatagggttcaaattcctgcaaaattacctaccccagttcatctctgctgaacatttggaaaccatgcactagccaacccaactgacttctgctaggtagaggcatttgtcttagagagagagagagcgcgggagagagtgagagagagtgagagcacaaagataacgcaggagagagagagagaaagaatgagaaagaaaaggaatgcaagagaaggagatgtaatgacagagagttctggtgagatacccagagagaaaaagagagagcagggtggggtaaggaggagaaaataaaccaacaattaggtctgcattttctcaggcagtaggcattctttagtctacataggcaaagttttccatttttgtcagtctgagtcatcaaaaagagtcttaattttctaaaacaagttggctagaagaaagtaaaaagaacaacacttgttatgagggcatgtgatattttcacatcttaattaagctccttcagtttgaaggctgcacactgacataatgtagtgagtgtagactggccatgcaagtggtttgggccccattcagaactctcagactctaaacacacaagtagattgatctaaggcatgctcccagcatttgtccacccacttagtccactctgagtcgattaacctgcatgcagcaacacccaagtccaccccaattaactgaagcaaataccaaagcagttgggagtacatatggtagacaatttgccttaggaagtgacttgaatgtacaaagatacttgatgcacttattttttaatgtgagacagcaagtttataaaacatccatataggattatagatacttaaaggaacacgtgggtgagcgtgtgtgggggtactagaagctgatctgattggtccaacagtttgatgctgagtcatgcgtgttgaatcccacttcagtgcacctgtggcctctcagtcaaacaagttgtgcctttcacagcttctttactactgcaagttcaagactgaaatggcttctatgatcagaactgggaaaacagtgaatcttatggtggaagaggttctcagcaagtgtacagtatttaccttcctttgtcttacattggctttttaaattttccattaatttcaacataattatgggaacaagtgtacagaagaattttttttttaagatatgtgagaacttttcatagatgaactttttaacaaatgttttcatttacaggaaattgcaaagaaaattctcaagtgatagtctttttttttaagtgtttcgtaagacaaaaattgaataatgttttttgaagttctggcaagattgaagtctgatattgcagtaatgatatttattaaaaacccataactaccaggaataatgatacctcccaccccttgattcccataacataaaagtgctacttgagagtgggggagaatggcatggtaggctacttttcagggccttgacaagtacatcacccagtggtatcctacatacttctttcaagatcttcaaccatgaggtaaaagagccaagttcaaagaaccctagcacaaatttgctttgggattttcttttctggaaaaaaaaaataaaagaaatagtacattgaaaacaaatgaattctcaactcctacggttcatgtagagtttagagaaaatttccatcattgtcatcattgaactgtgaacctgggaagccagatcatgattaacactgacatcaagtttcaagttgcagatcaatgcacccagtgttcagatgaggcaaacttctccgtgacaactgtgctgtgctctgtcacattacatttcctgcagactctaagatctacggagtagagaacaatgacctcattttattttctatgttagttatttatttcaaaattaacattttagttgatttttgtctgataagtctatgttttgcactgctaactatgatgagggtttaaaaaaatgcttcttcagggtcctttcactgaggacctatgcagtctacttaatgctgtgaattacatttttcaaatgtttaattttttaaagaaaattaatattctatttttgttaggcttctctagaaatgcagcttttatttattaccccatttctttcaagtccttggaaaataacatattaagggtacaagaaattaacacatgatggaaaagtcattgtgacgccaatgaatttcattgagtataaactcatctacttcaaatttattttataacacaacctaagatactcaagataattatttaatggttagctcttaagttgaattggtctacataatgcgtgggaagaaaaccagatttttagccttcttgccaaatccagacctctggttgatttttctttgacagaagatgcaagttattttccaatttcacaattaaatgtatttaacctgaacattattttgctttaaaaactataaacattgtaggagaattatagccagtcttcagttataaccactccaccctcctcactttctctctctctctctctttttttttttttttttttttgctatgggatttaatgggaaaaatatgtaaaaactgtcactagtcagctggctctttttcctatgaaatctatcagtacctttctccatccgttgttctcaatatgaccacagagcctgagtataccaagaaaaccaatattcgcattacaggttgctcctgtccttccagacacctttcctgcctgtgtgactaacctaattttgctagttccataaatacacgattagtttagtaacagccatcacaatgtaccatgtacattcatggtgagagctaaagatcgacacagacttctaggagctttgttcatactgattacttaatccaattgtatagattgaatatttgagtggaaggaatttacactctgtttaaatgatgggattctatcgagatagcactcatgatcatgacctttttggtagtattcttaaacaaaattctacagagactaaatgttagcgatgatcctccattttcaattttaaccaattctgtcccctttctcaaaaccctgagccctgtgcatgctttctcagtcttgtggtgggactggatacaatgactaacttcccctcctcccctctttaaacaccattttccatggagttcaaaaaaattttttttcttaacgttacatatcatagtgaatggtttccccagtgtatatgaatgttttaagtgtctccaatagcttatgcagtctaggagctttccaatactcatttaattaagatttaatcatttgctaatggaaatcttaccacctttcattttccctctgttaccaaatttcagctcttaggagctgctctacaattctgaatttgcttttcttgcctctctttagtcacctgtcacaggaggttcctgctcagtaatgatattgtgagttaggataataactttttttttttgtgcttcagatttagaagaaaagatcctgtttccatttgaaaggaactgtaagcttttatcttttaaccaactgaacaatacaccaaaagcagcctagggatgagcatttctttgaaagcaattaggttattcacctggtattaaaactatttactgttaaaaaatctgtgacttcatgaagttgatttttaaaggcagcatcaaaaactgaaaaggaagggaaaaaataggcagcttctctgcacttgtttggagctccccaaaacaggagccatggagaagtggcatcaagaccgggctgccctttcgagaacaccctgtggcagttcagagacacgcttttcctacactgcatgcagcccctctttccagcactggaaagaagtggtcttgagcccagctgagaagcacttcacactcctctctcttgttctgaatggtgtttgtgtcagtctgcagctgtgtatggtattatgtcttataatcctgcatcacttctatcctatccagtcatatctaatgtagaaaattagtttccagtgaaagtaatatgtagtgcttttatgatatttgtgtgcaatatcccctcttccattgaggatatttgatgtaaaggaaaaaaaaaaactcagttccacaataaaatacaaaagtggcaaaagtt

SEQ ID NO: 160222 - DNA, 7407 bp, Artificial Sequence
  derived and/or modified sequence
atggccaccgtggtggtggaggccaccgagcccgagcccagcggcagtatagccaatccagctgccagtacaagccccagcctaagtcataggttcctggattctaagttctacctgctggtggtggtgggagaaatcgtcacagaggagcacctacgaagagctattggcaacatcgaactcggaatacgtagttgggatactaatctcatcgagtgtaacctggatcaggagttgaagttattcgtttcgaggcatagtgcaagattctccccagaggtcccaggacagaagatcctgcaccataggtcggacgtacttgagaccgtggtgctgattaatccgtcagacgaggcagtttccaccgaagtgcgcctgatgattaccgacgcagctaggcataaacttttggttctcacagggcaatgcttcgaaaataccggcgagctaattctgcagtctgggagcttcagctttcagaacttcattgagatattcacagatcaggagatcggcgagctgctgagcaccacgcatcccgctaataaagcgtctctcacattattctgtcctgaggagggggattggaaaaactcaaacttggacagacacaatcttcaggattttattaatatcaagctcaactccgccagcatcctccctgaaatggaaggcttgagtgaattcactgaatatttaagcgagtctgtggaggttccatcgcccttcgacattctggagcccccaaccagcggaggcttcttaaagctctcgaagccatgttgttacatttttcccggtggacggggcgattccgccctgttcgccgttaatggatttaacatgctgataaacggaggttctgagcggaaatcatgcttctggaaactgatccgacatctcgaccgggtggactcaattctgctcacccatatcggggatgataatttgcccgggattaactcaatgttgcagcggaaaatcgccgagctggaggaggaacaatctcagggctccaccaccaattcagactggatgaaaaatctgatctcacccgacctgggcgtggtatttttaaatgttcctgaaaatctgaagaacccggagcctaacattaaaatgaaaagaagcattgaagaagcctgcttcaccctccagtacctgaacaaactttccatgaagcccgagccgctgttccgctctgtaggaaatactatcgaccccgtcattctttttcaaaagatgggggtcggcaaactggaaatgtacgtcctcaatccagttaagtcctcgaaggaaatgcaatactttatgcagcagtggacagggacgaacaaggataaagcggaatttattctccctaatgggcaggaggtggatttacccatcagttacttaacaagcgtttcttctctgatcgtgtggcacccagctaaccctgcagaaaaaattatcagagtcctttttccgggcaattcaacccagtacaacatcctggaaggcttggaaaagttgaaacacctagattttctgaagcagcccttggccacccagaaagatctgactggacaggtgcccactccagtggttaagcagactaaactcaaacagagggccgattcccgcgaaagcctgaagccagctgctaagccccttccgtcgaaaagcgtgcggaaagagtctaaggaggagacacctgaagtgacgaaggtgaatcacgtagagaaacctccaaaagtcgaaagtaaggagaaggtaatggtgaagaaggataaacctatcaagaccgaaacgaaacccagtgtgacagagaaggaggtccccagtaaggaagagccttcaccagtgaaggcagaggtggccgaaaagcaggctaccgacgtaaagccaaaagcagccaaggagaaaaccgtgaaaaaagagaccaaggtgaaacccgaagacaaaaaagaagagaaagaaaagccaaagaaagaagttgcgaagaaagaggacaagacccccataaagaaggaagaaaaaccaaagaaggaggaagtcaaaaaagaagtcaaaaaggagatcaaaaaggaggagaagaaggagcccaagaaggaggtcaaaaaggagaccccccctaaagaggttaagaaggaagtgaaaaaggaggaaaaaaaggaagttaagaaagaagaaaaagaacctaagaaggagatcaaaaaactcccgaaagatgcaaagaagtcttctacacccctgtcagaggcaaagaagccggccgcattgaagcctaaagtccctaaaaaggaagagagtgttaaaaaggactccgttgcagctggtaaacccaaggagaaaggcaagatcaaagtgatcaagaaagagggcaaagccgctgaggccgtggccgccgctgtggggaccggcgccacaaccgccgcagttatggcagctgcagggattgccgccatcggccccgcaaaagaactggaggctgagcggtcccttatgagctcacccgaagacctgactaaagatttcgaagagcttaaagccgaagaagtggatgtgaccaaagatatcaaacctcagcttgagctgattgaggacgaagaaaaactcaaagagaccgagccagttgaggcctacgttattcagaaagagcgcgaagtgacaaagggtccagccgagagtcctgacgaagggatcacaactaccgagggggaaggtgaatgcgaacagaccccagaggaactcgagccagttgagaagcagggcgtcgatgatattgagaaattcgaggacgaaggcgccgggttcgaggagtcctcagagacgggggactacgaggaaaaagcggagactgaggaagccgaggaacccgaagaggatggcgaagagcacgtgtgcgtaagtgcctccaaacacagtcccactgaggatgaggaaagcgcgaaagcagaagccgatgcttatattagagaaaaacgcgaatcggtcgcttccggcgacgatcgcgcggaggaagacatggatgaagcaatcgaaaagggcgaagcagagcaatctgaagaagaagcggatgaggaggacaaggcggaggatgcccgtgaagaagagtatgagcctgagaaaatggaagctgaggactacgtcatggcggtagtagataaggccgctgaggccgggggggcagaagaacaatacggattcctaactactccaaccaagcagctcggcgcgcaatctcccggcagagagccggcaagctctattcatgatgaaacccttcctgggggatcagaatcagaagctacagcgagcgatgaggaaaaccgcgaggaccagccggaagaattcacagccaccagcggttatactcagtccacgattgaaatctcctcagagcctactccaatggatgagatgagtacaccacgggatgtgatgtccgatgagacaaataacgaagagactgagagtcctagtcaggaattcgtaaatataactaaatacgagtcctcattgtactcacaagaatattctaagcccgccgacgtcacaccactgaacggcttctcagaaggaagtaagacagatgcaaccgacgggaaggactataatgcttccgcctctaccatcagcccaccatctagcatggaggaggacaagttttcacggtctgccctccgggatgcgtactgcagcgaagttaaggcctccactactctcgacataaaggactctatctcagcggtcagctctgagaaagtgtccccgagcaaaagtccctctctatccccttcgccgcccagcccactagaaaagaccccattgggggaacgtagcgttaacttttctttgaccccgaatgaaataaaggtctccgccgaagctgaagtcgctcccgtgtctcccgaggtgactcaagaggtagtggaggagcattgtgcctcgcccgaagataaaaccctggaagtggtctcgcccagtcaaagtgtcaccggctcagctggccacaccccttattatcagagccctacggatgagaagagctctcacttgcccactgaggtcatcgagaagcctcctgcagtgcctgtgtcctttgagttttcagacgctaaggacgaaaatgaacgggccagcgtatctcccatggacgaaccagttcccgactcagaatccccaatcgagaaggtcctctctcccctacgctctccacccctcatcggtagtgagtccgcatacgagagttttctatcggccgatgacaaagcgagcgggaggggagcagagagtcctttcgaagagaagtctggcaagcaagggagcccagatcaggtgagtcctgtgtctgaaatgacttccacttctttataccaggataaacaggaaggaaagtcaaccgacttcgcccctatcaaagaagacttcggacaggaaaagaagaccgatgacgttgaggctatgtcgtcgcagccagcactagcattggatgagagaaagctgggtgacgtgtcacccacccaaatagacgtcagtcagtttggaagtttcaaggaagatacaaagatgagcatctctgaagggacagttagcgacaagagcgcaactcctgtggatgagggcgtagctgaagacacatactcccacatggaaggggtcgcgtccgtctcgacagcctccgtggcaactagtagctttcctgagcccaccactgacgatgtcagcccaagtctccacgcagaagtcggcagcccccattcgacagaggtggacgactctctttctgtaagcgtggtgcagacacccacaacattccaggagactgagatgtccccatctaaagaggaatgtccccggcccatgtccatcagtcctcccgatttttctcccaaaaccgccaagagtagaacacctgtacaggatcaccgtagtgagcaatctagcatgtcaatcgaatttggccaagaatctcctgagcaaagcctcgccatggatttcagtcgccagagcccggaccaccctacagtgggagctggcgtgttgcacatcacggagaacgggccgacagaggtggactacagcccttctgacatgcaggatagcagcctgagtcacaaaattccgcctatggaggaaccttcctatacccaggataacgacctgtccgagctcatttccgtttctcaagtggaggctagcccctctacctccagcgctcacacaccctctcaaatcgcctcgcccctccaggaagacaccttatcggacgtggccccaccacgggacatgtccctctatgcctccttgacaagcgagaaggttcaatctcttgagggcgagaaactctctcccaaatctgacatctccccgctgactccaagggagtcaagccctctgtattctccaactttctccgactctacttctgccgtgaaagagaaaacggcaacctgtcactctagctctagcccccccatcgatgccgcttcagcagaaccctacgggtttagagctagcgtgctgttcgatactatgcagcaccacctcgcgttaaaccgagatttatccacgcccggcctggagaaggactcaggaggtaagaccccaggagacttttcctatgcctaccagaaacccgaggagaccacacgctcacctgacgaagaggactacgattacgagtcttacgagaagaccacacgcacatcagacgtaggcggctattattacgaaaagatcgaaagaacaacaaagagcccatcagattcaggctattcatatgaaactatcggaaagaccaccaagacgcctgaagatggagactactcatacgagattatcgagaagaccactagaactccagaggagggtgggtactcctacgacatctccgaaaagacaacttccccacccgaggttagcgggtattcatatgagaagacggagcgatctaggaggctgctagatgacatctctaatggatacgacgattcagaggatggcggtcataccctgggcgacccatcatatagttacgagaccaccgaaaagatcaccagctttcccgaatcagaaggatactcctacgaaacatccaccaagaccactaggaccccggataccagcacctactgttatgagactgcagagaagatcactcgcacaccgcaagccagcacatatagttacgagacctctgacctctgctataccgccgagaagaagagcccatccgaggcccgtcaggacgtggatctgtgcctcgtgtcatcctgcgaatacaagcaccccaagacagaacttagccccagttttataaaccctaatcccctggagtggtttgctagtgaagaacccacagaggaaagcgagaaaccattaacccagtctgggggggcgcccccgcctcctgggggaaaacagcagggacgacagtgcgacgagactcctccgacttcagtctctgagtccgcaccatcacagaccgattcagatgtgccgcctgagacagaagagtgtccttccattacagccgatgcaaatattgacagcgaggacgagagcgagacgatccccactgataagactgtgacttataaacatatggaccccccaccagcccccgtgcaggatcgttccccttctcccagacaccccgacgtgagtatggtggatccggaggcattagccatcgaacagaacctgggcaaggccctcaaaaaggatctgaaggagaagaccaaaactaagaagccaggaacaaagacaaagtccagcagccctgttaagaaatctgacggcaagtcgaagcccttagcagcttccccgaaaccagcagggctgaaagagtcttcagacaaagtcagtagggtggcttccccgaagaagaaggaaagcgttgaaaaagccgctaaaccaacgaccaccccagaagtgaaggcagcacgtggtgaggagaaggataaggagacgaagaatgccgccaatgcttctgcttccaaatctgctaaaactgcgacggccgggcctggtacgacaaaaaccacaaagagcagtgctgttcccccaggactgcccgtgtaccttgatctgtgttatatccctaaccattcgaactctaagaacgttgacgtcgaattctttaagagggtccgcagctcctactacgtggtcagcggtaacgacccagccgcagaggaaccaagcagggccgtgctggatgcgctgctcgaaggcaaggcgcagtgggggtcgaatatgcaggtaactcttattcccactcacgatagcgaggtcatgcgagagtggtaccaggagacacatgagaagcagcaggatctgaacataatggtccttgcgagtagctctacagttgtgatgcaggacgagtcttttccagcttgtaaaatcgagttgtag

SEQ ID NO: 160223 - DNA, 7406 bp, Artificial Sequence
  derived and/or modified sequence
atggctacagtcgtcgttgaggccacggagcccgaaccttctgggtctatagccaatcctgccgcttcgacctctccttcactttcacaccgcttcctggattctaaattctacttgctcgtggtggttggcgaaatcgttactgaagagcatctcagacgagccattggtaatattgagctagggattcgatcctgggacaccaatctaatcgagtgtaacctggatcaagagctgaaactgttcgtttccaggcatagtgctcgtttcagccctgaggtgcccggacaaaagattctccaccataggagcgacgttttagagaccgtagtcctaataaatccgtctgatgaagctgtttccaccgaagtccgcctcatgattacagacgctgcccgtcataagctgttggtattgacaggccagtgttttgagaacaccggtgagctcattcttcagtctggatcttttagtttccaaaattttatcgaaatcttcactgatcaggagatcggagaattgctctctaccacacacccggcaaacaaggcatcactaacactgttttgccctgaagagggagattggaaaaattccaatctagacagacacaatttgcaggattttatcaatatcaagctcaactcggccagtattctccctgaaatggagggattgtcagagttcactgaatacctgagcgaatccgtagaagtgccatctccgtttgacatcctcgaacctccaacatccggcggtttcctcaaacttagcaagccttgttgttacattttccccggaggtcgtggagattctgctctgttcgctgtcaacgggttcaatatgctgattaacggcggttcagagaggaagagctgtttttggaaactaatccggcacctggatcgagtcgactccatcctgctcacacacatcggagacgacaatctgcccggaataaattccatgctgcagagaaaaattgctgagttggaagaggaacagtctcagggttctactacaaattcagactggatgaagaatctcatctcccctgaccttggcgtggtattcctgaatgttcccgagaaccttaagaaccccgaacctaatatcaaaatgaaacggagtatagaagaagcttgcttcactctgcaatatttgaataagttaagcatgaagccagagcctttatttcggagcgttggaaatacaattgatccagtgatcctgttccagaagatgggagttgggaagctggaaatgtacgttctgaatccagtgaaaagcagcaaagagatgcaatatttcatgcaacagtggactggaacgaataaagacaaggcagagtttatcctgccaaatggtcaggaggtagatttacccatatcatacctcacgagtgtgtccagcctaattgtgtggcaccccgctaaccccgctgagaaaattatccgcgtcctttttcccggtaactctacacagtacaacatcttggagggccttgaaaaactgaagcacctggacttcttgaaacagcccttagccacccagaaagacctgacaggccaggtcccaacccccgtggtgaagcaaactaagctgaagcagagggccgattctagggagtcactgaaaccagccgcaaaaccactgccctccaagtcagtccgaaaggaatccaaggaagaaactcccgaggtgacaaaggtcaaccatgtggagaagccgccaaaggttgaatctaaggaaaaagtgatggtaaaaaaagataagcctattaaaacagaaaccaaaccctccgttaccgaaaaagaagtgccatctaaggaagagccatctcccgtgaaggctgaagtggcagagaaacaggctaccgacgtgaaacccaaagccgctaaagagaagaccgttaagaaggaaacaaaggtaaaaccggaggacaagaaggaggagaaggagaagccaaagaaagaagtcgccaagaaggaggacaaaacaccgattaagaaagaggagaaacctaagaaggaggaagtgaaaaaggaagttaaaaaggaaattaagaaagaggagaagaaagagccaaagaaagaagtcaagaaagaaaccccaccgaaggaggtcaagaaggaagtgaagaaggaggagaaaaaggaagtgaaaaaagaggaaaaggagccaaaaaaagagatcaagaaacttcctaaagacgcaaagaaaagctccactcccctgagcgaggcaaagaagccggcagccttgaaacccaaggttccgaaaaaggaggaatctgtaaagaaggacagtgtggcagccggtaagccgaaagagaagggaaagatcaaggtgattaaaaaggaagggaaagccgcagaagctgtagccgctgcagtgggcaccggggcaacaaccgctgctgtcatggcggctgcaggtatcgccgcaatcgggcctgccaaagaactagaagctgaacgctcactgatgagctcgcccgaagatcttaccaaggactttgaggaattgaaagcagaggaggtcgacgtgaccaaagatataaaaccacagctagagctcatcgaggacgaggagaaactcaaagaaacagagccagtcgaggcttatgtgatacagaaggaacgcgaagtcactaagggaccggcagaaagcccagatgagggcattactacgactgaaggcgagggtgagtgcgagcagacaccagaagaattagagcccgtggagaaacaaggtgtcgatgacatcgagaaatttgaggatgagggggcaggcttcgaggagtcatccgaaacaggcgattatgaggaaaaagcagaaacagaagaggctgaggagccagaggaagatggagaagagcacgtctgcgtgtcagcttcgaagcatagtcctactgaggatgaggaatccgcaaaggccgaggccgatgcctacattcgcgagaagcgggagtccgttgccagtggagacgaccgggctgaggaggacatggatgaggccattgagaaaggcgaggcagagcaaagcgaggaggaggcagacgaagaggacaaggcggaggatgccagggaggaagaatacgagccagagaagatggaagccgaggattacgtgatggccgttgtagacaaagcggcagaagcgggtggagctgaagaacagtatggcttccttactacgcccaccaagcagctgggggctcagagtcccggacgcgagccggcaagctcgatccatgacgagaccctccctggaggaagtgaaagcgaggctaccgccagtgacgaagagaatagggaagaccagcctgaggaattcactgctacatccgggtacacgcagagcactatcgaaatttcctcagagcctacccctatggatgaaatgtccaccccaagagatgtgatgtcggacgaaactaacaatgaagaaacggagtccccctctcaggaattcgtgaatattacgaagtacgagtccagcctgtattctcaggaatacagcaaacctgctgatgtgactccgttgaacggcttcagcgaggggagtaaaaccgacgccacagatggtaaggactacaatgcttcagcctcaaccattagccccccttctagtatggaagaagacaagttctccagaagcgcgctgagagatgcatactgctcggaggtcaaggcctcaaccacactagatataaaagacagtattagcgctgtttcatctgagaaggtcagcccttcaaaatcgccatccctgagcccctccccaccttcccctttggagaaaacaccactcggtgagaggtccgttaacttctcactcacacccaatgagattaaagtgtctgccgaagccgaggtggcccctgtgtcacctgaggtgactcaggaggtggtcgaggagcactgcgcctcgcctgaggataagacactggaggttgtgtcacccagccagtctgtcaccgggagcgcaggtcatacaccatattatcagtctccgaccgacgagaagtctagccacctgcctaccgaagtcatcgagaagcctcccgctgtgccggtgagtttcgagttctctgacgcaaaggatgagaacgagcgggcttccgtcagtccaatggacgagcctgtccctgactccgaatcccccatcgaaaaagttctgtccccattgagatctccacctctcattggcagcgagtccgcctatgagtcttttctgagcgccgacgataaggcctctgggcgtggcgctgaatcaccttttgaagagaagagcggcaaacaaggatctcctgaccaggtaagtcccgttagcgagatgacctctacaagcttataccaagataagcaggaagggaagagtaccgacttcgccccaatcaaggaggacttcggacaggagaagaaaacggatgatgtggaagccatgtcttctcagcctgcactggccctcgacgagagaaagcttggggatgtctcccccacacagattgatgtgagtcagtttggctcattcaaggaagataccaagatgtccatcagcgaaggcaccgtgtcagataagtccgccaccccagtggacgagggtgtagctgaggacacctattcacatatggaaggagtcgcttctgtaagcacggcctccgttgcaacctcctccttccccgagcctaccacggatgatgtgtccccgtctttacatgccgaggtgggctctccccacagcacagaagtcgacgactcactctccgtcagtgtggtgcagactccaactacctttcaggagaccgagatgtcgccaagcaaagaggaatgtcccaggccgatgtcgatttcacctcctgacttctctccaaagaccgccaaaagccggacgccagtgcaggatcaccgtagcgaacaaagcagcatgtctatcgagttcggccaggagtctccggaacagtcgctcgcaatggatttcagtcggcaatcacccgatcaccctacagttggcgcaggagttctacatatcactgaaaacgggccaacagaggtggactactctccttccgacatgcaggattcctcactgagtcacaagattccaccaatggaggaaccttcatatacacaggataacgatctgtccgagctcatctccgtatcccaagttgaggcaagtcccagcacctcatcagctcacacgcctagtcagatagcaagtcctctgcaggaggacactctgagcgacgtcgcccctccgagagacatgagcctgtacgcctcacttacctcggaaaaagttcagtcattggagggagagaagctgagtcccaagagtgacatttcccccctcacacccagagaaagctctccactctactccccaacctttagtgactccaccagcgccgttaaggagaagaccgccacatgccatagctcttccagtcctcccatcgatgccgcttccgctgaaccttatggtttccgagcctccgtactgtttgacaccatgcaacaccacctggccctaaacagggatctgtcaactccgggtttggagaaggattctggagggaagactcctggagacttctcctatgcttatcaaaagcccgaggagactactaggagtcctgatgaggaggactacgactatgagtcgtatgagaaaaccacacggacaagcgatgtcgggggatactactatgagaagatcgagagaactactaaaagcccttcagatagtgggtattcgtacgaaacaattgggaaaacgactaagacacccgaggacggggactactcctatgaaataattgagaaaactactcggactcccgaagaagggggatattcctatgacatctctgagaagacaacaagccctccagaggtttctggctactcatacgagaagaccgagcgtagtagacggctcctcgacgatatctccaacggctacgatgattcagaggacggcggtcataccctgggggaccctagctacagctatgagaccactgaaaagatcacctctttcccagaaagcgaggggtactcatacgaaacctccacaaaaaccacccggactccagacaccagtacctactgctatgagactgccgagaagataactcgtacgccccaagcaagcacctactcgtatgaaactagcgatctgtgctacacagccgaaaagaagtcgccatcagaggcgagacaggacgtggatctgtgcctggtatctagctgcgaatacaaacacccaaaaaccgaactttctcccagttttatcaatcccaatccattagagtggtttgcctccgaggaacccaccgaagagtctgagaagcctttgactcagtctggaggagctcctcctcctccgggaggaaagcaacagggacggcagtgtgatgagacacccccaacgtctgtctcagagagcgctcctagccagacagatagcgatgtgcctcctgagaccgaggagtgcccctctattacagccgatgcgaatattgattcagaggatgaaagcgaaactataccaaccgacaagacagtcacttacaagcatatggacccccctccggcacccgttcaggatcgatcgccctctcctcggcatccggatgtttcaatggtggatccggaggccctggctatcgagcagaatctggggaaagcgctcaaaaaggatttgaaagagaagaccaaaacaaagaagccaggcaccaagacgaagtctagctccccagtgaaaaagtcagacgggaaatctaagccattggcggcttctccgaagcctgccggattgaaggagtctagcgataaggtctctcgcgtagccagcccaaagaagaaggaaagcgtggagaaggccgctaagcctacaaccactcctgaagttaaggccgctcgcggtgaggaaaaggataaagagaccaaaaatgcagcgaatgcatctgcatctaagagcgccaagactgcgacagcgggaccaggtactaccaagaccacaaagagctcagccgtccccccaggacttccagtgtaccttgatttgtgctacatccctaaccactcaaattccaagaacgtcgatgttgagttttttaagcgcgtgaggtcctcatactacgttgtctctggaaacgaccccgcagcggaggagcctagtcgggctgttctggacgccctgctggagggaaaggctcagtggggttccaacatgcaggtgacactgatacccacccatgatagtgaggttatgcgtgaatggtatcaggaaacccatgagaaacaacaggatcttaacatcatggtgttagcctcaagttccaccgtcgtcatgcaggatgagtctttccctgcgtgtaaaatagagctgta

SEQ ID NO: 160224 - protein, 441 aa, Artificial Sequence
  derived and/or modified sequence
MAEPRQEFEVMEDHAGTYGLGDRKDQGGYTMHQDQEGDTDAGLKESPLQTPTEDGSEEPGSETSDAKSTPTAEDVTAPLVDEGAPGKQAAAQPHTEIPEGTTAEEAGIGDTPSLEDEAAGHVTQARMVSKSKDGTGSDDKKAKGADGKTKIATPRGAAPPGQKGQANATRIPAKTPPAPKTPPSSGEPPKSGDRSGYSSPGSPGTPGSRSRTPSLPTPPTREPKKVAVVRTPPKSPSSAKSRLQTAPVPMPDLKNVKSKIGSTENLKHQPGGGKVQIINKKLDLSNVQSKCGSKDNIKHVPGGGSVQIVYKPVDLSKVTSKCGSLGNIHHKPGGGQVEVKSEKLDFKDRVQSKIGSLDNITHVPGGGNKKIETHKLTFRENAKAKTDHGAEIVYKSPVVSGDTSPRHLSNVSSTGSIDMVDSPQLATLADEVSASLAKQGL

SEQ ID NO: 160225 - DNA, 1326 bp, Artificial Sequence
  derived and/or modified sequence
atggccgagcccagacaggagttcgaggtgatggaggaccacgccggcacctacggcctgggcgacagaaaggaccagggcggctacaccatgcaccaggaccaggagggcgacaccgacgccggcctgaaggagagccccctgcagacccccaccgaggacggcagcgaggagcccggcagcgagaccagcgacgccaagagcacccccaccgccgaggacgtgaccgcccccctggtggacgagggcgcccccggcaagcaggccgccgcccagccccacaccgagatccccgagggcaccaccgccgaggaggccggcatcggcgacacccccagcctggaggacgaggccgccggccacgtgacccaggccagaatggtgagcaagagcaaggacggcaccggcagcgacgacaagaaggccaagggcgccgacggcaagaccaagatcgccacccccagaggcgccgccccccccggccagaagggccaggccaacgccaccagaatccccgccaagaccccccccgcccccaagaccccccccagcagcggcgagccccccaagagcggcgacagaagcggctacagcagccccggcagccccggcacccccggcagcagaagcagaacccccagcctgcccaccccccccaccagagagcccaagaaggtggccgtggtgagaaccccccccaagagccccagcagcgccaagagcagactgcagaccgcccccgtgcccatgcccgacctgaagaacgtgaagagcaagatcggcagcaccgagaacctgaagcaccagcccggcggcggcaaggtgcagatcatcaacaagaagctggacctgagcaacgtgcagagcaagtgcggcagcaaggacaacatcaagcacgtgcccggcggcggcagcgtgcagatcgtgtacaagcccgtggacctgagcaaggtgaccagcaagtgcggcagcctgggcaacatccaccacaagcccggcggcggccaggtggaggtgaagagcgagaagctggacttcaaggacagagtgcagagcaagatcggcagcctggacaacatcacccacgtgcccggcggcggcaacaagaagatcgagacccacaagctgaccttcagagagaacgccaaggccaagaccgaccacggcgccgagatcgtgtacaagagccccgtggtgagcggcgacaccagccccagacacctgagcaacgtgagcagcaccggcagcatcgacatggtggacagcccccagctggccaccctggccgacgaggtgagcgccagcctggccaagcagggcctgtag

SEQ ID NO: 160226 - DNA, 1326 bp, Artificial Sequence
  derived and/or modified sequence
atggcagagccccgccaggaattcgaagtgatggaagaccatgctggtacctacggattaggcgacaggaaggatcaaggtggttacacgatgcatcaagaccaagagggggatacagacgctggactcaaagaaagtcccctgcagacaccaacggaggatggcagcgaggagcccggtagcgagacgtctgatgcaaagagtacaccaactgccgaggacgtgaccgcgccgctggtcgacgagggggctcctgggaagcaggccgccgcccagcctcatactgagattccggagggaacaaccgcagaagaggctggtatcggagatacgccatccctcgaggacgaggcagcaggccatgttacgcaggctcgaatggtttccaagagcaaagatggcacagggtccgacgataaaaaggcaaaaggggcagatggtaaaacaaaaatcgctacccccagaggcgcagcacctcccggtcagaaggggcaggcgaatgccactagaatccctgccaagactcccccggccccgaaaacaccgcccagcagtggagaaccacccaaaagcggagatcgatccggctacagttcccccggctcacctggaacaccgggatcccggtcacggaccccaagtctgccgactcccccgacccgggagcctaagaaagtggctgtggtgcgaacccccccaaaatccccatctagcgcaaagtcgcgcctccagacagcgcccgtcccaatgcctgatctgaagaatgtgaagtctaaaataggaagcacagaaaatctgaagcaccagccaggagggggtaaggtgcaaatcataaataaaaaactggatctgtccaatgtccaaagtaagtgcggtagcaaggacaacattaaacatgtgccgggtgggggcagcgtccagattgtgtataaaccagttgacctgagcaaggttaccagcaagtgtggaagcttggggaatatccatcacaaacccgggggtggccaggtggaagtcaagagtgagaaactggacttcaaggatcgcgtccagagtaaaatcggaagcttagataatattacacacgtccccggcggcgggaacaaaaagattgagactcacaagttaacattccgagagaatgccaaggccaaaactgaccatggggccgaaattgtctacaagagtccggttgtctctggcgatacctcaccacgacacctgagtaatgtgtcttctactggaagcattgacatggtcgattcaccccaactggccacactcgcggatgaggtttcagcaagcctcgctaagcagggtctgtag

SEQ ID NO: 160227 - DNA, 1326 bp, Artificial Sequence
  derived and/or modified sequence
atggccgagccccggcaggagtttgaggtgatggaggaccatgctggcacctacggcctgggggacaggaaggaccagggcggctacaccatgcaccaggaccaggagggggacacagatgctggcctgaaggagagccccctgcagacccccacagaagatggcagcgaggagcccggcagcgagaccagtgatgccaagagcacccccacagcagaagatgtgacagcccccctggtggatgaaggagcccctgggaagcaggccgccgcccagccccacacagagatccctgagggcaccacagctgaggaggccggcatcggggacacccccagcctggaggatgaggccgccggccacgtgacccaggccaggatggtgtccaagagcaaggatggcactggaagtgatgacaagaaggccaagggagcagatggcaagaccaagatcgccaccccaagaggagctgcccctcctggccagaagggccaggccaatgccacccgcatcccagccaagaccccaccagcccccaagaccccacccagcagtggagagccccccaagagcggggacagaagtggctacagcagccctggcagccctggcaccccaggcagccgcagcaggacccccagcctgcccaccccacccacccgggagcccaagaaggtggccgtggtgaggaccccacccaagagccccagcagcgccaagagccggctgcagacagcccctgtgcccatgccagacctgaagaatgtgaagagcaagattggcagcacagagaacctgaagcaccagcccggcggcggcaaggtgcagatcatcaacaagaagctggacctgagcaatgtgcagagcaaatgtggcagcaaggacaacatcaagcacgtgcctgggggcggctctgtgcagatcgtgtacaagcctgtggacctgagcaaggtgaccagcaaatgtggcagcctgggcaacatccaccacaagccaggcggcggccaggtggaggtgaagtctgagaagctggacttcaaggacagagtgcagagcaagattggcagcctggacaacatcacccacgtgcctgggggcggcaacaagaagattgagacccacaagctgaccttccgggagaatgccaaggccaagacagaccacggggctgagatcgtgtacaagagccctgtggtgtctggggacaccagccccaggcacctgagcaatgtgagcagcacaggcagcattgacatggtggacagcccccagctggccaccctggctgatgaggtgtctgccagcctggccaagcagggcctgtag

SEQ ID NO: 160228 - DNA, 1326 bp, Artificial Sequence
  derived and/or modified sequence
atggccgagccccggcaggagttcgaggtgatggaggaccacgccggaacctacgggttaggtgatcggaaagaccagggcgggtacaccatgcaccaggaccaagaaggagacactgacgcggggctgaaggagagccccctgcagactcctactgaggatggaagcgaggagcccgggagtgagacctctgacgctaagagcacccccacagccgaagatgtaactgcaccgctcgtggatgagggagctccaggcaaacaagcggccgcgcagccgcatacagaaattccagaggggaccaccgcggaggaggcaggcattggggataccccctccttggaggacgaggcagcggggcacgtaactcaggctcgcatggtgagtaagtcgaaagacggcaccggctctgacgataaaaaggcaaagggggcggacggcaagactaagatcgccaccccacggggcgctgctccacccgggcaaaaaggccaggcgaacgccacccgcattccagccaagaccccacctgcacccaagacgccaccgtctagcggcgagccaccaaagagcggcgacaggtctggctactcgagccccgggagccccggtactcctgggtcccggagcagaacccctagcctgccaactccaccaacccgcgagcctaaaaaggtcgctgtggttaggacccccccgaagtctcctagcagcgctaagtctaggcttcagacagcccctgttcctatgcctgacctgaagaatgttaagtcaaaaattggctctacagaaaatctgaagcaccagccaggcggaggcaaggtccagatcattaacaagaaactcgacctgagcaacgtgcaatccaaatgcggaagtaaagataatattaaacatgtcccaggcggcggctccgtgcaaatagtctacaagcccgtagatctgagtaaggtgacgagcaagtgtggctccctagggaatattcatcataagcctggtggtggccaggttgaggtcaaatctgaaaagctagattttaaggaccgagtacagtcaaaaatcggatccttggacaacatcacacatgtgcctggcggggggaacaaaaagatagagactcataaactcacatttcgtgagaacgcgaaggctaagactgaccatggtgcagagatagtgtacaaatcccctgtcgtgtcaggggatacttcacccaggcatctcagcaacgtgagctccaccggctctatcgacatggtcgactccccccagctcgccactctggccgatgaggtgtcagcctccctggccaagcagggtctatag

SEQ ID NO: 160229 - DNA, 2525 bp, Artificial Sequence
  derived and/or modified sequence
caggtgagctttgaaccaggatggctgagccccgccaggagttcgaagtgatggaagatcacgctgggacgtacgggttgggggacaggaaagatcaggggggctacaccatgcaccaagaccaagagggtgacacggacgctggcctgaaagaatctcccctgcagacccccactgaggacggatctgaggaaccgggctctgaaacctctgatgctaagagcactccaacagcggaagatgtgacagcacccttagtggatgagggagctcccggcaagcaggctgccgcgcagccccacacggagatcccagaaggaaccacagctgaagaagcaggcattggagacacccccagcctggaagacgaagctgctggtcacgtgacccaagctcgcatggtcagtaaaagcaaagacgggactggaagcgatgacaaaaaagccaagggggctgatggtaaaacgaagatcgccacaccgcggggagcagcccctccaggccagaagggccaggccaacgccaccaggattccagcaaaaaccccacccgctccaaagacaccacccagctctggtgaacctccaaaatcaggggatcgcagcggctacagcagccccggctccccaggcactcccggcagccgctcccgcaccccgtcccttccaaccccacccacccgggagcccaagaaggtggcggtggtccgtactccacccaagtcgccgtcttccgccaagagccgcctgcagacagcccccgtgcccatgccagacctgaagaacgtcaagtccaagatcggctccactgagaacctgaagcaccagccgggaggcgggaaggtgcagataattaataagaagctggatcttagcaacgtccagtccaagtgtggctcaaaggataatatcaaacacgtcccgggaggcggcagtgtgcaaatagtctacaaaccagttgacctgagcaaggtgacctccaagtgtggctcattaggcaacatccatcataaaccaggaggtggccaggtggaagtaaaatctgagaagcttgacttcaaggacagagtccagtcgaagattgggtccctggacaatatcacccacgtccctggcggaggaaataaaaagattgaaacccacaagctgaccttccgcgagaacgccaaagccaagacagaccacggggcggagatcgtgtacaagtcgccagtggtgtctggggacacgtctccacggcatctcagcaatgtctcctccaccggcagcatcgacatggtagactcgccccagctcgccacgctagctgacgaggtgtctgcctccctggccaagcagggtttgtgatcaggcccctggggcggtcaataatcgtggagaggagagaatgagagagtgtggaaaaaaaaagaataatgacccggcccccgccctctgcccccagctgctcctcgcagttcggttaattggttaatcacttaacctgcttttgtcactcggctttggctcgggacttcaaaatcagtgatgggagtaagagcaaatttcatctttccaaattgatgggtgggctagtaataaaatattttaaaaaaaaacattcaaaaacatggccacatccaacatttcctcaggcaattccttttgattcttttttcttcccccctccatgtagaagagggggaaggagaggctctgaaagctgcttctgggggatttcaagggactgggggtgccaaccacctctggccctgttgtgggggtgtcacagaggcagtggcagcaacaaaggatttgaaacttggtgtgttcgtggagccacaggcagacgatgtcaaccttgtgtgagtgtgacgggggttggggtggggcgggaggccacgggggaggccgaggcaggggctgggcagaggggagaggaagcacaagaagtgggagtgggagaggaagccacgtgctggagagtagacatccccctccttgccgctgggagagccaaggcctatgccacctgcagcgtctgagcggccgcctgtccttggtggccgggggtgggggcctgctgtgggtcagtgtgccaccctctgcagggcagcctgtgggagaagggacagcgggtaaaaagagaaggcaagctggcaggagggtggcacttcgtggatgacctccttagaaaagactgaccttgatgtcttgagagcgctggcctcttcctccctccctgcagggtagggggcctgagttgaggggcttccctctctgctccacagaaaccctgttttattgagttctgaaggttggaactgctgccatgattttggccactttgcagacctgggactttagggctaaccagttctctttgtaaggacttgtgcctcttgggagacgtccacccgtttccaagcctgggccaccggcatctctggagtgtgtgggggtctgggaggcgggtcccgagccccctgtccttcccacggccactgcagtcacccctgtctgccccgctgtgctgttgtctgccgt

SEQ ID NO: 160230 - DNA, 1326 bp, Artificial Sequence
  derived and/or modified sequence
atggcagagccccgacaggagttcgaggtgatggaggatcatgccggtacatacgggctgggcgacaggaaggaccagggtggatataccatgcatcaggaccaagaaggtgacacagacgccggtctgaaggaatcccccctccagactcccaccgaggatggaagtgaggagccaggctcagagacatctgacgcgaaatccactcccaccgccgaggacgtcaccgctccactggttgacgagggtgcccctggaaagcaggccgctgctcagccgcacaccgagattcctgagggcactaccgccgaggaagccggaatcggagataccccaagtctggaggacgaggcagctggccacgttacccaggctagaatggtctcaaagtcaaaggatgggacaggttctgatgataaaaaagctaagggcgcagatggcaagactaaaatcgctaccccacggggagcagctcccccagggcaaaagggccaagcgaacgcgactagaattccagcaaaaacgcctccagcacctaagactcccccaagtagtggcgagcctccgaagtccggcgaccgatcggggtatagcagtcccggtagtcctggtactcccggatctcggtcgaggacccccagcctcccaacgcccccaactagagaacctaagaaagttgcggtggttagaactcctccaaaatctcctagcagtgctaagtctcgactgcagacagcaccagttcccatgccagatctgaagaacgtgaaatctaagatcggatccaccgagaatctcaaacatcagcccggaggcggaaaagtccagatcataaataagaagctggatctttccaatgtccaatccaagtgtggctccaaggacaatatcaagcacgtgccaggcggaggctccgtgcagatagtgtacaaacctgtggacctgtctaaggttacaagcaaatgtggttccctgggcaacatacaccataagccagggggaggccaggtcgaggtaaaaagcgaaaaactggactttaaggatagggtgcagtctaagatcggctcattagataacatcacacatgtacctggtggcggaaacaagaaaattgagacacacaaactcaccttccgcgagaacgccaaggctaaaaccgatcacggagcagagattgtgtataagagccccgtcgtgtccggggacacctccccacgtcatttgtctaacgttagttcaacaggctccatcgacatggttgatagtccacaattggctaccctggcagacgaagtttctgcctccctggctaagcagggcctttag

SEQ ID NO: 160231 - DNA, 1326 bp, Artificial Sequence
  derived and/or modified sequence
atggcggagccccgccaggagtttgaggttatggaagaccacgcaggtacttacggcttgggcgatcgcaaggatcaggggggttatacaatgcatcaggaccaggagggcgacactgacgctgggctgaaagagagtcccttgcaaacacctactgaagatgggtccgaggagcccggcagcgagacctccgacgcgaagtccacccccactgcagaagacgtcacagcccccctggttgatgaaggtgccccaggaaagcaggccgctgcccagccgcataccgagatcccagagggcaccaccgccgaggaagctggcatcggcgacactccttccctggaggacgaggcagcaggccacgtcacacaggcgagaatggttagcaaaagtaaggatggaactggtagcgacgacaagaaggcaaagggggctgatggcaagacaaagattgcaacccccaggggcgcagcccccccaggccagaagggacaggccaacgcaacgcgcatccctgcaaaaacccctcctgctccaaagacccccccctcatcgggcgagccccccaagtctggagaccgctctggctattctagcccaggtagccccggaactccgggcagccgaagccggactccaagtctgcccaccccacctacaagggagcccaagaaagtggccgttgttcgcacaccgccgaaatcaccatcttctgcgaagtcgagattgcagaccgccccggtccccatgcctgatctcaagaacgtcaaatctaaaattggttctaccgagaacctgaaacaccaacctggcggagggaaagttcagattattaacaagaagcttgacctgagcaacgtccaatctaaatgcggtagcaaagacaatattaaacacgtgccaggtggtggaagcgtgcaaatagtgtacaagccagtcgacctcagtaaggtcacttccaaatgcggcagcctggggaatatccaccacaagccaggtggtggacaggtcgaagtgaaatctgaaaagctcgacttcaaggacagagtgcagagcaaaataggatcattggataatatcactcacgtaccaggcggggggaataaaaagatagaaacacacaaacttacattccgggagaatgctaaggctaaaactgatcatggcgccgagatagtgtacaagtccccagttgtaagtggggacacatcaccacggcacttaagtaacgtgagttctaccgggagtattgatatggtagattcccctcagcttgccacactggcagacgaggtaagcgctagcctggcgaagcagggactatag

SEQ ID NO: 160232 - DNA, 5811 bp, Artificial Sequence
  derived and/or modified sequence
ggacggccgagcggcagggcgctcgcgcgcgcccactagtggccggaggagaaggctcccgcggaggccgcgctgcccgccccctcccctggggaggctcgcgttcccgctgctcgcgcctgcgccgcccgccggcctcaggaacgcgccctcttcgccggcgcgcgccctcgcagtcaccgccacccaccagctccggcaccaacagcagcgccgctgccaccgcccaccttctgccgccgccaccacagccaccttctcctcctccgctgtcctctcccgtcctcgcctctgtcgactatcaggtgaactttgaaccaggatggctgagccccgccaggagttcgaagtgatggaagatcacgctgggacgtacgggttgggggacaggaaagatcaggggggctacaccatgcaccaagaccaagagggtgacacggacgctggcctgaaagaatctcccctgcagacccccactgaggacggatctgaggaaccgggctctgaaacctctgatgctaagagcactccaacagcggaagatgtgacagcacccttagtggatgagggagctcccggcaagcaggctgccgcgcagccccacacggagatcccagaaggaaccacagctgaagaagcaggcattggagacacccccagcctggaagacgaagctgctggtcacgtgacccaagctcgcatggtcagtaaaagcaaagacgggactggaagcgatgacaaaaaagccaagggggctgatggtaaaacgaagatcgccacaccgcggggagcagcccctccaggccagaagggccaggccaacgccaccaggattccagcaaaaaccccgcccgctccaaagacaccacccagctctggtgaacctccaaaatcaggggatcgcagcggctacagcagccccggctccccaggcactcccggcagccgctcccgcaccccgtcccttccaaccccacccacccgggagcccaagaaggtggcagtggtccgtactccacccaagtcgccgtcttccgccaagagccgcctgcagacagcccccgtgcccatgccagacctgaagaatgtcaagtccaagatcggctccactgagaacctgaagcaccagccgggaggcgggaaggtgcagataattaataagaagctggatcttagcaacgtccagtccaagtgtggctcaaaggataatatcaaacacgtcccgggaggcggcagtgtgcaaatagtctacaaaccagttgacctgagcaaggtgacctccaagtgtggctcattaggcaacatccatcataaaccaggaggtggccaggtggaagtaaaatctgagaagcttgacttcaaggacagagtccagtcgaagattgggtccctggacaatatcacccacgtccctggcggaggaaataaaaagattgaaacccacaagctgaccttccgcgagaacgccaaagccaagacagaccacggggcggagatcgtgtacaagtcgccagtggtgtctggggacacgtctccacggcatctcagcaatgtctcctccaccggcagcatcgacatggtagactcgccccagctcgccacgctagctgacgaggtgtctgcctccctggccaagcagggtttgtgatcaggcccctggggcggtcaataattgtggagaggagagaatgagagagtgtggaaaaaaaaagaataatgacccggcccccgccctctgcccccagctgctcctcgcagttcggttaattggttaatcacttaacctgcttttgtcactcggctttggctcgggacttcaaaatcagtgatgggagtaagagcaaatttcatctttccaaattgatgggtgggctagtaataaaatatttaaaaaaaaacattcaaaaacatggccacatccaacatttcctcaggcaattccttttgattcttttttcttccccctccatgtagaagagggagaaggagaggctctgaaagctgcttctgggggatttcaagggactgggggtgccaaccacctctggccctgttgtgggggtgtcacagaggcagtggcagcaacaaaggatttgaaacttggtgtgttcgtggagccacaggcagacgatgtcaaccttgtgtgagtgtgacgggggttggggtggggcgggaggccacgggggaggccgaggcaggggctgggcagaggggagaggaagcacaagaagtgggagtgggagaggaagccacgtgctggagagtagacatccccctccttgccgctgggagagccaaggcctatgccacctgcagcgtctgagcggccgcctgtccttggtggccgggggtgggggcctgctgtgggtcagtgtgccaccctctgcagggcagcctgtgggagaagggacagcgggtaaaaagagaaggcaagctggcaggagggtggcacttcgtggatgacctccttagaaaagactgaccttgatgtcttgagagcgctggcctcttcctccctccctgcagggtagggggcctgagttgaggggcttccctctgctccacagaaaccctgttttattgagttctgaaggttggaactgctgccatgattttggccactttgcagacctgggactttagggctaaccagttctctttgtaaggacttgtgcctcttgggagacgtccacccgtttccaagcctgggccactggcatctctggagtgtgtgggggtctgggaggcaggtcccgagccccctgtccttcccacggccactgcagtcaccccgtctgcgccgctgtgctgttgtctgccgtgagagcccaatcactgcctatacccctcatcacacgtcacaatgtcccgaattcccagcctcaccaccccttctcagtaatgaccctggttggttgcaggaggtacctactccatactgagggtgaaattaagggaaggcaaagtccaggcacaagagtgggaccccagcctctcactctcagttccactcatccaactgggaccctcaccacgaatctcatgatctgattcggttccctgtctcctcctcccgtcacagatgtgagccagggcactgctcagctgtgaccctaggtgtttctgccttgttgacatggagagagccctttcccctgagaaggcctggccccttcctgtgctgagcccacagcagcaggctgggtgtcttggttgtcagtggtggcaccaggatggaagggcaaggcacccagggcaggcccacagtcccgctgtcccccacttgcaccctagcttgtagctgccaacctcccagacagcccagcccgctgctcagctccacatgcatagtatcagccctccacacccgacaaaggggaacacacccccttggaaatggttcttttcccccagtcccagctggaagccatgctgtctgttctgctggagcagctgaacatatacatagatgttgccctgccctccccatctgcaccctgttgagttgtagttggatttgtctgtttatgcttggattcaccagagtgactatgatagtgaaaagaaaaaaaaaaaaaaaaaaggacgcatgtatcttgaaatgcttgtaaagaggtttctaacccaccctcacgaggtgtctctcacccccacactgggactcgtgtggcctgtgtggtgccaccctgctggggcctcccaagttttgaaaggctttcctcagcacctgggacccaacagagaccagcttctagcagctaaggaggccgttcagctgtgacgaaggcctgaagcacaggattaggactgaagcgatgatgtccccttccctacttccccttggggctccctgtgtcagggcacagactaggtcttgtggctggtctggcttgcggcgcgaggatggttctctctggtcatagcccgaagtctcatggcagtcccaaaggaggcttacaactcctgcatcacaagaaaaaggaagccactgccagctggggggatctgcagctcccagaagctccgtgagcctcagccacccctcagactgggttcctctccaagctcgccctctggaggggcagcgcagcctcccaccaagggccctgcgaccacagcagggattgggatgaattgcctgtcctggatctgctctagaggcccaagctgcctgcctgaggaaggatgacttgacaagtcaggagacactgttcccaaagccttgaccagagcacctcagcccgctgaccttgcacaaactccatctgctgccatgagaaaagggaagccgcctttgcaaaacattgctgcctaaagaaactcagcagcctcaggcccaattctgccacttctggtttgggtacagttaaaggcaaccctgagggacttggcagtagaaatccagggcctcccctggggctggcagcttcgtgtgcagctagagctttacctgaaaggaagtctctgggcccagaactctccaccaagagcctccctgccgttcgctgagtcccagcaattctcctaagttgaagggatctgagaaggagaaggaaatgtggggtagatttggtggtggttagagatatgcccccctcattactgccaacagtttcggctgcatttcttcacgcacctcggttcctcttcctgaagttcttgtgccctgctcttcagcaccatgggccttcttatacggaaggctctgggatctcccccttgtggggcaggctcttggggccagcctaagatcatggtttagggtgatcagtgctggcagataaattgaaaaggcacgctggcttgtgatcttaaatgaggacaatccccccagggctgggcactcctcccctcccctcacttctcccacctgcagagccagtgtccttgggtgggctagataggatatactgtatgccggctccttcaagctgctgactcactttatcaatagttccatttaaattgacttcagtggtgagactgtatcctgtttgctattgcttgttgtgctatggggggaggggggaggaatgtgtaagatagttaacatgggcaaagggagatcttggggtgcagcacttaaactgcctcgtaacccttttcatgatttcaaccacatttgctagagggagggagcagccacggagttagaggcccttggggtttctcttttccactgacaggctttcccaggcagctggctagttcattccctccccagccaggtgcaggcgtaggaatatggacatctggttgctttggcctgctgccctctttcaggggtcctaagcccacaatcatgcctccctaagaccttggcatccttccctctaagccgttggcacctctgtgccacctctcacactggctccagacacacagcctgtgcttttggagctgagatcactcgcttcaccctcctcatctttgttctccaagtaaagccacgaggtcggggcgagggcagaggtgatcacctgcgtgtcccatctacagacctgcagcttcataaaacttctgatttctcttcagctttgaaaagggttaccctgggcactggcctagagcctcacctcctaatagacttagccccatgagtttgccatgttgagcaggactatttctggcacttgcaagtcccatgatttcttcggtaattctgagggtggggggagggacatgaaatcatcttagcttagctttctgtctgtgaatgtctatatagtgtattgtgtgttttaacaaatgatttacactgactgttgctgtaaaagtgaatttggaaataaagttattactctgattaaa

SEQ ID NO: 160233 - DNA, 1326 bp, Artificial Sequence
  derived and/or modified sequence
atggccgagccccggcaggagttcgaggtgatggaggaccacgccggcacgtacggtctgggcgataggaaggaccagggcggatatacaatgcatcaggatcaggaaggagacaccgatgctgggctgaaagaaagcccgcttcagacccctacagaggatggctctgaggaaccaggatcagagacttctgacgcaaagtctacacccacagccgaggacgtgactgccccccttgtggacgagggcgctcctggaaagcaagcggctgcccaacctcatacggaaatcccggagggcaccacagccgaagaagcgggcattggagatacccccagtctcgaagacgaagccgcgggtcacgtcacacaggctcgcatggtgtctaagagtaaggatggcacgggctcagatgacaaaaaggccaaaggtgcggacggcaagactaaaatcgccacccctagaggcgcggccccgcctggtcagaagggtcaggcgaacgctacccgaatccctgccaaaacacctcctgcaccaaagacacctccttctagtggagagccgcccaagtcgggcgatcgaagcgggtactcgtcccccggatcgcctgggacgcctggcagtcgctccaggacaccatccctgccaacacctcctacaagagaacccaaaaaggttgccgtggtgcgtactccgcctaagtccccaagcagcgccaagagtcgacttcagacagcgcctgtccctatgcctgatcttaaaaatgtgaagtctaagatcggatctaccgagaacctgaagcatcaaccaggcggagggaaagtgcagattattaacaaaaagctggacctttcaaacgtgcagtcaaagtgcgggagtaaggataacatcaaacatgtgccaggtggggggagcgtccagatagtttataaaccagtcgacctgtctaaggtcacctccaagtgtgggtccctcgggaatatccaccataagcctggagggggacaggtggaggtgaagagcgaaaagctggattttaaagaccgagtccagtcaaagatcgggagtctggataacatcacccatgtccccgggggaggaaataaaaagattgagacacataagctgacttttagggagaatgccaaggccaagacggatcacggcgccgagatagtctacaagagtccagtagtgagcggggatacctccccacggcatctctctaacgtgagcagcactgggtctatcgacatggttgatagccctcagttggccaccttggcggatgaagtttccgcctctctggccaagcaaggcctctag

SEQ ID NO: 160234 - DNA, 1326 bp, Artificial Sequence
  derived and/or modified sequence
atggctgaaccaaggcaggagttcgaggttatggaggatcacgctggaacttatggactcggcgatagaaaggatcagggcggatacacgatgcaccaggaccaagagggagacaccgatgcaggattgaaggagagccccctgcagacaccaacagaggacggctccgaagaacccggtagtgaaacatctgacgcaaagagtacccctacagcagaggatgtgacggcgccactagtagatgagggggcaccaggaaagcaggccgctgcacagccccacaccgaaatcccagaagggactacggccgaggaggccggtatcggcgatacaccatctctcgaggacgaagcagccggacacgtgacgcaggccaggatggtgagcaagagtaaagacgggactggaagcgatgataagaaggctaagggtgcggacgggaaaacgaaaatcgccacacccaggggagcagccccaccgggtcaaaagggtcaggccaacgctacccgtattcctgccaaaacccccccagcccctaagactccgcctagctcaggcgaacctcccaagtcaggagacaggtctgggtactcttccccgggatccccaggcacaccaggaagcaggtcccgcacaccgagtcttcctaccccccctacccgcgaacctaaaaaagtcgccgtggtccggacgcctccaaaaagtccaagcagcgccaagagcaggctacaaaccgctcctgtgccaatgcccgatctgaaaaacgtgaagtccaagatcggaagcactgagaacctgaagcaccagcctggcggaggcaaagtccagatcattaacaaaaaactggacctctccaacgtccaaagcaaatgcggatctaaagacaacatcaaacatgtaccgggaggaggctctgtgcagattgtctataaacccgtggatctctccaaagttaccagcaagtgtggcagtcttggtaacatccaccataaaccaggagggggacaagtggaagtgaagtcagagaaactcgacttcaaggacagagtccagagtaagatcggaagcctcgataatattactcatgtcccgggaggcggaaacaagaagatcgagacacataagctgacgttccgggaaaatgcaaaggcaaaaaccgatcatggcgctgaaatcgtgtacaagagccccgtggtgtccggggacacatcccctcgacatctttcaaatgtgtcaagcacgggatcaattgacatggtggactccccccagcttgccacacttgcagacgaggtttctgcctcactggccaaacagggactgtag

SEQ ID NO: 160235 - protein, 395 aa, Artificial Sequence
  derived and/or modified sequence
MNGQLNGFHEAFIEEGTFLFTSESVGEGHPDKICDQISDAVLDAHLQQDPDAKVACETVAKTGMILLAGEITSRAAVDYQKVVREAVKHIGYDDSSKGFDYKTCNVLVALEQQSPDIAQGVHLDRNEEDIGAGDQGLMFGYATDETEECMPLTIVLAHKLNAKLAELRRNGTLPWLRPDSKTQVTVQYMQDRGAVLPIRVHTIVISVQHDEEVCLDEMRDALKEKVIKAVVPAKYLDEDTIYHLQPSGRFVIGGPQGDAGLTGRKIIVDTYGGWGAHGGGAFSGKDYTKVDRSAAYAARWVAKSLVKGGLCRRVLVQVSYAIGVSHPLSISIFHYGTSQKSERELLEIVKKNFDLRPGVIVRDLDLKKPIYQRTAAYGHFGRDSFPWEVPKKLKY

SEQ ID NO: 160236 - protein, 176 aa, Artificial Sequence
  derived and/or modified sequence
MNGQLNGFHEAFIEEGTFLFTSESVGEGHPDKICDQIGDAGLTGRKIIVDTYGGWGAHGGGAFSGKDYTKVDRSAAYAARWVAKSLVKGGLCRRVLVQVSYAIGVSHPLSISIFHYGTSQKSERELLEIVKKNFDLRPGVIVRDLDLKKPIYQRTAAYGHFGRDSFPWEVPKKLKY

SEQ ID NO: 160237 - DNA, 1188 bp, Artificial Sequence
  derived and/or modified sequence
atgaacggacagctcaatggcttccacgaagcatttatagaggagggcaccttcctcttcacatccgagtctgtcggggagggtcatcccgataaaatttgcgatcagatctcagatgcggtactggatgctcacttgcagcaagatcctgatgccaaagttgcctgtgaaacggtcgctaagacaggcatgatactcttagccggggagataaccagtcgggctgctgtggactatcagaaggtagttagggaagcggtcaaacacattgggtacgatgactcctccaaagggtttgattacaaaacttgtaacgtgcttgttgcactagagcaacagtcccccgacatcgctcagggcgtgcacctggatagaaacgaggaagacatcggggctggtgaccaaggcctcatgtttggttacgctacagatgaaactgaagagtgcatgcccctgacaattgtattggcacacaagctcaacgctaaactggcagaactgcgcaggaatggaaccctcccatggttgcggcccgactccaagactcaagtgaccgtacagtatatgcaggacaggggggcagtactgccaataagagtgcacactatcgtcatctccgtgcaacacgacgaggaggtttgtttggatgagatgcgagatgccctaaaggagaaagttatcaaggctgtggtaccggctaagtacctcgatgaggatactatttatcatttgcagccaagcgggcgcttcgtgatcggtggaccgcagggtgatgctgggctgacggggaggaaaattatcgtggacacctatggaggatggggggcccacggtggcggggcctttagcggtaaggactatactaaagtggatcgctcagctgcttatgcagcccgctgggttgctaaatccctggtcaaaggcggattgtgcaggagagttctggtgcaggtgtcctatgccatcggagtctctcatcctctctccattagcatcttccactacggcacctcccaaaaatccgagcgagagctgctggaaattgtgaaaaagaatttcgacctgcgtcccggggtcatcgtccgcgacctcgacctgaagaaacccatctatcagcggaccgccgcctacggtcactttggccgtgacagctttccgtgggaggtcccgaagaaactgaagtactag

SEQ ID NO: 160238 - DNA, 531 bp, Artificial Sequence
  derived and/or modified sequence
atgaatggacaactaaacggattccatgaagcctttattgaggaaggtacttttctcttcacctctgaaagcgtcggcgaggggcaccctgacaaaatatgcgaccagatcggagacgcggggcttacaggtaggaaaatcatcgttgatacatacggaggctggggtgcccacggaggtggagctttctcagggaaggactataccaaggtggaccgcagcgctgcctatgctgctaggtgggttgctaaaagcttggtgaagggaggtttgtgccgtcgggttcttgtccaggtcagctatgccatcggggtctcccaccctctgagcatttccattttccattacgggacttctcaaaaatcggagcgcgagctgctggagatcgtcaaaaaaaactttgatctccgcccgggagtgatagtacgtgacttggacttgaaaaagcctatttaccagaggactgctgcctatggccattttgggagagattcttttccatgggaggtgccgaaaaagctgaagtactag

SEQ ID NO: 160239 - DNA, 1188 bp, Artificial Sequence
  derived and/or modified sequence
atgaatggccagctgaatggcttccacgaggccttcatcgaggagggcaccttcctgttcaccagcgagagcgtgggggagggccacccagacaagatctgtgaccagatcagtgatgctgtgctggatgcccacctgcagcaggaccctgatgccaaggtggcctgtgagaccgtggccaagacaggcatgatcctgctggccggggagatcaccagcagagctgctgtggactaccagaaggtggtgcgggaggccgtgaagcacatcggctatgatgacagcagcaaaggatttgactacaagacctgcaatgtgctggtggccctggagcagcagagcccagacatcgcccagggcgtgcacctggacagaaatgaggaggacatcggggccggggaccagggcctgatgtttggctacgccacagatgaaacagaggagtgcatgcccctgaccatcgtgctggcccacaagctgaatgccaagctggccgagctgcggagaaatggcaccctgccctggctgcggccagacagcaagacccaggtgacagtgcagtacatgcaggacagaggagctgtgctgcccatccgggtgcacaccatcgtcatctctgtgcagcatgatgaggaggtgtgcctggatgagatgagagatgccctgaaggagaaggtgatcaaggctgtggtgcctgccaagtacctggatgaggacaccatctaccacctgcagcccagcggccgcttcgtcatcggcggcccccagggagatgctggcctgaccggcaggaagatcatcgtggacacctatggaggctggggcgcccatggaggaggagccttcagcggcaaggactacaccaaggtggacagatctgctgcctatgctgcccgctgggtggccaagagcctggtgaagggcggcctgtgccggcgggtgctggtgcaggtgtcctatgccatcggcgtgagccaccccctgagcatcagcatcttccactacggcaccagccagaagtctgagcgggagctgctggagatcgtgaagaagaactttgacctgcggcctggggtcatcgtgcgggacctggacctgaagaagcccatctaccagaggacagctgcctacggccacttcggccgggacagcttcccctgggaggtgcccaagaagctgaagtactag

SEQ ID NO: 160240 - DNA, 531 bp, Artificial Sequence
  derived and/or modified sequence
atgaatggccagctgaatggcttccacgaggccttcatcgaggagggcaccttcctgttcaccagcgagagcgtgggggagggccacccagacaagatctgtgaccagattggagatgctggcctgactggaaggaagatcatcgtggacacctacggcggctggggcgcccacggcggcggggccttcagcggcaaggactacaccaaggtggacagatctgctgcctatgctgcccgctgggtggccaagagcctggtgaagggcggcctgtgcagaagagtgctggtgcaggtgtcctatgccatcggcgtgagccaccccctgagcatcagcatcttccactacggcaccagccagaagtctgagcgggagctgctggagatcgtgaagaagaactttgacctgcggcctggggtgattgtgcgggacctggacctgaagaagcccatctaccagaggacagctgcctacggccacttcggccgggacagcttcccctgggaggtgcccaagaagctgaagtactag

SEQ ID NO: 160241 - DNA, 2819 bp, Artificial Sequence
  derived and/or modified sequence
ttcgttcgctccgcgccgcccgcctgctacgagtagaacgctgtccgcagcttgcgcatttcgcagccgctgccgcctcgccgctgctccttcgtaaggccacttccgcacaccgacaccaacatgaacggacagctcaacggcttccacgaggcgttcatcgaggagggcacattccttttcacctcagagtcggtcggggaaggccacccagataagatttgtgaccaaatcagtgatgctgtccttgatgcccaccttcagcaggatcctgatgccaaagtagcttgtgaaactgttgctaaaactggaatgatccttcttgctggggaaattacatccagagctgctgttgactaccagaaagtggttcgtgaagctgttaaacacattggatatgatgattcttccaaaggttttgactacaagacttgtaacgtgctggtagccttggagcaacagtcaccagatattgctcaaggtgttcatcttgacagaaatgaagaagacattggtgctggagaccagggcttaatgtttggctatgccactgatgaaactgaggagtgtatgcctttaaccattgtcttggcacacaagctaaatgccaaactggcagaactacgccgtaatggcactttgccttggttacgccctgattctaaaactcaagttactgtgcagtatatgcaggatcgaggtgctgtgcttcccatcagagtccacacaattgttatatctgttcagcatgatgaagaggtttgtcttgatgaaatgagggatgccctaaaggagaaagtcatcaaagcagttgtgcctgcgaaataccttgatgaggatacaatctaccacctacagccaagtggcagatttgttattggtgggcctcagggtgatgctggtttgactggacgcaaaatcattgtggacacttatggcggttggggtgctcatggaggaggtgccttttcaggaaaggattataccaaggtcgaccgttcagctgcttatgctgctcgttgggtggcaaaatcccttgttaaaggaggtctgtgccggagggttcttgttcaggtctcttatgctattggagtttctcatccattatctatctccattttccattatggtacctctcagaagagtgagagagagctattagagattgtgaagaagaatttcgatctccgccctggggtcattgtcagggatctggatctgaagaagccaatttatcagaggactgcagcctatggccactttggtagggacagcttcccatgggaagtgcccaaaaagcttaaatattgaaagtgttagccttttttccccagacttgttggcgtaggctacagagaagccttcaagctctgagggaaagggccctccttcctaaattttcctgtcctctttcagctcctgaccagttgcagtcactctagtcaatgacatgaattttagcttttgtgggggactgtaagttgggcttgctattctgtccctaggtgttttgttcaccattataatgaatttagtgagcataggtgatccatgtaactgcctagaaacaacactgtagtaaataatgctttgaaattgaacctttgtgccctatcacccaacgctccaaagtcataattgcattgactttccccaccagatgctgaaaatgtccttgtgatgtgcacgtaaagtacttgtagttccacttatagcctctgtctggcaatgccacagccctgtcagcatgaatttgtaatgtcttgagctctattatgaatgtgaagccttccccttatcctccctgtaacttgatccatttctaattatgtagctctttgtcagggagtgttccctatccaatcaatcttgcatgtaacgcaagttcccagttggagctccagcctgacatcaaaaaaggcagttaccattaaaccatctccctggtgcttatgctcttaattgccacctctaacagcaccaaatcaaaatctctccactttcagctgtcttttggaggacgtacgtaataaggttttaatttagtaaaccaatcctatgcatggtttcagcactagccaaacctcaccaactcctagttctagaaaaacaggcacttggcagccttgtgatgtcatacagagaagtcacagggcagtacctgagggtctgtaggttgcacactttggtaccagataacttttttttttctttataagaaagcctgagtactccacactgcacaataactcctcccagggttttaactttgttttattttcaaaaccaggtccaatgagctttctgaacagctggtgtagctacagagaaaccagcttccttcagagagcagtgcttttggcggggaggaggaaatcccttcatacttgaacgttttctaattgcttatttattgtattctggggtatggcgtaagtacagagaagccatcacctcagatggcagcttttaaaagattttttttttttctctcaacaccatgattcctttaacaacatgtttccagcattcccaggtaggccaaggtgtcctacagaaaaaccttgggttagacctacagggggtctggctggtgttaacagaagggagggcagagctggtgcggctggccatggagaaagctgacttggctggtgtggtacagagaagccagcttgtttacatgcttattccatgactgcttgccctaagcagaaagtgcctttcaggatctatttttggaggtttattacgtatgtctggttctcaattccaacagtttaatgaagatctaaataaaatgctaggttctaccttaa

SEQ ID NO: 160242 - DNA, 2144 bp, Artificial Sequence
  derived and/or modified sequence
cgcccgcctgctacgagtagaacgctgtccgcagcttgcgcatttcgcagccgctgccgcctcgccgctgctccttcgtaaggccacttccgcacaccgacaccaacatgaacggacagctcaacggcttccacgaggcgttcatcgaggagggcacattccttttcacctcagagtcggtcggggaaggccacccagataagatttgtgaccaaatcggtgatgctggtttgactggacgcaaaatcattgtggacacttatggcggttggggtgctcatggaggaggtgccttttcaggaaaggattataccaaggtcgaccgttcagctgcttatgctgctcgttgggtggcaaaatcccttgttaaaggaggtctgtgccggagggttcttgttcaggtctcttatgctattggagtttctcatccattatctatctccattttccattatggtacctctcagaagagtgagagagagctattagagattgtgaagaagaatttcgatctccgccctggggtcattgtcagggatctggatctgaagaagccaatttatcagaggactgcagcctatggccactttggtagggacagcttcccatgggaagtgcccaaaaagcttaaatattgaaagtgttagccttttttccccagacttgttggcgtaggctacagagaagccttcaagctctgagggaaagggccctccttcctaaattttcctgtcctctttcagctcctgaccagttgcagtcactctagtcaatgacatgaattttagcttttgtgggggactgtaagttgggcttgctattctgtccctaggtgttttgttcaccattataatgaatttagtgagcataggtgatccatgtaactgcctagaaacaacactgtagtaaataatgctttgaaattgaacctttgtgccctatcacccaacgctccaaagtcataattgcattgactttccccaccagatgctgaaaatgtccttgtgatgtgcacgtaaagtacttgtagttccacttatagcctctgtctggcaatgccacagccctgtcagcatgaatttgtaatgtcttgagctctattatgaatgtgaagccttccccttatcctccctgtaacttgatccatttctaattatgtagctctttgtcagggagtgttccctatccaatcaatcttgcatgtaacgcaagttcccagttggagctccagcctgacatcaaaaaaggcagttaccattaaaccatctccctggtgcttatgctcttaattgccacctctaacagcaccaaatcaaaatctctccactttcagctgtcttttggaggacgtacgtaataaggttttaatttagtaaaccaatcctatgcatggtttcagcactagccaaacctcaccaactcctagttctagaaaaacaggcacttggcagccttgtgatgtcatacagagaagtcacagggcagtacctgagggtctgtaggttgcacactttggtaccagataacttttttttttctttataagaaagcctgagtactccacactgcacaataactcctcccagggttttaactttgttttattttcaaaaccaggtccaatgagctttctgaacagctggtgtagctacagagaaaccagcttccttcagagagcagtgcttttggcggggaggaggaaatcccttcatacttgaacgttttctaattgcttatttattgtattctggggtatggcgtaagtacagagaagccatcacctcagatggcagcttttaaaagattttttttttttctctcaacaccatgattcctttaacaacatgtttccagcattcccaggtaggccaaggtgtcctacagaaaaaccttgggttagacctacagggggtctggctggtgttaacagaagggagggcagagctggtgcggctggccatggagaaagctgacttggctggtgtggtacagagaagccagcttgtttacatgcttattccatgactgcttgccctaagcagaaagtgcctttcaggatctatttttggaggtttattacgtatgtctggttctcaattccaacagtttaatgaagatctaaataaaatgctaggttctacctt

SEQ ID NO: 160243 - DNA, 1188 bp, Artificial Sequence
  derived and/or modified sequence
atgaacggccagctgaacggcttccacgaggccttcatcgaggagggtaccttcctttttacctctgaatccgtgggagaaggccacccagacaagatctgtgaccaaatatccgacgccgtcctcgacgcgcatcttcagcaggatccagacgctaaggtcgcctgtgagactgtcgccaaaacgggcatgatcctgctggcaggagagattacatcccgcgcagccgtcgactaccaaaaggtggtgagagaagctgtgaagcatatcgggtatgacgactcctctaaaggctttgactacaagacctgtaacgtcctcgtggccttggagcagcagagtcccgatatcgctcaaggcgttcatctggacaggaatgaggaagatatcggagcaggtgaccaagggctgatgttcgggtacgcaaccgatgagactgaagaatgcatgccactgactattgtgctcgcacataaattgaatgccaagcttgctgaattacggcggaatggcaccctaccctggttaagacctgactctaagacacaagtcacggtccagtacatgcaagaccgaggcgcagtgttgcctataagggtacatactatagtaataagcgtgcagcatgacgaggaagtctgtcttgacgagatgagagacgcattgaaagagaaggtcattaaggctgttgttcccgccaaatatctggacgaggataccatatatcacctgcagccctccggccgctttgtaattggcggccctcagggggatgcaggcctgacagggcgcaagatcatcgttgacacttacggtgggtggggggcacacggcggcggggccttttccggtaaagactatactaaggtggaccggagtgccgcttatgctgcgcggtgggtcgcgaagtcactagtaaaggggggactgtgtagacgagtgctggtccaggtctcttacgcaattggtgtcagccatccactctcaatctccattttccactatggcacaagccagaaatctgaacgagagttattagagatcgtcaaaaagaactttgatctccgcccgggcgtcatcgttagagaccttgacttgaagaagccaatataccagcgcactgcggcttatggtcactttggtagggactccttcccctgggaggttcccaaaaaacttaagtactag

SEQ ID NO: 160244 - DNA, 531 bp, Artificial Sequence
  derived and/or modified sequence
atgaacggccagctgaacggcttccacgaggccttcatcgaggagggcaccttcctctttacctctgaatccgtgggtgagggccacccagacaagatctgcgaccagatcggggatgctgggttaactggaaggaaaatcatcgtggatacatacgggggctggggtgcgcacggcggcggcgcattctctgggaaggattataccaaagtggataggtccgcagcctacgctgcgcgttgggtggcaaaatcattagtgaaggggggcctgtgccggagggttttggtgcaggtgagctatgctatcggcgtgtcccaccccttaagtatatctatatttcactatgggaccagccagaaaagcgaaagggagctgcttgaaatagttaagaagaattttgatctcaggccaggggttatcgtacgtgatttggacctcaaaaaacctatttaccagagaacagccgcctatgggcatttcggtcgcgattcttttccatgggaggtgcctaagaaactgaaatattag

SEQ ID NO: 160245 - DNA, 1188 bp, Artificial Sequence
  derived and/or modified sequence
atgaacggccagttgaacgggtttcacgaagcattcatagaggagggaactttcctctttacctccgaatccgtgggcgagggacaccctgacaaaatttgtgaccaaatcagcgatgcagtactggacgcgcatttacagcaagatcccgatgctaaggttgcctgtgagactgtcgcgaaaaccgggatgatattgctcgccggagagatcacgagtcgtgctgctgtggactaccagaaagtggtgagggaggcagtgaagcatattggctatgacgacagttccaagggtttcgactataaaacttgtaacgttcttgtagcactagagcaacagtcccccgatatagcccaaggagtgcatttagatagaaacgaggaggacatcggagccggagatcaggggcttatgtttggttatgccacagacgaaactgaagagtgtatgccattaacgatcgtactagctcacaagctgaatgccaagctagctgagctgcggagaaacggaacccttccttggttacggcctgactccaaaacacaggtgaccgtccagtacatgcaggatagaggagccgtgcttccaattcgtgtgcacacaattgtcatctccgtccagcatgatgaggaggtgtgcctcgacgaaatgcgcgacgcactgaaggagaaagttattaaagcggtggtcccagcaaaatacttggacgaggacacaatctaccacctgcagcccagcggcagatttgtgatcgggggaccgcagggtgacgcaggcctgacagggagaaagattatcgtggacacatatggaggatggggagcccatggtgggggagcattcagtggaaaagactacacaaaggtggaccgctcggctgcgtacgcagcccgatgggtcgccaagagcctggtgaaaggaggactatgtagacgggtgcttgtacaagttagctatgcgattggcgtgtctcaccctctgtccatatcgattttccactacggaacctcacagaagagcgaacgggagctgctagagattgtgaaaaaaaatttcgacttgcgtcccggagtgattgtgagggaccttgacctgaaaaagcccatataccagaggaccgccgcatatgggcattttggcagggattcgttcccctgggaagtgcccaagaaattgaaatactag

SEQ ID NO: 160246 - DNA, 531 bp, Artificial Sequence
  derived and/or modified sequence
atgaacggacagttaaacggcttccatgaggcttttatcgaggaaggcacattcttgttcacatccgaatccgtgggcgagggccacccagataaaatctgcgatcaaataggggatgctggcctgactggaaggaagattattgtcgacacctacggcggatggggcgctcatggcggaggtgcctttagtggaaaggattacactaaagttgatcgaagcgcagcctacgctgccaggtgggtggctaaaagtctggtcaaggggggattgtgtcgtagggttctcgtgcaggtgtcttacgccatcggcgtcagccatcctttgtccatcagcatttttcactatgggactagccagaagtccgaaagggagctgttagagatagtgaaaaagaactttgatctgcggccaggagttatcgtcagggaccttgacctgaagaagcccatctaccaaagaactgctgcttatggacacttcggaagggacagctttccttgggaagtaccaaaaaaactgaaatattag

SEQ ID NO: 160247 - DNA, 1188 bp, Artificial Sequence
  derived and/or modified sequence
atgaacggccagctgaacggcttccacgaggccttcatcgaggagggcaccttcctgttcaccagcgagagcgtgggcgagggccaccccgacaagatctgcgaccagatcagcgacgccgtgctggacgcccacctgcagcaggaccccgacgccaaggtggcctgcgagaccgtggccaagaccggcatgatcctgctggccggcgagatcaccagcagagccgccgtggactaccagaaggtggtgagagaggccgtgaagcacatcggctacgacgacagcagcaagggcttcgactacaagacctgcaacgtgctggtggccctggagcagcagagccccgacatcgcccagggcgtgcacctggacagaaacgaggaggacatcggcgccggcgaccagggcctgatgttcggctacgccaccgacgagaccgaggagtgcatgcccctgaccatcgtgctggcccacaagctgaacgccaagctggccgagctgagaagaaacggcaccctgccctggctgagacccgacagcaagacccaggtgaccgtgcagtacatgcaggacagaggcgccgtgctgcccatcagagtgcacaccatcgtgatcagcgtgcagcacgacgaggaggtgtgcctggacgagatgagagacgccctgaaggagaaggtgatcaaggccgtggtgcccgccaagtacctggacgaggacaccatctaccacctgcagcccagcggcagattcgtgatcggcggcccccagggcgacgccggcctgaccggcagaaagatcatcgtggacacctacggcggctggggcgcccacggcggcggcgccttcagcggcaaggactacaccaaggtggacagaagcgccgcctacgccgccagatgggtggccaagagcctggtgaagggcggcctgtgcagaagagtgctggtgcaggtgagctacgccatcggcgtgagccaccccctgagcatcagcatcttccactacggcaccagccagaagagcgagagagagctgctggagatcgtgaagaagaacttcgacctgagacccggcgtgatcgtgagagacctggacctgaagaagcccatctaccagagaaccgccgcctacggccacttcggcagagacagcttcccctgggaggtgcccaagaagctgaagtactag

SEQ ID NO: 160248 - DNA, 531 bp, Artificial Sequence
  derived and/or modified sequence
atgaacggccagctgaacggcttccacgaggccttcatcgaggagggcaccttcctgttcaccagcgagagcgtgggcgagggccaccccgacaagatctgcgaccagatcggcgacgccggcctgaccggcagaaagatcatcgtggacacctacggcggctggggcgcccacggcggcggcgccttcagcggcaaggactacaccaaggtggacagaagcgccgcctacgccgccagatgggtggccaagagcctggtgaagggcggcctgtgcagaagagtgctggtgcaggtgagctacgccatcggcgtgagccaccccctgagcatcagcatcttccactacggcaccagccagaagagcgagagagagctgctggagatcgtgaagaagaacttcgacctgagacccggcgtgatcgtgagagacctggacctgaagaagcccatctaccagagaaccgccgcctacggccacttcggcagagacagcttcccctgggaggtgcccaagaagctgaagtactag

SEQ ID NO: 160249 - protein, 332 aa, Artificial Sequence [sequence omitted]

SEQ ID NO: 160250 - DNA, 999 bp, Artificial Sequence
  derived and/or modified sequence
atggtgaacagcacccacagaggcatgcacaccagcctgcacctgtggaacagaagcagctacagactgcacagcaacgccagcgagagcctgggcaagggctacagcgacggcggctgctacgagcagctgttcgtgagccccgaggtgttcgtgaccctgggcgtgatcagcctgctggagaacatcctggtgatcgtggccatcgccaagaacaagaacctgcacagccccatgtacttcttcatctgcagcctggccgtggccgacatgctggtgagcgtgagcaacggcagcgagaccatcgtgatcaccctgctgaacagcaccgacaccgacgcccagagcttcaccgtgaacatcgacaacgtgatcgacagcgtgatctgcagcagcctgctggccagcatctgcagcctgctgagcatcgccgtggacagatacttcaccatcttctacgccctgcagtaccacaacatcatgaccgtgaagagagtgggcatcatcatcagctgcatctgggccgcctgcaccgtgagcggcatcctgttcatcatctacagcgacagcagcgccgtgatcatctgcctgatcaccatgttcttcaccatgctggccctgatggccagcctgtacgtgcacatgttcctgatggccagactgcacatcaagagaatcgccgtgctgcccggcaccggcgccatcagacagggcgccaacatgaagggcgccatcaccctgaccatcctgatcggcgtgttcgtggtgtgctgggcccccttcttcctgcacctgatcttctacatcagctgcccccagaacccctactgcgtgtgcttcatgagccacttcaacctgtacctgatcctgatcatgtgcaacagcatcatcgaccccctgatctacgccctgagaagccaggagctgagaaagaccttcaaggagatcatctgctgctaccccctgggcggcctgtgcgacctgagcagcagatactag

SEQ ID NO: 160251 - DNA, 999 bp, Artificial Sequence
  derived and/or modified sequence
atggtcaatagcacccatcgaggaatgcacactagcctgcatctgtggaacaggagttcctatagactccactccaatgcatcagagagcctgggcaagggctatagcgacggcggatgttacgagcaactgttcgtcagcccggaagttttcgtaacattaggcgtaatctctctcctcgagaatatcctggtaattgtcgccatcgcgaaaaataaaaatcttcactcccctatgtactttttcatttgtagcttagcggttgcagatatgctggtgtcagtgtccaatggatcagagacaattgtgatcactttgcttaacagcacagataccgacgcacaatcttttaccgtaaatatcgacaatgtcatcgactccgtcatttgctcctcactcttggccagcatttgcagccttctgtccattgctgtggaccgatacttcacgatcttttatgctctgcagtatcacaatataatgacagtgaagcgggtgggcattatcatctcttgcatttgggccgcttgtactgtgagtggaatcctttttattatatacagcgattctagcgcagttattatttgccttattactatgttcttcacaatgctggcattgatggcttccctgtacgtgcatatgtttctcatggccagactgcacattaagagaatcgccgtgctgccagggaccggcgccatccgccagggcgcaaacatgaagggtgccatcacactgactattctgattggagtctttgtggtctgctgggcaccattctttctacacttgatcttctacatttcttgccctcagaatccatattgcgtctgctttatgtcacacttcaacctttacctcattcttatcatgtgcaactcaatcatcgaccctctgatttatgccctcagatcgcaggaattgcgcaaaaccttcaaggagattatctgctgctatcctcttgggggactctgtgacttgtcctctagatactag

SEQ ID NO: 160252 - DNA, 999 bp, Artificial Sequence
  derived and/or modified sequence
atggtgaacagcacccaccggggcatgcacaccagcctgcacctgtggaacagaagcagctaccgcctgcacagcaatgccagcgagagcctgggcaagggctacagtgatggcggctgctatgagcagctgtttgtgtccccagaggtgtttgtgaccctgggcgtcatcagcctgctggagaacatcctggtgattgtggccatcgccaagaacaagaacctgcacagccccatgtacttcttcatctgcagcctggccgtggccgacatgctggtgtctgtgtccaatggaagtgagaccatcgtcatcaccctgctgaacagcacagacacagatgcccagagcttcaccgtgaacatcgacaacgtgattgattctgtcatctgcagcagcctgctggccagcatctgcagcctgctgagcattgctgtggaccgctacttcaccatcttctacgccctgcagtaccacaacatcatgacagtgaagagggtgggcatcatcatcagctgcatctgggccgcctgcaccgtgtctggcatcctcttcatcatctacagcgacagcagcgctgtgatcatctgcctgatcaccatgttcttcaccatgctggccctgatggccagcctgtatgtgcacatgttcctgatggcccggctgcacatcaagagaattgctgtgctgcccggcaccggggccatccggcagggcgccaacatgaagggggccatcaccctgaccatcctgattggagtgtttgtggtgtgctgggcccccttcttcctgcacctgatcttctacatcagctgcccccagaacccctactgtgtgtgcttcatgagccacttcaacctgtacctgatcctgatcatgtgcaacagcatcatcgaccccctcatctatgccctgcggagccaggagctgaggaagaccttcaaggagatcatctgctgctaccccctgggcggcctgtgtgacctgagcagccgctactag

SEQ ID NO: 160253 - DNA, 999 bp, Artificial Sequence
  derived and/or modified sequence
atggtgaacagcacccaccggggcatgcacaccagcctgcacctgtggaatagatcatcctatagactccatagtaatgcaagtgagtctctcggcaagggatattctgatggaggatgttacgagcagctctttgtttcgcccgaagtatttgtgactctgggcgttatttcactgcttgaaaacattcttgtcatcgtggccatagctaaaaataagaacctacacagccctatgtatttctttatctgttctctagcagtcgctgatatgcttgtcagtgtgtccaatggctccgaaaccatcgtcataacactgcttaactcgacagacacagacgcccaatcatttacagtcaatatagataatgtaatcgactcagtgatctgttcttccctgctggcaagcatctgctcacttttatctatagcagtggacaggtacttcactatattttacgcgttacagtaccataatatcatgacagtgaaaagggttggaatcatcatttcttgtatatgggccgcctgcacagttagtggcattctgtttataatatactcagattccagcgccgtgatcatctgcctaataactatgttcttcacgatgcttgcacttatggcctcactctatgtgcatatgtttttaatggcacgcctgcatattaaaaggatcgcagtcctgccggggacaggggccatcagacagggcgctaatatgaaaggagcaatcaccctgacgatactcattggggttttcgtggtgtgctgggccccttttttcctgcacctgatcttctatatttcctgcccacagaatccatattgcgtgtgcttcatgagtcactttaatttatatctcatcctcattatgtgtaatagtattatcgacccccttatttatgctctccgctcccaggaacttaggaagactttcaaggaaatcatatgctgctaccctttggggggcctctgtgacttgtcctcgcgttattag

SEQ ID NO: 160254 - DNA, 999 bp, Artificial Sequence
  derived and/or modified sequence
atggtgaattccacccacaggggtatgcacactagtctgcacttgtggaacaggagtagctaccgcctgcattccaacgctagcgagtctctggggaagggctactccgacggagggtgttatgagcagttgtttgtatcacctgaagtcttcgttactcttggggttatcagtctacttgaaaacattttggttattgtggctatcgctaagaacaagaatctgcactcgcctatgtacttcttcatatgcagtctcgccgtggcagatatgctagtctccgtgtcgaacggctctgagacaatcgtcattacgttgttgaatagtactgatacagatgcgcagtccttcaccgtgaacattgacaatgttattgactcagtgatatgctctagcctgctggccagtatctgcagcttgttgagcatagcagttgatagatattttaccatcttttacgccttgcagtatcataacatcatgaccgttaagcgtgtgggtatcattatctcgtgcatttgggccgcttgtaccgtcagcggcatcctgtttattatatatagtgactcaagtgccgtgatcatatgtttaatcaccatgttttttaccatgctagccctgatggcctcactctatgttcacatgttcctgatggccagattgcatatcaagaggatcgccgtgcttcctgggactggtgctatccgccagggggcaaatatgaagggggctataaccttgaccattttaataggggtgttcgtggtctgttgggcgcctttcttcctgcatcttatcttttacataagttgcccccagaacccatactgtgtttgtttcatgtctcatttcaatctgtatttgatactgataatgtgcaatagcatcattgatcccctcatctatgcgcttcgaagccaggagctcaggaaaaccttcaaggagattatatgctgctaccctcttgggggtttgtgtgaccttagctcacggtactag

SEQ ID NO: 160255 - DNA, 1438 bp, Artificial Sequence
  derived and/or modified sequence
aaagcaacgctcaggctggaaacagaagcttccgagaggcagccgatgtgagcatgtgcgcacagattcgtctcccaatggcatggcagcttcaaggaaaattattttgaacagacttgaatgcataagattaaagttaaagcagaagtgagaacaagaaagcaaagagcagactctttcaactgagaatgaatattttgaagcccaagattttaaagtgatgatgattagagtcgtacctaaaagagactaaaaactccatgtcaagctctggacttgtgacatttactcacagcaggcatggcaattttagcctcacaactttcagacagataaagacttggaggaaataactgagacgactccctgacccaggaggttaaatcaattcagggggacactggaattctcctgccagcatggtgaactccacccaccgtgggatgcacacttctctgcacctctggaaccgcagcagttacagactgcacagcaatgccagtgagtcccttggaaaaggctactctgatggagggtgctacgagcaactttttgtctctcctgaggtgtttgtgactctgggtgtcatcagcttgttggagaatatcttagtgattgtggcaatagccaagaacaagaatctgcattcacccatgtactttttcatctgcagcttggctgtggctgatatgctggtgagcgtttcaaatggatcagaaaccattgtcatcaccctattaaacagtacagatacggatgcacagagtttcacagtgaatattgataatgtcattgactcggtgatctgtagctccttgcttgcatccatttgcagcctgctttcaattgcagtggacaggtactttactatcttctatgctctccagtaccataacattatgacagttaagcgggttgggatcatcataagttgtatctgggcagcttgcacggtttcaggcattttgttcatcatttactcagatagtagtgctgtcatcatctgcctcatcaccatgttcttcaccatgctggctctcatggcttctctctatgtccacatgttcctgatggccaggcttcacattaagaggattgctgtcctccccggcactggtgccatccgccaaggtgccaatatgaagggagcgattaccttgaccatcctgattggcgtctttgttgtctgctgggccccattcttcctccacttaatattctacatctcttgtcctcagaatccatattgtgtgtgcttcatgtctcactttaacttgtatctcatactgatcatgtgtaattcaatcatcgatcctctgatttatgcactccggagtcaagaactgaggaaaaccttcaaagagatcatctgttgctatcccctgggaggcctttgtgacttgtctagcagatattaaatggggacagagcacgcaat

SEQ ID NO: 160256 - protein, 325 aa, Artificial Sequence
  derived and/or modified sequence
MNSSFHLHFLDLNLNATEGNLSGPNVKNKSSPCEDMGIAVEVFLTLGVISLLENILVIGAIVKNKNLHSPMYFFVCSLAVADMLVSMSSAWETITIYLLNNKHLVIADAFVRHIDNVFDSMICISVVASMCSLLAIAVDRYVTIFYALRYHHIMTARRSGAIIAGIWAFCTGCGIVFILYSESTYVILCLISMFFAMLFLLVSLYIHMFLLARTHVKRIAALPGASSARQRTSMQGAVTVTMLLGVFTVCWAPFFLHLTLMLSCPQNLYCSRFMSHFNMYLILIMCNSVMDPLIYAFRSQEMRKTFKEIICCRGFRIACSFPRRD

SEQ ID NO: 160257 - DNA, 978 bp, Artificial Sequence
  derived and/or modified sequence
atgaacagcagcttccacctgcacttcctggacctgaacctgaacgccaccgagggcaacctgagcggccccaacgtgaagaacaagagcagcccctgcgaggacatgggcatcgccgtggaggtgttcctgaccctgggcgtgatcagcctgctggagaacatcctggtgatcggcgccatcgtgaagaacaagaacctgcacagccccatgtacttcttcgtgtgcagcctggccgtggccgacatgctggtgagcatgagcagcgcctgggagaccatcaccatctacctgctgaacaacaagcacctggtgatcgccgacgccttcgtgagacacatcgacaacgtgttcgacagcatgatctgcatcagcgtggtggccagcatgtgcagcctgctggccatcgccgtggacagatacgtgaccatcttctacgccctgagataccaccacatcatgaccgccagaagaagcggcgccatcatcgccggcatctgggccttctgcaccggctgcggcatcgtgttcatcctgtacagcgagagcacctacgtgatcctgtgcctgatcagcatgttcttcgccatgctgttcctgctggtgagcctgtacatccacatgttcctgctggccagaacccacgtgaagagaatcgccgccctgcccggcgccagcagcgccagacagagaaccagcatgcagggcgccgtgaccgtgaccatgctgctgggcgtgttcaccgtgtgctgggcccccttcttcctgcacctgaccctgatgctgagctgcccccagaacctgtactgcagcagattcatgagccacttcaacatgtacctgatcctgatcatgtgcaacagcgtgatggaccccctgatctacgccttcagaagccaggagatgagaaagaccttcaaggagatcatctgctgcagaggcttcagaatcgcctgcagcttccccagaagagactag

SEQ ID NO: 160258 - DNA, 978 bp, Artificial Sequence
  derived and/or modified sequence
atgaactccagcttccacctccacttcctggaccttaacctgaacgcaacagaaggaaacctctctgggcctaacgtcaagaataaatcctcaccttgtgaagatatgggtatcgctgtggaagtttttcttacactcggggttataagtttactagagaacatactagttattggtgccattgtgaagaacaaaaatctgcacagccccatgtatttcttcgtgtgcagtctggcagtggcggacatgctagtttctatgagttctgcctgggagaccatcaccatttatcttctcaataataaacatctcgtgatagccgacgccttcgtccgccatatagataatgtattcgatagcatgatttgtatctcagtagtggccagcatgtgctcccttctcgccattgcggtggatcgatatgtgacgatcttttacgcccttaggtaccaccacatcatgactgcaagacgatcaggggccattattgcaggtatttgggcattctgcacaggctgcggaattgtgtttatcctttacagcgaatcaacttacgtaatcttgtgtttaatttctatgttttttgccatgctgtttttgctggtgtcactctacatccatatgtttctgctggctaggactcatgtcaagaggatcgcggctctgccgggcgcaagctccgcccgccagcgcacttcaatgcaaggcgccgtgaccgtaactatgctgcttggcgttttcacagtttgctgggccccatttttcttacatttaacactgatgctgtcgtgtccccagaatctgtactgctctcggtttatgagccattttaatatgtatctcatcctgattatgtgcaactctgtcatggatcccctcatctatgccttccgtagtcaggagatgcgcaagacttttaaagagatcatctgctgtaggggattcagaatagcctgctcatttccacgacgcgattag

SEQ ID NO: 160259 - DNA, 978 bp, Artificial Sequence
  derived and/or modified sequence
atgaacagcagcttccacctgcacttcctggacctgaacctgaatgccacagagggcaacctgagcggccccaacgtgaagaacaagagcagcccctgtgaggacatgggcattgctgtggaggtgttcctgaccctgggcgtcatcagcctgctggagaacatcctggtgattggagccatcgtgaagaacaagaacctgcacagccccatgtacttctttgtgtgcagcctggccgtggccgacatgctggtgtccatgagcagcgcctgggagaccatcaccatctacctgctgaacaacaagcacctggtgattgctgatgcctttgtgcgccacatcgacaacgtgtttgacagcatgatctgcatctctgtggtggcctccatgtgcagcctgctggccatcgctgtggacagatatgtgaccatcttctacgccctgcgctaccaccacatcatgacagccaggagaagtggggccatcatcgccggcatctgggccttctgcaccggctgcggcatcgtgttcatcctgtacagcgagagcacctacgtgatcctgtgcctgatctccatgttctttgccatgctgttcctgctggtgtccctgtacatccacatgttcctgctggcccggacccacgtgaagagaattgctgccctgcccggggccagcagcgcccggcagaggacctccatgcagggcgctgtgacagtgaccatgctgctgggcgtcttcaccgtgtgctgggcccccttcttcctgcacctgaccctgatgctgagctgcccccagaacctgtactgcagccgcttcatgagccacttcaacatgtacctgatcctgatcatgtgcaacagcgtgatggaccccctcatctatgccttccgcagccaggagatgaggaagaccttcaaggagatcatctgctgccggggcttcagaattgcctgcagcttcccccggcgggactag

SEQ ID NO: 160260 - DNA, 978 bp, Artificial Sequence
  derived and/or modified sequence
atgaacagcagcttccacctgcacttcctggacctgaacctgaacgctaccgagggaaatctgagcggccccaacgtaaagaacaagtcttctccttgtgaggatatggggatagctgtggaggtgtttctgaccctgggagtcatttccttactcgagaacatccttgttattggggccatcgtgaagaacaagaacctccactcccctatgtactttttcgtgtgcagccttgcggtcgctgatatgttggtgagcatgtcaagtgcatgggaaacgattactatttacctcctgaacaataagcatctggtgatcgcggatgcttttgtcaggcacatcgataatgtgtttgactctatgatctgcatttcagtagtggcgtccatgtgcagcctgctggccattgcagtggacagatacgtcacaattttttacgctctgcgatatcatcatattatgactgcgcggaggagtggcgccatcatcgccgggatttgggccttttgcaccggctgtggtatcgtcttcatcctgtacagcgagagcacctatgtcattctctgtctgatttccatgttctttgcgatgctcttcctgctcgtatctttgtatatacatatgttcctgctggcccgcacacacgtaaaaagaatcgccgcgttgcctggcgcaagctcagctagacagcgcacatccatgcagggtgcagttaccgtgacgatgctgctcggcgtgttcacagtttgctgggcccctttttttctccatttaacactgatgctgagctgcccccagaacctgtactgcagcaggtttatgagtcacttcaacatgtacctgattctgatcatgtgtaattcagtgatggatccactgatctacgccttcagaagccaggaaatgcgcaagacatttaaggaaattatttgctgtcgcggattcagaatagcttgtagctttcctaggagagactag

SEQ ID NO: 160261 - DNA, 978 bp, Artificial Sequence
  derived and/or modified sequence
atgaactcttccttccacctccatttcctagatctgaatttgaacgccacggagggaaatctgagtggacctaatgtcaagaataaatcatctccctgcgaggacatgggaatcgcggtagaggttttcctcactttgggcgtgattagcctactggagaatatcctggtcatcggcgcaatcgtgaagaataaaaatttgcacagcccgatgtacttctttgtttgctctctagctgtcgccgatatgctggtgagtatgagcagtgcctgggagactatcacaatttacctactgaataacaaacatctcgtaatcgcagacgcttttgtgagacatatcgataatgtgtttgactctatgatctgtatctctgtcgtggcgtcgatgtgttcactcctcgctattgccgtggataggtacgtaactatattctacgctcttaggtaccaccatataatgactgccagacgatctggagctataatcgccggtatctgggccttttgcaccggttgcgggatagtgtttatcctctactccgagtcaacatacgtgattctgtgcctaatcagcatgttcttcgccatgctgtttctattggtcagtctgtacattcacatgtttcttttggccaggacgcacgtcaaaagaatcgctgctctgccaggagctagctcggcaagacaaagaacctctatgcaaggagctgtaactgtcactatgctcctgggcgtgttcactgtctgctgggcaccttttttccttcacctgaccctcatgctctcctgcccccagaacttgtactgctctcgcttcatgtcacattttaacatgtatttgattcttatcatgtgcaactccgttatggatccactgatatacgcttttcgctctcaggagatgagaaaaaccttcaaagaaattatatgctgccgcggatttagaatagcctgcagcttcccacgacgagactag

SEQ ID NO: 160262 - DNA, 1319 bp, Artificial Sequence
  derived and/or modified sequence
catagggagaccctgtctcttaaaaaaaaaaaaaaaaaaggactgagtgagccgagcccagtcctctgatgcactgtgtcattcatcccctttcttaggctgtgttggttctaggctagctgctgtctttctttggtaggctgctaacctctttggattgtgaatttaaaacatgttttacagtaaatttgctgccaagacaagaggtgtatttctccagcaatgaattcctcatttcacctgcatttcttggatctcaacctgaatgccacagagggcaacctttcaggacccaatgtcaaaaacaagtcttcaccatgtgaagacatgggcattgctgtggaggtgtttctcactctgggtgtcatcagcctcttggagaacatcttggtcataggggccatagtgaagaacaaaaacctgcactcccccatgtacttcttcgtgtgcagcctggcagtggcggacatgctggtgagcatgtccagtgcctgggagaccatcaccatctacctactcaacaacaagcacctagtgatagcagacgcctttgtgcgccacattgacaatgtgtttgactccatgatctgcatttccgtggtggcatccatgtgcagcttactggccattgcagtggataggtacgtcaccatcttctacgccctgcgctaccaccacatcatgacggcgaggcgctcaggggccatcatcgccggcatctgggctttctgcacgggctgcggcattgtcttcatcctgtactcagaatccacctacgtcatcctgtgcctcatctccatgttcttcgctatgctgttcctcctggtgtctctgtacatacacatgttcctcctggcgcggactcacgtcaagcggatcgcggctctgcccggggccagctctgcgcggcagaggaccagcatgcagggcgcggtcaccgtcaccatgctgctgggcgtgtttaccgtgtgctgggccccgttcttccttcatctcactttaatgctttcttgccctcagaacctctactgctctcgcttcatgtctcacttcaatatgtacctcatactcatcatgtgtaattccgtgatggaccctctcatatatgccttccgcagccaagagatgcggaagacctttaaggagattatttgctgccgtggtttcaggatcgcctgcagctttcccagaagggattaagcacaaagtgctcctctctgtggctctgttctcctttgtttgctcacctatgacaaagcgacagccaaggggtaggcgggagtgctagcatcccatttttctctttaccagctcagaca

SEQ ID NO: 160263 - protein, 821 aa, Artificial Sequence
  derived and/or modified sequence
MDLAAAAEPGAGSQHLEVRDEVAEKCQKLFLDFLEEFQSSDGEIKYLQLAEELIRPERNTLVVSFVDLEQFNQQLSTTIQEEFYRVYPYLCRALKTFVKDRKEIPLAKDFYVAFQDLPTRHKIRELTSSRIGLLTRISGQVVRTHPVHPELVSGTFLCLDCQTVIRDVEQQFKYTQPNICRNPVCANRRRFLLDTNKSRFVDFQKVRIQETQAELPRGSIPRSLEVILRAEAVESAQAGDKCDFTGTLIVVPDVSKLSTPGARAETNSRVSGVDGYETEGIRGLRALGVRDLSYRLVFLACCVAPTNPRFGGKELRDEEQTAESIKNQMTVKEWEKVFEMSQDKNLYHNLCTSLFPTIHGNDEVKRGVLLMLFGGVPKTTGEGTSLRGDINVCIVGDPSTAKSQFLKHVEEFSPRAVYTSGKASSAAGLTAAVVRDEESHEFVIEAGALMLADNGVCCIDEFDKMDVRDQVAIHEAMEQQTISITKAGVKATLNARTSILAAANPISGHYDRSKSLKQNINLSAPIMSRFDLFFILVDECNEVTDYAIARRIVDLHSRIEESIDRVYSLDDIRRYLLFARQFKPKISKESEDFIVEQYKHLRQRDGSGVTKSSWRITVRQLESMIRLSEAMARMHCCDEVQPKHVKEAFRLLNKSIIRVETPDVNLDQEEEIQMEVDEGAGGINGHADSPAPVNGINGYNEDINQESAPKASLRLGFSEYCRISNLIVLHLRKVEEEEDESALKRSELVNWYLKEIESEIDSEEELINKKRIIEKVIHRLTHYDHVLIELTQAGLKGSTEGSESYEEDPYLVVNPNYLLED

SEQ ID NO: 160264 - DNA, 2466 bp, Artificial Sequence
  derived and/or modified sequence
atggatttggcagcagctgcagagccgggagcgggtagtcaacatctggaggtgagagatgaggtcgccgagaagtgtcagaaactcttcttggatttcctcgaagagttccaaagtagcgatggcgagataaaatacttgcagctggcagaagagctgattcgtccagagcggaataccctggtcgtgtctttcgttgatctggagcagttcaatcagcagttaagcactacaatccaggaggaattctatcgcgtttacccttacctgtgtagagccctcaagacattcgtgaaagaccgaaaggaaatccctctggccaaggacttttacgtggccttccaggatttgccaacccgacacaagattagggaattgacttcctccaggatcggcctcctgacacggatttctggtcaggtggtgcggacccacccggtgcaccccgagcttgtgtctggcacattcctttgcctggactgccaaacggtgattcgggacgtggagcagcagtttaaatacacccagcccaacatctgtaggaacccagtttgcgctaaccggagaaggttcttgctagatactaataagagtaggttcgtcgacttccagaaagtgagaatccaagagacgcaagcagaactgccccgagggtccataccacggtcattggaggtgattctcagggcagaagcagtcgagtctgcacaggctggagataagtgcgactttactggcacgttaatcgtcgtccccgatgtgagtaaattgtccacacccggtgctagagcagaaacaaattccagggtttcaggcgtggatggatatgagacagagggcattcgtggactgcgcgcattgggcgtgagagacctatcctatcgcctcgtgttcctcgcttgttgcgttgctcctacaaatcctaggttcggcggcaaagagctccgcgatgaggagcagacagccgaatccatcaaaaaccagatgaccgttaaggagtgggaaaaagtgttcgagatgtcccaggacaagaatctttaccataatctgtgtacctcccttttccccaccatccacgggaatgacgaggtcaagcgcggcgtgctgctgatgctcttcggaggcgtccctaaaacaaccggcgagggcacaagcctgcgaggagatattaatgtgtgcatcgtgggggatccatctacagcaaagtcacagtttctgaaacacgttgaggaattcagccctcgcgccgtttacaccagtggcaaggcctccagcgccgcggggttgactgccgccgtggtgagagatgaggaaagccacgaattcgtgatcgaagcaggcgcattgatgctcgcagacaatggcgtgtgttgtatcgatgaatttgacaaaatggacgtgagagaccaggttgccatccatgaggccatggaacagcagactatatccattacaaaggccggagtgaaggcaaccctgaacgcccggaccagcatcctggctgccgccaatcccattagtggacactacgaccggtctaaatcattaaaacagaatataaacctgtccgcacccatcatgtctcggttcgacttatttttcattctggtcgatgaatgcaacgaggtaacagactatgccattgctcgaagaattgtcgacctgcactctcggattgaggaatctattgaccgagtatattcgcttgacgacatcaggcgatatttgctgtttgcaaggcagttcaaaccaaaaatcagcaaggaaagtgaagacttcattgtggaacagtacaaacacctgagacagcgggatggctctggtgtgacaaaatccagctggcgtattacagttcggcagctggaatccatgatccggctctccgaggccatggcccgcatgcactgctgtgacgaagtgcagcctaagcacgtcaaggaggctttccgattattgaacaaaagcattatacgggtggagacccctgatgtgaatcttgatcaggaggaggagatccagatggaagtggacgagggtgccggcgggattaacggacacgccgattccccggctcccgtgaacggtattaatggatacaatgaggacatcaaccaggagagtgcccctaaggctagcctccgactgggcttttccgagtactgtcgaattagcaatctcatagtgctgcatctccggaaagtcgaagaagaagaggacgaaagcgccctgaaacgctctgagctcgtgaattggtatttgaaagagattgaatccgagatagactcagaggaggaactgattaacaagaaaaggatcatagagaaggtgatccatcggcttacacattatgaccatgtactcatcgagctcacccaggcgggcctcaagggatccaccgagggttccgaatcatacgaggaggacccatatctggtagtgaatccgaactacctgcttgaggattag

SEQ ID NO: 160265 - DNA, 2466 bp, Artificial Sequence
  derived and/or modified sequence
atggacctggccgctgctgctgagcctggagctggcagccagcacctggaggtgagagatgaggtggccgagaagtgccagaagctgttcctggacttcctggaggagttccagagcagtgatggagagatcaagtacctgcagctggccgaggagctgatccggcctgagaggaacaccctggtggtgtcctttgtggacctggagcagttcaaccagcagctgagcaccaccatccaggaggagttctacagagtgtacccctacctgtgccgggccctgaagacctttgtgaaggacaggaaggagatccccctggccaaggacttctacgtggccttccaggacctgcccaccaggcacaagatccgggagctgaccagcagcagaattggcctgctgacccgcatcagcggccaggtggtgaggacccaccctgtgcaccctgagctggtgtctggcaccttcctgtgcctggactgccagaccgtcatcagagatgtggagcagcagttcaagtacacccagcccaacatctgcagaaatcctgtgtgtgccaacagaagacgcttcctgctggacaccaacaagagcagatttgtggacttccagaaggtgcgcatccaggagacccaggccgagctgccccggggcagcatccccaggagcctggaggtgatcctgcgggcagaggccgtggagagcgcccaggccggggacaagtgtgacttcaccggcaccctgattgtggtgcctgatgtgtccaagctgagcacccctggggcccgggcagagaccaacagccgggtgtctggagtggatggctatgaaacagagggcatccggggcctgcgggccctgggcgtgcgggacctgagctaccgcctggtgttcctggcctgctgcgtggcccccaccaaccccaggtttggaggcaaggagctgagagatgaggagcagacagctgagagcatcaagaaccagatgacagtgaaggagtgggagaaggtgtttgagatgagccaggacaagaacctgtaccacaacctgtgcaccagcctcttccccaccatccatggaaatgatgaggtgaagaggggcgtgctgctgatgctgtttggaggagtgcccaagaccaccggggagggcaccagcctgcggggggacatcaacgtgtgcatcgtgggggaccccagcacagccaagagccagttcctgaagcacgtggaggagttcagccccagggctgtgtacaccagcggcaaggccagcagcgctgctggcctgacagctgctgtggtgagagatgaggagagccatgaatttgtgattgaggccggggccctgatgctggccgacaacggggtgtgctgcattgatgaatttgacaagatggatgtgcgggaccaggtggccatccacgaggccatggagcagcagaccatcagcatcaccaaggccggcgtgaaggccaccctgaatgcccggaccagcatcctggccgccgccaaccccatcagcggccactatgacaggagcaagagcctgaagcagaacatcaacctgagcgcccccatcatgagcagatttgacctcttcttcatcctggtggatgaatgtaatgaggtgacagattatgccatcgcccggcgcatcgtggacctgcacagcagaattgaggagagcattgacagagtgtacagcctggatgacatccgccgctacctgctgtttgcccggcagttcaagcccaagatcagcaaggagagcgaggacttcatcgtggagcagtacaagcacctgcggcagagagatggcagcggcgtgaccaagagctcctggaggatcaccgtgcggcagctggagagcatgatccggctgtctgaggccatggccaggatgcactgctgtgatgaggtgcagcccaagcacgtgaaggaggccttccggctgctgaacaagagcatcatccgggtggagaccccagatgtgaacctggaccaggaggaggagatccagatggaggtggatgaaggagctgggggcatcaatggacatgctgacagccctgcccctgtgaatggcatcaatggctacaatgaagacatcaaccaggagagcgcccccaaggccagcctgcggctgggcttcagcgagtactgccgcatcagcaacctgattgtgctgcacctgaggaaggtggaggaggaggaggatgaaagtgccctgaagaggtctgagctggtgaactggtacctgaaggagattgagagcgagattgacagcgaggaggagctgatcaacaagaagaggatcatcgagaaggtgatccaccggctgacccactatgaccacgtgctgattgagctgacccaggccggcctgaagggcagcacagagggcagcgagagctatgaggaggacccctacctggtggtgaaccccaactacctgctggaggactag

SEQ ID NO: 160266 - DNA, 3736 bp, Artificial Sequence
  derived and/or modified sequence
ggaaaaaagcgacttgtggcggtcgagcgtggcgcaggcgaatcctcggcactaagcaaatatggacctcgcggcggcagcggagccgggcgccggcagccagcacctggaggtccgcgacgaggtggccgagaagtgccagaaactgttcctggacttcttggaggagtttcagagcagcgatggagaaattaaatacttgcaattagcagaggaactgattcgtcctgagagaaacacattggttgtgagttttgtggacctggaacaatttaaccagcaactttccaccaccattcaagaggagttctatagagtttacccttacctgtgtcgggccttgaaaacattcgtcaaagaccgtaaagagatccctcttgccaaggatttttatgttgcattccaagacctgcctaccagacacaagattcgagagctcacctcatccagaattggtttgctcactcgcatcagtgggcaggtggtgcggactcacccagttcacccagagcttgtgagcggaacttttctgtgcttggactgtcagacagtgatcagggatgtagaacagcagttcaaatacacacagccaaacatctgccgaaatccagtttgtgccaacaggaggagattcttactggatacaaataaatcaagatttgttgattttcaaaaggttcgtattcaagagacccaagctgagcttcctcgagggagtatcccccgcagtttagaagtaattttaagggctgaagctgtggaatcagctcaagctggtgacaagtgtgactttacagggacactgattgttgtgcctgacgtctccaagcttagcacaccaggagcacgtgcagaaactaattcccgtgtcagtggtgttgatggatatgagacagaaggcattcgaggactccgggcccttggtgttagggacctttcttataggctggtctttcttgcctgctgtgttgcgccaaccaacccaaggtttggggggaaagagctcagagatgaggaacagacagctgagagcattaagaaccaaatgactgtgaaagaatgggagaaagtgtttgagatgagtcaagataaaaatctataccacaatctttgtaccagcctgttccctactatacatggcaatgatgaagtaaaacggggtgtcctgctgatgctctttggtggcgttccaaagacaacaggagaagggacctctcttcgaggggacataaatgtttgcattgttggtgacccaagtacagctaagagccaatttctcaagcacgtggaggagttcagccccagagctgtctacaccagtggtaaagcgtccagtgctgctggcttaacagcagctgttgtgagagatgaagaatctcatgagtttgtcattgaggctggagctttgatgttggctgataatggtgtgtgttgtattgatgaatttgataagatggacgtgcgggatcaagttgctattcatgaagctatggaacagcagaccatatccatcactaaagcaggagtgaaggctactctgaacgcccggacgtccattttggcagcagcaaacccaatcagtggacactatgacagatcaaaatcattgaaacagaatataaatttgtcagctcccatcatgtcccgattcgatctcttctttatccttgtggatgaatgtaatgaggttacagattatgccattgccaggcgcatagtagatttgcattcaagaattgaggaatcaattgatcgtgtctattccctcgatgatatcagaagatatcttctctttgcaagacagtttaaacccaagatttccaaagagtcagaggacttcattgtggagcaatataaacatctccgccagagagatggttctggagtgaccaagtcttcatggaggattacagtgcgacagcttgagagcatgattcgtctctctgaagctatggctcggatgcactgctgtgatgaggtccaacctaaacatgtgaaggaagctttccggttactgaataaatcaatcatccgtgtggaaacacctgatgtcaatctagatcaagaggaagagatccagatggaggtagatgagggtgctggtggcatcaatggtcatgctgacagccctgctcctgtgaacgggatcaatggctacaatgaagacataaatcaagagtctgctcccaaagcctccttaaggctgggcttctctgagtactgccgaatctctaaccttattgtgcttcacctcagaaaggtggaagaagaagaggacgagtcagcattaaagaggagcgagcttgttaactggtacttgaaggaaatcgaatcagagatagactctgaagaagaacttataaataaaaaaagaatcatagagaaagttattcatcgactcacacactatgatcatgttctaattgagctcacccaggctggattgaaaggctccacagagggaagtgagagctatgaagaagatccctacttggtagttaaccctaactacttgctcgaagattgagatagtgaaagtaactgaccagagctgaggaactgtggcacagcacctcgtggcctggagcctggctggagctctgctagggacagaagtgtttctggaagtgatgcttccaggatttgttttcagaaacaagaattgagttgatggtcctatgtgtcacattcatcacaggtttcataccaacacaggcttcagcacttcctttggtgtgtttcctgtcccagtgaagttggaaccaaataatgtgtagtctctataaccaatacctttgttttcatgtgtaagaaaaggcccattacttttaaggtatgtgctgtcctattgagcaaataactttttttcaattgccagctactgcttttattcatcaaaataaaataacttgttctgaagttgtctattggatttctttctactgtaccctgattattacttccatctacttctgaatgtgagactttccctttttgcttaacctggagtgaagaggtagaactgtggtattatggatgaggtttctatgagaaggagtcattagagaactcatatgaaagctagaggccttagagatgactttccaaggttaattccagttgtttttttttttttttaagtttataaaagtttattatacttttttaaaattactctttagtaatttattttacttctgtgtcctaagggtaatttctcaggattgttttcaaattgcttttttaggggaaataggtcatttgctatattacaagcaatccccaaattttatggtcttccaggaaaagttattaccgtttatgatactaacagttcctgagacttagctatgatcagtatgttcatgaggtggagcagttcctgtgttgcagcttttaacaacagatggcattcattaaatcacaaagtatgttaaaggtcacaaaagcaaaataactgtctgaggctaaggcccacgtgggacagtctaatacccatgagtactcaacttgccttgatgtctgagctttccagtgcaatgtgaatttgagcagccagaaatctattagtagaaagcaagacagattaatataggttaaaacaatgatttaaatatgtttctcccaataattatctctttccctggaatcaacttgtatgaaaccttgtcaaaatgtactccacaagtatgtacaattaagtattttaaaaataaatggcaaacattaaaaacaa

SEQ ID NO: 160267 - DNA, 2466 bp, Artificial Sequence
  derived and/or modified sequence
atggacctggccgccgccgccgagcccggcgccggcagccagcacctggaagtgcgagatgaggtcgcggagaagtgccaaaagctgttcctggatttccttgaggaattccagagttccgacggcgagatcaagtaccttcagctggccgaggagctgatacgtcctgaacgcaacaccctggtggttagttttgtcgacctggagcagttcaatcagcagctgtcaaccaccatccaggaggagttctaccgtgtctacccatacctgtgcagagctctgaaaacctttgtgaaggaccgaaaggaaattccccttgccaaggacttttacgtggccttccaagatctgccaacacggcataagattagggagcttacaagcagtcgaataggtctgctcaccaggatatcagggcaagtggtcaggacgcatccagtgcacccggaactggtcagcggaacattcctttgcttggactgccagaccgttataagagatgtggagcaacagtttaagtatacccagcccaacatttgtaggaaccccgtttgtgcgaaccggcggcggttcctgttggataccaacaaatcccgcttcgtagatttccagaaagtcaggatccaggagacccaagctgaactgccaagggggtcaatcccacgatctcttgaggtcatcttacgtgcagaagccgtggaaagtgctcaggcaggcgataaatgcgacttcaccgggactttaatagtggtccctgatgtgtccaaactttccacacctggcgcccgagcggaaaccaacagccgtgtttccggtgtggatgggtatgaaaccgagggaatcagaggcctgcgggctctcggtgtaagagacctgtcctataggttggtcttccttgcgtgttgcgtggctcctaccaatcccaggtttggcggtaaggaactgcgggatgaagaacagactgcagagagcatcaagaatcagatgacagtgaaagaatgggaaaaagtatttgaaatgtcccaggacaaaaatctctatcacaacttgtgtaccagtctcttccctactatccacggaaacgatgaagtgaagcgaggcgtccttctgatgctctttggtggtgtccctaaaacaaccggggaggggactagtcttagaggcgatatcaacgtctgcattgtgggggatccctccactgctaaatcccagttcctgaagcacgttgaggaattttcaccacgggcagtctatacttcagggaaggcctcctcggctgccggccttaccgccgccgtggtccgcgatgaggagtcccacgagtttgtcatcgaggctggcgcactaatgttggctgataatggcgtgtgttgcattgacgagttcgataagatggacgtgagagaccaggttgccattcacgaagctatggagcagcagactatcagcattaccaaggctggtgtcaaggcgacactcaatgccaggacgtctattctcgcggccgcaaacccaatcagtggccactatgacaggtctaaatcactgaagcagaacataaatctatcggcgcctataatgtcgcgctttgatcttttctttattctggtcgacgagtgtaacgaggtgaccgactacgccatcgcccggcgcatcgtagacctccacagccgcattgaggagtctatcgaccgggtctattcattagatgacataagaagatatctgctattcgccaggcaatttaagccaaagatctcgaaggagtcagaggacttcattgtagagcaatacaaacacctgcgacagagagacggatctggggttactaaaagttcctggcgtattaccgtcaggcagcttgagagcatgatcagactctctgaggctatggcaaggatgcactgctgcgatgaggtccaaccaaagcatgtgaaggaagcctttagattacttaataagagtataataagagtagaaacacctgacgtgaatctggatcaggaggaagagattcagatggaggtggatgagggagcgggcggcatcaatggacacgcggactcccctgcacccgtcaacggaatcaacggatacaatgaagatattaaccaagaatccgcccccaaagcatcactgcggctggggttctccgaatactgtagaatttcaaacctgatcgtgctccatcttcggaaggtggaggaagaagaagatgagtcagcccttaagagaagcgaacttgtgaattggtatttaaaggagatcgaaagcgagatcgactcagaagaggagctgatcaacaaaaaaaggataatcgagaaagtcatccaccggctgacacactacgatcatgtgttgattgagctcacccaggccggccttaagggcagcactgaaggatctgaatcatatgaagaggacccatacctggtcgtaaaccctaactacttgctcgaggactag

SEQ ID NO: 160268 - DNA, 2466 bp, Artificial Sequence
  derived and/or modified sequence
atggatctggctgcagcagcagagcccggagcaggctcacaacatctggaggtgcgcgacgaggttgctgaaaagtgtcagaagctctttcttgacttcctggaggagtttcaatcatctgatggagagattaagtaccttcaacttgccgaagagttaatccgaccagagaggaacactctcgtggtttctttcgtcgatctggaacaatttaatcagcagctcagtactaccatacaagaggagttctaccgtgtgtacccatatctgtgccgtgctcttaagactttcgtcaaggataggaaggaaattccccttgcaaaggatttctatgtagctttccaggatttacccactagacacaaaattcgagaactgacaagctctagaatcggcttactaacccgtatctccgggcaggtcgtgcgtactcaccccgtgcatccggaactagtctctggtacatttctttgtctggattgtcagaccgtgatacgcgatgtagagcaacaatttaaatatacacagccaaatatatgtcgcaaccctgtatgtgctaacaggcggcgtttcctgttagatactaacaagtctagatttgtagacttccagaaagtgagaatccaggaaactcaggccgagctaccaagagggtccatacccagaagcttagaggtaattttgcgcgcagaggctgtcgaaagtgcccaagcgggtgataagtgtgactttaccggaactctgatagtcgtgcccgatgtttcaaagttgtccactccaggtgctcgggctgagactaactcccgggtttccggagttgacggctatgaaacggaagggattcggggactacgcgcactgggcgtgcgggacctgagctatcggctcgtgttcctggcttgttgcgtcgctcccacaaatccacgttttggcggaaaggaactgagggacgaggagcagacagccgagtctatcaagaaccaaatgactgttaaagagtgggagaaggtcttcgagatgtcccaggacaagaacttataccacaacctctgtacgtccctgtttccaactatccatgggaatgacgaggtgaagcgaggcgtcctcctgatgctgttcggtggagtcccaaagaccactggagagggaacctccctgaggggggatattaatgtgtgcatcgtgggcgacccatccaccgccaaaagccaattcctcaaacatgtagaggaattctccccgcgagcagtatacactagtggcaaagcaagctcagccgcagggctcactgctgccgtcgtgagggacgaagagagtcatgaattcgttattgaagctggcgcattgatgttggctgacaacggagtttgctgcatcgatgaattcgacaagatggacgttagggatcaggtggctatccacgaagccatggagcagcagacaatctccatcaccaaagcaggcgtgaaggccacgctcaacgcgaggacaagcattcttgccgctgcaaatccaatcagtgggcattatgataggtctaagtcacttaagcagaacatcaatctgagcgctcccatcatgtctcgcttcgatctcttctttatcctcgtggacgagtgtaacgaggtgaccgactatgcaatcgcacggcgtatcgttgatttgcacagtcgaattgaggaatccattgaccgtgtgtactcactggatgacatacgaagataccttctgttcgcgagacagtttaagccaaagatttcaaaagagagcgaagacttcattgtagagcaatacaagcaccttcggcaacgtgacgggagcggcgtgactaagtcgagctggcgcatcaccgtgcgacaattggagagcatgatccgtctaagcgaggctatggctcgcatgcactgctgcgacgaagtgcagcctaagcacgtgaaggaggcgtttaggcttctgaacaagtctatcattagagtcgaaacccccgatgtcaatctggatcaggaggaagaaattcagatggaggtggatgaaggtgctggtggtatcaacggccacgctgatagccctgcacctgttaacgggatcaacggttacaatgaggacataaaccaggaaagcgctcctaaggctagtctcagactcgggttctcagagtactgtcgcatatctaatcttattgtgctccacctccgaaaagtggaagaggaagaggacgagagcgcccttaagcgctccgagctggtgaactggtatctaaaggaaattgagtctgagatcgacagtgaagaagagctgataaacaagaagagaattatagaaaaggtaatccatagactcacgcactacgaccacgttctgatcgagcttacccaggcaggcttgaaagggtctacagaaggaagtgaatcatatgaagaggacccctatctcgtcgttaatccaaactacctgcttgaagactag

SEQ ID NO: 160269 - DNA, 2466 bp, Artificial Sequence
  derived and/or modified sequence
atggacctggccgccgccgccgagcccggcgccggcagccagcacctggaggtgagagacgaggtggccgagaagtgccagaagctgttcctggacttcctggaggagttccagagcagcgacggcgagatcaagtacctgcagctggccgaggagctgatcagacccgagagaaacaccctggtggtgagcttcgtggacctggagcagttcaaccagcagctgagcaccaccatccaggaggagttctacagagtgtacccctacctgtgcagagccctgaagaccttcgtgaaggacagaaaggagatccccctggccaaggacttctacgtggccttccaggacctgcccaccagacacaagatcagagagctgaccagcagcagaatcggcctgctgaccagaatcagcggccaggtggtgagaacccaccccgtgcaccccgagctggtgagcggcaccttcctgtgcctggactgccagaccgtgatcagagacgtggagcagcagttcaagtacacccagcccaacatctgcagaaaccccgtgtgcgccaacagaagaagattcctgctggacaccaacaagagcagattcgtggacttccagaaggtgagaatccaggagacccaggccgagctgcccagaggcagcatccccagaagcctggaggtgatcctgagagccgaggccgtggagagcgcccaggccggcgacaagtgcgacttcaccggcaccctgatcgtggtgcccgacgtgagcaagctgagcacccccggcgccagagccgagaccaacagcagagtgagcggcgtggacggctacgagaccgagggcatcagaggcctgagagccctgggcgtgagagacctgagctacagactggtgttcctggcctgctgcgtggcccccaccaaccccagattcggcggcaaggagctgagagacgaggagcagaccgccgagagcatcaagaaccagatgaccgtgaaggagtgggagaaggtgttcgagatgagccaggacaagaacctgtaccacaacctgtgcaccagcctgttccccaccatccacggcaacgacgaggtgaagagaggcgtgctgctgatgctgttcggcggcgtgcccaagaccaccggcgagggcaccagcctgagaggcgacatcaacgtgtgcatcgtgggcgaccccagcaccgccaagagccagttcctgaagcacgtggaggagttcagccccagagccgtgtacaccagcggcaaggccagcagcgccgccggcctgaccgccgccgtggtgagagacgaggagagccacgagttcgtgatcgaggccggcgccctgatgctggccgacaacggcgtgtgctgcatcgacgagttcgacaagatggacgtgagagaccaggtggccatccacgaggccatggagcagcagaccatcagcatcaccaaggccggcgtgaaggccaccctgaacgccagaaccagcatcctggccgccgccaaccccatcagcggccactacgacagaagcaagagcctgaagcagaacatcaacctgagcgcccccatcatgagcagattcgacctgttcttcatcctggtggacgagtgcaacgaggtgaccgactacgccatcgccagaagaatcgtggacctgcacagcagaatcgaggagagcatcgacagagtgtacagcctggacgacatcagaagatacctgctgttcgccagacagttcaagcccaagatcagcaaggagagcgaggacttcatcgtggagcagtacaagcacctgagacagagagacggcagcggcgtgaccaagagcagctggagaatcaccgtgagacagctggagagcatgatcagactgagcgaggccatggccagaatgcactgctgcgacgaggtgcagcccaagcacgtgaaggaggccttcagactgctgaacaagagcatcatcagagtggagacccccgacgtgaacctggaccaggaggaggagatccagatggaggtggacgagggcgccggcggcatcaacggccacgccgacagccccgcccccgtgaacggcatcaacggctacaacgaggacatcaaccaggagagcgcccccaaggccagcctgagactgggcttcagcgagtactgcagaatcagcaacctgatcgtgctgcacctgagaaaggtggaggaggaggaggacgagagcgccctgaagagaagcgagctggtgaactggtacctgaaggagatcgagagcgagatcgacagcgaggaggagctgatcaacaagaagagaatcatcgagaaggtgatccacagactgacccactacgaccacgtgctgatcgagctgacccaggccggcctgaagggcagcaccgagggcagcgagagctacgaggaggacccctacctggtggtgaaccccaactacctgctggaggactag

SEQ ID NO: 160270 - protein, 719 aa, Artificial Sequence
  derived and/or modified sequence
MALKDYALEKEKVKKFLQEFYQDDELGKKQFKYGNQLVRLAHREQVALYVDLDDVAEDDPELVDSICENARRYAKLFADAVQELLPQYKEREVVNKDVLDVYIEHRLMMEQRSRDPGMVRSPQNQYPAELMRRFELYFQGPSSNKPRVIREVRADSVGKLVTVRGIVTRVSEVKPKMVVATYTCDQCGAETYQPIQSPTFMPLIMCPSQECQTNRSGGRLYLQTRGSRFIKFQEMKMQEHSDQVPVGNIPRSITVLVEGENTRIAQPGDHVSVTGIFLPILRTGFRQVVQGLLSETYLEAHRIVKMNKSEDDESGAGELTREELRQIAEEDFYEKLAASIAPEIYGHEDVKKALLLLLVGGVDQSPRGMKIRGNINICLMGDPGVAKSQLLSYIDRLAPRSQYTTGRGSSGVGLTAAVLRDSVSGELTLEGGALVLADQGVCCIDEFDKMAEADRTAIHEVMEQQTISIAKAGILTTLNARCSILAAANPAYGRYNPRRSLEQNIQLPAALLSRFDLLWLIQDRPDRDNDLRLAQHITYVHQHSRQPPSQFEPLDMKLMRRYIAMCREKQPMVPESLADYITAAYVEMRREAWASKDATYTSARTLLAILRLSTALARLRMVDVVEKEDVNEAIRLMEMSKDSLLGDKGQTARTQRPADVIFATVRELVSGGRSVRFSEAEQRCVSRGFTPAQFQAALDEYEELNVWQVNASRTRITFV

SEQ ID NO: 160271 - protein, 389 aa, Artificial Sequence
  derived and/or modified sequence
MALKDYALEKEKVKKFLQEFYQDDELGKKQFKYGNQLVRLAHREQVALYVDLDDVAEDDPELVDSICENARRYAKLFADAVQELLPQYKEREVVNKDVLDVYIEHRLMMEQRSRDPGMVRSPQNQYPAELMRRFELYFQGPSSNKPRVIREVRADSVGKLVTVRGIVTRVSEVKPKMVVATYTCDQCGAETYQPIQSPTFMPLIMCPSQECQTNRSGGRLYLQTRGSRFIKFQEMKMQEHSDQVPVGNIPRSITVLVEGENTRIAQPGDHVSVTGIFLPILRTGFRQVVQGLLSETYLEAHRIVKMNKSEDDESGAGELTREELRQIADVIFATVRELVSGGRSVRFSEAEQRCVSRGFTPAQFQAALDEYEELNVWQVNASRTRITFV

SEQ ID NO: 160272 - protein, 543 aa, Artificial Sequence
  derived and/or modified sequence
MVVATYTCDQCGAETYQPIQSPTFMPLIMCPSQECQTNRSGGRLYLQTRGSRFIKFQEMKMQEHSDQVPVGNIPRSITVLVEGENTRIAQPGDHVSVTGIFLPILRTGFRQVVQGLLSETYLEAHRIVKMNKSEDDESGAGELTREELRQIAEEDFYEKLAASIAPEIYGHEDVKKALLLLLVGGVDQSPRGMKIRGNINICLMGDPGVAKSQLLSYIDRLAPRSQYTTGRGSSGVGLTAAVLRDSVSGELTLEGGALVLADQGVCCIDEFDKMAEADRTAIHEVMEQQTISIAKAGILTTLNARCSILAAANPAYGRYNPRRSLEQNIQLPAALLSRFDLLWLIQDRPDRDNDLRLAQHITYVHQHSRQPPSQFEPLDMKLMRRYIAMCREKQPMVPESLADYITAAYVEMRREAWASKDATYTSARTLLAILRLSTALARLRMVDVVEKEDVNEAIRLMEMSKDSLLGDKGQTARTQRPADVIFATVRELVSGGRSVRFSEAEQRCVSRGFTPAQFQAALDEYEELNVWQVNASRTRITFV

SEQ ID NO: 160273 - protein, 612 aa, Artificial Sequence
  derived and/or modified sequence
MMEQRSRDPGMVRSPQNQYPAELMRRFELYFQGPSSNKPRVIREVRADSVGKLVTVRGIVTRVSEVKPKMVVATYTCDQCGAETYQPIQSPTFMPLIMCPSQECQTNRSGGRLYLQTRGSRFIKFQEMKMQEHSDQVPVGNIPRSITVLVEGENTRIAQPGDHVSVTGIFLPILRTGFRQVVQGLLSETYLEAHRIVKMNKSEDDESGAGELTREELRQIAEEDFYEKLAASIAPEIYGHEDVKKALLLLLVGGVDQSPRGMKIRGNINICLMGDPGVAKSQLLSYIDRLAPRSQYTTGRGSSGVGLTAAVLRDSVSGELTLEGGALVLADQGVCCIDEFDKMAEADRTAIHEVMEQQTISIAKAGILTTLNARCSILAAANPAYGRYNPRRSLEQNIQLPAALLSRFDLLWLIQDRPDRDNDLRLAQHITYVHQHSRQPPSQFEPLDMKLMRRYIAMCREKQPMVPESLADYITAAYVEMRREAWASKDATYTSARTLLAILRLSTALARLRMVDVVEKEDVNEAIRLMEMSKDSLLGDKGQTARTQRPADVIFATVRELVSGGRSVRFSEAEQRCVSRGFTPAQFQAALDEYEELNVWQVNASRTRITFV

SEQ ID NO: 160274 - protein, 656 aa, Artificial Sequence
  derived and/or modified sequence
MTPSWWTQFVRMPGATRSSLLMPYYKEREVVNKDVLDVYIEHRLMMEQRSRDPGMVRSPQNQYPAELMRRFELYFQGPSSNKPRVIREVRADSVGKLVTVRGIVTRVSEVKPKMVVATYTCDQCGAETYQPIQSPTFMPLIMCPSQECQTNRSGGRLYLQTRGSRFIKFQEMKMQEHSDQVPVGNIPRSITVLVEGENTRIAQPGDHVSVTGIFLPILRTGFRQVVQGLLSETYLEAHRIVKMNKSEDDESGAGELTREELRQIAEEDFYEKLAASIAPEIYGHEDVKKALLLLLVGGVDQSPRGMKIRGNINICLMGDPGVAKSQLLSYIDRLAPRSQYTTGRGSSGVGLTAAVLRDSVSGELTLEGGALVLADQGVCCIDEFDKMAEADRTAIHEVMEQQTISIAKAGILTTLNARCSILAAANPAYGRYNPRRSLEQNIQLPAALLSRFDLLWLIQDRPDRDNDLRLAQHITYVHQHSRQPPSQFEPLDMKLMRRYIAMCREKQPMVPESLADYITAAYVEMRREAWASKDATYTSARTLLAILRLSTALARLRMVDVVEKEDVNEAIRLMEMSKDSLLGDKGQTARTQRPADVIFATVRELVSGGRSVRFSEAEQRCVSRGFTPAQFQAALDEYEELNVWQVNASRTRITFV

SEQ ID NO: 160275 - DNA, 2160 bp, Artificial Sequence
  derived and/or modified sequence
atggcactgaaggattacgctctcgaaaaagagaaagttaagaaattcctgcaggaattttaccaggatgacgaactggggaagaagcaattcaagtacggcaaccagctggtgcgactggcacacagggagcaggtagcgctctacgtggatctcgacgacgtcgctgaggacgacccagaactggttgattccatatgtgagaacgcaaggcggtacgccaagctgtttgcagatgctgtccaggaattgcttccccagtacaaggagcgggaggtggtcaataaagacgtacttgacgtgtacatagagcaccgccttatgatggaacaacgctctagggatcctggcatggtcagatcaccccagaaccagtatcccgctgagctaatgcggcgatttgaattatacttccaggggccttcctcgaacaaaccccgggttattagagaagtaagagctgactcggtgggcaaattagtgacagtgcggggtatcgttacacgcgtttccgaggtaaagcctaaaatggtggttgcaacctacacgtgcgaccagtgcggcgccgaaacctatcaacccatccagtcgccaacattcatgcccctaataatgtgccccagtcaggagtgccagacgaacagatcaggagggaggctgtacctccaaacccgcggttcccggtttatcaagttccaggaaatgaaaatgcaggaacattcagatcaggtccccgtcgggaatattccgcgcagcattacggtgttggtggaaggcgagaacacccggatcgcccagcctggcgaccatgtgtctgtgacaggcatcttcctcccgattctaaggacgggctttcgacaagtggtccagggcctcttgtctgagacttatttggaggcacacaggattgttaagatgaataaatccgaagacgatgagtccggcgccggagagctaacacgggaggaactcaggcagatcgcggaggaggacttttacgagaaactggccgcttcgatagctcccgaaatttacggacacgaagacgtgaagaaggctctcctgttgctcctggttggcggggttgaccagagccccagaggaatgaaaataagaggcaatattaacatctgcctcatgggcgacccaggggtcgcaaagagccagctgctgtcatacatcgatcgcctcgcccctcgatctcagtacaccacgggccgagggtctagcggcgtggggctgaccgcagctgtgttgagggacagcgtcagcggagaattgactctcgaagggggagcattggttctggcagatcagggcgtctgttgcatcgatgaatttgacaagatggccgaagcagataggactgccattcacgaggttatggagcagcagaccatctcgatcgctaaggccgggatccttactacactgaacgcccgctgctctatattggcggccgctaatcccgcatatggccgttataacccgaggcgcagcctggagcagaacatccagttgccagcggctttgctgagcagattcgatctgctgtggcttattcaggacagaccagatcgggataacgatttgcgcctggcacagcatataacctatgtgcatcagcacagtcgccagcctcctagtcagttcgaaccgctggatatgaagctaatgcgcagatatatagccatgtgccgtgagaaacaaccaatggttccagagagtctcgctgattatatcacggccgcctacgtggaaatgaggagagaggcttgggctagcaaagatgcgacgtacacgtccgctcgtaccctcttggcaattttgagattgtcgaccgctctagcacggctgcggatggtggatgtcgtggagaaggaagacgttaacgaagcaattaggctgatggagatgtctaaggactccctgctcggcgacaagggacaaacagctcgcacacaacggcccgctgacgtcatctttgctaccgtgagagagttagttagtggtggtcggtccgttagatttagcgaggccgagcagagatgcgtttcgcgggggtttacaccagcgcagttccaggctgctctcgacgaatatgaggaactgaacgtgtggcaggttaatgcgtctcgcacacggattacctttgtatag

SEQ ID NO: 160276 - DNA, 1170 bp, Artificial Sequence
  derived and/or modified sequence
atggcactcaaggattatgctctggagaaggagaaagtcaagaagttcctgcaggaattttaccaggatgacgaactgggcaaaaagcagttcaaatacggcaaccagttggttcgcctcgctcatcgggaacaggtcgccctttacgtcgatttggatgacgttgctgaggacgatcccgaattggtcgatagtatctgcgaaaacgccagaaggtacgctaaactgtttgccgatgcggtccaggaactcctgccacagtataaagaacgagaagttgtcaataaggatgtgctcgacgtgtatatcgagcaccgtctcatgatggaacagcgttccagagaccccggaatggtcagaagtcctcagaatcagtacccagcagagctgatgcggcgcttcgaactctactttcagggccccagcagcaacaagccgcgggtcatccgtgaggtgagagccgactcggtgggcaaacttgtgaccgtgcgggggattgttacccgagttagcgaggttaagccgaagatggtggttgcaacatacacatgcgaccagtgcggcgccgagacctatcagcccatacagtcaccaaccttcatgcccctgatcatgtgccccagccaagagtgccaaaccaaccgcagtggggggcgcttgtacctgcagacccgtggttcacgcttcatcaaattccaagagatgaagatgcaagaacactccgatcaggtgcccgtcggtaacatccctcgctcaatcacagtgctggtggaaggtgagaacaccaggattgcccaacccggcgaccatgtgtccgtgacggggatcttcctcccaatcctgcggacgggctttagacaggtggtacaaggactgttgtctgaaacatacctggaggctcaccgcatagttaagatgaataaatctgaggacgatgaatctggggctggagaactgacgagggaggaactccgccaaattgcggacgtgatctttgcaacagtccgggagctagtatccggtggtcgaagcgtaagattctctgaagctgaacagcgttgtgttagtagaggattcacacctgctcagttccaggcggctcttgacgagtacgaggaactgaatgtatggcaagtgaacgcttctcgcacacgcatcacttttgtctag

SEQ ID NO: 160277 - DNA, 1971 bp, Artificial Sequence
  derived and/or modified sequence
atgactccctcttggtggactcagtttgtgagaatgccaggtgctacgcggagttctcttctgatgccttattacaaagagcgcgaagtcgtgaacaaggacgttctggacgtctatattgaacatagactgatgatggaacagcggtcccgtgaccccggcatggtgaggagcccacagaatcagtaccccgccgaactgatgcgtcgttttgagctctacttccaaggaccctcttccaataagcctcgagtgatcagagaagtgagggctgatagtgtgggtaaactcgtgacagtgcggggaatcgtgacccgcgtcagtgaggtaaaacctaagatggttgtggctacatacacgtgcgatcagtgcggggctgagacttaccagccaatccaatcccccacctttatgcccttgatcatgtgtccttcccaggagtgtcagaccaaccggtcgggcggacggctctatttgcaaacacgggggtcccgcttcattaaatttcaggaaatgaagatgcaggagcacagcgaccaggtccctgtcggaaacattccgcggtcaatcaccgtgctggttgagggtgagaatacaagaatcgcgcaaccgggagatcacgtgtctgttactgggatctttctgccaatacttaggacaggtttccgccaagtagtgcaggggctgctatcagagacttacctggaagctcacagaatcgtcaagatgaataagagcgaagacgatgagtccggcgccggcgaactaacccgggaggagctgcggcagattgccgaagaggacttttacgagaagctggcagcatcaatagcccctgaaatctatggacatgaggacgttaaaaaagctctactcctcctgctcgtcggtggagtggatcagtcacctcggggcatgaaaataaggggaaatatcaatatctgcctcatgggtgaccccggggtggctaagtctcagctcctgtcatacatcgaccggcttgcccctaggagtcagtacactacaggtcgcggctcatcgggcgtcggtctcacagctgcggtgttgcgggattcagtctccggagaattaaccctggaaggtggggccctcgtactagcagaccagggtgtctgctgtatcgatgagtttgataaaatggcagaggctgacagaacagcaatccacgaggttatggaacaacagacaatcagcattgctaaagctggtattctgaccaccttgaacgcgaggtgttctatcctagctgccgccaaccctgcttacgggcgctacaacccccggaggtctctcgagcaaaatattcagctgcctgctgctttactgtcgaggtttgatctgctctggctaatacaagataggcctgaccgtgacaacgacctgcggcttgctcagcacatcacatacgtccaccaacatagtcggcagccccccagccagttcgaaccattggacatgaagttgatgcggcgttacatcgctatgtgtagggagaagcaacctatggtgcctgagtctttggccgattacattaccgctgcctacgtcgaaatgagacgggaggcctgggcctctaaggatgctacatatacatcagcacggaccctgctggcaatcttgcgccttagcacggctctggcaagactgaggatggtagatgtcgtggagaaagaggacgtgaacgaggccatccgccttatggagatgtcgaaagattccctgttgggggataaagggcaaacagctagaacccaacgtccagcagatgtaatttttgctactgtgcgcgagctcgtttccggagggcgaagcgtgaggttctccgaggctgagcaacgttgtgtttccaggggctttacacccgcacagttccaagcagcacttgatgaatacgaagagcttaacgtatggcaggtaaatgcgagtcgtaccaggattaccttcgtatag

SEQ ID NO: 160278 - DNA, 2160 bp, Artificial Sequence
  derived and/or modified sequence
atggccctgaaggactatgccctggagaaggagaaggtgaagaagttcctgcaggagttctaccaggatgatgagctgggcaagaagcagttcaagtatggcaaccagctggtgcggctggcccaccgggagcaggtggccctgtatgtggacctggatgatgtggctgaagatgatcctgagctggtggacagcatctgtgaaaatgccaggagatatgccaagctgtttgctgatgctgtgcaggagctgctgccccagtacaaggagcgggaggtggtgaacaaggatgtgctggatgtgtacatcgagcaccggctgatgatggagcagaggagccgggaccccggcatggtgcgcagcccccagaaccagtacccagctgagctgatgagaagatttgagctgtacttccagggccccagcagcaacaagcccagggtcatccgggaggtgcgggctgacagcgtgggcaagctggtgacagtgcggggcatcgtgaccagggtgtctgaggtgaagcccaagatggtggtggccacctacacctgtgaccagtgtggggctgagacctaccagcccatccagagccccaccttcatgcccctcatcatgtgccccagccaggagtgccagaccaacagaagtggcggccgcctgtacctgcagacccggggcagccgcttcatcaagttccaggagatgaagatgcaggagcacagcgaccaggtgcctgtgggcaacatccccaggagcatcaccgtgctggtggagggggagaacacccgcatcgcccagcccggggaccacgtgtctgtgacaggcatcttcctgcccatcctgaggacaggcttccggcaggtggtgcagggcctgctgtctgagacctacctggaggcccacagaattgtgaagatgaacaagtcagaagatgatgagagcggggccggggagctgacccgggaggagctgcggcagattgctgaggaggacttctatgagaagctggccgccagcatcgcccctgagatctacggccatgaagatgtgaagaaggccctgctgctgctgctggtgggcggcgtggaccagagcccccggggcatgaagatccggggcaacatcaacatctgcctgatgggagaccccggggtggccaagagccagctgctgagctacatcgaccggctggcccccaggagccagtacaccaccggccggggcagcagcggcgtgggcctgacagctgctgtgctgcgggacagcgtgtctggagagctgaccctggagggcggggccctggtgctggccgaccagggcgtgtgctgcattgatgaatttgacaagatggccgaggccgacagaacagccatccacgaggtgatggagcagcagaccatcagcatcgccaaggccggcatcctgaccaccctgaatgcccgctgcagcatcctggccgccgccaacccagcctacggccgctacaacccccggcgcagcctggagcagaacatccagctgcctgctgccctgctgagcagatttgacctgctgtggctgatccaggacagaccagaccgggacaatgacctgcggctggcccagcacatcacctacgtgcaccagcacagccggcagccccccagccagtttgagcccctggacatgaagctgatgaggcgctacatcgccatgtgccgggagaagcagcccatggtgcctgagagcctggccgactacatcacagctgcctacgtggagatgagaagagaggcctgggccagcaaggatgccacctacaccagcgcccggaccctgctggccatcctgcggctgagcacagccctggcccggctgaggatggtggatgtggtggagaaggaggatgtgaatgaggccatccggctgatggagatgagcaaggacagcctgctgggggacaagggccagacagcccggacccagaggcctgcagatgtgatctttgccaccgtgcgggagctggtgtctgggggccgctctgtgcgcttcagcgaggccgagcagagatgtgtgtcccggggcttcaccccagcccagttccaggccgccctggatgaatatgaggagctgaatgtgtggcaggtgaatgccagcaggacccgcatcacctttgtgtag

SEQ ID NO: 160279 - DNA, 1170 bp, Artificial Sequence
  derived and/or modified sequence
atggccctgaaggactatgccctggagaaggagaaggtgaagaagttcctgcaggagttctaccaggatgatgagctgggcaagaagcagttcaagtatggcaaccagctggtgcggctggcccaccgggagcaggtggccctgtatgtggacctggatgatgtggctgaagatgatcctgagctggtggacagcatctgtgaaaatgccaggagatatgccaagctgtttgctgatgctgtgcaggagctgctgccccagtacaaggagcgggaggtggtgaacaaggatgtgctggatgtgtacatcgagcaccggctgatgatggagcagaggagccgggaccccggcatggtgcgcagcccccagaaccagtacccagctgagctgatgagaagatttgagctgtacttccagggccccagcagcaacaagcccagggtcatccgggaggtgcgggctgacagcgtgggcaagctggtgacagtgcggggcatcgtgaccagggtgtctgaggtgaagcccaagatggtggtggccacctacacctgtgaccagtgtggggctgagacctaccagcccatccagagccccaccttcatgcccctcatcatgtgccccagccaggagtgccagaccaacagaagtggcggccgcctgtacctgcagacccggggcagccgcttcatcaagttccaggagatgaagatgcaggagcacagcgaccaggtgcctgtgggcaacatccccaggagcatcaccgtgctggtggagggggagaacacccgcatcgcccagcccggggaccacgtgtctgtgacaggcatcttcctgcccatcctgaggacaggcttccggcaggtggtgcagggcctgctgtctgagacctacctggaggcccacagaattgtgaagatgaacaagtcagaagatgatgagagcggggccggggagctgacccgggaggagctgcggcagattgctgatgtgatctttgccaccgtgcgggagctggtgtctgggggccgctctgtgcgcttcagcgaggccgagcagagatgtgtgtcccggggcttcaccccagcccagttccaggccgccctggatgaatatgaggagctgaatgtgtggcaggtgaatgccagcaggacccgcatcacctttgtgtag

SEQ ID NO: 160280 - DNA, 1971 bp, Artificial Sequence
  derived and/or modified sequence
atgacccccagctggtggacccagtttgtgaggatgcctggggccaccaggagcagcctgctgatgccctactacaaggagcgggaggtggtgaacaaggatgtgctggatgtgtacatcgagcaccggctgatgatggagcagaggagccgggaccccggcatggtgcgcagcccccagaaccagtacccagctgagctgatgagaagatttgagctgtacttccagggccccagcagcaacaagcccagggtcatccgggaggtgcgggctgacagcgtgggcaagctggtgacagtgcggggcatcgtgaccagggtgtctgaggtgaagcccaagatggtggtggccacctacacctgtgaccagtgtggggctgagacctaccagcccatccagagccccaccttcatgcccctcatcatgtgccccagccaggagtgccagaccaacagaagtggcggccgcctgtacctgcagacccggggcagccgcttcatcaagttccaggagatgaagatgcaggagcacagcgaccaggtgcctgtgggcaacatccccaggagcatcaccgtgctggtggagggggagaacaccagaattgcccagcccggggaccacgtgtctgtgacaggcatcttcctgcccatcctgaggacaggcttccggcaggtggtgcagggcctgctgtctgagacctacctggaggcccaccgcatcgtgaagatgaacaagtcagaagatgatgaaagtggagctggggagctgacccgggaggagctgcggcagattgctgaggaggacttctatgagaagctggccgccagcatcgcccctgagatctacggccatgaagatgtgaagaaggccctgctgctgctgctggtgggcggcgtggaccagagcccccggggcatgaagatccggggcaacatcaacatctgcctgatgggagaccccggggtggccaagagccagctgctgagctacatcgaccggctggcccccaggagccagtacaccaccggccggggcagcagtggagtgggcctgacagctgctgtgctgcgggacagcgtgtctggagagctgaccctggagggcggggccctggtgctggccgaccagggcgtgtgctgcattgatgaatttgacaagatggccgaggccgacagaacagccatccacgaggtgatggagcagcagaccatcagcatcgccaaggccggcatcctgaccaccctgaatgcccgctgcagcatcctggccgccgccaacccagcctacggccgctacaaccccaggaggagcctggagcagaacatccagctgcctgctgccctgctgagcagatttgacctgctgtggctgatccaggacagaccagaccgggacaatgacctgcggctggcccagcacatcacctacgtgcaccagcacagccggcagccccccagccagtttgagcccctggacatgaagctgatgaggcgctacatcgccatgtgccgggagaagcagcccatggtgcctgagagcctggccgactacatcacagctgcctacgtggagatgaggcgggaggcctgggccagcaaggatgccacctacaccagcgcccggaccctgctggccatcctgcggctgagcacagccctggcccggctgaggatggtggatgtggtggagaaggaggatgtgaatgaggccatccggctgatggagatgagcaaggacagcctgctgggggacaagggccagacagcccggacccagaggcctgcagatgtgatctttgccaccgtgcgggagctggtgtctgggggccgctctgtgcgcttcagcgaggccgagcagagatgtgtgtcccggggcttcaccccagcccagttccaggccgccctggatgaatatgaggagctgaatgtgtggcaggtgaatgccagcaggacccgcatcacctttgtgtag

SEQ ID NO: 160281 - DNA, 2957 bp, Artificial Sequence
  derived and/or modified sequence
agtcccgtcagcttccggtagaagagctcggccacatcccggccgccactgtccccgcggactggcgggtggaaggactcagtgaaggatcctgcgacacaggctggccctgggcgcccctcccgcccggcccctccgccccttcccagccccaagggtctaggatacagtctttgtagatgagcgggtcccccttggaggacagaatgaagaattgggaaatcatggccgttctggagagtagacaagaagacggcgaaagtcgggcctgccccgccctgcggccccggaacaaaagaacgcgtgtgcgctggccctttaagagcgattctcctccgcccgcgccagctcggaccgcgggaaacccggcgcctgcactaccccgcccggagattcccttccgacgcccgcaccgcctccccgtcactcattctaggcccgcacggtgattggcttgcggctagcgggaggtgaagaaggccgccttgtccgattggcccgcacgcagtggcgccggtcacgtggggggcgacgtttcgcgccaatttcggttggccggccacagtccaccgcgcggagattctcagcttccccaggagcaagacctctgagcccgccaagcgcggccgcacggccctcggcagcgatggcactgaaggactacgcgctagagaaggaaaaggttaagaagttcttacaagagttctaccaggatgatgaactcgggaagaagcagttcaagtatgggaaccagttggttcggctggctcatcgggaacaggtggctctgtatgtggacctggacgacgtagccgaggatgaccccgagttggtggactcaatttgtgagaatgccaggcgctacgcgaagctctttgctgatgccgtacaagagctgctgcctcagtacaaggagagggaagtggtaaataaagatgtcctggacgtttacattgagcatcggctaatgatggagcagcggagtcgggaccctgggatggtccgaagcccccagaaccagtaccctgctgaactcatgcgcagatttgagctgtattttcaaggccctagcagcaacaagcctcgtgtgatccgggaagtgcgggctgactctgtggggaagttggtaactgtgcgtggaatcgtcactcgtgtctctgaagtcaaacccaagatggtggtggccacttacacttgtgaccagtgtggggcagagacctaccagccgatccagtctcccactttcatgcctctgatcatgtgcccaagccaggagtgccaaaccaaccgctcaggagggcggctgtatctgcagacacggggctccagattcatcaaattccaggagatgaagatgcaagaacatagtgatcaggtgcctgtgggaaatatccctcgtagtatcacggtgctggtagaaggagagaacacaaggattgcccagcctggagaccacgtcagcgtcactggtattttcttgccaatcctgcgcactgggttccgacaggtggtacagggtttactctcagaaacctacctggaagcccatcggattgtgaagatgaacaagagtgaggatgatgagtctggggctggagagctcaccagggaggagctgaggcaaattgcagaggaggatttctacgaaaagctggcagcttcaatcgccccagaaatatacgggcatgaagatgtgaagaaggcactgctgctcctgctagtcgggggtgtggaccagtctcctcgaggcatgaaaatccggggcaacatcaacatctgtctgatgggggatcctggtgtggccaagtctcagctcctgtcatacattgatcgactggcgcctcgcagccagtacacaacaggccggggctcctcaggagtggggcttacggcagctgtgctgagagactccgtgagtggagaactgaccttagagggtggggccctggtgctggctgaccagggtgtgtgctgcattgatgagttcgacaagatggctgaggccgaccgcacagccatccacgaggtcatggagcagcagaccatctccattgccaaggccggcattctcaccacactcaatgcccgctgctccatcctggctgccgccaaccctgcctacgggcgctacaaccctcgccgcagcctggagcagaacatacagctacctgctgcactgctctcccggtttgacctcctctggctgattcaggaccggcccgaccgagacaatgacctacggttggcccagcacatcacctatgtgcaccagcacagccggcagcccccctcccagtttgaacctctggacatgaagctcatgaggcgttacatagccatgtgccgcgagaagcagcccatggtgccagagtctctggctgactacatcacagcagcatacgtggagatgaggcgagaggcttgggctagtaaggatgccacctatacttctgcccggaccctgctggctatcctgcgcctttccactgctctggcacgtctgagaatggtggatgtggtggagaaagaagatgtgaatgaagccatcaggctaatggagatgtcaaaggactctcttctaggagacaaggggcagacagctaggactcagagaccagcagatgtgatatttgccaccgtccgtgaactggtctcagggggccgaagtgtccggttctctgaggcagagcagcgctgtgtatctcgtggcttcacacccgcccagttccaggcggctctggatgaatatgaggagctcaatgtctggcaggtcaatgcttcccggacacggatcacttttgtctgattccagcctgcttgcaaccctggggtcctcttgttccctgctggcctgccccttgggaaggggcagtgatgcctttgaggggaaggaggagcccctctttctcccatgctgcacttactccttttgctaataaaagtgtttgtagattgtc

SEQ ID NO: 160282 - DNA, 1968 bp, Artificial Sequence
  derived and/or modified sequence
agtcccgtcagcttccggtagaagagctcggccacatcccggccgccactgtccccgcggactggcgggtggaaggactcagtgaaggatcctgcgacacaggctggccctgggcgcccctcccgcccggcccctccgccccttcccagccccaagggtctaggatacagtctttgtagatgagcgggtcccccttggaggacagaatgaagaattgggaaatcatggccgttctggagagtagacaagaagacggcgaaagtcgggcctgccccgccctgcggccccggaacaaaagaacgcgtgtgcgctggccctttaagagcgattctcctccgcccgcgccagctcggaccgcgggaaacccggcgcctgcactaccccgcccggagattcccttccgacgcccgcaccgcctccccgtcactcattctaggcccgcacggtgattggcttgcggctagcgggaggtgaagaaggccgccttgtccgattggcccgcacgcagtggcgccggtcacgtggggggcgacgtttcgcgccaatttcggttggccggccacagtccaccgcgcggagattctcagcttccccaggagcaagacctctgagcccgccaagcgcggccgcacggccctcggcagcgatggcactgaaggactacgcgctagagaaggaaaaggttaagaagttcttacaagagttctaccaggatgatgaactcgggaagaagcagttcaagtatgggaaccagttggttcggctggctcatcgggaacaggtggctctgtatgtggacctggacgacgtagccgaggatgaccccgagttggtggactcaatttgtgagaatgccaggcgctacgcgaagctctttgctgatgccgtacaagagctgctgcctcagtacaaggagagggaagtggtaaataaagatgtcctggacgtttacattgagcatcggctaatgatggagcagcggagtcgggaccctgggatggtccgaagcccccagaaccagtaccctgctgaactcatgcgcagatttgagctgtattttcaaggccctagcagcaacaagcctcgtgtgatccgggaagtgcgggctgactctgtggggaagttggtaactgtgcgtggaatcgtcactcgtgtctctgaagtcaaacccaagatggtggtggccacttacacttgtgaccagtgtggggcagagacctaccagccgatccagtctcccactttcatgcctctgatcatgtgcccaagccaggagtgccaaaccaaccgctcaggagggcggctgtatctgcagacacggggctccagattcatcaaattccaggagatgaagatgcaagaacatagtgatcaggtgcctgtgggaaatatccctcgtagtatcacggtgctggtagaaggagagaacacaaggattgcccagcctggagaccacgtcagcgtcactggtattttcttgccaatcctgcgcactgggttccgacaggtggtacagggtttactctcagaaacctacctggaagcccatcggattgtgaagatgaacaagagtgaggatgatgagtctggggctggagagctcaccagggaggagctgaggcaaattgcagatgtgatatttgccaccgtccgtgaactggtctcagggggccgaagtgtccggttctctgaggcagagcagcgctgtgtatctcgtggcttcacacccgcccagttccaggcggctctggatgaatatgaggagctcaatgtctggcaggtcaatgcttcccggacacggatcacttttgtctgattccagcctgcttgcaaccctggggtcctcttgttccctgctggcctgccccttgggaaggggcagtgatgcctttgaggggaaggaggagcccctctttctcccatgctgcacttactccttttgctaataaaagtgtttgtagattgtca

SEQ ID NO: 160283 - DNA, 2900 bp, Artificial Sequence
  derived and/or modified sequence
agtgtcgtgtaaacagtgtccttccgcgcggcggccgcggagagagctgcggcccgggggggcgtgcctgggatccggagcttcgctcgggcccgggaaaggcggcagtgggctgggatcgcggtgtctctgggtgtgatggccaatggctggactggctcccgccctgggcggaggaatcccgagctgtgaagcggctggaatccgggcccatgtgcttctttgtttactaagagcggaagcgatggcgggagcgggggtggggtgcggtggcggggtgcggtggcggaggtcccggtgaaatcaggggctaaggggacccaaagaaggcgggggatcataggggtggaaagaaagctgagaaccttgagaccggagtgtgaggggccaacggggaagggcgctagaattttaaactaaagtagggaccggaattcccctggggagatgttggatggccctgtgcactgccacgggctctttattcttcgctggttagaaacagacttgtgaaaaagagttatgcccactttggggagacttcgaaaaggttaagaagttcttacaagagttctaccaggatgatgaactcgggaagaagcagttcaagtatgggaaccagttggttcggctggctcatcgggaacaggtggctctgtatgtggacctggacgacgtagccgaggatgaccccgagttggtggactcaatttgtgagaatgccaggcgctacgcgaagctctttgctgatgccgtacaagagctgctgcctcagtacaaggagagggaagtggtaaataaagatgtcctggacgtttacattgagcatcggctaatgatggagcagcggagtcgggaccctgggatggtccgaagcccccagaaccagtaccctgctgaactcatgcgcagattgtgagtggtctctgtcgggaaagatgtagggattggttctccaggatcttgtttgtgactgttttctccccttagtgagctgtattttcaaggccctagcagcaacaagcctcgtgtgatccgggaagtgcgggctgactctgtggggaagttggtaactgtgcgtggaatcgtcactcgtgtctctgaagtcaaacccaagatggtggtggccacttacacttgtgaccagtgtggggcagagacctaccagccgatccagtctcccactttcatgcctctgatcatgtgcccaagccaggagtgccaaaccaaccgctcaggagggcggctgtatctgcagacacggggctccagattcatcaaattccaggagatgaagatgcaagaacatagtgatcaggtgcctgtgggaaatatccctcgtagtatcacggtgctggtagaaggagagaacacaaggattgcccagcctggagaccacgtcagcgtcactggtattttcttgccaatcctgcgcactgggttccgacaggtggtacagggtttactctcagaaacctacctggaagcccatcggattgtgaagatgaacaagagtgaggatgatgagtctggggctggagagctcaccagggaggagctgaggcaaattgcagaggaggatttctacgaaaagctggcagcttcaatcgccccagaaatatacgggcatgaagatgtgaagaaggcactgctgctcctgctagtcgggggtgtggaccagtctcctcgaggcatgaaaatccggggcaacatcaacatctgtctgatgggggatcctggtgtggccaagtctcagctcctgtcatacattgatcgactggcgcctcgcagccagtacacaacaggccggggctcctcaggagtggggcttacggcagctgtgctgagagactccgtgagtggagaactgaccttagagggtggggccctggtgctggctgaccagggtgtgtgctgcattgatgagttcgacaagatggctgaggccgaccgcacagccatccacgaggtcatggagcagcagaccatctccattgccaaggccggcattctcaccacactcaatgcccgctgctccatcctggctgccgccaaccctgcctacgggcgctacaaccctcgccgcagcctggagcagaacatacagctacctgctgcactgctctcccggtttgacctcctctggctgattcaggaccggcccgaccgagacaatgacctacggttggcccagcacatcacctatgtgcaccagcacagccggcagcccccctcccagtttgaacctctggacatgaagctcatgaggcgttacatagccatgtgccgcgagaagcagcccatggtgccagagtctctggctgactacatcacagcagcatacgtggagatgaggcgagaggcttgggctagtaaggatgccacctatacttctgcccggaccctgctggctatcctgcgcctttccactgctctggcacgtctgagaatggtggatgtggtggagaaagaagatgtgaatgaagccatcaggctaatggagatgtcaaaggactctcttctaggagacaaggggcagacagctaggactcagagaccagcagatgtgatatttgccaccgtccgtgaactggtctcagggggccgaagtgtccggttctctgaggcagagcagcgctgtgtatctcgtggcttcacacccgcccagttccaggcggctctggatgaatatgaggagctcaatgtctggcaggtcaatgcttcccggacacggatcacttttgtctgattccagcctgcttgcaaccctggggtcctcttgttccctgctggcctgccccttgggaaggggcagtgatgcctttgaggggaaggaggagcccctctttctcccatgctgcacttactccttttgctaataaaagtgtttgtagattgtc

SEQ ID NO: 160284 - DNA, 2321 bp, Artificial Sequence
  derived and/or modified sequence
tcggttggccggccacagtccaccgcgcggagattctcagcttccccaggagcaagacctctgagcccgccaagcgcggccgcacggccctcggcagcgatggcactgaaggactacgcgctagagaaggaaaaggttaagaagttcttacaagagttctaccaggatgatgaactcgggaagaagcagttcaagtatgggaaccagttggttcggctggctcatcgggaacaggtggctctgtatgtggacctggacgacgtagcctcagtacaaggagagggaagtggtaaataaagatgtcctggacgtttacattgagcatcggctaatgatggagcagcggagtcgggaccctgggatggtccgaagcccccagaaccagtaccctgctgaactcatgcgcagatttgagctgtattttcaaggccctagcagcaacaagcctcgtgtgatccgggaagtgcgggctgactctgtggggaagttggtaactgtgcgtggaatcgtcactcgtgtctctgaagtcaaacccaagatggtggtggccacttacacttgtgaccagtgtggggcagagacctaccagccgatccagtctcccactttcatgcctctgatcatgtgcccaagccaggagtgccaaaccaaccgctcaggagggcggctgtatctgcagacacggggctccagattcatcaaattccaggagatgaagatgcaagaacatagtgatcaggtgcctgtgggaaatatccctcgtagtatcacggtgctggtagaaggagagaacacaaggattgcccagcctggagaccacgtcagcgtcactggtattttcttgccaatcctgcgcactgggttccgacaggtggtacagggtttactctcagaaacctacctggaagcccatcggattgtgaagatgaacaagagtgaggatgatgagtctggggctggagagctcaccagggaggagctgaggcaaattgcagaggaggatttctacgaaaagctggcagcttcaatcgccccagaaatatacgggcatgaagatgtgaagaaggcactgctgctcctgctagtcgggggtgtggaccagtctcctcgaggcatgaaaatccggggcaacatcaacatctgtctgatgggggatcctggtgtggccaagtctcagctcctgtcatacattgatcgactggcgcctcgcagccagtacacaacaggccggggctcctcaggagtggggcttacggcagctgtgctgagagactccgtgagtggagaactgaccttagagggtggggccctggtgctggctgaccagggtgtgtgctgcattgatgagttcgacaagatggctgaggccgaccgcacagccatccacgaggtcatggagcagcagaccatctccattgccaaggccggcattctcaccacactcaatgcccgctgctccatcctggctgccgccaaccctgcctacgggcgctacaaccctcgccgcagcctggagcagaacatacagctacctgctgcactgctctcccggtttgacctcctctggctgattcaggaccggcccgaccgagacaatgacctacggttggcccagcacatcacctatgtgcaccagcacagccggcagcccccctcccagtttgaacctctggacatgaagctcatgaggcgttacatagccatgtgccgcgagaagcagcccatggtgccagagtctctggctgactacatcacagcagcatacgtggagatgaggcgagaggcttgggctagtaaggatgccacctatacttctgcccggaccctgctggctatcctgcgcctttccactgctctggcacgtctgagaatggtggatgtggtggagaaagaagatgtgaatgaagccatcaggctaatggagatgtcaaaggactctcttctaggagacaaggggcagacagctaggactcagagaccagcagatgtgatatttgccaccgtccgtgaactggtctcagggggccgaagtgtccggttctctgaggcagagcagcgctgtgtatctcgtggcttcacacccgcccagttccaggcggctctggatgaatatgaggagctcaatgtctggcaggtcaatgcttcccggacacggatcacttttgtctgattccagcctgcttgcaaccctggggtcctcttgttccctgctggcctgccccttgggaaggggcagtgatgcctttgaggggaaggaggagcccctctttctcccatgctgcacttactccttttgctaataaaagtgtttgtagattgtc

SEQ ID NO: 160285 - DNA, 2122 bp, Artificial Sequence
  derived and/or modified sequence
atgaccccgagttggtggactcaatttgtgagaatgccaggcgctacgcgaagctctttgctgatgccgtactacaaggagagggaagtggtaaataaagatgtcctggacgtttacattgagcatcggctaatgatggagcagcggagtcgggaccctgggatggtccgaagcccccagaaccagtaccctgctgaactcatgcgcagatttgagctgtattttcaaggccctagcagcaacaagcctcgtgtgatccgggaagtgcgggctgactctgtggggaagttggtaactgtgcgtggaatcgtcactcgtgtctctgaagtcaaacccaagatggtggtggccacttacacttgtgaccagtgtggggcagagacctaccagccgatccagtctcccactttcatgcctctgatcatgtgcccaagccaggagtgccaaaccaaccgctcaggagggcggctgtatctgcagacacggggctccagattcatcaaattccaggagatgaagatgcaagaacatagtgatcaggtgcctgtgggaaatatccctcgtagtatcacggtgctggtagaaggagagaacacaaggattgcccagcctggagaccacgtcagcgtcactggtattttcttgccaatcctgcgcactgggttccgacaggtggtacagggtttactctcagaaacctacctggaagcccatcggattgtgaagatgaacaagagtgaggatgatgagtctggggctggagagctcaccagggaggagctgaggcaaattgcagaggaggatttctacgaaaagctggcagcttcaatcgccccagaaatatacgggcatgaagatgtgaagaaggcactgctgctcctgctagtcgggggtgtggaccagtctcctcgaggcatgaaaatccggggcaacatcaacatctgtctgatgggggatcctggtgtggccaagtctcagctcctgtcatacattgatcgactggcgcctcgcagccagtacacaacaggccggggctcctcaggagtggggcttacggcagctgtgctgagagactccgtgagtggagaactgaccttagagggtggggccctggtgctggctgaccagggtgtgtgctgcattgatgagttcgacaagatggctgaggccgaccgcacagccatccacgaggtcatggagcagcagaccatctccattgccaaggccggcattctcaccacactcaatgcccgctgctccatcctggctgccgccaaccctgcctacgggcgctacaaccctcgccgcagcctggagcagaacatacagctacctgctgcactgctctcccggtttgacctcctctggctgattcaggaccggcccgaccgagacaatgacctacggttggcccagcacatcacctatgtgcaccagcacagccggcagcccccctcccagtttgaacctctggacatgaagctcatgaggcgttacatagccatgtgccgcgagaagcagcccatggtgccagagtctctggctgactacatcacagcagcatacgtggagatgaggcgagaggcttgggctagtaaggatgccacctatacttctgcccggaccctgctggctatcctgcgcctttccactgctctggcacgtctgagaatggtggatgtggtggagaaagaagatgtgaatgaagccatcaggctaatggagatgtcaaaggactctcttctaggagacaaggggcagacagctaggactcagagaccagcagatgtgatatttgccaccgtccgtgaactggtctcagggggccgaagtgtccggttctctgaggcagagcagcgctgtgtatctcgtggcttcacacccgcccagttccaggcggctctggatgaatatgaggagctcaatgtctggcaggtcaatgcttcccggacacggatcacttttgtctgattccagcctgcttgcaaccctggggtcctcttgttccctgctggcctgccccttgggaaggggcagtgatgcctttgaggggaaggaggagcccctctttctcccatgctgcacttactccttttgctaataaaagtgtttgtagattgtc

SEQ ID NO: 160286 - DNA, 2160 bp, Artificial Sequence
  derived and/or modified sequence
atggccctgaaggactacgccctggagaaggagaaggtgaagaagtttttgcaagagttttaccaggatgacgagctcgggaaaaaacagtttaaatacggtaaccagctggtgcggctggctcaccgagagcaggtggctttgtacgtggatctggacgacgtggctgaggacgaccctgaactggtggacagtatctgtgagaacgctcggcggtatgccaagttattcgccgacgccgtccaagaactgctcccccaatacaaagaacgggaagttgttaacaaggatgtcctggacgtctacatcgaacaccggcttatgatggaacaaaggtctagggaccccgggatggtgaggtccccacaaaaccagtatcccgcagaactgatgcgaaggtttgaactctatttccaaggcccgtcttcgaataaacctcgtgtgattagagaggtaagagcagattcagttggaaagctcgtcacggtgcgggggattgtgactcgggtcagcgaagtcaaacctaagatggttgtagcaacttacacttgcgaccaatgcggagctgagacctatcagccgattcagagtcccactttcatgcctctgatcatgtgcccctctcaggagtgccaaaccaaccggagcggtggaagactatatctgcagacgcgggggagcaggttcatcaagttccaagaaatgaagatgcaggaacacagcgatcaggtgccggtgggcaatatcccaaggagtatcacggttttggtagagggggagaatactaggatagcccaaccaggcgaccacgtgagcgtcactggaatttttctccctatactgcgtactggcttccgccaggtggtccagggacttttatcagagacctaccttgaagcccacagaatcgtgaagatgaacaagtccgaggacgatgagtctggggcaggcgagctgacaagagaagaactgcgccaaatcgccgaggaggacttttacgaaaagctggctgcaagcatcgctcctgagatatatgggcatgaagacgtcaaaaaggcactcctcctgctcttagtgggcggtgtggaccaaagtcccaggggcatgaagatcaggggaaacattaacatatgcctcatgggggaccctggggtcgcaaaatcccagctactgtcctacattgataggctggctccgagaagccaatacactaccggccgcggatcatctggcgtggggctaacagccgccgtcttacgcgattctgtatctggcgagttgaccttggagggaggggccctggttctggctgatcaaggcgtttgttgcattgacgaattcgacaaaatggcagaggcagatagaactgcgattcacgaagtgatggaacaacagacaatctcgatcgccaaagccggaatcttgaccacacttaatgcccgatgttcaatattagcggctgctaatccagcttacggcaggtacaatccccgtagatcactcgaacaaaatatccagctcccagctgccctcttaagcagatttgaccttctctggctgatacaggacagaccggacagagacaatgatctgcggctggcgcagcacataacttacgtgcaccaacacagtaggcaaccacccagtcagttcgagccgttagatatgaaattgatgcgtcgctatatagcgatgtgtcgggagaagcagccaatggttccagagtctttagccgattacattacagccgcatacgtcgaaatgaggcgggaagcttgggcttccaaggatgctacttacacatctgcacgcaccctactcgccatcctcagactctccactgccctggcccggctgcgaatggtcgacgtagtcgagaaagaagatgtaaacgaagcaatcaggctgatggagatgagcaaggactccctgcttggcgataaaggccagactgcccggacacagaggcctgccgacgtgattttcgctaccgtgcgggagctggtgtctggcggccgttccgttagattctctgaagccgaacaacggtgtgtgtctcgtggcttcactccagcccagttccaggccgcgctggatgaatacgaggagcttaatgtctggcaggtaaacgccagtcgcacacggattacattcgtctag

SEQ ID NO: 160287 - DNA, 1170 bp, Artificial Sequence
  derived and/or modified sequence
atggccctgaaggactacgccctggagaaggagaaggtgaagaagttcttgcaggaattctaccaggacgatgagctggggaaaaaacaatttaagtacgggaaccagttagtccggctggcgcaccgcgagcaggttgccctgtacgtggatcttgatgacgtggctgaggacgatccagagctcgtagactctatatgcgaaaacgcaagaaggtatgcgaagctcttcgctgacgctgtacaggaactgctgccacaatataaagaaagggaggtggttaacaaagatgtgttggatgtttacattgaacaccgcctgatgatggagcagcgctccagggatcccgggatggttcggagccctcagaatcagtaccctgccgagttgatgaggaggtttgaattgtatttccagggaccaagctctaataagccaagagtgatacgagaagtgcgtgccgacagcgtaggtaaactggtcactgtgaggggcatagtcacccgggtgtccgaggtaaagcccaaaatggtggtcgccacttacacttgcgatcagtgtggagccgaaacgtaccagcctatccagtctcctactttcatgcctctcatcatgtgtccttctcaagagtgtcagacaaaccggagtggcggacgcctgtacctgcaaacaagaggctcacggttcatcaagttccaggagatgaagatgcaagagcattctgaccaagtccctgtcgggaatatccctaggtccatcacagttttggtggaaggagaaaatacacgaatagcccaacccggcgatcatgtgagtgtgacaggcattttccttccgattctccgtaccggatttcgccaagttgtacaggggctcctgtctgagacttacctggaagctcacaggattgtcaagatgaataagagcgaagacgacgagtctggtgccggcgaattgacccgcgaggaactacggcagatagccgacgtgatttttgctaccgtgagggagctcgtgtccggaggaaggagcgtgcgattttccgaagccgaacagaggtgcgtaagccgaggattcacgcccgctcagttccaggctgctctggacgagtacgaagagctgaacgtgtggcaagtgaacgcttcccgaacacgcatcacctttgtttag

SEQ ID NO: 160288 - DNA, 1971 bp, Artificial Sequence
  derived and/or modified sequence
atgacccccagctggtggacccagttcgtgcggatgcccggcgccacccgctcgagtttgcttatgccctactacaaagaacgcgaggtagtgaataaggatgtgctggacgtgtatattgagcataggcttatgatggagcaacgttctcgcgaccctggaatggtgaggtctcctcagaaccagtaccctgccgagttgatgcggcgttttgaactgtacttccaggggccttctagcaacaagccacgtgtgatccgcgaggttcgcgctgactccgtagggaaactggtgaccgtgagaggaatcgtcactcgcgtgtctgaagtgaaaccaaagatggtggtggccacgtacacatgtgaccaatgcggagcagaaacgtatcaacctattcagtccccaaccttcatgcctttgatcatgtgtcccagccaggagtgccagacaaaccgtagcggcggccgtctttatctgcaaacgcggggaagccggtttatcaagtttcaggagatgaaaatgcaggagcactcagaccaggtacccgtgggcaacatacccaggtcgataaccgtgctagtcgaaggagaaaataccaggattgcacagcccggggatcacgtttctgtgaccggtatcttcttacccattctgcgaacaggctttagacaggtggtacagggattattgagcgagacatatttggaggctcacaggatcgtcaagatgaacaagtccgaagatgacgagagcggagctggagagcttacacgcgaggagctgcgtcagatcgctgaggaggacttctatgagaaactggcagccagcattgctcctgagatctatggccacgaggacgtgaaaaaagccctgctgctgctgttggtgggcggggttgaccagtccccccgggggatgaagattcgcggcaacataaacatctgtctcatgggggatcccggtgtcgctaagtcccagctactttcatatattgaccgcctggcaccccgctctcaatacaccaccggcagaggatcttccggagttggactgacggcggccgtgctgcgcgacagtgtatcgggagaactcaccctggagggcggtgccctagtccttgcggaccagggggtctgttgcatcgatgagtttgataagatggcagaagcagacaggactgcgatccatgaagtgatggagcagcaaaccatctctattgccaaagccgggatcctcacaactctgaacgccagatgcagtattctggccgccgccaatcctgcctacggtcggtacaatccgaggcgttctcttgagcagaacattcagctcccagctgcccttctctcgcgatttgacctcctgtggctcatacaggaccgacccgaccgcgataatgatctgagattagcccagcatattacatacgtgcaccaacacagtaggcagcctccttctcagtttgagccgttggatatgaaactgatgcgcaggtatatcgcaatgtgcagggaaaagcaaccaatggtgccagaaagtcttgcagactacatcaccgcagcttatgtcgagatgcgacgtgaggcttgggcatcgaaagatgcgacatatacttccgctcgcacactgctggccattctcagactatccaccgccctggctcggctccgaatggtggacgttgtcgagaaagaagacgtgaacgaggctatcagattgatggagatgtccaaggactctctgctcggcgacaaggggcaaacagcgcgaacacagcgccctgccgacgtgatcttcgctactgtgcgcgagctggtcagcggcggacggagtgtgcggttctccgaggcagagcagcgttgtgtcagccggggcttcacccctgcccagtttcaggccgctctggacgagtacgaggagcttaacgtttggcaggtgaacgcatctcggacaagaatcacgtttgtgtag

SEQ ID NO: 160289 - DNA, 2160 bp, Artificial Sequence
  derived and/or modified sequence
atggccctgaaagactatgcactggagaaggaaaaggtgaaaaagttcctgcaggagttctaccaggacgacgaattgggtaagaaacagttcaagtacggcaatcagctggtgagattggcccatcgagaacaggtggccctgtatgtggatctggacgatgtggccgaagatgacccggagctggttgactctatttgcgagaatgctagacgttatgctaaactcttcgctgacgctgtgcaagagcttttgcctcaatacaaagagagggaagtggttaataaggacgtactggacgtgtatatcgagcaccggctcatgatggaacagcggtcaagagaccctgggatggtaaggagtccccagaatcaatatcctgcagagctcatgcgcaggttcgaattatactttcaggggccttccagtaataaaccacgcgttatccgcgaggtgcgagcagattcggtcggaaaactggtgactgtccgcggaattgtgacaagagtgagcgaggtgaagccgaaaatggtcgtcgcgacttatacctgcgatcaatgtggagcagaaacataccagccaatccagtccccaacatttatgcctctgataatgtgtcctagccaggaatgccagacgaaccgcagcggcggtcgcctttacttgcagaccagggggtccaggtttattaagtttcaggaaatgaaaatgcaggaacactctgatcaggtcccagtcggcaacatcccccgatcaattactgtgctcgtggagggcgaaaacactcgaattgcgcagcccggagaccacgtctctgtgaccggtatcttcttaccgattctgaggaccggctttaggcaggtcgtgcaaggactgctgagtgagacttacctcgaagcccaccggatagtgaagatgaataagtctgaagacgatgagtctggagccggagaacttacgagggaagagctgcggcagatagccgaagaggatttctacgagaagctggccgcttcaatcgctccggaaatctacggccacgaggacgtaaagaaagctttactgttgttacttgtggggggtgtggaccagtcccccaggggcatgaagattcgcggaaacattaatatatgtctgatgggcgatcccggagtggccaaatcccagcttttatcatatatcgatcgccttgctccacgatcccagtatacaactggacgaggctcttccggagttggcttgaccgcagcagttttgcgcgattctgtgagcggggagctcacattagaggggggagctctcgttctggccgatcagggcgtgtgctgtatagacgagtttgataagatggccgaagcggaccggaccgcgatccatgaggtgatggagcagcaaacgatctcaatcgcaaaagccggtatacttaccactctcaacgcacgctgtagtatcctggccgctgccaatcccgcttatggaagatataatccaaggagaagcttggagcagaacattcagctaccagctgccctactgtcccggtttgatctcctgtggcttatacaggaccgcccagatcgcgacaacgatctcaggctggcccaacacattacctatgttcatcagcactctagacagcccccaagccaattcgagcctttagacatgaaattgatgcgtagatatattgccatgtgcagggagaaacagcctatggtgccggaatctctcgctgattatataaccgccgcttacgtagaaatgcgtagggaggcatgggcatccaaagatgccacatatacaagtgcgagaactctgttggcaatcctgcggctttcaactgccctcgccagactcagaatggtcgatgtcgtcgagaaggaggacgtgaacgaagccattcgcttgatggagatgtctaaggattcactgctcggagataaaggccagaccgcccgtactcagcggccagcagatgtgatttttgcaacagtgcgagagcttgttagcggaggcaggagcgtgcgcttttcagaagccgaacagcgctgtgtgagcaggggattcacaccagcacagtttcaggccgctctcgatgaatacgaagaattgaatgtctggcaggtgaatgcttctcgaactcgcattacctttgtctag

SEQ ID NO: 160290 - DNA, 1170 bp, Artificial Sequence
  derived and/or modified sequence
atggccctgaaggactacgcattggagaaagagaaggtcaagaaatttctgcaagagttttatcaggatgacgagctgggaaagaagcagtttaagtacgggaaccagctggttaggcttgctcacagggagcaggttgccctttatgtagaccttgatgacgttgcagaggacgatcccgaactggtggacagcatttgtgagaatgctagacggtacgctaagctgttcgcagacgccgtgcaggaactcttaccgcaatacaaggagagggaggtggtgaataaggatgtgctggatgtgtatatagagcatcgcctaatgatggaacagcggagccgcgacccgggaatggtccggtcacctcaaaaccagtatcccgcagaattgatgcgtcgctttgagctctattttcagggacctagctcgaacaaacctagggtgattcgggaggtgcgggcagacagtgttgggaagctagtaactgttcggggaatcgtcacaagagtgtccgaagtgaaaccgaaaatggtagtggcaacctacacatgtgaccaatgtggcgctgaaacctaccagccaatccagtcccccacctttatgcctcttatcatgtgccctagccaggagtgccagaccaataggagcggcggacggttgtatctccagacacgaggctcccgatttataaagtttcaggagatgaagatgcaagagcactccgaccaagtacccgtaggtaatatcccaagatcaatcaccgtattggtcgaaggcgaaaacactagaatcgcccagccgggagatcacgtgtccgtgacaggcattttcctccctatcctgcgtactgggttcaggcaagtggtgcagggactgctgtcagagacctacctcgaagcgcaccgtattgtgaagatgaacaaatccgaagacgacgagagtggggcaggtgaactgaccagagaagagcttaggcagattgcggacgttatcttcgctactgtgcgcgagctggttagtggtggccgtagcgttcgattctccgaagcggagcagcgctgcgtgagtcgcggttttacacccgctcagtttcaggctgccctggacgagtatgaggaactcaatgtgtggcaagtgaatgcatccaggacacgtattacctttgtatag

SEQ ID NO: 160291 - DNA, 1971 bp, Artificial Sequence
  derived and/or modified sequence
atgacacctagttggtggacgcagtttgtccggatgcccggagctacaaggagttcccttctgatgccatactataaggaacgagaggtcgtgaacaaggacgtccttgacgtttacatagagcacaggcttatgatggagcaaaggagcagagatcctggaatggtaagatcacctcagaatcagtaccctgccgagctgatgcggagatttgagttgtactttcagggtccatcctccaataaaccacgggtgatccgggaggtccgagcggatagcgtgggtaaattagttacagtgcgcggaatcgtgacccgagtgagtgaagtcaagccgaagatggtggttgctacgtacacttgtgatcaatgcggggctgagacttaccagccaatccagtccccaacctttatgccactgatcatgtgccctagtcaggaatgccagaccaaccgatcgggtggccgtttatacctgcagacaaggggaagcagattcatcaaatttcaggaaatgaagatgcaggagcattctgaccaggtgcccgtgggcaatattccacgctctatcaccgtgctggttgagggtgagaacacccgcatcgcccaaccaggcgatcatgtctcggttactggaattttccttcccattctgaggacaggttttaggcaggtggtacaaggcctgctaagtgagacctacttggaggctcaccggatcgtcaaaatgaacaagtctgaagacgatgaatctggcgcaggagaacttaccagggaagaattacgtcagatcgccgaagaagatttttatgaaaagctggccgctagtatcgcccctgagatttatgggcacgaggacgtgaagaaggctctcctgctgctgctcgtggggggagtagatcaatctccccgagggatgaaaatcagaggcaacattaacatttgtctaatgggggaccccggagtggctaagagccaactgctgagctatatagatcgcttggctcctcgctcgcagtacaccacaggcagaggttcctccggtgtcgggcttacagctgccgtcctgagggacagcgtcagtggagaactcactctggagggaggggcactagtcctcgcagaccagggtgtctgctgcatcgacgaattcgacaagatggctgaggccgatcggactgcaatacacgaggtcatggaacagcagactatctccattgccaaggcaggaatactgaccactctgaacgctagatgctccatcttggcagccgcaaacccagcatatggcagatacaatcctaggcggagcctcgaacagaacatccagctgccggctgccctgctgtcacgattcgacttgctgtggcttattcaggaccgaccagacagggataatgatttacgactggcacaacacatcacctatgtacatcaacactcccgtcagcccccatcacagttcgaaccgttggacatgaaactgatgcgcaggtatatcgccatgtgcagagagaagcagcccatggtgccggagagcctggctgactatattaccgccgcttatgtggaaatgcgcagggaggcctgggcatccaaagatgccacgtacactagtgctcggacattactggctattctgcgcctcagtacagcactggccaggctgagaatggtagatgttgtggagaaggaggatgtcaatgaggccattcggctgatggaaatgagcaaggacagtttgttgggagacaaggggcaaactgcacgcacccagaggcccgctgacgtgattttcgccacggtgagagagctcgtgagcggaggaaggtccgttcggttctcagaggccgagcagaggtgtgtttctcgcggttttacaccagcccagtttcaagcagcattggatgaatatgaagagcttaacgtttggcaagtcaatgcgtcaaggacccgcattacattcgtttag

SEQ ID NO: 160292 - DNA, 2160 bp, Artificial Sequence
  derived and/or modified sequence
atggccctgaaggactacgccctggagaaggagaaggtgaagaagttcctgcaggagttctaccaggacgacgagctgggcaagaagcagttcaagtacggcaaccagctggtgagactggcccacagagagcaggtggccctgtacgtggacctggacgacgtggccgaggacgaccccgagctggtggacagcatctgcgagaacgccagaagatacgccaagctgttcgccgacgccgtgcaggagctgctgccccagtacaaggagagagaggtggtgaacaaggacgtgctggacgtgtacatcgagcacagactgatgatggagcagagaagcagagaccccggcatggtgagaagcccccagaaccagtaccccgccgagctgatgagaagattcgagctgtacttccagggccccagcagcaacaagcccagagtgatcagagaggtgagagccgacagcgtgggcaagctggtgaccgtgagaggcatcgtgaccagagtgagcgaggtgaagcccaagatggtggtggccacctacacctgcgaccagtgcggcgccgagacctaccagcccatccagagccccaccttcatgcccctgatcatgtgccccagccaggagtgccagaccaacagaagcggcggcagactgtacctgcagaccagaggcagcagattcatcaagttccaggagatgaagatgcaggagcacagcgaccaggtgcccgtgggcaacatccccagaagcatcaccgtgctggtggagggcgagaacaccagaatcgcccagcccggcgaccacgtgagcgtgaccggcatcttcctgcccatcctgagaaccggcttcagacaggtggtgcagggcctgctgagcgagacctacctggaggcccacagaatcgtgaagatgaacaagagcgaggacgacgagagcggcgccggcgagctgaccagagaggagctgagacagatcgccgaggaggacttctacgagaagctggccgccagcatcgcccccgagatctacggccacgaggacgtgaagaaggccctgctgctgctgctggtgggcggcgtggaccagagccccagaggcatgaagatcagaggcaacatcaacatctgcctgatgggcgaccccggcgtggccaagagccagctgctgagctacatcgacagactggcccccagaagccagtacaccaccggcagaggcagcagcggcgtgggcctgaccgccgccgtgctgagagacagcgtgagcggcgagctgaccctggagggcggcgccctggtgctggccgaccagggcgtgtgctgcatcgacgagttcgacaagatggccgaggccgacagaaccgccatccacgaggtgatggagcagcagaccatcagcatcgccaaggccggcatcctgaccaccctgaacgccagatgcagcatcctggccgccgccaaccccgcctacggcagatacaaccccagaagaagcctggagcagaacatccagctgcccgccgccctgctgagcagattcgacctgctgtggctgatccaggacagacccgacagagacaacgacctgagactggcccagcacatcacctacgtgcaccagcacagcagacagccccccagccagttcgagcccctggacatgaagctgatgagaagatacatcgccatgtgcagagagaagcagcccatggtgcccgagagcctggccgactacatcaccgccgcctacgtggagatgagaagagaggcctgggccagcaaggacgccacctacaccagcgccagaaccctgctggccatcctgagactgagcaccgccctggccagactgagaatggtggacgtggtggagaaggaggacgtgaacgaggccatcagactgatggagatgagcaaggacagcctgctgggcgacaagggccagaccgccagaacccagagacccgccgacgtgatcttcgccaccgtgagagagctggtgagcggcggcagaagcgtgagattcagcgaggccgagcagagatgcgtgagcagaggcttcacccccgcccagttccaggccgccctggacgagtacgaggagctgaacgtgtggcaggtgaacgccagcagaaccagaatcaccttcgtgtag

SEQ ID NO: 160293 - DNA, 1170 bp, Artificial Sequence
  derived and/or modified sequence
atggccctgaaggactacgccctggagaaggagaaggtgaagaagttcctgcaggagttctaccaggacgacgagctgggcaagaagcagttcaagtacggcaaccagctggtgagactggcccacagagagcaggtggccctgtacgtggacctggacgacgtggccgaggacgaccccgagctggtggacagcatctgcgagaacgccagaagatacgccaagctgttcgccgacgccgtgcaggagctgctgccccagtacaaggagagagaggtggtgaacaaggacgtgctggacgtgtacatcgagcacagactgatgatggagcagagaagcagagaccccggcatggtgagaagcccccagaaccagtaccccgccgagctgatgagaagattcgagctgtacttccagggccccagcagcaacaagcccagagtgatcagagaggtgagagccgacagcgtgggcaagctggtgaccgtgagaggcatcgtgaccagagtgagcgaggtgaagcccaagatggtggtggccacctacacctgcgaccagtgcggcgccgagacctaccagcccatccagagccccaccttcatgcccctgatcatgtgccccagccaggagtgccagaccaacagaagcggcggcagactgtacctgcagaccagaggcagcagattcatcaagttccaggagatgaagatgcaggagcacagcgaccaggtgcccgtgggcaacatccccagaagcatcaccgtgctggtggagggcgagaacaccagaatcgcccagcccggcgaccacgtgagcgtgaccggcatcttcctgcccatcctgagaaccggcttcagacaggtggtgcagggcctgctgagcgagacctacctggaggcccacagaatcgtgaagatgaacaagagcgaggacgacgagagcggcgccggcgagctgaccagagaggagctgagacagatcgccgacgtgatcttcgccaccgtgagagagctggtgagcggcggcagaagcgtgagattcagcgaggccgagcagagatgcgtgagcagaggcttcacccccgcccagttccaggccgccctggacgagtacgaggagctgaacgtgtggcaggtgaacgccagcagaaccagaatcaccttcgtgtag

SEQ ID NO: 160294 - DNA, 1971 bp, Artificial Sequence
  derived and/or modified sequence
atgacccccagctggtggacccagttcgtgagaatgcccggcgccaccagaagcagcctgctgatgccctactacaaggagagagaggtggtgaacaaggacgtgctggacgtgtacatcgagcacagactgatgatggagcagagaagcagagaccccggcatggtgagaagcccccagaaccagtaccccgccgagctgatgagaagattcgagctgtacttccagggccccagcagcaacaagcccagagtgatcagagaggtgagagccgacagcgtgggcaagctggtgaccgtgagaggcatcgtgaccagagtgagcgaggtgaagcccaagatggtggtggccacctacacctgcgaccagtgcggcgccgagacctaccagcccatccagagccccaccttcatgcccctgatcatgtgccccagccaggagtgccagaccaacagaagcggcggcagactgtacctgcagaccagaggcagcagattcatcaagttccaggagatgaagatgcaggagcacagcgaccaggtgcccgtgggcaacatccccagaagcatcaccgtgctggtggagggcgagaacaccagaatcgcccagcccggcgaccacgtgagcgtgaccggcatcttcctgcccatcctgagaaccggcttcagacaggtggtgcagggcctgctgagcgagacctacctggaggcccacagaatcgtgaagatgaacaagagcgaggacgacgagagcggcgccggcgagctgaccagagaggagctgagacagatcgccgaggaggacttctacgagaagctggccgccagcatcgcccccgagatctacggccacgaggacgtgaagaaggccctgctgctgctgctggtgggcggcgtggaccagagccccagaggcatgaagatcagaggcaacatcaacatctgcctgatgggcgaccccggcgtggccaagagccagctgctgagctacatcgacagactggcccccagaagccagtacaccaccggcagaggcagcagcggcgtgggcctgaccgccgccgtgctgagagacagcgtgagcggcgagctgaccctggagggcggcgccctggtgctggccgaccagggcgtgtgctgcatcgacgagttcgacaagatggccgaggccgacagaaccgccatccacgaggtgatggagcagcagaccatcagcatcgccaaggccggcatcctgaccaccctgaacgccagatgcagcatcctggccgccgccaaccccgcctacggcagatacaaccccagaagaagcctggagcagaacatccagctgcccgccgccctgctgagcagattcgacctgctgtggctgatccaggacagacccgacagagacaacgacctgagactggcccagcacatcacctacgtgcaccagcacagcagacagccccccagccagttcgagcccctggacatgaagctgatgagaagatacatcgccatgtgcagagagaagcagcccatggtgcccgagagcctggccgactacatcaccgccgcctacgtggagatgagaagagaggcctgggccagcaaggacgccacctacaccagcgccagaaccctgctggccatcctgagactgagcaccgccctggccagactgagaatggtggacgtggtggagaaggaggacgtgaacgaggccatcagactgatggagatgagcaaggacagcctgctgggcgacaagggccagaccgccagaacccagagacccgccgacgtgatcttcgccaccgtgagagagctggtgagcggcggcagaagcgtgagattcagcgaggccgagcagagatgcgtgagcagaggcttcacccccgcccagttccaggccgccctggacgagtacgaggagctgaacgtgtggcaggtgaacgccagcagaaccagaatcaccttcgtgtag

SEQ ID NO: 160295 - protein, 334 aa, Artificial Sequence
  derived and/or modified sequence
MSEPIRVLVTGAAGQIAYSLLYSIGNGSVFGKDQPIILVLLDITPMMGVLDGVLMELQDCALPLLKDVIATDKEDVAFKDLDVAILVGSMPRREGMERKDLLKANVKIFKSQGAALDKYAKKSVKVIVVGNPANTNCLTASKSAPSIPKENFSCLTRLDHNRAKAQIALKLGVTANDVKNVIIWGNHSSTQYPDVNHAKVKLQGKEVGVYEALKDDSWLKGEFVTTVQQRGAAVIKARKLSSAMSAAKAICDHVRDIWFGTPEGEFVSMGVISDGNSYGVPDDLLYSFPVVIKNKTWKFVEGLPINDFSREKMDLTAKELTEEKESAFEFLSSA

SEQ ID NO: 160296 - protein, 245 aa, Artificial Sequence
  derived and/or modified sequence
MPRREGMERKDLLKANVKIFKSQGAALDKYAKKSVKVIVVGNPANTNCLTASKSAPSIPKENFSCLTRLDHNRAKAQIALKLGVTANDVKNVIIWGNHSSTQYPDVNHAKVKLQGKEVGVYEALKDDSWLKGEFVTTVQQRGAAVIKARKLSSAMSAAKAICDHVRDIWFGTPEGEFVSMGVISDGNSYGVPDDLLYSFPVVIKNKTWKFVEGLPINDFSREKMDLTAKELTEEKESAFEFLSSA

SEQ ID NO: 160297 - DNA, 1005 bp, Artificial Sequence
  derived and/or modified sequence
atgtccgaacccataagggtgctcgtgaccggcgctgcgggccaaatagcctactctctactgtactctatcggcaatgggagtgtgtttggaaaggatcagcctatcatactggttttgctggatattactcccatgatgggcgtcttggatggtgtgctgatggaactgcaggattgcgcattgcctttattgaaagacgtgatcgcgaccgacaaggaggatgttgcctttaaggacctggacgtggccattttggtggggagcatgcccaggagggagggaatggagcggaaggatctgctaaaggccaacgtaaagatattcaagtctcagggcgcggctctggataagtacgccaagaagagtgtcaaggtaattgtggttggcaatcccgccaatactaactgtctgaccgcaagcaagtcagcacctagtataccaaaggagaacttcagctgcctgacacgccttgaccataaccgagccaaggcccagattgcccttaaacttggcgttacagccaatgatgttaagaacgtgatcatctgggggaaccactcctcaacccaataccctgacgtaaaccatgcaaaagtcaaactgcagggaaaggaagtgggagtctatgaggccctgaaagacgacagctggttgaaaggcgaattcgtaacgactgtacagcagcgcggagccgcagtcattaaagcccgtaaactgtcatcagctatgagtgccgctaaagccatttgtgaccacgtcagggatatctggttcgggacgccagaaggggagtttgtgagtatgggggtgatctccgatggaaactcatacggcgtgccggatgatctgttgtactcctttccggttgttatcaaaaataaaacctggaaatttgtcgaggggttgcccatcaacgacttttcaagagagaagatggatctgacagccaaagaattgacagaggaaaaggagtctgctttcgaatttttgtcttcagcctag

SEQ ID NO: 160298 - DNA, 1005 bp, Artificial Sequence
  derived and/or modified sequence
atgtccgaacctatccgcgtcctagttacgggcgccgccggtcagatagcgtacagtctgctttacagtattgggaatggctccgtgtttggcaaggatcagccaatcattttggtgctgctggatattactcccatgatgggggtgctggacggggtgctgatggagctccaagattgcgccctacctcttctcaaagatgtaattgccactgacaaggaagatgtggccttcaaagacttggacgtggctattcttgtggggagcatgccccgtagggagggcatggaaagaaaggacctactgaaggcaaacgtgaaaatcttcaagagccaaggggctgccttggataagtacgccaaaaagtctgtaaaggtgatagtggtgggaaacccagctaacaccaattgcctcactgcatctaagagcgcgccctctatccccaaagagaatttctcatgtcttactagactggaccacaacagggccaaagctcagatagctctgaaattgggtgtaactgccaatgacgtaaagaacgtaatcatttggggaaatcattccagcacacaataccccgacgtcaatcacgccaaagtgaagctccagggcaaagaagtcggagtgtatgaggccttaaaggatgactcctggctgaaaggtgagttcgtaaccactgtccagcagaggggtgccgctgttatcaaggctagaaagttgtcaagcgctatgtccgccgccaaagcgatatgtgaccacgtgcgagacatctggtttgggactccagagggtgagttcgtgtcaatgggcgtcattagtgacggaaatagttacggggtacctgatgatttgctgtatagtttcccagtagtgatcaagaacaaaacatggaagttcgttgagggcttacctattaatgatttctcccgagagaaaatggacctgaccgccaaggaattgaccgaagaaaaagaaagtgcttttgaattcctgtcatccgcttag

SEQ ID NO: 160299 - DNA, 1005 bp, Artificial Sequence
  derived and/or modified sequence
atgtctgagcccatccgggtgctggtgactggagctgctggccagatcgcctacagcctgctgtacagcattggaaatggatctgtgtttgggaaggaccagcccatcatcctggtgctgctggacatcacccccatgatgggcgtgctggatggagtgctgatggagctgcaggactgtgccctgcccctgctgaaggatgtgattgccacagacaaggaggatgtggccttcaaggacctggatgtggccatcctggtgggctccatgccccggcgggagggcatggagaggaaggacctgctgaaggccaacgtgaagatcttcaagagccagggcgccgccctggacaagtatgccaagaagtctgtgaaggtgattgtggtgggcaacccagccaacaccaactgcctgacagccagcaagagcgcccccagcatccccaaggagaacttcagctgcctgacccggctggaccacaacagagccaaggcccagatcgccctgaagctgggcgtgacagccaatgatgtgaagaatgtcatcatctggggcaaccacagcagcacccagtacccagatgtgaaccacgccaaggtgaagctgcagggcaaggaggtgggcgtgtatgaggccctgaaggatgacagctggctgaagggggagtttgtgaccaccgtgcagcagagaggagctgctgtgatcaaggccaggaagctgagcagcgccatgtctgctgccaaggccatctgtgaccacgtgcgggacatctggtttggcaccccagagggggagtttgtgtccatgggcgtcatcagtgatggcaacagctatggagtgcctgatgacctgctgtacagcttccctgtggtgatcaagaacaagacctggaagtttgtggagggcctgcccatcaatgacttcagccgggagaagatggacctgacagccaaggagctgacagaggagaaggagagcgcctttgagttcctgagcagcgcctag

SEQ ID NO: 160300 - DNA, 1005 bp, Artificial Sequence
  derived and/or modified sequence
atgagcgagcccatccgggtgctggtgaccggcgccgccggccagattgcctattccctgctgtacagtatcgggaatggatctgttttcggtaaggaccagcctattattctcgtcttactggacataacaccaatgatgggtgttctggatggagtactaatggaacttcaagactgcgccctgcctctgcttaaggacgttatcgcaaccgataaagaggacgtggcatttaaggacttggacgtggcaattttggtgggcagtatgccacgtcgtgaaggtatggaaagaaaggacctcctgaaagccaatgtgaaaatatttaagtcacagggggccgctctggacaagtacgcgaagaaatcagtcaaagtcatagttgtcggcaaccccgccaataccaattgcctgaccgcttccaagtccgctccaagcatacccaaggaaaacttcagttgcctcacacggctggaccataaccgagcaaaagcccaaattgctctcaagctcggcgtgactgctaacgatgtgaaaaacgtgattatttggggcaaccatagttccactcaatacccagacgtgaaccatgcaaaagtaaaattgcagggaaaagaggtcggggtctatgaggccctcaaggacgatagctggttaaagggcgagttcgtaactaccgtacagcagagaggagctgcagtgatcaaggctcgcaaactgagctctgccatgagtgccgctaaggcgatctgtgaccatgtgcgtgacatatggttcggcaccccggaaggtgaatttgtctccatgggcgttatctccgatggcaacagctatggggtgcctgacgacctgttgtactcattccccgttgttatcaagaataagacctggaagttcgttgagggccttccgattaatgattttagtagggagaagatggaccttactgcaaaggaactaactgaagaaaaagaaagcgcctttgagtttctgtcctctgcgtag

SEQ ID NO: 160301 - DNA, 1005 bp, Artificial Sequence
  derived and/or modified sequence
atgagcgagcccatccgggtgctggtgaccggcgccgccggccagatcgcttattcgctgttgtacagtattggtaacgggtctgtgttcggcaaggatcagcctatcattctcgtgctcctggacatcactcctatgatgggtgtgctcgatggagtgctgatggagttacaggattgtgcattgcccttgctgaaggacgtgatcgccactgacaaggaagacgtggcatttaaggacctggacgtggccatcctagtagggagtatgccgaggcgtgaaggcatggagcgtaaggacctgttaaaggcgaacgttaaaattttcaagtctcagggggccgcgttagataaatacgctaaaaagagcgtgaaagtcatcgtggtcggcaaccctgctaacaccaattgtcttactgccagtaagtcggcacccagcatcccgaaagaaaatttctcctgcctgactaggctggaccacaatcgtgccaaagcccagatcgccttaaaattgggcgtgactgccaatgacgtcaagaacgtaataatctggggtaatcactcctccactcagtatcccgatgtaaatcacgctaaggtcaagctgcaggggaaggaagtcggagtatatgaagcactgaaggatgattcttggttgaaaggcgagtttgtcacaacagtccagcagagaggggctgcagtgatcaaggcccgaaaactgtcctccgctatgtccgccgcgaaggccatttgcgaccacgtaagagatatatggtttggcacgcccgagggagagttcgtgagcatgggcgtgatatccgacgggaactcatacggggtccccgacgatctgttatatagttttccggtggtgattaagaacaagacctggaaatttgttgagggtttacccattaatgattttagtagagagaagatggacctaactgctaaggagctaacagaagagaaggagtccgcattcgagtttctgtcatctgcctag

SEQ ID NO: 160302 - DNA, 1005 bp, Artificial Sequence
  derived and/or modified sequence
atgagcgagcctattagggtccttgtcactggggcagcgggtcagatcgcttactcacttttgtactcgattgggaacggcagtgtttttggaaaagaccaaccgattattctggtcctcttggacattactcctatgatgggggtactcgatggggtgctcatggagctccaggactgtgccctgccacttctgaaagatgtgattgccactgataaagaggatgtggcctttaaggacctggacgtggccattcttgtgggttcgatgcccaggagggaaggcatggaacgaaaggacttgcttaaagccaacgtaaagattttcaaaagccaaggcgcagcacttgataaatatgccaagaaatcagtgaaggtaattgtcgtcggcaatcccgctaacaccaattgtctgacagccagcaaaagcgcgccatcaatccctaaggaaaattttagctgcctaacgagactcgaccataaccgggcaaaagcgcagattgccctgaaactcggcgtaaccgctaacgacgtgaaaaatgtgattatttggggtaaccatagctcaacccagtatccagacgtgaaccatgcaaaggtaaagttacagggcaaggaggtcggggtgtacgaagccttaaaagatgatagctggctgaagggagaatttgtgaccaccgtacaacaaagaggcgcagcagtgatcaaggctagaaagttgtctagcgccatgtctgccgcaaaggccatttgtgaccatgtgagggatatttggtttggtacacccgaaggggaattcgtgtcaatgggcgtgattagtgacgggaattcttacggggtgcctgacgacctgttgtacagctttccagttgtaataaagaacaagacctggaagttcgtcgaaggactacctatcaacgatttttctcgcgaaaagatggatctgactgcaaaggaactgacagaggagaaggagtccgccttcgaatttctttccagcgcctag

SEQ ID NO: 160303 - DNA, 1005 bp, Artificial Sequence
  derived and/or modified sequence
atgtctgagcccattagggtgctggtgacgggggcagccggtcagatcgcgtattccctgttatactccatcggaaacggatccgtctttggaaaggatcagccgattattctggtactacttgacattacaccaatgatgggggtgctggacggggtcctgatggagctgcaggactgcgctctccctctgctgaaagatgtgatcgcaactgataaagaggacgtcgcctttaaagacttagatgttgccatactggtgggatcaatgcctcggagagaaggaatggagaggaaagacttacttaaagcaaacgtgaaaatatttaagtcccaaggggcagccctggataagtacgccaagaaatctgttaaagtcatcgtggtcggaaatccagctaatacaaactgtttgaccgccagtaagagcgctcctagtatccccaaagagaatttctcctgcctcacccggctggaccataaccgcgctaaggcacagatcgcattaaagttgggggtgacagcaaacgacgtgaagaatgtcattatctggggtaatcatagtagtacccaatacccagatgtcaatcacgccaaggttaagctgcagggcaaggaggtgggggtgtacgaagctctgaaggacgactcctggctgaaaggtgaatttgtgacaactgtgcagcagcggggagccgctgtaataaaggctcgcaagttgtctagcgccatgtccgcagcaaaggccatctgtgatcacgtgcgcgacatatggttcggtacccctgagggcgagtttgtgtcaatgggtgtgatcagtgatggaaactcttatggcgttccagatgatcttctgtactcctttcccgtggtgataaagaataaaacctggaagtttgtggaaggcttgcctattaacgatttcagtcgggaaaagatggatctcactgcaaaggagttgacggaggagaaagagagcgcgttcgaattcttatcctccgcgtag

SEQ ID NO: 160304 - DNA, 1005 bp, Artificial Sequence
  derived and/or modified sequence
atgagcgagcccatcagagtgctggtgaccggcgccgccggccagatcgcctacagcctgctgtacagcatcggcaacggcagcgtgttcggcaaggaccagcccatcatcctggtgctgctggacatcacccccatgatgggcgtgctggacggcgtgctgatggagctgcaggactgcgccctgcccctgctgaaggacgtgatcgccaccgacaaggaggacgtggccttcaaggacctggacgtggccatcctggtgggcagcatgcccagaagagagggcatggagagaaaggacctgctgaaggccaacgtgaagatcttcaagagccagggcgccgccctggacaagtacgccaagaagagcgtgaaggtgatcgtggtgggcaaccccgccaacaccaactgcctgaccgccagcaagagcgcccccagcatccccaaggagaacttcagctgcctgaccagactggaccacaacagagccaaggcccagatcgccctgaagctgggcgtgaccgccaacgacgtgaagaacgtgatcatctggggcaaccacagcagcacccagtaccccgacgtgaaccacgccaaggtgaagctgcagggcaaggaggtgggcgtgtacgaggccctgaaggacgacagctggctgaagggcgagttcgtgaccaccgtgcagcagagaggcgccgccgtgatcaaggccagaaagctgagcagcgccatgagcgccgccaaggccatctgcgaccacgtgagagacatctggttcggcacccccgagggcgagttcgtgagcatgggcgtgatcagcgacggcaacagctacggcgtgcccgacgacctgctgtacagcttccccgtggtgatcaagaacaagacctggaagttcgtggagggcctgcccatcaacgacttcagcagagagaagatggacctgaccgccaaggagctgaccgaggagaaggagagcgccttcgagttcctgagcagcgcctag

SEQ ID NO: 160305 - protein, 338 aa, Artificial Sequence
  derived and/or modified sequence
MLSALARPASAALRRSFSTSAQNNAKVAVLGASGGIGQPLSLLLKNSPLVSRLTLYDIAHTPGVAADLSHIETKAAVKGYLGPEQLPDCLKGCDVVVIPAGVPRKPGMTRDDLFNTNATIVATLTAACAQHCPEAMICVIANPVNSTIPITAEVFKKHGVYNPNKIFGVTTLDIVRANTFVAELKGLDPARVNVPVIGGHAGKTIIPLISQCTPKVDFPQDQLTALTGRIQEAGTEVVKAKAGAGSATLSMAYAGARFVFSLVDAMNGKEGVVECSFVKSQETECTYFSTPLLLGKKGIEKNLGIGKVSSFEEKMISDAIPELKASIKKGEDFVKTLK

SEQ ID NO: 160306 - DNA, 1017 bp, Artificial Sequence
  derived and/or modified sequence
atgctctccgcacttgccagacccgcaagcgcggccctgcgacggtccttcagtacgtcagcccagaacaatgccaaggttgctgttctaggtgcctcaggcggcatcggacagccactatcgctgcttctgaagaacagtccccttgtgagtagactcaccctgtacgacatcgctcacactccaggggtggcggccgacttgtctcacatcgagaccaaagctgctgttaagggctacctcgggccggagcagctccctgattgcctaaaaggttgtgacgttgtagtcatccctgctggtgtacctagaaaaccaggcatgacccgagacgacctctttaacaccaacgccaccatcgtggccacgctgactgctgcttgtgctcaacactgccctgaagctatgatctgcgtgatcgctaatccagtgaacagcactattccaatcacagccgaagtatttaaaaaacacggggtttataatccaaataaaattttcggagtgaccaccctggatatcgtccgggcaaatacatttgttgcggaactgaagggtctggaccctgcaagagtgaatgtgccagtcataggtggacacgctggcaaaaccataattcctctcattagccaatgcacaccaaaagtagatttccctcaggatcagcttacagctttaactggtagaattcaggaagccggaacagaagtggtcaaagcaaaggcaggggcaggaagcgcaactctatccatggcttatgcaggcgcccgattcgtgttcagcttggtagacgccatgaatggaaaggaaggggtggtagagtgttctttcgtgaagtcccaggagacagagtgtacttacttttctaccccacttctgttggggaaaaagggcattgaaaagaatctgggaatcggcaaggttagctcctttgaagaaaaaatgatctctgacgccatccccgaactgaaagccagtatcaagaagggcgaggatttcgttaagactctcaagtag

SEQ ID NO: 160307 - DNA, 1017 bp, Artificial Sequence
  derived and/or modified sequence
atgctgagcgccctggcccggcctgccagcgctgccctgcggcgctccttcagcaccagcgcccagaacaatgccaaggtggccgtgctgggcgccagcggcggcatcggccagcccctgagcctgctgctgaagaacagccccctggtgtcccggctgaccctgtatgacatcgcccacaccccaggagtggccgctgacctgagccacatcgagaccaaggctgctgtgaagggctacctgggccctgagcagctgcctgactgcctgaagggctgtgatgtggtggtgatcccagctggggtgcccaggaagccaggcatgaccagagatgacctcttcaacaccaatgccaccatcgtggccaccctgacagctgcctgtgcccagcactgcccagaggccatgatctgtgtgattgccaaccctgtgaacagcaccatccccatcacagctgaggtgttcaagaagcacggcgtgtacaaccccaacaagatctttggagtgaccaccctggacatcgtgcgggccaacacctttgtggccgagctgaagggcctggaccctgcccgggtgaatgtgcctgtgattggaggccatgctgggaagaccatcatccccctcatcagccagtgcacccccaaggtggacttcccccaggaccagctgacagccctgaccggccgcatccaggaggccggcacagaggtggtgaaggccaaggccggggccggcagcgccaccctgtccatggcctatgctggggccaggtttgtgttcagcctggtggatgccatgaatggcaaggagggcgtggtggagtgcagctttgtgaagagccaggagacagagtgcacctacttcagcacccccctgctgctgggcaagaagggcatcgagaagaacctgggcatcggcaaggtgagcagctttgaggagaagatgatcagtgatgccatccctgagctgaaggccagcatcaagaagggagaagattttgtgaagaccctgaagtag

SEQ ID NO: 160308 - DNA, 2209 bp, Artificial Sequence
  derived and/or modified sequence
agagagcaggcgctgggcagtgtggaggtcgttggagtcacttccccgtcaccagctcctgtgcctgccagtcggtgcccctcccgctccagccatgctctccgccctcgcccggcctgccagcgctgctctccgccgcagcttcagcacctcggcccagaacaatgctaaagtagctgtgctaggggcctctggaggcatcgggcagccactttcacttctcctgaagaacagccccttggtgagccgcctgaccctctatgatatcgcgcacacacccggagtggccgcagatctgagccacatcgagaccaaagccgctgtgaaaggctacctcggacctgaacagctgcctgactgcctgaaaggttgtgatgtggtagttattccggctggagtccccagaaagccaggcatgacccgggacgacctgttcaacaccaatgccacgattgtggccaccctgaccgctgcctgtgcccagcactgcccggaagccatgatctgcgtcattgccaatccggttaattccaccatccccatcacagcagaagttttcaagaagcatggagtgtacaaccccaacaaaatcttcggcgtgacgaccctggacatcgtcagagccaacacctttgttgcagagctgaagggtttggatccagctcgagtcaacgtccctgtcattggtggccatgctgggaagaccatcatccccctgatctctcagtgcacccccaaggtggactttccccaggaccagctgacagcactcactgggcggatccaggaggccggcacggaggtggtcaaggctaaagccggagcaggctctgccaccctctccatggcgtatgccggcgcccgctttgtcttctcccttgtggatgcaatgaatggaaaggaaggtgttgtggaatgttccttcgttaagtcacaggaaacggaatgtacctacttctccacaccgctgctgcttgggaaaaagggcatcgagaagaacctgggcatcggcaaagtctcctcttttgaggagaagatgatctcggatgccatccccgagctgaaggcctccatcaagaagggggaagatttcgtgaagaccctgaagtgagccgctgtgacgggtggccagtttccttaatttatgaaggcatcatgtcactgcaaagccgttgcagataaactttgtattttaatttgctttggtgatgattactgtattgacatcatcatgccttccaaattgtgggtggctctgtgggcgcatcaataaaagccgtccttgattttatttttcaaggtcccttctgtaaatgctgtgctttcttccctgtgagagccaactttagagtgtctgctacctcttcattaccaatcagaattagatgatgtttaactgttagactgaagcgtgacgctttcatcagtagcttcaagaaagtctaaattgttaatttatggaattggacacagtattcagtttacccgtacatgctcctcccgcccctcctgttggcacccttgcatcgcccaggcctgattcctcctgggggtagttcacccccacgggttcatagttcagcggcgaatgccaggcagctgttttctggctgagcaaacagcacctttctcattgagcttcctctactgacctctgtcccccttgggatttcatcttctgaccgaaccctgatgttcagtggcagagacagcccatagccagaactgtgggtagaccagggttggggtgtgcggtttgggacagcccaaaccccagccgctgtgtcaaggcctaggacgccatgctgccatcaaaagggggttccaggtttccatcagtggcctaaagaagggacttcttgttgtactgaggagtgcggaattaaagagatttgactccctttagtattgggggcagtccgttccccagacactgtggcctctgaagtggaaactgaaagctgcatacctgggaaagaactttctaggaataggcaatggccttcagtggaagagggagggctggaggtgtgcccagtacttggatgttcatctgtccacaacagctttttgtttttttaaaaaagctaaaatggaaatggattttatcataaaggatgacatcgttttcttctacaattaatacatgttcattgtataaaacccaaaaagcagctaaaaaataaagcgggaaaggaactactggtaa

SEQ ID NO: 160309 - DNA, 1017 bp, Artificial Sequence
  derived and/or modified sequence
atgctgagcgccctggcccggcccgccagcgccgccctgcggcggtcgttcagcaccagcgctcagaataacgcaaaggtggctgttttaggcgcctcaggagggattgggcagcctctcagcctgcttctcaaaaacagtcccctcgtgtctcgccttactctttatgatattgcccacacccccggggtcgcggcagatctgtctcacattgaaacaaaggctgcagtgaaaggatacctgggccccgaacagcttcccgattgtctcaaaggctgtgacgtagtggtgattcctgccggagttccacggaagcccgggatgacacgggacgacttgtttaataccaatgctactatcgtcgccaccttgactgcagcgtgcgcacagcattgcccggaagctatgatatgcgtgatcgctaaccccgtaaattccacaatcccaattacagctgaagtgttcaagaagcacggggtgtacaacccaaataagatctttggcgtcacaaccctagatattgtccgggcaaataccttcgtggctgagctgaaaggcttggatccagccagagtcaatgtgcctgtcataggggggcacgctggcaagacgatcatcccactgatttctcaatgcacacccaaggtagattttccccaggaccaattgacggccttgactggaagaatacaggaagcagggaccgaggtcgtgaaagctaaggcgggtgccggtagcgctacgttgtcaatggcttacgccggcgcccgtttcgtgttctccctcgtggacgctatgaatgggaaagagggcgttgttgagtgcagtttcgtaaagtctcaagagacagaatgcacgtacttttcaactcccctgctgctggggaagaaagggattgaaaaaaacctagggatcggtaaagtctcttcattcgaagagaaaatgataagcgacgccatccctgagctgaaagcaagcataaagaaaggcgaagatttcgtgaaaaccttgaagtag

SEQ ID NO: 160310 - DNA, 1017 bp, Artificial Sequence
  derived and/or modified sequence
atgttatctgccctggcgagaccagcttccgccgctttgcgacgctccttcagtacttctgcccagaataatgccaaggtagccgtgctgggagcttctggcggaattggccagcctctgtcactgcttctcaaaaacagcccactcgtgagccgcttgacgctgtatgacatcgctcatactcccggagtggctgccgacctatcgcacattgaaaccaaggcagcggtcaagggatacctggggcctgagcagttgcctgattgcctaaagggatgcgatgtggtagttattcccgctggggtccccaggaagcccggtatgacccgagatgatctctttaacacaaacgcaacgatcgttgccactctcaccgctgcgtgtgcacaacattgccctgaggccatgatctgtgtcatcgctaatcccgtcaattccacaattcctatcacagcagaggtctttaagaaacatggtgtttataatcccaataagatcttcggcgtcacaaccctggatattgtcagagctaacaccttcgttgccgagcttaaaggtctggaccctgctagggtgaacgtgccagtaattggcggtcacgccggtaagactatcattccacttatctcacagtgtacccccaaagtggattttccacaagatcagctgaccgccctgaccggcaggatccaggaggccggaacagaagtggtaaaagccaaagcaggcgcagggtccgcaacactcagcatggcctatgcaggcgctaggtttgtgtttagccttgtggacgccatgaacggaaaagaaggagtcgtcgagtgtagttttgtaaaatctcaggagactgaatgtacatacttttcgactcccctgctgctgggcaagaaaggaatcgagaaaaatctgggaataggaaaagtttcctcctttgaggaaaagatgatctcagacgccatcccagagctgaaggcaagtatcaagaaaggagaagattttgtgaaaacactcaaatag

SEQ ID NO: 160311 - DNA, 1017 bp, Artificial Sequence
  derived and/or modified sequence
atgctgagcgccctggccagacccgccagcgccgccctgagaagaagcttcagcaccagcgcccagaacaacgccaaggtggccgtgctgggcgccagcggcggcatcggccagcccctgagcctgctgctgaagaacagccccctggtgagcagactgaccctgtacgacatcgcccacacccccggcgtggccgccgacctgagccacatcgagaccaaggccgccgtgaagggctacctgggccccgagcagctgcccgactgcctgaagggctgcgacgtggtggtgatccccgccggcgtgcccagaaagcccggcatgaccagagacgacctgttcaacaccaacgccaccatcgtggccaccctgaccgccgcctgcgcccagcactgccccgaggccatgatctgcgtgatcgccaaccccgtgaacagcaccatccccatcaccgccgaggtgttcaagaagcacggcgtgtacaaccccaacaagatcttcggcgtgaccaccctggacatcgtgagagccaacaccttcgtggccgagctgaagggcctggaccccgccagagtgaacgtgcccgtgatcggcggccacgccggcaagaccatcatccccctgatcagccagtgcacccccaaggtggacttcccccaggaccagctgaccgccctgaccggcagaatccaggaggccggcaccgaggtggtgaaggccaaggccggcgccggcagcgccaccctgagcatggcctacgccggcgccagattcgtgttcagcctggtggacgccatgaacggcaaggagggcgtggtggagtgcagcttcgtgaagagccaggagaccgagtgcacctacttcagcacccccctgctgctgggcaagaagggcatcgagaagaacctgggcatcggcaaggtgagcagcttcgaggagaagatgatcagcgacgccatccccgagctgaaggccagcatcaagaagggcgaggacttcgtgaagaccctgaagtag

SEQ ID NO: 160312 - protein, 365 aa, Artificial Sequence
  derived and/or modified sequence
MGRKKIQISRILDQRNRQVTFTKRKFGLMKKAYELSVLCDCEIALIIFNSANRLFQYASTDMDRVLLKYTEYSEPHESRTNTDILETLKRRGIGLDGPELEPDEGPEEPGEKFRRLAGEGGDPALPRPRLYPAAPAMPSPDVVYGALPPPGCDPSGLGEALPAQSRPSPFRPAAPKAGPPGLVHPLFSPSHLTSKTPPPLYLPTEGRRSDLPGGLAGPRGGLNTSRSLYSGLQNPCSTATPGPPLGSFPFLPGGPPVGAEAWARRVPQPAAPPRRPPQSASSLSASLRPPGAPATFLRPSPIPCSSPGPWQSLCGLGPPCAGCPWPTAGPGRRSPGGTSPERSPGTARARGDPTSLQASSEKTQQ

SEQ ID NO: 160313 - DNA, 1978 bp, Artificial Sequence
  derived and/or modified sequence
gtacgcggggcgtctggaacttaaaggggcagcgtaccttggccgtcccgttccacaacaaggtcccttctgcggtctcaaaggcttataagcaagggcgggggcagagggctaaagaagggagtttttgcggcccgagtgggtaatgcgtggaggactcccccaactcgtctctcaaggaaaagggggttcagaaagggagagagttcttccccctctcctgcctgggtgtcgctccaccagcctcctggccgtcgcgccccctcctcactgcgccacccccgggtgtgcctccttccctgcgtctcacacagcccctttcttgtccgcaaagactgaggagcggggagggcgggccctctgacaccggaacaggagccgtgcggcgtccggtttcagcagggaaggcttaggcgggcgtcccaacctccgggcttccggtgccgtttcccggttcgctcggccgcggtcgctatggaggagccggagatgcagctcaaggggaagaaagcgccgtgaagaacctggtggacagcagcgtctacttccgcagcgtggagggtctgctcaaacaggccatcagcatccgggaccatatgaatgccagtgcccagggccacagcccggaggaaccacccccgccctcctcagcctgatcctggaagagactcggggccccccagcctccgccaacccagacaaagatcattccactcagcctgggacgatggggaggaaaaaaatccagatctcccgcatcctggaccaaaggaatcggcaggtgacgttcaccaagcggaagttcgggctgatgaagaaggcctatgagctgagcgtgctctgtgactgtgagatagccctcatcatcttcaacagcgccaaccgcctcttccagtatgccagcacggacatggaccgtgtgctgctgaagtacacagagtacagcgagccccacgagagccgcaccaacactgacatcctcgagacgctgaagcggaggggcattggcctcgatgggccagagctggagccggatgaagggcctgaggagccaggagagaagtttcggaggctggcaggcgaagggggtgatccggccttgccccgaccccggctgtatcctgcagctcctgctatgcccagcccagatgtggtatacggggccttaccgccaccaggctgtgaccccagtgggcttggggaagcactgcccgcccagagccgcccatctcccttccgaccagcagcccccaaagccgggcccccaggcctggtgcaccctctcttctcaccaagccacctcaccagcaagacaccacccccactgtacctgccgacggaagggcggaggtcagacctgcctggtggcctggctgggccccgagggggactaaacacctccagaagcctctacagtggcctgcagaacccctgctccactgcaactcccggacccccactggggagcttccccttcctccccggaggccccccagtgggggccgaagcctgggcgaggagggtcccccaacccgcggcgcctccccgccgacccccccagtcagcatcaagtctgagcgcctctctccggcccccgggggccccggcgactttcctaagaccttcccctatcccttgctcctcgcccggtccctggcagagcctctgcggcctgggcccgccctgcgccggctgcccttggccgacggctggccccggtaggagatcacccggtggcaccagcccagagcgctcgccaggtacggcgagggcacgtggggaccccacctccctccaggcctcttcagagaagacccaacagtgacgcccccctccgcggtgggggcttggaggtgggcggctggactcaatccaccctggggggctcctttccttcttcctatttgtgtgtatatccacaaataaaacgcgcgtggcgtccgtggaccagaaaaaaaaaaaaaaaaaaaaaaaaaaa

SEQ ID NO: 160314 - DNA, 1098 bp, Artificial Sequence
  derived and/or modified sequence
atgggaaggaaaaaaatacagatcagcagaatcctcgaccagagaaataggcaagtaacattcaccaaaagaaagtttggcttgatgaaaaaggcctacgaacttagtgtgctgtgcgactgtgaaatagcccttatcatctttaattctgctaatagactgttccagtacgctagtaccgacatggacagggtgctgttaaaatacactgagtattcggaaccgcatgaaagtcgaaccaatacagatatcctggagaccctgaagcgccgcggcataggtctggacggaccagaattagagccagacgagggcccagaggagcctggggagaagtttagacgactggcaggcgagggtggagatccagctctgcctaggccacgactataccccgccgcccctgccatgccatctcccgatgtggtctatggagctctgccccctcctggatgcgacccatcaggtctgggcgaagccctgccggcccagtcgcgaccttctcccttccggcctgcagcccccaaggctggccctccgggactggtccatccactattcagtccctcacacctgacctccaaaacccctcctcctttgtatctgcccacagaaggcagacgctcagacctccccgggggattagcgggcccacgcggtggacttaatacatctcgctcgctgtacagcggcctccaaaacccatgtagcacagccacacctggaccacctttgggaagcttcccttttctgcccggaggtccgcccgtgggagcagaggcctgggctcgccgggtcccacaaccagcggctcccccacgccgaccgcctcagtccgccagtagtctttctgccagcctgaggccacctggtgcacccgcaacattcttaaggccctcacctatcccttgctcatctcctggtccatggcagagcctctgcggtctcggtcccccatgtgccgggtgtccttggcccactgccggacccgggagacggtccccaggcgggactagcccggaacggtctccgggtactgccagagctaggggtgatccaacttcactgcaggccagcagtgaaaagacgcagcaatag

SEQ ID NO: 160315 - DNA, 1098 bp, Artificial Sequence
  derived and/or modified sequence
atgggcaggaagaagatccagatcagccgcatcctggaccagaggaaccggcaggtgaccttcaccaagaggaagtttggcctgatgaagaaggcctatgagctgtctgtgctgtgtgactgtgaaattgccctgatcatcttcaacagcgccaacagactcttccagtatgccagcacagacatggacagagtgctgctgaagtacacagagtacagcgagccccatgagagcaggaccaacacagacatcctggagaccctgaagaggcggggcatcggcctggatggccctgagctggagccagatgagggccctgaggagcctggagagaagttccggcggctggccggggagggcggggaccctgccctgccccggccccggctgtacccagctgccccagccatgcccagcccagatgtggtgtatggagccctgcccccacctggctgtgaccccagcggcctgggggaggccctgcctgcccagagccggcccagccccttccggcctgctgcccccaaggccggccccccaggcctggtgcaccccctcttcagccccagccacctgaccagcaagaccccaccacccctgtacctgcccacagagggcagaagaagtgacctgcccggcggcctggccggcccccggggcggcctgaacaccagccgcagcctgtacagcggcctgcagaacccctgcagcacagccaccccaggcccccccctgggcagcttccccttcctgcccggcggcccccctgtgggcgctgaggcctgggcccggcgggtgccccagcctgctgccccaccccggcggcccccccagagcgccagcagcctgagcgccagcctgcggcccccaggggccccagccaccttcctgcggcccagccccatcccctgcagcagccctggcccctggcagagcctgtgtggcctgggccccccctgtgccggctgcccctggcccacagctggccctggccgccgcagccctgggggcaccagccctgagaggagccctggaacagcccgggcccggggggaccccaccagcctgcaggccagcagcgagaagacccagcagtag

SEQ ID NO: 160316 - DNA, 1949 bp, Artificial Sequence
  derived and/or modified sequence
gtacgcggggcgtctggaacttaaaggggcagcgtaccttggccgtcccgttccacaacaaggtcccttctgcggtctcaaaggcttataagcaagggcgggggcagagggctaaagaagggagtttttgcggcccgagtgggtaatgcgtggaggactcccccaactcgtctctcaaggaaaagggggttcagaaagggagagagttcttccccctctcctgcctgggtgtcgctccaccagcctcctggccgtcgcgccccctcctcactgcgccacccccgggtgtgcctccttccctgcgtctcacacagcccctttcttgtccgcaaagactgaggagcggggagggcgggccctctgacaccggaacaggagccgtgcggcgtccggtttcagcagggaaggcttaggcgggcgtcccaacctccgggcttccggtgccgtttcccggttcgctcggccgcggtcgctatggaggagccggagatgcagctcaaggggaagaaagcgccgtgaagaacctggtggacagcagcgtctacttccgcagcgtggagggtctgctcaaacaggccatcagcatccgggaccatatgaatgccagtgcccagggccacagcccggaggaaccacccccgccctcctcagcctgatcctggaagagactcggggccccccagcctccgccaacccagacaaagatcattccactcagcctgggacgatggggaggaaaaaaatccagatctcccgcatcctggaccaaaggaatcggcaggtgacgttcaccaagcggaagttcgggctgatgaagaaggcctatgagctgagcgtgctctgtgactgtgagatagccctcatcatcttcaacagcgccaaccgcctcttccagtatgccagcacggacatggaccgtgtgctgctgaagtacacagagtacagcgagccccacgagagccgcaccaacactgacatcctcgagacgctgaagcggaggggcattggcctcgatgggccagagctggagccggatgaagggcctgaggagccaggagagaagtttcggaggctggcaggcgaagggggtgatccggccttgccccgaccccggctgtatcctgcagctcctgctatgcccagcccagatgtggtatacggggccttaccgccaccaggctgtgaccccagtgggcttggggaagcactgcccgcccagagccgcccatctcccttccgaccagcagcccccaaagccgggcccccaggcctggtgcaccctctcttctcaccaagccacctcaccagcaagacaccacccccactgtacctgccgacggaagggcggaggtcagacctgcctggtggcctggctgggccccgagggggactaaacacctccagaagcctctacagtggcctgcagaacccctgctccactgcaactcccggacccccactggggagcttccccttcctccccggaggccccccagtgggggccgaagcctgggcgaggagggtcccccaacccgcggcgcctccccgccgacccccccagtcagcatcaagtctgagcgcctctctccggcccccgggggccccggcgactttcctaagaccttcccctatcccttgctcctcgcccggtccctggcagagcctctgcggcctgggcccgccctgcgccggctgcccttggccgacggctggccccggtaggagatcacccggtggcaccagcccagagcgctcgccaggtacggcgagggcacgtggggaccccacctccctccaggcctcttcagagaagacccaacagtgacgcccccctccgcggtgggggcttggaggtgggcggctggactcaatccaccctggggggctcctttccttcttcctatttgtgtgtatatccacaaataaaacgcgcgtggcgtccgtggacc

SEQ ID NO: 160317 - DNA, 1098 bp, Artificial Sequence
  derived and/or modified sequence
atgggccggaagaagatccagatcagccggatcctggaccagcggaatcggcaagtgacatttactaaacggaagttcggtctcatgaagaaagcctatgaactgtccgttctctgtgactgcgagattgccttgatcatctttaattccgcaaatcgactgtttcagtacgcctccacggacatggaccgggttctgctcaaatatacagaatattccgagccacatgagtctcggacaaacactgatatcctggaaacactcaaacgaagaggtatcggccttgacggcccagagctcgagccagatgagggccccgaagaaccaggcgaaaaatttagacgactggcaggagagggcggcgacccagccctccctcgcccaaggttgtaccccgccgcgcccgccatgccctcacctgatgtggtctacggcgcattgcctcctcctgggtgcgacccatccggtctgggcgaagcacttccagctcaatccagaccatctccttttagacccgctgcacccaaggctggccccccgggattagtacaccctctgttttcaccttcacatctcacttccaaaacccctccgcctttgtaccttcctacagagggtaggcgcagcgacctacccggtgggctggccggtcctcgcggaggtctgaatacatcacggtccctttacagtggcttgcagaacccttgcagtactgccactcccgggcctccacttggttcctttcccttcctgcccggtggccctccggttggcgccgaagcatgggcccgacgggtaccacagcccgctgcccctccaaggaggccacctcagagcgccagctcactgtctgcctcgctgcggccgccgggggcccctgccaccttcttacgccctagtccaatcccatgctcctctccaggcccctggcagtccctttgtggtctgggcccaccctgtgccggttgtccgtggcccaccgcaggtccaggccgtcgctcacccgggggtacctcaccagagcggtcccccggcacagcacgggcccggggcgaccccacttctttgcaggcttcttctgagaagacccagcagtag

SEQ ID NO: 160318 - DNA, 1098 bp, Artificial Sequence
  derived and/or modified sequence
atggggagaaaaaaaatccagatatccagaattctcgaccagcggaatcgacaagtcacgtttaccaaacggaagtttgggctgatgaaaaaagcatacgagctcagtgtactttgcgactgcgaaattgcactgatcattttcaacagtgccaacaggttgttccagtatgcatccactgatatggatagggtgctgctgaagtataccgaatacagcgagccacacgagtcccgtacaaacactgatattttggaaactcttaagcggcgaggcatcggccttgatggcccagaacttgaacccgatgaaggccctgaggaacctggagagaagtttcgacggctggctggagaggggggagaccccgcactgcccagacctcggctgtaccctgcggctcctgctatgccttctcctgacgtagtgtacggtgcccttccccctcctggctgtgatccttccgggctaggggaggctcttcctgcccaaagccggccatctcccttccggccagctgcccctaaggccggtcccccaggactggtacaccccctcttcagcccatctcacctcacatccaagacaccccctcccctctacctccctactgagggtcgcagatctgaccttcccggaggtctcgctggccctcggggtgggctgaacacttcaagatctctttattcgggcctccagaacccatgctccaccgccacaccaggcccaccactcggctctttccccttcttaccgggagggccaccagtgggagcagaagcctgggcacgaagggtccctcaaccggctgcccctccacgcaggccaccacagagcgcctctagtctaagtgctagtctccgaccccctggagcgcctgcaacctttcttaggccatcccccataccctgcagctctccaggaccctggcagtccctttgtgggctcggtcctccttgcgccggatgcccttggccaactgctggtcctgggagaaggtccccaggaggcacctctcccgagcgctctccaggaaccgcgagggccaggggggaccctacctctcttcaggcttccagcgagaaaacccagcagtag

SEQ ID NO: 160319 - DNA, 1098 bp, Artificial Sequence
  derived and/or modified sequence
atgggcagaaagaagatccagatcagcagaatcctggaccagagaaacagacaggtgaccttcaccaagagaaagttcggcctgatgaagaaggcctacgagctgagcgtgctgtgcgactgcgagatcgccctgatcatcttcaacagcgccaacagactgttccagtacgccagcaccgacatggacagagtgctgctgaagtacaccgagtacagcgagccccacgagagcagaaccaacaccgacatcctggagaccctgaagagaagaggcatcggcctggacggccccgagctggagcccgacgagggccccgaggagcccggcgagaagttcagaagactggccggcgagggcggcgaccccgccctgcccagacccagactgtaccccgccgcccccgccatgcccagccccgacgtggtgtacggcgccctgcccccccccggctgcgaccccagcggcctgggcgaggccctgcccgcccagagcagacccagccccttcagacccgccgcccccaaggccggcccccccggcctggtgcaccccctgttcagccccagccacctgaccagcaagacccccccccccctgtacctgcccaccgagggcagaagaagcgacctgcccggcggcctggccggccccagaggcggcctgaacaccagcagaagcctgtacagcggcctgcagaacccctgcagcaccgccacccccggcccccccctgggcagcttccccttcctgcccggcggcccccccgtgggcgccgaggcctgggccagaagagtgccccagcccgccgccccccccagaagacccccccagagcgccagcagcctgagcgccagcctgagaccccccggcgcccccgccaccttcctgagacccagccccatcccctgcagcagccccggcccctggcagagcctgtgcggcctgggccccccctgcgccggctgcccctggcccaccgccggccccggcagaagaagccccggcggcaccagccccgagagaagccccggcaccgccagagccagaggcgaccccaccagcctgcaggccagcagcgagaagacccagcagtag

SEQ ID NO: 160320 - protein, 1512 aa, Artificial Sequence
  derived and/or modified sequence
MAAAAGNRASSSGFPGARATSPEAGGGGGALKASSAPAAAAGLLREAGSGGRERADWRRRQLRKVRSVELDQLPEQPLFLAASPPASSTSPSPEPADAAGSGTGFQPVAVPPPHGAASRGGAHLTESVAAPDSGASSPAAAEPGEKRAPAAEPSPAAAPAGREMENKETLKGLHKMDDRPEERMIREKLKATCMPAWKHEWLERRNRRGPVVVKPIPVKGDGSEMNHLAAESPGEVQASAASPASKGRRSPSPGNSPSGRTVKSESPGVRRKRVSPVPFQSGRITPPRRAPSPDGFSPYSPEETNRRVNKVMRARLYLLQQIGPNSFLIGGDSPDNKYRVFIGPQNCSCARGTFCIHLLFVMLRVFQLEPSDPMLWRKTLKNFEVESLFQKYHSRRSSRIKAPSRNTIQKFVSRMSNSHTLSSSSTSTSSSENSIKDEEEQMCPICLLGMLDEESLTVCEDGCRNKLHHHCMSIWAEECRRNREPLICPLCRSKWRSHDFYSHELSSPVDSPSSLRAAQQQTVQQQPLAGSRRNQESNFNLTHYGTQQIPPAYKDLAEPWIQVFGMELVGCLFSRNWNVREMALRRLSHDVSGALLLANGESTGNSGGSSGSSPSGGATSGSSQTSISGDVVEACCSVLSMVCADPVYKVYVAALKTLRAMLVYTPCHSLAERIKLQRLLQPVVDTILVKCADANSRTSQLSISTLLELCKGQAGELAVGREILKAGSIGIGGVDYVLNCILGNQTESNNWQELLGRLCLIDRLLLEFPAEFYPHIVSTDVSQAEPVEIRYKKLLSLLTFALQSIDNSHSMVGKLSRRIYLSSARMVTTVPHVFSKLLEMLSVSSSTHFTRMRRRLMAIADEVEIAEAIQLGVEDTLDGQQDSFLQASVPNNYLETTENSSPECTVHLEKTGKGLCATKLSASSEDISERLASISVGPSSSTTTTTTTTEQPKPMVQTKGRPHSQCLNSSPLSHHSQLMFPALSTPSSSTPSVPAGTATDVSKHRLQGFIPCRIPSASPQTQRKFSLQFHRNCPENKDSDKLSPVFTQSRPLPSSNIHRPKPSRPTPGNTSKQGDPSKNSMTLDLNSSSKCDDSFGCSSNSSNAVIPSDETVFTPVEEKCRLDVNTELNSSIEDLLEASMPSSDTTVTFKSEVAVLSPEKAENDDTYKDDVNHNQKCKEKMEAEEEEALAIAMAMSASQDALPIVPQLQVENGEDIIIIQQDTPETLPGHTKAKQPYREDTEWLKGQQIGLGAFSSCYQAQDVGTGTLMAVKQVTYVRNTSSEQEEVVEALREEIRMMSHLNHPNIIRMLGATCEKSNYNLFIEWMAGGSVAHLLSKYGAFKESVVINYTEQLLRGLSYLHENQIIHRDVKGANLLIDSTGQRLRIADFGAAARLASKGTGAGEFQGQLLGTIAFMAPEVLRGQQYGRSCDVWSVGCAIIEMACAKPPWNAEKHSNHLALIFKIASATTAPSIPSHLSPGLRDVALRCLELQPQDRPPSRELLKHPVFRTTW

SEQ ID NO: 160321 - DNA, 4539 bp, Artificial Sequence
  derived and/or modified sequence
atggccgccgccgccggcaacagagccagcagcagcggcttccccggcgccagagccaccagccccgaggccggcggcggcggcggcgccctgaaggccagcagcgcccccgccgccgccgccggcctgctgagagaggccggcagcggcggcagagagagagccgactggagaagaagacagctgagaaaggtgagaagcgtggagctggaccagctgcccgagcagcccctgttcctggccgccagcccccccgccagcagcaccagccccagccccgagcccgccgacgccgccggcagcggcaccggcttccagcccgtggccgtgccccccccccacggcgccgccagcagaggcggcgcccacctgaccgagagcgtggccgcccccgacagcggcgccagcagccccgccgccgccgagcccggcgagaagagagcccccgccgccgagcccagccccgccgccgcccccgccggcagagagatggagaacaaggagaccctgaagggcctgcacaagatggacgacagacccgaggagagaatgatcagagagaagctgaaggccacctgcatgcccgcctggaagcacgagtggctggagagaagaaacagaagaggccccgtggtggtgaagcccatccccgtgaagggcgacggcagcgagatgaaccacctggccgccgagagccccggcgaggtgcaggccagcgccgccagccccgccagcaagggcagaagaagccccagccccggcaacagccccagcggcagaaccgtgaagagcgagagccccggcgtgagaagaaagagagtgagccccgtgcccttccagagcggcagaatcaccccccccagaagagcccccagccccgacggcttcagcccctacagccccgaggagaccaacagaagagtgaacaaggtgatgagagccagactgtacctgctgcagcagatcggccccaacagcttcctgatcggcggcgacagccccgacaacaagtacagagtgttcatcggcccccagaactgcagctgcgccagaggcaccttctgcatccacctgctgttcgtgatgctgagagtgttccagctggagcccagcgaccccatgctgtggagaaagaccctgaagaacttcgaggtggagagcctgttccagaagtaccacagcagaagaagcagcagaatcaaggcccccagcagaaacaccatccagaagttcgtgagcagaatgagcaacagccacaccctgagcagcagcagcaccagcaccagcagcagcgagaacagcatcaaggacgaggaggagcagatgtgccccatctgcctgctgggcatgctggacgaggagagcctgaccgtgtgcgaggacggctgcagaaacaagctgcaccaccactgcatgagcatctgggccgaggagtgcagaagaaacagagagcccctgatctgccccctgtgcagaagcaagtggagaagccacgacttctacagccacgagctgagcagccccgtggacagccccagcagcctgagagccgcccagcagcagaccgtgcagcagcagcccctggccggcagcagaagaaaccaggagagcaacttcaacctgacccactacggcacccagcagatcccccccgcctacaaggacctggccgagccctggatccaggtgttcggcatggagctggtgggctgcctgttcagcagaaactggaacgtgagagagatggccctgagaagactgagccacgacgtgagcggcgccctgctgctggccaacggcgagagcaccggcaacagcggcggcagcagcggcagcagccccagcggcggcgccaccagcggcagcagccagaccagcatcagcggcgacgtggtggaggcctgctgcagcgtgctgagcatggtgtgcgccgaccccgtgtacaaggtgtacgtggccgccctgaagaccctgagagccatgctggtgtacaccccctgccacagcctggccgagagaatcaagctgcagagactgctgcagcccgtggtggacaccatcctggtgaagtgcgccgacgccaacagcagaaccagccagctgagcatcagcaccctgctggagctgtgcaagggccaggccggcgagctggccgtgggcagagagatcctgaaggccggcagcatcggcatcggcggcgtggactacgtgctgaactgcatcctgggcaaccagaccgagagcaacaactggcaggagctgctgggcagactgtgcctgatcgacagactgctgctggagttccccgccgagttctacccccacatcgtgagcaccgacgtgagccaggccgagcccgtggagatcagatacaagaagctgctgagcctgctgaccttcgccctgcagagcatcgacaacagccacagcatggtgggcaagctgagcagaagaatctacctgagcagcgccagaatggtgaccaccgtgccccacgtgttcagcaagctgctggagatgctgagcgtgagcagcagcacccacttcaccagaatgagaagaagactgatggccatcgccgacgaggtggagatcgccgaggccatccagctgggcgtggaggacaccctggacggccagcaggacagcttcctgcaggccagcgtgcccaacaactacctggagaccaccgagaacagcagccccgagtgcaccgtgcacctggagaagaccggcaagggcctgtgcgccaccaagctgagcgccagcagcgaggacatcagcgagagactggccagcatcagcgtgggccccagcagcagcaccaccaccaccaccaccaccaccgagcagcccaagcccatggtgcagaccaagggcagaccccacagccagtgcctgaacagcagccccctgagccaccacagccagctgatgttccccgccctgagcacccccagcagcagcacccccagcgtgcccgccggcaccgccaccgacgtgagcaagcacagactgcagggcttcatcccctgcagaatccccagcgccagcccccagacccagagaaagttcagcctgcagttccacagaaactgccccgagaacaaggacagcgacaagctgagccccgtgttcacccagagcagacccctgcccagcagcaacatccacagacccaagcccagcagacccacccccggcaacaccagcaagcagggcgaccccagcaagaacagcatgaccctggacctgaacagcagcagcaagtgcgacgacagcttcggctgcagcagcaacagcagcaacgccgtgatccccagcgacgagaccgtgttcacccccgtggaggagaagtgcagactggacgtgaacaccgagctgaacagcagcatcgaggacctgctggaggccagcatgcccagcagcgacaccaccgtgaccttcaagagcgaggtggccgtgctgagccccgagaaggccgagaacgacgacacctacaaggacgacgtgaaccacaaccagaagtgcaaggagaagatggaggccgaggaggaggaggccctggccatcgccatggccatgagcgccagccaggacgccctgcccatcgtgccccagctgcaggtggagaacggcgaggacatcatcatcatccagcaggacacccccgagaccctgcccggccacaccaaggccaagcagccctacagagaggacaccgagtggctgaagggccagcagatcggcctgggcgccttcagcagctgctaccaggcccaggacgtgggcaccggcaccctgatggccgtgaagcaggtgacctacgtgagaaacaccagcagcgagcaggaggaggtggtggaggccctgagagaggagatcagaatgatgagccacctgaaccaccccaacatcatcagaatgctgggcgccacctgcgagaagagcaactacaacctgttcatcgagtggatggccggcggcagcgtggcccacctgctgagcaagtacggcgccttcaaggagagcgtggtgatcaactacaccgagcagctgctgagaggcctgagctacctgcacgagaaccagatcatccacagagacgtgaagggcgccaacctgctgatcgacagcaccggccagagactgagaatcgccgacttcggcgccgccgccagactggccagcaagggcaccggcgccggcgagttccagggccagctgctgggcaccatcgccttcatggcccccgaggtgctgagaggccagcagtacggcagaagctgcgacgtgtggagcgtgggctgcgccatcatcgagatggcctgcgccaagcccccctggaacgccgagaagcacagcaaccacctggccctgatcttcaagatcgccagcgccaccaccgcccccagcatccccagccacctgagccccggcctgagagacgtggccctgagatgcctggagctgcagccccaggacagaccccccagcagagagctgctgaagcaccccgtgttcagaaccacctggtag

SEQ ID NO: 160322 - DNA, 4539 bp, Artificial Sequence
  derived and/or modified sequence
atggccgctgccgctggaaaccgcgcctcatcctcaggatttcccggtgctcgggcaacaagccccgaggctgggggtggcgggggcgcactcaaagcatcgtccgcccccgctgccgcggctgggctcttacgggaagctggctcaggcggaagagaacgcgcggattggagacgcaggcagcttcggaaggtcaggagcgtcgagctggatcagctcccagaacaacctctgtttctggctgcatccccaccagcatcaagcacctctccctctccggagcctgcagacgctgccggctccggtacaggtttccagccagtggctgtgccacctccacacggggctgcatctcgcggtggggcccatttgaccgagtcagtggcagcccctgactcaggcgcctcttcacccgcggccgctgaacccggggagaaacgtgcccccgcagccgagccatccccggccgcagcccccgccgggcgcgagatggaaaacaaggagacacttaagggcctccataaaatggacgatagaccggaagagagaatgatccgggagaaattaaaagctacctgcatgcctgcctggaaacatgaatggttggagaggagaaatcgccgcgggccagttgtggtgaagccaatacctgttaagggggatgggtctgagatgaatcacttggctgcagagagccctggtgaagtccaagcttccgccgctagccccgcctctaagggccgacgaagccccagtccgggaaatagccccagcggtaggaccgtcaagtccgaaagtcctggggttcggcgcaagagggtgtcacccgtccccttccaatccggacgcattacgccccctaggagagccccatcccccgatggcttcagcccatattccccagaggagaccaacaggcgcgttaacaaggtgatgcgggcccggctgtatttgctgcagcagatcggcccaaacagtttccttataggcggggacagtcctgacaataagtatagagtgtttatcggtccgcaaaattgttcatgcgcgcgcggcacattttgcattcatctgctgttcgtcatgctgcgggtcttccagctggaaccatctgatccaatgctgtggcggaaaaccctgaaaaatttcgaggtggagtctctctttcagaaataccattcaaggcgctcttcaaggatcaaggccccctctcgtaacaccatccagaaattcgtctcccggatgtcgaactctcatacactttcgagcagttctacctccacatcctcatcagagaactcaattaaggacgaggaggagcaaatgtgtccaatttgcctgctcggaatgctggatgaggaatccctgacagtttgcgaggatgggtgtaggaacaaattgcatcaccactgcatgtctatttgggctgaggaatgtcggagaaaccgcgaaccactgatttgtcctctgtgcagatccaaatggcggtcccatgacttttattcacatgagctgtcctctcccgtggactcccccagttcactacgcgctgcgcagcagcaaactgttcaacaacagcctctggccggcagccgcagaaaccaggaatccaatttcaatctgactcattacgggacacaacagattcctccagcttataaggacttagccgagccttggatccaggttttcggcatggaattggttggctgcctgttttctcggaattggaacgttcgcgaaatggccctcaggcgcctctcccatgatgtgagcggggcacttctgttggcgaatggtgagtccaccggaaacagcggaggtagctctggctcctctccatctggtggtgccacatccgggagcagtcagaccagcatcagtggtgatgtggtcgaggcatgctgctcggtgctgtcaatggtgtgtgccgatccagtttataaagtttatgtggccgcattaaaaaccctgcgcgctatgctagtttatactccttgtcatagtttggctgaacggattaaacttcagcggcttttacaaccggtggtggatactatcctggtgaagtgcgcagatgctaattctaggacctcccaattgagcatttcaacgctcctggagctgtgcaaaggacaggctggcgagctagccgttgggagagagattctgaaggctggtagcataggaattggaggagtggattacgtgttaaattgcatcctgggtaaccagactgagagtaacaactggcaggaattgctcggccgtctgtgtctgattgatcggctgctgctggagtttcccgccgagttctacccccacatagtaagcactgacgtgagccaagccgagccggtggagattcggtataagaaactactcagtctgctgacattcgccttgcagtctatcgacaattcacattcaatggtggggaaactgagcaggcgaatatacctcagctcagcccggatggtcaccaccgtaccccacgtattctccaagttgctggagatgctgtccgtgtcgtctagcacacatttcacacggatgagacgtagactgatggccatcgcggatgaagtggagatcgccgaggccatccagttgggtgttgaagacaccttggatggccagcaggacagctttctccaggcttctgttcccaataactacttagagacgactgagaattcctcacccgaatgcaccgtccacctcgaaaagactggcaagggactttgcgcaacgaaactaagcgctagcagcgaagacatcagtgagcggctggcaagtatctcggtcggtccaagtagtagtaccacgactacaaccactactactgagcagcctaaacctatggtacaaactaaagggagaccccacagtcagtgccttaactctagcccactgagccaccacagccagctgatgtttcccgcattgtctacaccgtctagtagcacaccatcagtgccggccggcacggccacagatgtatctaaacaccggctccaaggctttatcccctgccgtatccccagcgcctctccacagacacagcgcaagttctccttacagttccaccgcaactgtcctgagaataaggatagcgacaagctcagcccagtattcacccaaagtaggcccctgccatcaagcaacatccaccgaccgaaaccctcaaggcccacacctggtaatactagcaagcagggagatccctcaaagaatagtatgacgctggatctgaacagttcatcaaaatgcgacgatagctttggctgctcaagcaactccagcaacgccgtaataccctcagacgagaccgtcttcacaccggtggaagagaagtgccgactggatgttaataccgagctgaactctagcattgaagatctattggaagcaagcatgccctcgagcgacaccacagtaaccttcaagagcgaggtggcagtactcagccctgaaaaagcagaaaacgatgacacctacaaggacgacgtgaaccacaaccagaaatgcaaggagaagatggaagccgaagaagaagaggcccttgcaatcgccatggcaatgtcagccagtcaagacgcactgcccatagtgccccagctccaggtggagaatggtgaggacattatcatcattcaacaagatactcctgaaaccctccccggccacacaaaggctaaacagccctatagggaggacaccgaatggcttaaggggcagcaaattgggctgggcgcctttagttcatgttatcaggcccaggacgtgggcacagggactctcatggcagttaaacaggttacttacgtgagaaatacatcatcagaacaggaagaggtggtggaagccctgcgggaagaaattcgtatgatgagccatctgaaccatccaaacattatccgaatgctaggagcgacttgtgaaaagagtaattacaatctgttcatcgagtggatggccggcggtagcgtggcacatctcctgtcgaaatacggagcattcaaggaatccgtagtgatcaattatactgagcaactcctgcgggggctatcgtatttgcacgagaaccagataattcatagggacgtcaagggggcaaacctgttgatcgattctactggtcaacgcctccggatagccgactttggggccgctgctcgtctggctagcaagggaactggcgctggcgagtttcagggccagctgctaggaactatagcctttatggcccccgaggttctcagaggacagcaatatgggaggagctgcgacgtgtggagcgtggggtgtgccattatcgagatggcctgtgccaagccgccttggaatgcggaaaagcactccaaccacctggccctgatatttaaaatcgctagcgcgacaaccgccccaagtattccaagccacctttccccaggtctccgtgacgtggctctgcgatgcctcgagctgcaacctcaggaccgacccccgtctagggagcttcttaaacatcctgtgtttcgaacaacgtggtag

SEQ ID NO: 160323 - DNA, 4539 bp, Artificial Sequence
  derived and/or modified sequence
atggctgctgctgctggcaacagagccagcagcagcggcttccctggggcccgggccaccagccctgaggccggcggcggcggcggggccctgaaggccagcagcgccccagctgctgctgctggcctgctgcgggaggccggcagcggcggccgggagagagctgactggaggcggcggcagctgaggaaggtgcgctctgtggagctggaccagctgcctgagcagcccctcttcctggccgccagccccccagccagcagcaccagccccagccctgagccagcagatgctgctggcagcggcaccggcttccagcctgtggccgtgcccccaccccacggggccgccagccggggcggggcccacctgacagaatctgtggccgccccagattctggggccagcagccctgctgctgctgagcctggagagaagagggccccagctgctgagcccagccctgctgctgccccagctggccgggagatggagaacaaggagaccctgaagggcctgcacaagatggatgacaggcctgaggagaggatgatccgggagaagctgaaggccacctgcatgcctgcctggaagcatgagtggctggagaggaggaacagaagaggccctgtggtggtgaagcccatccctgtgaagggagatggcagcgagatgaaccacctggccgctgagagccctggagaggtgcaggccagcgctgccagccctgccagcaagggccgccgcagccccagccctggcaacagccccagcggccgcacagtgaagtctgagagccctggggtgcggaggaagagggtgtcccctgtgcccttccagagcggccgcatcaccccaccccggcgggcccccagcccagatggcttcagcccctacagccctgaggagaccaacagaagagtgaacaaggtgatgagggcccggctgtacctgctgcagcagatcggccccaacagcttcctgattggaggagacagcccagacaacaagtacagagtcttcatcggcccccagaactgcagctgtgcccggggcaccttctgcatccacctgctgtttgtgatgctgcgggtcttccagctggagcccagcgaccccatgctgtggaggaagaccctgaagaactttgaggtggagagcctcttccagaagtaccacagcagaagaagcagccgcatcaaggcccccagcaggaacaccatccagaagtttgtgtccaggatgagcaacagccacaccctgagcagcagcagcaccagcaccagcagcagcgagaacagcatcaaggatgaggaggagcagatgtgccccatctgcctgctgggcatgctggatgaggagagcctgactgtgtgtgaagatggctgcaggaacaagctgcaccaccactgcatgagcatctgggccgaggagtgcagaagaaaccgggagcccctcatctgccccctgtgccgcagcaagtggaggagccatgacttctacagccatgagctgagcagccctgtggacagccccagcagcctgcgggccgcccagcagcagacagtgcagcagcagcccctggccggcagcagaagaaaccaggagagcaacttcaacctgacccactacggcacccagcagatccccccagcctacaaggacctggccgagccctggatccaggtgtttggcatggagctggtgggctgcctcttcagcaggaactggaatgtgcgggagatggccctgcggcggctgagccatgatgtgtctggggccctgctgctggccaatggagagagcactggaaacagcggcggcagcagcggcagcagccccagcggcggggccaccagcggcagcagccagaccagcatctctggagatgtggtggaggcctgctgcagcgtgctgtccatggtgtgtgccgaccctgtgtacaaggtgtatgtggccgccctgaagaccctgcgggccatgctggtgtacaccccctgccacagcctggccgagcgcatcaagctgcagaggctgctgcagcctgtggtggacaccatcctggtgaagtgtgctgatgccaacagcaggaccagccagctgagcatcagcaccctgctggagctgtgcaagggccaggccggggagctggccgtgggccgggagatcctgaaggccggcagcattggaattggaggagtggactatgtgctgaactgcatcctgggcaaccagacagagagcaacaactggcaggagctgctgggccgcctgtgcctgattgaccggctgctgctggagttccctgctgagttctacccccacatcgtgtccacagatgtgtcccaggccgagcctgtggagatccgctacaagaagctgctgagcctgctgacctttgccctgcagagcattgacaacagccacagcatggtgggcaagctgagccgccgcatctacctgagcagcgccaggatggtgaccaccgtgccccacgtgttcagcaagctgctggagatgctgtctgtgagcagcagcacccacttcaccaggatgagaagaaggctgatggccatcgcagatgaggtggagattgctgaggccatccagctgggcgtggaggacaccctggatggccagcaggacagcttcctgcaggcctctgtgcccaacaactacctggagaccacagagaacagcagcccagaatgtactgtgcacctggagaagacaggcaagggcctgtgtgccaccaagctgagcgccagcagcgaggacatcagcgagcggctggccagcatctctgtgggccccagcagcagcaccaccaccaccaccaccaccacagagcagcccaagcccatggtgcagaccaagggccggccccacagccagtgcctgaacagcagccccctgagccaccacagccagctgatgtttcctgccctgagcacccccagcagcagcacccccagcgtgcctgctggaacagccacagatgtgtccaagcaccggctgcagggcttcatcccctgccgcatccccagcgccagcccccagacccagaggaagttcagcctgcagttccacaggaactgcccagagaacaaggacagcgacaagctgagccctgtgttcacccagagccggcccctgcccagcagcaacatccaccggcccaagcccagccggcccaccccaggcaacaccagcaagcagggcgaccccagcaagaacagcatgaccctggacctgaacagcagcagcaaatgtgatgacagctttggctgcagcagcaacagcagcaatgctgtgatccccagtgatgaaacagtgttcacccctgtggaggagaagtgccgcctggatgtgaacacagagctgaacagcagcattgaggacctgctggaggcctccatgcccagcagtgacaccaccgtgaccttcaagtctgaggtggccgtgctgagccctgagaaggccgagaatgatgacacctacaaggatgatgtgaaccacaaccagaagtgcaaggagaagatggaggccgaggaggaggaggccctggccatcgccatggccatgtctgccagccaggatgccctgcccatcgtgccccagctgcaggtggagaatggagaggacatcatcatcatccagcaggacaccccagagaccctgcccggccacaccaaggccaagcagccctaccgggaggacacagagtggctgaagggccagcagatcggcctgggcgccttcagcagctgctaccaggcccaggatgtgggcaccggcaccctgatggctgtgaagcaggtgacctacgtgaggaacaccagcagcgagcaggaggaggtggtggaggccctgcgggaggagatccgcatgatgagccacctgaaccaccccaacatcatccgcatgctgggcgccacctgtgagaagagcaactacaacctcttcatcgagtggatggccggcggctctgtggcccacctgctgagcaagtacggggccttcaaggagagcgtggtgatcaactacacagagcagctgctgcggggcctgagctacctgcacgagaaccagatcatccacagagatgtgaagggggccaacctgctgattgacagcacaggccagaggctgagaattgctgactttggagctgctgcccggctggccagcaagggcaccggggccggggagttccagggccagctgctgggcaccatcgccttcatggcccctgaggtgctgcggggccagcagtatggccgcagctgtgatgtgtggagcgtgggctgtgccatcatcgagatggcctgtgccaagccaccctggaatgctgagaagcacagcaaccacctggccctgatcttcaagatcgccagcgccaccacagcccccagcatccccagccacctgagccctggcctgagagatgtggccctgcgctgcctggagctgcagccccaggacaggcctcccagccgggagctgctgaagcaccctgtgttccgcaccacctggtag

SEQ ID NO: 160324 - DNA, 4539 bp, Artificial Sequence
  derived and/or modified sequence
atggccgccgccgccggcaaccgggccagcagcagcggcttccccggtgccagggctaccagtccagaggcgggaggaggaggcggcgctctcaaggcatcctctgcccccgctgccgccgctggcctcctgagggaggccggatccggtggacgagaacgcgctgactggaggcgcaggcagctccgcaaagtacgaagtgtggaacttgaccagttgccagaacagccgctgtttctcgccgcgagtccccccgcctctagcacttccccctctcctgagcccgccgatgcggccggctccgggaccggctttcagcccgtggcagtgccaccgccccatggtgccgcctctcgcggaggcgctcacttaaccgagagtgtcgcagcccctgactctggagccagctcccctgcggccgccgagccaggagagaaaagggctcctgctgccgagccatcccccgccgctgctcccgcaggccgggaaatggaaaataaggaaactctgaaggggctgcacaagatggacgacagacccgaggagcgtatgattagagaaaagctaaaggccacttgtatgcccgcttggaaacatgaatggctggaaagaaggaaccggcgaggacccgtcgtggtgaagccaataccggtgaagggcgatgggagcgaaatgaaccacctggctgcagagagcccaggagaagttcaggcttctgccgcgtccccagcgtcaaagggacggcgaagccccagcccagggaacagcccctccggaagaactgtcaagagcgagagcccaggggtgaggaggaagcgggtaagtcccgtgcccttccagagtgggagaattacccccccgcggagagcgccatcgccggatggcttttccccatacagtccagaagaaactaatagacgcgtcaataaagtgatgagggcaagactctacctgctgcagcagattggccccaacagtttccttatcgggggggatagtcccgataacaagtatcgggtttttatcggcccccagaattgctcatgcgcccgcgggaccttttgtattcaccttctgttcgtgatgttgagagtatttcaactcgagccaagtgatcccatgttatggcggaagaccctgaaaaactttgaggtggaaagtctgtttcaaaaataccacagtcgcagatcctcaaggataaaggctccttcaagaaacaccattcaaaaattcgtctccaggatgtcgaattcacatactctgagcagctctagtacctccactagctcctctgagaacagcatcaaggacgaagaagaacaaatgtgtcccatctgcctgctgggtatgctggacgaggagagtctcacagtttgcgaagatggttgcagaaataaactccaccaccactgcatgtccatctgggccgaggaatgcagaaggaatcgcgaacccctgatttgtcccctctgtaggagcaagtggcgcagtcatgatttctatagccacgaactgtcttcacctgtcgactcgccatcctccctgagagccgcacagcagcagactgtgcagcagcaacctctggccgggagccgaagaaaccaggagagtaattttaacctcacacattacggaacacagcagatacccccggcatacaaagatctggcagaaccttggattcaagtgttcggaatggagctcgtcggatgcctgttttccaggaattggaatgtgagggagatggctcttcgccggctgagtcatgacgtatcaggcgccctactgctggcgaacggggagtccacagggaactcaggagggtccagtggttcaagtccaagcggcggtgcgacctccggttctagccagacttcaatctctggtgatgtagttgaagcctgctgtagtgtgctgtccatggtatgtgcggacccagtttacaaggtttacgttgccgctctcaaaaccctcagggcaatgctcgtatatactccatgccattcgttggctgagcggataaagctgcagagactcctgcaacccgtggtcgacaccatacttgttaaatgcgccgatgcgaattcgcgcacatcccagttatccatcagcaccctgctggaactctgtaagggccaggcgggggaactggctgtgggtagagagattttaaaggctggttccattgggatcgggggagtggattatgtgctaaattgtattctggggaaccagactgaaagtaacaactggcaagagttgctcgggagactgtgtttgattgaccgcctccttctggaattcccagccgaattttaccctcacattgtgtccacagacgtgagccaggccgagcccgtcgagattagatataaaaaactactgtccctgttaacctttgcgctgcaatcaatcgacaactcccattctatggtggggaagctcagccgccggatctatctctcatccgccaggatggtgacaaccgtgcctcatgtgttctccaaactgttggagatgctcagcgtttcatcctctacccacttcactcgcatgaggcggcgcctgatggccatcgcagatgaagtggagattgcagaggccatacaactgggggtggaagatacccttgatggccaacaggacagctttcttcaggccagcgttcctaataactatctcgaaacaactgagaatagttctcctgaatgtacggtacacctggaaaagaccggtaaggggctgtgcgcaactaaactttctgcatcttcggaagacatcagcgaacgcctggcctccatctccgtcgggcccagctcttccaccaccacgacaaccacgacaaccgagcaacctaaacccatggtccaaactaagggaagaccccacagccagtgcctaaattcaagtcctctcagtcaccacagtcagctcatgtttccagccttgtctactccctcgagctctactcccagtgtccccgcaggcacagctacagatgtgtccaagcaccgcctgcaggggttcatcccttgcagaattccatcggcaagcccccagacacaacggaagttctcattgcaatttcacagaaactgtcctgaaaacaaagattcagacaagctctcgcccgtgttcacccagtcgcgcccactgcccagcagtaatatacatagaccgaagccatctcgcccaactcccggaaacacgtcaaaacagggcgatccgagcaaaaatagcatgacacttgacttgaactcatcctctaaatgcgacgatagctttggttgttcgtctaatagctccaacgccgtcatcccatccgacgagacggtgttcacccccgttgaggaaaaatgtcgtttagacgtcaacaccgaactcaactcatcaattgaggatctgctggaagccagcatgcccagctccgacacaaccgtgacattcaaaagcgaggtggccgtactctcacccgagaaggctgagaacgacgacacgtataaggacgatgtaaatcataatcagaagtgcaaagagaaaatggaggcagaagaggaggaagctctggccatagctatggcaatgtcagcttctcaggacgccctgcccattgttccccagctgcaagtggaaaatggcgaagacattatcatcatccaacaagacactcctgaaacgcttcctggacatactaaagctaagcagccctatcgcgaagacactgagtggctcaaaggccagcagattggactgggtgccttctcaagctgttatcaagcccaggatgtggggaccggaaccctgatggcagtaaagcaggttacatatgtgcgcaatactagcagtgagcaagaggaggtagtcgaggccctccgggaagagatcagaatgatgtcccaccttaaccacccgaacatcattcggatgttgggtgcaacttgcgagaagtcgaattacaacctgttcattgagtggatggcaggaggctccgtggcacacttgctcagcaaatatggagcgttcaaagagtcagtggtgattaactatacggagcaactgctccgagggctgagctatctgcatgagaatcagatcatccacagggatgtgaagggcgctaatcttctcatcgactcaacggggcagagactgcggattgcagacttcggggccgcggcacggctcgcatccaagggtactggcgcgggcgagttccaggggcagctgttagggaccattgcatttatggcccccgaagtgttacgtggccaacagtatggacggtcgtgcgacgtatggtcagttggatgcgccataattgagatggcctgcgcaaagccaccatggaacgcagagaagcactcaaatcacctggccctgatctttaaaatcgcttctgcgaccacggcaccttccatccctagccacctgtccccaggtctgagggacgtggccctgcgatgtctggagctgcagccccaagacagacccccgtctcgggaactgctgaaacatcccgtgtttaggacaacctggtag

SEQ ID NO: 160325 - DNA, 7011 bp, Artificial Sequence
  derived and/or modified sequence
atggcggcggcggcggggaatcgcgcctcgtcgtcgggattcccgggcgccagggctacgagccctgaggcaggcggcggcggaggagccctcaaggcgagcagcgcgcccgcggctgccgcgggactgctgcgggaggcgggcagcgggggccgcgagcgggcggactggcggcggcggcagctgcgcaaagtgcggagtgtggagctggaccagctgcctgagcagccgctcttccttgccgcctcaccgccggcctcctcgacttccccgtcgccggagcccgcggacgcagcggggagtgggaccggcttccagcctgtggcggtgccgccgccccacggagccgcgagccgcggcggcgcccaccttaccgagtcggtggcggcgccggacagcggcgcctcgagtcccgcagcggccgagcccggggagaagcgggcgcccgccgccgagccgtctcctgcagcggcccccgccggtcgtgagatggagaataaagaaactctcaaagggttgcacaagatggatgatcgtccagaggaacgaatgatcagggagaaactgaaggcaacctgtatgccagcctggaagcacgaatggttggaaaggagaaataggcgagggcctgtggtggtaaaaccaatcccagttaaaggagatggatctgaaatgaatcacttagcagctgagtctccaggagaggtccaggcaagtgcggcttcaccagcttccaaaggccgacgcagtccttctcctggcaactccccatcaggtcgcacagtgaaatcagaatctccaggagtaaggagaaaaagagtttccccagtgccttttcagagtggcagaatcacaccaccccgaagagccccttcaccagatggcttctcaccatatagccctgaggaaacaaaccgccgtgttaacaaagtgatgcgggccagactgtacttactgcagcagatagggcctaactctttcctgattggaggagacagcccagacaataaataccgggtgtttattgggcctcagaactgcagctgtgcacgtggaacattctgtattcatctgctatttgtgatgctccgggtgtttcaactagaaccttcagacccaatgttatggagaaaaactttaaagaattttgaggttgagagtttgttccagaaatatcacagtaggcgtagctcaaggatcaaagctccatctcgtaacaccatccagaagtttgtttcacgcatgtcaaattctcatacattgtcatcatctagtacttctacgtctagttcagaaaacagcataaaggatgaagaggaacagatgtgtcctatttgcttgttgggcatgcttgatgaagaaagtcttacagtgtgtgaagacggctgcaggaacaagctgcaccaccactgcatgtcaatttgggcagaagagtgtagaagaaatagagaacctttaatatgtcccctttgtagatctaagtggagatctcatgatttctacagccacgagttgtcaagtcctgtggattccccttcttccctcagagctgcacagcagcaaaccgtacagcagcagcctttggctggatcacgaaggaatcaagagagcaattttaaccttactcattatggaactcagcaaatccctcctgcttacaaagatttagctgagccatggattcaggtgtttggaatggaactcgttggctgcttattttctagaaactggaatgtgagagagatggccctcaggcgtctttcccatgatgtcagtggggccctgctgttggcaaatggggagagcactggaaattctgggggcagcagtggaagcagcccgagtgggggagccaccagtgggtcttcccagaccagtatctcaggagatgtggtggaggcatgctgcagcgttctgtcaatggtctgtgctgaccctgtctacaaagtgtacgttgctgctttaaaaacattgagagccatgctggtatatactccttgccacagtttagcggaaagaatcaaacttcagagacttctccagccagttgtagacaccatcctagtcaaatgtgcagatgccaatagccgcacaagtcagctgtccatatcaacactgttggaactgtgcaaaggccaagcaggagagttggcagttggcagagaaatactaaaagctggatccattggtattggtggtgttgattatgtcttaaattgtattcttggaaaccaaactgaatcaaacaattggcaagaacttcttggccgcctttgtcttatagatagactgttgttggaatttcctgctgaattttatcctcatattgtcagtactgatgtttcacaagctgagcctgttgaaatcaggtataagaagctgctgtccctcttaacctttgctttgcagtccattgataattcccactcaatggttggcaaactttccagaaggatctacttgagttctgcaagaatggttactacagtaccccatgtgttttcaaaactgttagaaatgctgagtgtttccagttccactcacttcaccaggatgcgtcgccgtttgatggctattgcagatgaggtggaaattgccgaagccatccagttgggcgtagaagacactttggatggtcaacaggacagcttcttgcaggcatctgttcccaacaactatctggaaaccacagagaacagttcccctgagtgcacagtccatttagagaaaactggaaaaggattatgtgctacaaaattgagtgccagttcagaggacatttctgagagactggccagcatttcagtaggaccttctagttcaacaacaacaacaacaacaacaacagagcaaccaaagccaatggttcaaacaaaaggcagaccccacagtcagtgtttgaactcctctcctttatctcatcattcccaattaatgtttccagccttgtcaaccccttcttcttctaccccatctgtaccagctggcactgcaacagatgtctctaagcatagacttcagggattcattccctgcagaataccttctgcatctcctcaaacacagcgcaagttttctctacaattccacagaaactgtcctgaaaacaaagactcagataaactttccccagtctttactcagtcaagacccttgccctccagtaacatacacaggccaaagccatctagacctaccccaggtaatacaagtaaacagggagatccctcaaaaaatagcatgacacttgatctgaacagtagttccaaatgtgatgacagctttggctgtagcagcaatagtagtaatgctgttatacccagtgacgagacagtgttcaccccagtagaggagaaatgcagattagatgtcaatacagagctcaactccagtattgaggaccttcttgaagcatctatgccttcaagtgatacaacagtaacttttaagtcagaagttgctgtcctgtctcctgaaaaggctgaaaatgatgatacctacaaagatgatgtgaatcataatcaaaagtgcaaagagaagatggaagctgaagaagaagaagctttagcaattgccatggcaatgtcagcgtctcaggatgccctccccatagttcctcagctgcaggttgaaaatggagaagatatcatcattattcaacaggatacaccagagactctaccaggacataccaaagcaaaacaaccgtatagagaagacactgaatggctgaaaggtcaacagataggccttggagcattttcttcttgttatcaggctcaagatgtgggaactggaactttaatggctgttaaacaggtgacttatgtcagaaacacatcttctgagcaagaagaagtagtagaagcactaagagaagagataagaatgatgagccatctgaatcatccaaacatcattaggatgttgggagccacgtgtgagaagagcaattacaatctcttcattgaatggatggcagggggatcggtggctcatttgctgagtaaatatggagccttcaaagaatcagtagttattaactacactgaacagttactccgtggcctttcgtatctccatgaaaaccaaatcattcacagagatgtcaaaggtgccaatttgctaattgacagcactggtcagagactaagaattgcagattttggagctgcagccaggttggcatcaaaaggaactggtgcaggagagtttcagggacaattactggggacaattgcatttatggcacctgaggtactaagaggtcaacagtatggaaggagctgtgatgtatggagtgttggctgtgctattatagaaatggcttgtgcaaaaccaccatggaatgcagaaaaacactccaatcatcttgctttgatatttaagattgctagtgcaactactgctccatcgatcccttcacatttgtctcctggtttacgagatgtggctcttcgttgtttagaacttcaacctcaggacagacctccatcaagagagctactgaagcatccagtctttcgtactacatggtagccaattatgcagatcaactacagtagaaacaggatgctcaacaagagaaaaaaaacttgtggggaaccacattgatattctactggccatgatgccactgaacagctatgaacgaggccagtggggaacccttacctaagtatgtgattgacaaatcatgatctgtacctaagctcagtatgcaaaagcccaaactagtgcagaaactgtaaactgtgcctttcaaagaactggccctaggtgaacaggaaaacaatgaagtttgcatgactaaattgcagaagcataattttatttttttggagcactttttcagcaatattagcggctgaggggctcaggatctattttaatatttcaattattcttccatttcatatagtgatcacaagcagggggttctgcaattccgttcaaattttttgtcactggctataaaatcagtatctgcctcttttaggtcagagtatgctatgagtagcaatacatacatatatttttaaaagttgatacttctttatgacccacagttgacctttattttcttaaataccagggcagttgtggctcattgtgcattttactgttggcccattcatttcgtttttggaaattatggttttgtattttcatgtttatttacattcatttttgtttattcagggaaagctgatctttttttcaaaccagaaaaaaaaaatgaactagatatgaagtagagttcattaaatatcttgctattgtcagagtttttaaaatatagacttaattttgtttttttaaattggaatacaataaagtactacctacatttgagtcagtcaccactcttattgtgcaggttaagtacaagttaactaaaaataaactgtcctctctggtgcaactcacaaccaagatcaagattaccttaaaatttatttgaattttttagatgttttggttgtcaaactgtaggaaacttcacaacatttaagtcttactctgtatgtaacaatccatcattcaccttcactactggtagtaacatagagctgccattttccttttaccatgcatcatctctttacagtaggcctggcagatcattttttaaaaagattattcaactaccaatcagtaatgtttttaaacagtacatttgctttgaacttggaaaatgtgttcagaaagaaaaatggaattgaatttcatttatacactaattccttggattttgcacagttacctaacggttttagtctggagttaaattcagatgcatggaatcctgaaggaaaatggtagctttttaatctttttgtgtgtgtgtgagtcttttaaatcaagtactgattaactattaagtacaactttgagattttagttttaactcttcagaagccagtgtgaaatagaattggttattctcaaagactcaggataaactaaataagctatatatagagtacatttaaaatgtacaacacaaattggaaataaaataagttacaagataagtttacagggatatattgcttacaatttttaaaaggcagtttgttttttatgtgaatatgtttcttagtgaaattttacattcctttgttttggaagattggcgatatttgaagagttaaaaatagtacagaaatgtgaagtttggtatctctaaatgtgttgtacttgactttcttttttattttgtttttttttttttttgactacttagaattttcacaattctaataagattgtttccaagtctctcatgtgcaagctttaaaggatgcactcttgccattttatgtactggaagatcattggtcagatgaatactgtgtctgacaaaaatgtaaactgtataaactgaggaacctcagctaatcagtattactttgtagatcaccatgcccaccacatttcaaactcaaactatctgtagatttcaaaatccattgtgtttgagtttgtttgcagttccctcagcttgctggtaattgtggtgttttgttttttgttttgttttcaatgcaaatgtgatgtaatattcttattttctttggatcaaagctggactggaaattgtatcgtgtaattatttttgtgttcttaatgttatttggtactcaagttgtaaataacgtctactactgtttattccagtttctactacctcaggtgtcctatagatttttcttctaccaaagttcactttcacaatgaaattatatttgctgtgtgactatgattcctaagatttccagggcttaagggctaacttctattagcaccttactgtgtaagcaaatgttacaaaaaaaaaaaaaaaaaatctctgggttaagaaaatttggcttaaatgtatcctttgttattttaaatatattgagatattttaattaaaatttttaccccattgaaccgattttatagtatttgtacctattttggtgtttttgtctttatagtaaataaaagtttttgaacaaa

SEQ ID NO: 160326 - DNA, 4539 bp, Artificial Sequence
  derived and/or modified sequence
atggccgctgcagcgggaaaccgcgcttcaagtagcggcttccccggagctcgggcaacatctcctgaggccggaggaggcggtggagcccttaaggcaagctccgccccagccgctgccgcaggcctgttgagggaagccggtagcggtggtagggagcgggctgactggcgcagaagacagctgcgaaaagtgcgttctgtggagcttgaccagctaccagagcaaccccttttcctcgccgcatcccctcccgcttcatcgacatccccatctcccgagcctgccgacgcggcaggctcagggacaggattccaaccagttgcggtgccaccgcctcatggtgcagccagccgagggggagcgcacctcaccgagtcagtggctgcccctgacagcggagcgtctagcccagcggcagccgagcctggggagaagagggctcctgccgctgagccctcaccagctgccgcacctgccggacgcgagatggaaaataaagaaactctgaaaggcttacataagatggacgaccgccctgaagagaggatgatcagggagaagttaaaagccacctgtatgccagcttggaagcacgaatggcttgaacggagaaatcggaggggaccagtagtcgttaaaccaataccggtgaagggggacggctccgaaatgaatcacctggccgcagaatcacctggagaggtacaagcttctgccgcatcacctgcatccaagggcaggaggtcacccagtcctgggaattctcccagcggtcggacagttaaaagcgagagccctggtgtcagacgcaagagagtctcacctgtgccgttccagtctggccgaatcacccccccacgtcgcgctccatcccctgacggtttctccccttatagccccgaagaaaccaaccggagggtaaataaggttatgcgcgctaggctgtacttgctgcaacagatcggcccaaactcattcctcattggaggggattcccccgacaacaaatatcgggtgtttattggccctcagaactgttcctgcgctaggggcaccttctgcattcatctgttgttcgtcatgctccgagtttttcagctcgagcctagtgatcccatgctgtggagaaagactttaaaaaactttgaggttgagtcgcttttccagaaataccattcacgtcggagctcacgcataaaggcccctagcagaaacaccatccaaaagttcgtgagccgcatgtccaattcacataccctttcctcctccagcactagcacttcctcgagcgagaactctatcaaggacgaagaagagcagatgtgtcctatatgcctgctagggatgctggatgaggagagtctcacggtatgcgaagacggttgcaggaacaaactgcaccaccattgcatgagcatatgggccgaggaatgccggcgtaaccgcgaaccacttatctgccccctatgtcggagcaagtggaggtcgcacgatttttattctcacgagttgtctagtcctgttgactcccccagcagtcttcgggctgcacagcagcaaaccgtgcagcagcagcctttggccggatccagacgcaaccaggaaagtaatttcaatctgacacattatgggacacaacagatcccacccgcatacaaggatttggctgaaccttggattcaggtcttcgggatggagctcgtgggatgtctattcagcaggaactggaatgtgcgcgaaatggctctgcgccgtctgtctcacgatgtgtcaggcgctctgttgttagctaatggtgagtccactgggaactccggcggttcctccggatcgtctccctctggcggagccacctccggaagttcgcagacctctatcagtggggatgtcgtggaggcctgctgctccgttctatcaatggtttgtgccgatccagtttataaggtctacgtagctgccctgaagaccctccgcgcaatgctggtgtataccccatgtcactctctcgccgagcgaatcaagttgcagagactgctgcagcctgtcgtagacacaatcctcgttaagtgcgcagacgccaacagccgcacatcacagttgagcatcagcacactgctcgagctgtgcaaaggccaagcaggggagttggccgttgggagggagatcctgaaagccggtagtatcggaataggcggagttgactatgtcctcaactgcatattaggaaatcagactgaatccaacaactggcaggaactcctcgggagattgtgcctcattgacagactgctcctggaatttcctgctgagttctatcctcatattgtttctactgacgtcagtcaggccgaaccggtggagattaggtacaagaaattgctttcactcctgaccttcgccctgcagtccatcgataatagtcattccatggtaggaaagcttagcagacgcatttatctcagcagtgcgagaatggtgaccactgtgccccatgtgttttccaaactgttggaaatgttgtctgttagctccagcactcacttcacccgcatgcgccgtaggcttatggctatagccgacgaggtcgaaatcgccgaggcaattcagctcggagtcgaagataccctggacggccagcaagactcgttcttgcaagcatctgtcccgaataactatttggaaactaccgaaaattcttccccagaatgcactgtgcacctggaaaaaactgggaaaggcctgtgcgcaactaagttaagcgcgtcgagcgaagatatttcagagagacttgcctctattagcgtgggtccatcctcatccactactaccaccacaacaacaaccgagcagccgaaaccaatggtgcagacaaaaggacggcctcactcacagtgtctcaatagcagccctctgtcccaccactcacagcttatgtttcccgcactaagcacaccttcctcctccaccccttctgtgccagcgggaacagcaaccgacgtgtcgaaacaccgcctccaggggttcatcccctgtagaattccctcagcaagcccccaaacccaaagaaagttctcactgcagtttcaccgcaattgccccgagaacaaggacagcgacaaactgtccccggtgttcacacagagccggcctctgccaagttcgaatatccacagaccaaagccttctaggcccaccccgggtaatacaagcaagcagggcgacccctctaagaattcgatgacattagacctgaactcttccagcaagtgcgacgattccttcggctgttcctccaattcatctaatgcagtgatacctagtgacgaaacagtattcaccccagtagaggagaagtgcaggttagacgttaacaccgaactgaacagttctattgaagatcttcttgaggctagtatgcctagcagcgacacaaccgtcaccttcaagtctgaagttgctgtactgtcgccagagaaagccgaaaacgacgatacctataaggacgacgtaaatcataaccagaagtgtaaagaaaagatggaggccgaggaggaggaggcactggctatcgcaatggccatgtcggcttcacaagatgcactgccaattgtacctcaattgcaggtggaaaacggtgaggacattattattatacagcaggatacgcctgagactctgccgggacacaccaaagcgaagcagccttacagggaggatacagagtggttgaagggccaacagattggtctcggcgctttctcaagttgttaccaggcccaggatgtcgggaccggaactttgatggcagtgaaacaggtcacatacgtacgcaatacctcttccgagcaggaggaagtagtggaagccctccgtgaggaaatacgtatgatgtcccatctgaaccatcctaatattatcaggatgctgggggctacatgtgagaaatctaactacaacctgtttattgagtggatggcaggcggttcagttgcccatttgttgtctaagtatggtgccttcaaggagagtgttgtgatcaactacacagaacaattgctgcgagggctgtcatacctgcatgagaaccagatcatccatagggacgtaaaaggagcaaacctgctaatcgacagcactggacagcgccttaggatagcagattttggcgctgccgcacgcctggcgagtaaaggaaccggtgcaggggagtttcagggccaactccttggaactattgcatttatggcacctgaggtcctgcgcggacagcagtatggacgcagctgcgatgtctggagtgtcggatgtgctattattgaaatggcttgtgcaaagccaccatggaacgctgagaagcactccaaccatctagcccttatcttcaagattgcgtccgccacaaccgctccttccataccgtcccatctgtcccccggactgcgcgacgtggccctccgctgtctcgaattacagcctcaggaccggcctccatctagagagctcctgaagcatcctgtcttcagaaccacctggtag

SEQ ID NO: 160327 - protein, 1608 aa, Artificial Sequence
  derived and/or modified sequence
MREAAAALVPPPAFAVTPAAAMEEPPPPPPPPPPPPEPETESEPECCLAARQEGTLGDSACKSPESDLEDFSDETNTENLYGTSPPSTPRQMKRMSTKHQRNNVGRPASRSNLKEKMNAPNQPPHKDTGKTVENVEEYSYKQEKKIRAALRTTERDRKKNVQCSFMLDSVGGSLPKKSIPDVDLNKPYLSLGCSNAKLPVSVPMPIARPARQTSRTDCPADRLKFFETLRLLLKLTSVSKKKDREQRGQENTSGFWLNRSNELIWLELQAWHAGRTINDQDFFLYTARQAIPDIINEILTFKVDYGSFAFVRDRAGFNGTSVEGQCKATPGTKIVGYSTHHEHLQRQRVSFEQVKRIMELLEYIEALYPSLQALQKDYEKYAAKDFQDRVQALCLWLNITKDLNQKLRIMGTVLGIKNLSDIGWPVFEIPSPRPSKGNEPEYEGDDTEGELKELESSTDESEEEQISDPRVPEIRQPIDNSFDIQSRDCISKKLERLESEDDSLGWGAPDWSTEAGFSRHCLTSIYRPFVDKALKQMGLRKLILRLHKLMDGSLQRARIALVKNDRPVEFSEFPDPMWGSDYVQLSRTPPSSEEKCSAVSWEELKAMDLPSFEPAFLVLCRVLLNVIHECLKLRLEQRPAGEPSLLSIKQLVRECKEVLKGGLLMKQYYQFMLQEVLEDLEKPDCNIDAFEEDLHKMLMVYFDYMRSWIQMLQQLPQASHSLKNLLEEEWNFTKEITHYIRGGEAQAGKLFCDIAGMLLKSTGSFLEFGLQESCAEFWTSADDSSASDEIRRSVIEISRALKELFHEARERASKALGFAKMLRKDLEIAAEFRLSAPVRDLLDVLKSKQYVKVQIPGLENLQMFVPDTLAEEKSIILQLLNAAAGKDCSKDSDDVLIDAYLLLTKHGDRARDSEDSWGTWEAQPVKVVPQVETVDTLRSMQVDNLLLVVMQSAHLTIQRKAFQQSIEGLMTLCQEQTSSQPVIAKALQQLKNDALELCNRISNAIDRVDHMFTSEFDAEVDESESVTLQQYYREAMIQGYNFGFEYHKEVVRLMSGEFRQKIGDKYISFARKWMNYVLTKCESGRGTRPRWATQGFDFLQAIEPAFISALPEDDFLSLQALMNECIGHVIGKPHSPVTGLYLAIHRNSPRPMKVPRCHSDPPNPHLIIPTPEGFSTRSMPSDARSHGSPAAAAAAAAAAVAASRPSPSGGDSVLPKSISSAHDTRGSSVPENDRLASIAAELQFRSLSRHSSPTEERDEPAYPRGDSSGSTRRSWELRTLISQSKDTASKLGPIEAIQKSVRLFEEKRYREMRRKNIIGQVCDTPKSYDNVMHVGLRKVTFKWQRGNKIGEGQYGKVYTCISVDTGELMAMKEIRFQPNDHKTIKETADELKIFEGIKHPNLVRYFGVELHREEMYIFMEYCDEGTLEEVSRLGLQEHVIRLYSKQITIAINVLHEHGIVHRDIKGANIFLTSSGLIKLGDFGCSVKLKNNAQTMPGEVNSTLGTAAYMAPEVITRAKGEGHGRAADIWSLGCVVIEMVTGKRPWHEYEHNFQIMYKVGMGHKPPIPERLSPEGKDFLSHCLESDPKMRWTASQLLDHSFVKVCTDEE

SEQ ID NO: 160328 - protein, 107 aa, Artificial Sequence
  derived and/or modified sequence
MEEPPPPPPPPPPPPEPETESEPECCLAARQEGTLGDSACKSPESDLEDFSDETNTENLYGTSPPSTPRQMKRMSTKHQRNNVGRPASRSNLKGVRQISHAVSSSLN

SEQ ID NO: 160329 - DNA, 4827 bp, Artificial Sequence
  derived and/or modified sequence
atgcgcgaggctgccgcggctctggtgcctcctcccgccttcgctgtgacccccgcggccgcaatggaggagcccccccctccgcccccaccccccccccctccaccggagcctgagacagagtccgaacctgagtgctgtctggctgcccgccaagaagggacactcggcgactctgcatgcaaatcccctgagtctgaccttgaagacttcagtgacgaaactaatacggagaacttgtatggcacttctccaccctcgacaccacgccagatgaagcgcatgagcacgaaacaccagagaaataacgttggccggccagcttccagatctaacctcaaggagaagatgaacgcgccgaatcaacccccacacaaagataccggcaaaacagtggaaaacgttgaagagtacagctacaagcaagaaaagaaaattagggctgctctgcggaccacagaacgtgatcggaaaaagaacgttcagtgcagttttatgctggattcagttgggggctccctgcccaaaaaatcaatccccgacgtcgatctgaataaaccttacttatcattaggctgctctaatgccaagctgcctgtgagcgtgcctatgccaatcgctcgccccgctagacagacttcccgcacagactgtcctgccgacagattaaagtttttcgaaacccttagacttctgttgaagctcacctctgttagcaagaaaaaagaccgcgagcagcgtgggcaggagaacacaagtggcttttggctgaatcgatctaatgagctcatctggctggagttacaggcttggcatgcaggacgcacaatcaatgaccaggacttcttcctctatactgcccgacaggcaattccggacattattaatgagatactcacttttaaagtcgattacgggtcatttgcctttgtgagagaccgggcaggcttcaacgggacttctgtggaaggtcagtgtaaggcaacgcctggaaccaagattgtaggctacagtacgcatcacgaacacttacagaggcagagggtaagttttgaacaagtgaagaggatcatggagctcctagagtacatcgaagccctatacccgtctttgcaagcccttcaaaaagactacgagaaatatgcggccaaggactttcaggaccgcgttcaggccctttgtttgtggttaaacattacaaaggacctcaaccaaaaactgaggattatggggacggtcctcggaataaaaaatttatctgacataggttggccagtgttcgagattccaagtccgaggcctagtaaaggcaatgagcctgaatacgagggcgacgatacggagggcgagctcaaggagcttgaatcatccactgatgaaagtgaggaggagcagatctcggaccctcgtgtgcccgaaattagacagccaatagataattctttcgatattcagtccagggattgtatctccaagaagctcgagaggctggaatctgaggacgactctctgggttggggcgcgcccgactggtctaccgaagctgggtttagcaggcattgtttaacgtcaatctacagaccttttgtggataaggccctgaaacagatgggcctgagaaagctgattctgcggctccacaaattgatggatggctccctgcaaagagctcggatcgctctcgtgaagaacgataggcccgtcgagttctcagaatttcctgatcctatgtgggggagcgattacgttcagctgagcaggactcccccctcttctgaagagaaatgttccgcagtatcttgggaagaactgaaggccatggaccttccctcattcgagccagccttcctggtactgtgcagagtgctcctgaacgtaatacacgagtgccttaaattgaggctggagcaaagacccgcgggagaacctagcctcctgagcattaaacagttggttcgagaatgtaaagaagtgctgaagggcggcctgctgatgaagcaatactatcagtttatgcttcaagaggtcctcgaagatttggaaaagccagattgcaatatagacgcattcgaagaagatttacataaaatgctgatggtgtattttgattacatgaggtcttggatccaaatgcttcagcagctccctcaggcctctcactcgttgaagaacctcctcgaggaggaatggaattttaccaaagagattacccactatattaggggtggcgaggcccaagctgggaagctgttctgtgacattgcaggtatgctgttgaaatccactggcagcttcctggagttcggattgcaggaaagttgcgcagagttctggacctcagccgacgactcatcagcctctgatgaaatccgaagatccgtgatagaaattagtcgggccctgaaggaactgttccatgaggcacgagaacgtgccagcaaagccctggggttcgcgaagatgctgcggaaagacctggagatcgcggctgaattcagactgtctgcaccggtacgggacctcctggacgtattgaagagcaagcagtacgttaaggtccaaattcccggattggagaacctgcagatgtttgttcccgacacgctggccgaggagaagtccattatactgcagttactgaacgcagccgctgggaaggattgctccaaggattccgatgacgtattgatagatgcatacctgctgctgaccaagcatggggatcgtgctagagactcagaggactcctggggcacttgggaagctcagcctgtcaaggtggtgccacaggtcgagacggtcgatacactgcgaagtatgcaggttgacaatttactgctggtcgtaatgcagtccgcccatctcaccatccagcgcaaagcctttcagcagtcaattgaagggctgatgacattgtgtcaggagcaaacctctagccagcctgtaatcgcaaaggcactgcaacagttgaagaatgacgccctggagctgtgcaatcgtattagcaatgctatcgatcgcgtcgaccatatgttcacttctgaattcgacgcagaagtagacgagagtgaaagtgtcactctgcaacaatattatcgagaagcaatgattcagggttataattttgggttcgagtaccacaaagaagtcgtgaggcttatgagcggggagttccgccagaagatcggcgacaagtatataagctttgcacgcaaatggatgaattacgtgcttactaaatgtgagtcaggacgggggacacgcccccggtgggccactcaaggattcgacttcttgcaggccatcgagcccgcctttattagtgccctccctgaggacgattttctttctctacaagccttgatgaatgaatgtatcggacatgtcatcggtaaaccccattcccccgtcactggtctgtatctcgccatccataggaatagtccgagacctatgaaagtcccgcgttgccactccgatcctccaaaccctcaccttattatccctacccccgagggtttttctacacgctccatgccaagtgatgccagaagccacggcagcccagccgccgctgcagctgccgctgcagcagccgtagctgccagcagaccatcaccctccggtggagatagtgtcttacccaagagcatctcatccgcgcacgacaccaggggctctagcgtcccggagaacgaccggttggcaagtatcgctgctgagctccagttccgctccctgtctcgtcactcctcaccgacagaagagcgcgacgaaccagcatacccacgcggggactcaagtggcagtacacggcgttcatgggagttgagaacccttattagtcaaagcaaggacactgcatctaagctaggccccatagaagccatacaaaagagcgtacggcttttcgaagagaagagataccgcgagatgaggcgaaaaaatatcatcgggcaggtttgtgataccccaaagtcctacgataacgtgatgcatgtgggcttgaggaaggtgaccttcaagtggcagcgcggaaacaagattggggagggccagtacggaaaagtttacacctgcatatcagtcgacactggggagttgatggctatgaaagagattaggttccagccaaatgaccataagaccataaaggagactgccgacgagctcaaaatatttgaaggcatcaaacaccctaacctggttcggtatttcggcgttgaactgcaccgggaggaaatgtacatcttcatggagtattgcgacgagggaacactggaggaggtgtccaggctaggcctgcaggagcacgtgattaggctgtacagcaaacagatcacaattgctatcaacgtgttgcatgaacacggcattgtgcaccgcgacatcaaaggagccaatatcttcctcacatcctcaggcctgatcaagctaggggacttcgggtgctcagttaaattaaagaataacgcacagaccatgcctggagaagttaattcaactctcgggacagctgcctacatggccccagaggtgataacccgcgcaaaaggggagggccacggccgggccgccgatatttggagcttaggatgcgtggtgatagaaatggtgaccgggaagcgtccctggcacgagtatgaacacaacttccaaataatgtacaaggtagggatgggccataagcccccgatccctgagaggttatcccctgaaggcaaagatttcctctcacattgtctcgagtccgacccgaagatgcgatggaccgcttctcagctgttagaccactcattcgtgaaggtctgcaccgatgaggaatag

SEQ ID NO: 160330 - DNA, 4827 bp, Artificial Sequence
  derived and/or modified sequence
atgagggaggccgccgccgccctggtgcccccaccagcctttgctgtgaccccagctgctgccatggaggagcccccacctcctcctcctcctcctcctcctcctcctgagcctgagacagagagcgagcctgagtgctgcctggccgcccggcaggagggcaccctgggggacagcgcctgcaagagccctgagagtgacctggaggacttcagtgatgagaccaacacagagaacctgtatggcaccagcccccccagcaccccccggcagatgaagaggatgagcaccaagcaccagagaaataatgtgggccgcccagccagccgcagcaacctgaaggagaagatgaatgcccccaaccagcccccccacaaggacaccgggaagacagtggagaatgtggaggagtacagctacaagcaggagaagaagatccgggccgccctgcggaccacagagcgggacaggaagaagaatgtgcagtgcagcttcatgctggacagcgtgggcggcagcctgcccaagaagagcatcccagatgtggacctgaacaagccctacctgagcctgggctgcagcaatgccaagctgcctgtgtctgtgcccatgcccatcgcccggcctgcccggcagaccagcaggacagactgcccagctgaccggctgaagttctttgagaccctgcggctgctgctgaagctgacctctgtgtccaagaagaaggaccgggagcagaggggccaggagaacaccagcggcttctggctgaacagaagcaatgaactcatctggctggagctgcaggcctggcatgctggccgcaccatcaatgaccaggacttcttcctgtacacagcccggcaggccatcccagacatcatcaatgagatcctgaccttcaaggtggactatggcagctttgcctttgtgcgggacagagctggcttcaacggcacctctgtggagggccagtgcaaggccaccccaggcaccaagatcgtgggctacagcacccaccacgagcacctgcagaggcagagggtgtcctttgagcaggtgaagaggatcatggagctgctggagtacatcgaggccctgtaccccagcctgcaggccctgcagaaggactatgagaagtatgctgccaaggacttccaggacagagtgcaggccctgtgcctgtggctgaacatcaccaaggacctgaaccagaagctgcgcatcatgggcaccgtgctgggcatcaagaacctgagtgacatcggctggcctgtgtttgagatccccagcccccggcccagcaaaggaaatgaaccagaatatgaaggagatgacacagaaggagagctgaaggagctggagagcagcacagatgaaagtgaggaggagcagatcagtgacccccgggtgcctgagatccggcagcccatcgacaacagctttgacatccagagccgggactgcatcagcaagaagctggagcggctggagagtgaagatgacagcctgggctggggcgccccagactggagcacagaagctggcttcagccgccactgcctgaccagcatctaccggccctttgtggacaaggccctgaagcagatgggcctgaggaagctgatcctgcggctgcacaagctgatggatggcagcctgcagagggccagaattgccctggtgaagaatgacaggcctgtggagttcagcgagttcccagaccccatgtggggcagtgactatgtgcagctgagcaggaccccacccagcagcgaggagaagtgcagcgctgtgtcctgggaggagctgaaggccatggacctgcccagctttgagcccgccttcctggtgctgtgccgggtgctgctgaatgtcatccatgaatgtctgaagctgcggctggagcagaggcctgctggggagcccagcctgctgagcatcaagcagctggtgcgggagtgcaaggaggtgctgaagggcggcctgctgatgaagcagtactaccagttcatgctgcaggaggtgctggaggacctggagaagccagactgcaacattgatgcctttgaggaggacctgcacaagatgctgatggtgtactttgactacatgaggtcctggatccagatgctgcagcagctgccccaggccagccacagcctgaagaacctgctggaggaggagtggaacttcaccaaggagatcacccactacatccggggcggggaggcccaggccggcaagctgttctgtgacattgctggcatgctgctgaagagcacaggcagcttcctggagtttggcctgcaggagagctgtgccgagttctggaccagcgcagatgacagcagcgccagtgatgagatcagaagatctgtgattgagatcagccgggccctgaaggagctgttccacgaggcccgggagcgggccagcaaggccctgggctttgccaagatgctgaggaaggacctggagattgctgctgagttccggctgagcgcccctgtgcgggacctgctggatgtgctgaagagcaagcagtatgtgaaggtgcagatccctggcctggagaacctgcagatgtttgtgcctgacaccctggccgaggagaagagcatcatcctgcagctgctgaatgctgctgctgggaaggactgcagcaaggacagtgatgatgtgctgattgatgcctacctgctgctgaccaagcacggggaccgggcccgggacagcgaggacagctggggcacctgggaggcccagcctgtgaaggtggtgccccaggtggagaccgtggacaccctgcgctccatgcaggtggacaacctgctgctggtggtgatgcagagcgcccacctgaccatccagaggaaggccttccagcagagcattgagggcctgatgaccctgtgccaggagcagaccagcagccagcctgtgattgccaaggccctgcagcagctgaagaatgatgccctggagctgtgcaaccgcatcagcaatgccatcgacagagtggaccacatgttcaccagcgagtttgatgctgaggtggatgaaagtgaatctgtgaccctgcagcagtactaccgggaggccatgatccagggctacaactttggatttgagtaccacaaggaggtggtgcggctgatgtctggagagttccggcagaagatcggggacaagtacatcagctttgccaggaagtggatgaactacgtgctgaccaagtgtgagagcggccggggcacccggccccgctgggccacccagggctttgacttcctgcaggccatcgagcccgccttcatcagcgccctgcctgaagatgacttcctgagcctgcaggccctgatgaatgaatgcatcggccacgtgattggcaagccccacagccctgtgacaggcctgtacctggccatccacaggaacagcccccggcccatgaaggtgccccgctgccacagcgacccccccaacccccacctgatcatccccaccccagagggcttcagcaccaggtccatgcccagtgatgcccggagccacggcagccctgctgctgctgctgctgctgctgctgctgctgtggccgccagccggcccagccccagcggcggggacagcgtgctgcccaagagcatcagcagcgcccatgacacccggggcagctctgtgcctgaaaatgaccggctggccagcattgctgctgagctgcagttccgcagcctgagccgccacagcagccccacagaggagagagatgagcccgcctaccccaggggggacagcagcggcagcacccggcgctcctgggagctgcggaccctcatcagccagagcaaggacacagccagcaagctgggccccatcgaggccatccagaagtctgtgcggctgtttgaggagaagcgctaccgggagatgaggaggaagaacatcatcggccaggtgtgtgacacccccaagagctatgacaacgtgatgcacgtgggcctgaggaaggtgaccttcaagtggcagaggggcaacaagattggagagggccagtatggcaaggtgtacacctgcatctctgtggacacaggagagctgatggccatgaaggagatccgcttccagcccaatgaccacaagaccatcaaggagacagcagatgagctgaagatctttgagggcatcaagcaccccaacctggtgcgctactttggagtggagctgcaccgggaggagatgtacatcttcatggagtactgtgatgagggcaccctggaggaggtgtcccggctgggcctgcaggagcacgtgatccggctgtacagcaagcagatcaccatcgccatcaacgtgctgcatgaacatggaattgtgcaccgggacatcaagggggccaacatcttcctgaccagcagcggcctcatcaagctgggggactttggctgcagcgtgaagctgaagaacaatgcccagaccatgcctggagaggtgaacagcaccctgggcacagctgcctacatggcccctgaggtgatcacccgggccaagggggagggccacggccgggctgctgacatctggagcctgggctgtgtggtgattgagatggtgacaggcaagaggccctggcatgaatatgagcacaacttccagatcatgtacaaggtgggcatgggccacaagccacccatccctgagcggctgagccctgagggcaaggacttcctgagccactgcctggagagtgaccccaagatgcgctggacagccagccagctgctggaccacagctttgtgaaggtgtgcacagatgaggagtag

SEQ ID NO: 160331 - DNA, 5490 bp, Artificial Sequence
  derived and/or modified sequence
gtttccaagatggccgcggcgcgcacggctcctgcggcggggtagaggcggaggcggagtcgagtcactcccgcacttcggggctccggtgccccgcgccaggctgcagcttactgcccgccgcggccatgcggggctccgtgcacggatgagagaagccgctgccgcgctggtccctcctcccgcctttgccgtcacgcctgccgccgccatggaggagccgccgccaccgccgccgccgccaccaccgccaccggaacccgagaccgagtcagaacccgagtgctgcttggcggcgaggcaagagggcacattgggagattcagcttgcaagagtcctgaatctgatctagaagacttctccgatgaaacaaatacagagaatctttatggtacctctccccccagcacacctcgacagatgaaacgcatgtcaaccaaacatcagaggaataatgtggggaggccagccagtcggtctaatttgaaagaaaaaatgaatgcaccaaatcagcctccacataaagacactggaaaaacagtggagaatgtggaagaatacagctataagcaggagaaaaagatccgagcagctcttagaacaacagagcgtgatcgtaaaaaaaatgtacagtgctcattcatgttagactcagtgggtggatctttgccaaaaaaatcaattccagatgtggatctcaataagccttacctcagccttggctgtagcaatgctaagcttccagtatctgtgcccatgcctatagccagacctgcacgccagacttctaggactgactgtccagcagatcgtttaaagttttttgaaactttacgacttttgctaaagcttacctcagtctcaaagaaaaaagacagggagcaaagaggacaagaaaatacgtctggtttctggcttaaccgatctaacgaactgatctggttagagctacaagcctggcatgcaggacggacaattaacgaccaggacttctttttatatacagcccgtcaagccatcccagatattattaatgaaatccttactttcaaagtcgactatgggagcttcgcctttgttagagatagagctggttttaatggtacttcagtagaagggcagtgcaaagccactcctggaacaaagattgtaggttactcaacacatcatgagcatctccaacgccagagggtctcatttgagcaggtaaaacggataatggagctgctagagtacatagaagcactttatccatcattgcaggctcttcagaaggactatgaaaaatatgctgcaaaagacttccaggacagggtgcaggcactctgtttgtggttaaacatcacaaaagacttaaatcagaaattaaggattatgggcactgttttgggcatcaagaatttatcagacattggctggccagtgtttgaaatcccttcccctcgaccatccaaaggtaatgagccggagtatgagggtgatgacacagaaggagaattaaaggagttggaaagtagtacggatgagagtgaagaagaacaaatctctgatcctagggtaccggaaatcagacagcccatagataacagcttcgacatccagtcgcgggactgcatatccaagaagcttgagaggctcgaatctgaggatgattctcttggctggggagcaccagactggagcacagaagcaggctttagtagacattgtctgacttctatttatagaccatttgtagacaaagcactgaagcagatggggttaagaaagttaattttaagacttcacaagctaatggatggttccttgcaaagggcacgtatagcattggtaaagaacgatcgtccagtggagttttctgaatttccagatcccatgtggggttcagattatgtgcagttgtcaaggacaccaccttcatctgaggagaaatgcagtgctgtgtcgtgggaggagctgaaggccatggatttaccttcattcgaacctgccttcctagttctctgccgagtccttctgaatgtcatacatgagtgtctgaagttaagattggagcagagacctgctggagaaccatctctcttgagtattaagcagctggtgagagagtgtaaggaggtcctgaagggcggcctgctgatgaagcagtactaccagttcatgctgcaggaggttctggaggacttggagaagcccgactgcaacattgacgcttttgaagaggatctacataaaatgcttatggtgtattttgattacatgagaagctggatccaaatgctacagcaattacctcaagcatcgcatagtttaaaaaatctgttagaagaagaatggaatttcaccaaagaaataactcattacatacggggaggagaagcacaggccgggaagcttttctgtgacattgcaggaatgctgctgaaatctacaggaagttttttagaatttggcttacaggagagctgtgctgaattttggactagtgcggatgacagcagtgcttccgacgaaatcaggaggtctgttatagagatcagtcgagccctgaaggagctcttccatgaagccagagaaagggcttccaaagcacttggatttgctaaaatgttgagaaaggacctggaaatagcagcagaattcaggctttcagccccagttagagacctcctggatgttctgaaatcaaaacagtatgtcaaggtgcaaattcctgggttagaaaacttgcaaatgtttgttccagacactcttgctgaggagaagagtattattttgcagttactcaatgcagctgcaggaaaggactgttcaaaagattcagatgacgtactcatcgatgcctatctgcttctgaccaagcacggtgatcgagcccgtgattcagaggacagctggggcacctgggaggcacagcctgtcaaagtcgtgcctcaggtggagactgttgacaccctgagaagcatgcaggtggataatcttttactagttgtcatgcagtctgcgcatctcacaattcagagaaaagctttccagcagtccattgagggacttatgactctgtgccaggagcagacatccagtcagccggtcatcgccaaagctttgcagcagctgaagaatgatgcattggagctatgcaacaggataagcaatgccattgaccgcgtggaccacatgttcacatcagaatttgatgctgaggttgatgaatctgaatctgtcaccttgcaacagtactaccgagaagcaatgattcaggggtacaattttggatttgagtatcataaagaagttgttcgtttgatgtctggggagtttagacagaagataggagacaaatatataagctttgcccggaagtggatgaattatgtcctgactaaatgtgagagtggtagaggtacaagacccaggtgggcgactcaaggatttgattttctacaagcaattgaacctgcctttatttcagctttaccagaagatgacttcttgagtttacaagccttgatgaatgaatgcattggccatgtcataggaaaaccacacagtcctgttacaggtttgtaccttgccattcatcggaacagcccccgtcctatgaaggtacctcgatgccatagtgaccctcctaacccacacctcattatccccactccagagggattcagcactcggagcatgccttccgacgcgcggagccatggcagccctgctgctgctgctgctgctgctgctgctgctgttgctgccagtcggcccagcccctctggtggtgactctgtgctgcccaaatccatcagcagtgcccatgataccaggggttccagcgttcctgaaaatgatcgattggcttccatagctgctgaattgcagtttaggtccctgagtcgtcactcaagccccacggaggagcgagatgaaccagcatatccaagaggagattcaagtgggtccacaagaagaagttgggaacttcggacactaatcagccagagtaaagatactgcttctaaactaggacccatagaagctatccagaagtcagtccgattgtttgaagaaaagaggtaccgagaaatgaggagaaagaatatcattggtcaagtttgtgatacgcctaagtcctatgataatgttatgcacgttggcttgaggaaggtgaccttcaaatggcaaagaggaaacaaaattggagaaggccagtatgggaaggtgtacacctgcatcagcgtcgacaccggggagctgatggccatgaaagagattcgatttcaacctaatgaccataagactatcaaggaaactgcagacgaattgaaaatattcgaaggcatcaaacaccccaatctggttcggtattttggtgtggagctccatagagaagaaatgtacatcttcatggagtactgcgatgaggggactttagaagaggtgtcaaggctgggacttcaggaacatgtgattaggctgtattcaaagcagatcaccattgcgatcaacgtcctccatgagcatggcatagtccaccgtgacattaaaggtgccaatatcttccttacctcatctggattaatcaaactgggagattttggatgttcagtaaagctcaaaaacaatgcccagaccatgcctggtgaagtgaacagcaccctggggacagcagcatacatggcacctgaagtcatcactcgtgccaaaggagagggccatgggcgtgcggccgacatctggagtctggggtgtgttgtcatagagatggtgactggcaagaggccttggcatgagtatgagcacaactttcaaattatgtataaagtggggatgggacataagccaccaatccctgaaagattaagccctgaaggaaaggacttcctttctcactgccttgagagtgacccaaagatgagatggaccgccagccagctcctcgaccattcgtttgtcaaggtttgcacagatgaagaatgaagcctagtagaatatggacttggaaaattctcttaatcactactgtatgtaatatttacataaagactgtgctgagaagcagtataagcctttttaaccttccaagactgaagactgcacaggtgacaagcgtcacttctcctgctgctcctgtttgtctgatgtggcaaaaggccctctggagggctggtggccacgaggttaaagaagctgcatgttaagtgccattactactgtacacggaccatcgcctctgtctcctccgtgtctcgcgcgactgagaaccgtgacatcagcgtagtgttttgacctttctaggttcaaaagaagttgtagtgttatcaggcgtcccataccttgtttttaatctcctgtttgttgagtgcactgactgtgaaacctttaccttttttgttgttgttggcaagctgcaggtttgtaatgcaaaaggctgattactgaaatttaagaaaaaggttcttttttcaataaatggtttattttaggaaagctca

SEQ ID NO: 160332 - DNA, 4827 bp, Artificial Sequence
  derived and/or modified sequence
atgcgggaggccgccgccgccctggtgcccccccccgccttcgccgtgacccctgctgctgcgatggaagagcccccccccccaccccctcctccgcccccacctccagagccggagactgagagtgagcctgagtgttgtctcgctgcacggcaggaaggtacacttggggacagcgcatgcaaaagtcccgaatctgatctagaggatttttccgacgaaactaatactgaaaacctgtacggcacctcccccccgtcaaccccccgccagatgaagcgtatgtctaccaagcaccaaagaaataacgtcggccgccccgcaagtaggagcaacctgaaagagaagatgaacgccccaaaccagcccccacacaaagataccgggaaaacagtggaaaacgtggaagaatacagttataaacaagagaagaagatacgagcagctctaagaacgactgaaagggatagaaaaaagaatgtacagtgctcttttatgctcgactcagtaggcggctctctaccaaaaaaaagtatacccgacgttgatttgaacaagccctatctctccctgggatgttcaaacgctaagctgccagtctcagtgccaatgcccattgccagacccgccaggcagaccagtcgaacagactgtccggccgacagacttaagttttttgagactctgaggctcctgcttaaactgacaagcgtgtccaaaaaaaaggaccgtgaacagagaggccaagaaaatactagcggcttctggcttaatagatcaaatgaactcatttggcttgagcttcaggcttggcacgcaggcagaactataaatgatcaggacttcttcttgtacactgccagacaagccatccccgatatcatcaacgagatactcaccttcaaggtggattacggatcttttgcctttgtaagagaccgcgcggggtttaacggcacctccgtagaggggcagtgtaaagctactccaggcacgaaaatagtaggttactctacccatcacgagcatttgcaaaggcagagagtgtcattcgagcaggtcaaaaggataatggagttactggagtacattgaggcgctttatcctagcctacaagccctgcagaaggactacgagaaatatgctgccaaagactttcaggatcgagtccaagcactgtgcttgtggcttaatattaccaaagacttaaaccagaagcttagaattatgggcactgtgctggggatcaaaaatctgtccgacatagggtggcctgtttttgaaatcccatctcctcgcccatctaaaggtaatgagccagaatatgaaggtgatgacaccgagggcgagttgaaggaattggagagctctaccgatgaatctgaggaagagcaaattagtgatcctagagtgcccgaaattagacagcccattgacaattctttcgatattcaatcccgcgattgcatctccaagaagctggagaggctggagtccgaagacgattccctgggctggggtgcccctgactggagcaccgaagctggcttctcccgacactgcctgaccagcatctatcgacccttcgtggataaagccctgaagcaaatgggtttgcggaagctcatcctccgactccacaaacttatggacgggtcactgcagcgagccaggattgctcttgtcaaaaacgatcgcccagtggaatttagcgaatttcctgacccgatgtgggggagcgactacgtgcagctatcccgaacaccccctagttcggaggagaagtgttcggcagtgagctgggaagagcttaaagctatggacttgccctccttcgaaccagcttttttggtgctgtgtcgtgtactgctcaacgtgattcacgagtgtctgaagttgcgccttgagcagcggcctgctggcgagccctcacttctgagtattaagcagctggtacgggaatgcaaggaggtgctgaagggaggtctgttgatgaagcaatattatcagtttatgctacaggaggtgctggaagatctggagaaaccggactgcaacatagacgcttttgaagaagacttacataagatgctgatggtgtattttgattacatgcggtcctggattcagatgctgcagcaactgcctcaagctagccattcactgaaaaacctcttggaggaggagtggaacttcacaaaggagattactcattatattagaggaggtgaagcccaggccggaaagctgttttgcgacattgctggcatgctactcaaaagcacaggaagctttctcgagtttggattacaagagtcctgtgccgagttttggacatcagccgatgactcgagcgcttctgacgagatcaggaggagtgttatcgaaatcagccgcgcactcaaagaacttttccatgaggcacgggagagggcgtccaaggcgttaggctttgctaaaatgttgagaaaagatctagagatcgccgcagagttcagattgagcgcacccgtgcgagatttactggacgtgcttaaaagtaaacagtacgtgaaggtgcagataccagggctggaaaatctgcaaatgtttgttcccgatactctggctgaagagaagagcattatcctccaactgctcaatgcggcagccggtaaggattgttccaaggacagcgatgacgtgctgatcgacgcctatctgctgctgacgaaacatggagacagagctagggactcggaggacagttggggcacatgggaagcgcaacctgtgaaggtggttccacaggtggagacagtcgataccctgcgcagcatgcaggtggacaacctgctgctggttgtgatgcagtcagctcacctgaccatccagcgtaaagcctttcagcaaagcatcgagggcctaatgaccctttgccaggagcaaacatctagccaacccgtgatcgccaaggcactgcagcaactgaagaacgatgcattagaactctgcaatcgcatctccaatgcaattgatcgcgtggatcatatgtttacgagtgagttcgacgctgaggtcgacgaaagcgaaagcgtcaccttacaacagtattaccgggaggccatgattcaaggatacaatttcggtttcgaataccacaaagaggtggtcaggcttatgagcggcgagttccggcagaagattggtgataagtacattagtttcgccaggaaatggatgaattatgtcctcaccaagtgtgagtccggccgagggacccggccccgctgggctacacagggatttgactttctacaagcaatcgaacccgcttttattagtgccttgcccgaggacgactttctgagtctccaggccttgatgaatgaatgcatagggcacgttattgggaagccgcactcccctgtgacaggtctgtaccttgccattcaccgaaactccccccgaccaatgaaggtaccgagatgccactcagatcccccaaatccgcacctgataattccgacccccgaaggattttccacgcggtcaatgccaagcgacgcccgctcacacgggagccctgcagctgcagccgcagccgctgccgcagccgtggcagcaagtcggccttcgccttccggaggagacagtgtgctgccaaagtccataagctccgcccacgatactcgcggatcctctgtcccggagaatgaccgcctagctagcatagccgcagaattgcagtttaggtcactttcaaggcacagctcaccaaccgaggaacgagacgaaccggcgtatcctcggggcgattcttctgggtcgacaagacggtcttgggagctgcgaacactgataagccagtctaaagacactgcctctaagctgggcccaatagaagccattcagaaaagtgtgcgcctcttcgaggagaagcgctatcgcgaaatgcgacgcaaaaatatcatagggcaggtctgcgacacacctaagtcgtacgataatgttatgcacgtgggccttagaaaagtgacctttaagtggcaaaggggtaacaaaattggtgaaggacaatacgggaaggtatacacatgcatctctgtggacacaggggagttaatggcgatgaaagaaattcgattccaaccaaacgatcataaaacaatcaaagagacagcggatgaattgaagatttttgaaggtatcaagcaccctaatctggtgagatactttggagtggagctgcaccgggaggagatgtacatcttcatggaatactgtgacgaaggcacactcgaggaggtgtcacgcctgggactccaggaacatgtgatacggttgtattccaagcagattacaatcgccataaatgtcctgcacgagcatggaattgtccaccgagatattaagggggccaacatttttttaacctcctccgggctgattaagttgggcgacttcggctgctccgtgaagttaaaaaacaacgcccagactatgccgggcgaggtgaactctacccttggaactgccgcttacatggctccagaggtgatcacccgggccaagggagagggtcatgggcgagcagctgatatttggtcattagggtgtgttgtcatcgaaatggtaaccgggaagaggccttggcatgaatacgagcacaactttcagatcatgtataaagttggaatggggcataaaccacctatacccgagagactttcaccagagggtaaggactttttaagccactgcctcgagtctgatccaaagatgcgttggacggctagccagcttctcgatcactcattcgttaaagtctgtactgacgaagagtag

SEQ ID NO: 160333 - DNA, 4827 bp, Artificial Sequence
  derived and/or modified sequence
atgagggaagccgctgccgctctggttccaccacccgctttcgcagtaacccccgcagctgccatggaggagccacctccaccccctccccctccccctccccctccggagccagaaacggaatctgaaccagagtgttgcttggccgcaagacaggaaggcactttgggtgactcagcttgcaaaagcccagaaagcgaccttgaggacttctctgacgagactaacaccgagaacctttacgggactagcccacccagcactcctcggcaaatgaaacggatgagcaccaaacaccagcgcaataacgtgggacggccagcctccagatctaatttaaaggaaaagatgaatgctccaaaccagcccccacacaaagatactggaaaaaccgtggagaatgtggaagaatattcatacaaacaggaaaagaaaatacgtgctgctctgcgcaccacagaacgcgataggaaaaagaatgtgcagtgtagttttatgcttgattccgtgggaggcagcttacccaagaagagcatccctgatgtcgatctcaacaaaccctacctatccctgggttgcagtaacgccaagctcccggtgtctgtacctatgcccattgctcgccctgcaaggcaaacttcccgtacggactgccccgctgatcggcttaaattttttgagaccttgcggctcctgctcaagttgacctccgtgtccaaaaaaaaagaccgggagcagagaggtcaggaaaatacctcgggattttggctcaatcgctccaatgagctgatttggctcgagctccaggcctggcacgctggccgaaccatcaatgaccaggactttttcctgtataccgccaggcaggctatccctgacatcattaacgaaatattaacattcaaggtggattatgggtcctttgcatttgttagagaccgcgcaggcttcaacggaacctccgtggagggacaatgcaaagccaccccgggtaccaaaatcgtagggtattctacccaccatgaacatctgcagcggcaaagggtctcctttgagcaggtgaagaggattatggagctgctggaatacatcgaggcgctctacccttctctccaggccctccagaaggactacgagaaatatgcggcaaaagatttccaagacagagtgcaggcgctgtgcctgtggttgaatatcacgaaggacctgaatcagaagctgcggattatgggaactgtccttgggattaagaatctctccgatattggctggcctgtgttcgaaataccctctcccaggccctcaaaggggaacgaaccagagtacgaaggagatgacaccgagggagagctcaaagaactggagtctagtacggacgagtctgaggaagagcagatctcagatccgagggtgcccgaaattagacagccaatagataactcattcgacattcagtcgcgcgactgcatcagtaagaagcttgaacggctggaatcagaggatgacagtcttggctggggggcacccgattggtccactgaagccggttttagtcggcactgcctgactagcatttaccgtccttttgttgacaaagccctgaagcagatgggccttaggaagctgattctgcgtctgcacaaactcatggacggaagtcttcagcgagcaagaatcgcactggtgaaaaacgaccgtccggttgaattcagtgagtttcccgatccgatgtggggctcagactacgttcagctctcccgaaccccacccagcagcgaggagaagtgcagcgccgtgtcttgggaggagctgaaggccatggatcttccaagtttcgagccagcctttctggtactgtgcagggtgctcctgaacgtcatccatgaatgtctaaagttgcggctcgaacagaggcctgctggggagccttcactgctgtcaataaagcagcttgtcagagaatgtaaggaggtccttaagggcggactgttgatgaagcagtactaccagtttatgctccaggaagtgctcgaggacctggagaagcctgattgcaatattgatgcttttgaggaagacttgcacaagatgttgatggtctatttcgactacatgcgatcctggatccagatgttgcagcaattgccgcaagctagccattcccttaagaatttgcttgaggaggaatggaactttactaaggaaattacacattacatccgcggtggagaggcacaggcagggaaacttttctgtgacatcgcgggaatgctgctgaagtccactggctcatttctcgaattcggacttcaggagagctgcgctgaattctggacatcggcggacgactcctctgcaagtgacgagatccgcaggtccgtgatcgagatttcacgtgccctcaaggaactgtttcacgaggcgagggagcgcgctagcaaagccctgggattcgctaaaatgctgcggaaagatctggagattgctgccgagttccgcctgtctgccccagtaagggacctgttagatgtactgaagagtaaacagtatgttaaagtgcagatcccgggtctggaaaatttgcagatgtttgtccccgacactctagccgaagagaagtcaatcattcttcaacttttgaacgcagccgcaggcaaggactgcagcaaagactctgatgatgtcttgattgatgcctatctgcttctgacaaagcatggcgaccgggctcgcgattctgaggattcttggggcacctgggaggcccagcccgtcaaagttgtacctcaggtggagaccgttgatacgctacggtcaatgcaggtagacaacctgttgttggtggtgatgcagagtgctcacctaacgattcagcgcaaggcctttcagcagtcaatagaaggtctgatgacgctgtgtcaggaacagacctcctcacagccggtgatcgcgaaggcgctgcagcaacttaaaaatgacgcgttagaactgtgcaatcgtatctccaacgccatcgaccgagtcgaccacatgtttacctctgaatttgatgctgaagtcgacgaaagtgaaagtgtgactctacagcagtactatcgggaagcaatgatccaaggctacaactttggattcgagtaccacaaagaagtggtgcgactgatgtctggtgaatttcgacagaagatcggcgacaaatacatatcttttgctcgcaagtggatgaactacgtgctgaccaagtgcgaatcgggacgcggaacgagaccgagatgggccactcaggggttcgactttctgcaggcaattgagccggcattcattagtgccctacccgaagatgattttttgagcctgcaggccctcatgaacgagtgcattggacacgtcattgggaaacctcatagccctgtcaccgggctctacctcgctatccatagaaactcccctaggcccatgaaagttccaagatgccattcagatccacccaatcctcacctgatcatccctacacccgagggattcagcacacgcagcatgccatccgatgcaagatcacatggttcaccagccgcagcagcggctgccgctgcggctgctgttgccgcttctagaccgtccccatccggcggagattccgtgttaccaaaaagcatcagctccgcacacgatacacgcggatcatctgtcccagaaaacgacaggctcgcttctattgctgcagaattacagttccgaagcttgtccagacacagtagtccaacggaagaacgggatgaaccagcgtaccccaggggcgattcttctggttctacccgcaggtcctgggaactgaggactctaatatcccagagcaaggacactgcaagcaaactgggaccgatcgaagccattcagaaatcggtaagactgtttgaagagaaacgatatcgggagatgcggagaaagaatatcatcggtcaggtctgtgacacacctaaaagttacgataatgtgatgcacgtggggctgcgcaaggtgacctttaagtggcaaagaggaaataagatcggcgagggccaatacggaaaggtctacacctgcatctccgtggacactggtgagctgatggcaatgaaagagatccgttttcagcctaatgatcacaaaaccataaaggagacagcagacgagcttaaaattttcgaggggatcaagcacccaaatttagtcagatacttcggggtggaactgcaccgagaagagatgtacatcttcatggagtactgcgatgaaggcaccctcgaagaagtctccaggctgggactgcaggaacatgtcatccgcctctactcaaagcagatcaccatagctattaatgtacttcacgaacatgggattgtccaccgagacattaagggcgcaaacatttttctcaccagtagcggcctcatcaaactcggggacttcggctgctctgttaaacttaagaataacgcacagactatgcccggtgaggttaattccacattgggaaccgcagcttatatggcccctgaagttatcacacgggcaaagggcgaagggcacggcagggcagcagacatctggtctcttggttgtgttgtaattgaaatggtcacagggaaacgtccatggcacgagtatgagcacaacttccagattatgtacaaggtcggaatggggcataagccacccatccccgaaagattgtcacctgaggggaaggactttctgtcccattgccttgagtctgaccccaagatgagatggaccgcctcccagctgctggaccattcgttcgtgaaagtgtgcaccgacgaagaatag

SEQ ID NO: 160334 - DNA, 4827 bp, Artificial Sequence
  derived and/or modified sequence
atgagagaggccgccgccgccctggtgcccccccccgccttcgccgtgacccccgccgccgccatggaggagccccccccccccccccccccccccccccccccccccgagcccgagaccgagagcgagcccgagtgctgcctggccgccagacaggagggcaccctgggcgacagcgcctgcaagagccccgagagcgacctggaggacttcagcgacgagaccaacaccgagaacctgtacggcaccagcccccccagcacccccagacagatgaagagaatgagcaccaagcaccagagaaacaacgtgggcagacccgccagcagaagcaacctgaaggagaagatgaacgcccccaaccagcccccccacaaggacaccggcaagaccgtggagaacgtggaggagtacagctacaagcaggagaagaagatcagagccgccctgagaaccaccgagagagacagaaagaagaacgtgcagtgcagcttcatgctggacagcgtgggcggcagcctgcccaagaagagcatccccgacgtggacctgaacaagccctacctgagcctgggctgcagcaacgccaagctgcccgtgagcgtgcccatgcccatcgccagacccgccagacagaccagcagaaccgactgccccgccgacagactgaagttcttcgagaccctgagactgctgctgaagctgaccagcgtgagcaagaagaaggacagagagcagagaggccaggagaacaccagcggcttctggctgaacagaagcaacgagctgatctggctggagctgcaggcctggcacgccggcagaaccatcaacgaccaggacttcttcctgtacaccgccagacaggccatccccgacatcatcaacgagatcctgaccttcaaggtggactacggcagcttcgccttcgtgagagacagagccggcttcaacggcaccagcgtggagggccagtgcaaggccacccccggcaccaagatcgtgggctacagcacccaccacgagcacctgcagagacagagagtgagcttcgagcaggtgaagagaatcatggagctgctggagtacatcgaggccctgtaccccagcctgcaggccctgcagaaggactacgagaagtacgccgccaaggacttccaggacagagtgcaggccctgtgcctgtggctgaacatcaccaaggacctgaaccagaagctgagaatcatgggcaccgtgctgggcatcaagaacctgagcgacatcggctggcccgtgttcgagatccccagccccagacccagcaagggcaacgagcccgagtacgagggcgacgacaccgagggcgagctgaaggagctggagagcagcaccgacgagagcgaggaggagcagatcagcgaccccagagtgcccgagatcagacagcccatcgacaacagcttcgacatccagagcagagactgcatcagcaagaagctggagagactggagagcgaggacgacagcctgggctggggcgcccccgactggagcaccgaggccggcttcagcagacactgcctgaccagcatctacagacccttcgtggacaaggccctgaagcagatgggcctgagaaagctgatcctgagactgcacaagctgatggacggcagcctgcagagagccagaatcgccctggtgaagaacgacagacccgtggagttcagcgagttccccgaccccatgtggggcagcgactacgtgcagctgagcagaaccccccccagcagcgaggagaagtgcagcgccgtgagctgggaggagctgaaggccatggacctgcccagcttcgagcccgccttcctggtgctgtgcagagtgctgctgaacgtgatccacgagtgcctgaagctgagactggagcagagacccgccggcgagcccagcctgctgagcatcaagcagctggtgagagagtgcaaggaggtgctgaagggcggcctgctgatgaagcagtactaccagttcatgctgcaggaggtgctggaggacctggagaagcccgactgcaacatcgacgccttcgaggaggacctgcacaagatgctgatggtgtacttcgactacatgagaagctggatccagatgctgcagcagctgccccaggccagccacagcctgaagaacctgctggaggaggagtggaacttcaccaaggagatcacccactacatcagaggcggcgaggcccaggccggcaagctgttctgcgacatcgccggcatgctgctgaagagcaccggcagcttcctggagttcggcctgcaggagagctgcgccgagttctggaccagcgccgacgacagcagcgccagcgacgagatcagaagaagcgtgatcgagatcagcagagccctgaaggagctgttccacgaggccagagagagagccagcaaggccctgggcttcgccaagatgctgagaaaggacctggagatcgccgccgagttcagactgagcgcccccgtgagagacctgctggacgtgctgaagagcaagcagtacgtgaaggtgcagatccccggcctggagaacctgcagatgttcgtgcccgacaccctggccgaggagaagagcatcatcctgcagctgctgaacgccgccgccggcaaggactgcagcaaggacagcgacgacgtgctgatcgacgcctacctgctgctgaccaagcacggcgacagagccagagacagcgaggacagctggggcacctgggaggcccagcccgtgaaggtggtgccccaggtggagaccgtggacaccctgagaagcatgcaggtggacaacctgctgctggtggtgatgcagagcgcccacctgaccatccagagaaaggccttccagcagagcatcgagggcctgatgaccctgtgccaggagcagaccagcagccagcccgtgatcgccaaggccctgcagcagctgaagaacgacgccctggagctgtgcaacagaatcagcaacgccatcgacagagtggaccacatgttcaccagcgagttcgacgccgaggtggacgagagcgagagcgtgaccctgcagcagtactacagagaggccatgatccagggctacaacttcggcttcgagtaccacaaggaggtggtgagactgatgagcggcgagttcagacagaagatcggcgacaagtacatcagcttcgccagaaagtggatgaactacgtgctgaccaagtgcgagagcggcagaggcaccagacccagatgggccacccagggcttcgacttcctgcaggccatcgagcccgccttcatcagcgccctgcccgaggacgacttcctgagcctgcaggccctgatgaacgagtgcatcggccacgtgatcggcaagccccacagccccgtgaccggcctgtacctggccatccacagaaacagccccagacccatgaaggtgcccagatgccacagcgacccccccaacccccacctgatcatccccacccccgagggcttcagcaccagaagcatgcccagcgacgccagaagccacggcagccccgccgccgccgccgccgccgccgccgccgccgtggccgccagcagacccagccccagcggcggcgacagcgtgctgcccaagagcatcagcagcgcccacgacaccagaggcagcagcgtgcccgagaacgacagactggccagcatcgccgccgagctgcagttcagaagcctgagcagacacagcagccccaccgaggagagagacgagcccgcctaccccagaggcgacagcagcggcagcaccagaagaagctgggagctgagaaccctgatcagccagagcaaggacaccgccagcaagctgggccccatcgaggccatccagaagagcgtgagactgttcgaggagaagagatacagagagatgagaagaaagaacatcatcggccaggtgtgcgacacccccaagagctacgacaacgtgatgcacgtgggcctgagaaaggtgaccttcaagtggcagagaggcaacaagatcggcgagggccagtacggcaaggtgtacacctgcatcagcgtggacaccggcgagctgatggccatgaaggagatcagattccagcccaacgaccacaagaccatcaaggagaccgccgacgagctgaagatcttcgagggcatcaagcaccccaacctggtgagatacttcggcgtggagctgcacagagaggagatgtacatcttcatggagtactgcgacgagggcaccctggaggaggtgagcagactgggcctgcaggagcacgtgatcagactgtacagcaagcagatcaccatcgccatcaacgtgctgcacgagcacggcatcgtgcacagagacatcaagggcgccaacatcttcctgaccagcagcggcctgatcaagctgggcgacttcggctgcagcgtgaagctgaagaacaacgcccagaccatgcccggcgaggtgaacagcaccctgggcaccgccgcctacatggcccccgaggtgatcaccagagccaagggcgagggccacggcagagccgccgacatctggagcctgggctgcgtggtgatcgagatggtgaccggcaagagaccctggcacgagtacgagcacaacttccagatcatgtacaaggtgggcatgggccacaagccccccatccccgagagactgagccccgagggcaaggacttcctgagccactgcctggagagcgaccccaagatgagatggaccgccagccagctgctggaccacagcttcgtgaaggtgtgcaccgacgaggagtag

SEQ ID NO: 160335 - protein, 621 aa, Artificial Sequence
  derived and/or modified sequence
MEQVPGGSLSALLRSKWGPLKDNEQTIGFYTKQILEGLKYLHDNQIVHRDIKGDNVLINTYSGVLKISDFGTSKRLAGINPCTETFTGTLQYMAPEIIDKGPRGYGKAADIWSLGCTIIEMATGKPPFYELGEPQAAMFKVGMFKVHPEIPESMSAEAKAFILKCFEPDPDKRACANDLLVDEFLKVSSKKKKTQPKLSALSAGSNEYLRSISLPVPVLVEDTSSSSEYGSVSPDTELKVDPFSFKTRAKSCGERDVKGIRTLFLGIPDENFEDHSAPPSPEEKDSGFFMLRKDSERRATLHRILTEDQDKIVRNLMESLAQGAEEPKLKWEHITTLIASLREFVRSTDRKIIATTLSKLKLELDFDSHGISQVQVVLFGFQDAVNKVLRNHNIKPHWMFALDSIIRKAVQTAITILVPELRPHFSLASESDTADQEDLDVEDDHEEQPSNQTVRRPQAVIEDAVATSGVSTLSSTVSHDSQSAHRSLNVQLGRMKIETNRLLEELVRKEKELQALLHRAIEEKDQEIKHLKLKSQPIEIPELPVFHLNSSGTNTEDSELTDWLRVNGADEDTISRFLAEDYTLLDVLYYVTRDDLKCLRLRGGMLCTLWKAIIDFRNKQT

SEQ ID NO: 160336 - protein, 1374 aa, Artificial Sequence
  derived and/or modified sequence
MSTEADEGITFSVPPFAPSGFCTIPEGGICRRGGAAAVGEGEEHQLPPPPPGSFWNVESAAAPGIGCPAATSSSSATRGRGSSVGGGSRRTTVAYVINEASQGQLVVAESEALQSLREACETVGATLETLHFGKLDFGETTVLDRFYNADIAVVEMSDAFRQPSLFYHLGVRESFSMANNIILYCDTNSDSLQSLKEIICQKNTMCTGNYTFVPYMITPHNKVYCCDSSFMKGLTELMQPNFELLLGPICLPLVDRFIQLLKVAQASSSQYFRESILNDIRKARNLYTGKELAAELARIRQRVDNIEVLTADIVINLLLSYRDIQDYDSIVKLVETLEKLPTFDLASHHHVKFHYAFALNRRNLPGDRAKALDIMIPMVQSEGQVASDMYCLVGRIYKDMFLDSNFTDTESRDHGASWFKKAFESEPTLQSGINYAVLLLAAGHQFESSFELRKVGVKLSSLLGKKGNLEKLQSYWEVGFFLGASVLANDHMRVIQASEKLFKLKTPAWYLKSIVETILIYKHFVKLTTEQPVAKQELVDFWMDFLVEATKTDVTVVRFPVLILEPTKIYQPSYLSINNEVEEKTISIWHVLPDDKKGIHEWNFSASSVRGVSISKFEERCCFLYVLHNSDDFQIYFCTELHCKKFFEMVNTITEEKGRSTEEGDCESDLLEYDYEYDENGDRVVLGKGTYGIVYAGRDLSNQVRIAIKEIPERDSRYSQPLHEEIALHKHLKHKNIVQYLGSFSENGFIKIFMEQVPGGSLSALLRSKWGPLKDNEQTIGFYTKQILEGLKYLHDNQIVHRDIKGDNVLINTYSGVLKISDFGTSKRLAGINPCTETFTGTLQYMAPEIIDKGPRGYGKAADIWSLGCTIIEMATGKPPFYELGEPQAAMFKVGMFKVHPEIPESMSAEAKAFILKCFEPDPDKRACANDLLVDEFLKVSSKKKKTQPKLSALSAGSNEYLRSISLPVPVLVEDTSSSSEYGSVSPDTELKVDPFSFKTRAKSCGERDVKGIRTLFLGIPDENFEDHSAPPSPEEKDSGFFMLRKDSERRATLHRILTEDQDKIVRNLMESLAQGAEEPKLKWEHITTLIASLREFVRSTDRKIIATTLSKLKLELDFDSHGISQVQVVLFGFQDAVNKVLRNHNIKPHWMFALDSIIRKAVQTAITILVPELRPHFSLASESDTADQEDLDVEDDHEEQPSNQTVRRPQAVIEDAVATSGVSTLSSTVSHDSQSAHRSLNVQLGRMKIETNRLLEELVRKEKELQALLHRAIEEKDQEIKHLKLKSQPIEIPELPVFHLNSSGTNTEDSELTDWLRVNGADEDTISRFLAEDYTLLDVLYYVTRDDLKCLRLRGGMLCTLWKAIIDFRNKQT

SEQ ID NO: 160337 - protein, 1256 aa, Artificial Sequence
  derived and/or modified sequence
TLQRASGAATEAPRRSEPPPGSGVPSGERAPERRRRRGGEGAARDGSCLARRARSSPELWLARRCGWAGDAAAVAARPGEMSTEADEGITFSVPPFAPSGFCTIPEGGICRRGGAAAVGEGEEHQLPPPPPGSFWNVESAAAPGIGCPAATSSSSATRGRGSSVGGGSRRTTVAYVINEASQGQLVVAESEALQSLREACETVGATLETLHFGKLDFGETTVLDRFYNADIAVVEMSDAFRQPSLFYHLGVRESFSMANNIILYCDTNSDSLQSLKEIICQKNTMCTGNYTFVPYMITPHNKVYCCDSSFMKGLTELMQPNFELLLGPICLPLVDRFIQLLKVAQASSSQYFRESILNDIRKARNLYTGKELAAELARIRQRVDNIEVLTADIVINLLLSYRDIQDYDSIVKLVETLEKLPTFDLASHHHVKFHYAFALNRRNLPGDRAKALDIMIPMVQSEGQVASDMYCLVGRIYKDMFLDSNFTDTESRDHGASWFKKAFESEPTLQSGINYAVLLLAAGHQFESSFELRKVGVKLSSLLGKKGNLEKLQSYWEVGFFLGASVLANDHMRVIQASEKLFKLKTPAWYLKSIVETILIYKHFVKLTTEQPVAKQELVDFWMDFLVEATKTDVTVVRFPVLILEPTKIYQPSYLSINNEVEEKTISIWHVLPDDKKGIHEWNFSASSVRGVSISKFEERCCFLYVLHNSDDFQIYFCTELHCKKFFEMVNTITEEKGRSTEEGDCESDLLEYDYEYDENGDRVVLGKGTYGIVYAGRDLSNQVRIAIKEIPERDSRYSQPLHEEIALHKHLKHKNIVQYLGSFSENGFIKIFMEQVPGGSLSALLRSKWGPLKDNEQTIGFYTKQILEGLKYLHDNQIVHRDIKGDNVLINTYSGVLKISDFGTSKRLAGINPCTETFTGTLQYMAPEIIDKGPRGYGKAADIWSLGCTIIEMATGKPPFYELGEPQAAMFKVGMFKVHPEIPESMSAEAKAFILKCFEPDPDKRACANDLLVDEFLKVSSKKKKTQPKLSDLSIAQAEYLRSISLPVPVLVEDTSSSSEYGSVSPDTELKVDPFSFKTRAKSCGERDVKGIRTLFLGIPDENFEDHSAPPSPEEKDSGFFMLRKDSERRATLHRILTEDQDKIVRNLMESLAQGAEEPKLKWEHITTLIASLREFVRSTDRKIIATTLSKLKLELDFDSHGISQVQVVLFGFQDAVNKVLRNHNIKPHWMFALDSIIRKAVQTAITILVPGIKP

SEQ ID NO: 160338 - DNA, 1866 bp, Artificial Sequence
  derived and/or modified sequence
atggaacaggtacccggcgggtcactgtccgcgcttctgcgctccaaatgggggccattgaaagataatgagcagactatcggcttttacaccaaacagatcctggagggattgaaatatctgcacgataatcagatcgtgcaccgagacatcaagggcgataacgtgctcatcaatacctatagcggagtcctaaagatcagcgacttcgggacatcaaagagactcgcaggaataaatccatgtaccgagactttcaccggaaccctgcagtacatggctcccgagatcatcgataaggggcctcggggctatgggaaggccgccgatatctggtcattaggttgtaccatcatcgagatggccacaggaaagccccccttttacgagctgggggagccccaggctgctatgttcaaagtcgggatgtttaaggtgcaccccgaaattcccgagtccatgtccgctgaggcaaaagccttcatccttaagtgttttgaaccagaccccgataaacgggcatgcgcaaacgatctgctggtcgatgagtttctcaaggtaagttctaagaaaaagaagactcaacccaagctgtcagccctgtcagctggcagtaatgaatatctgagaagcatcagcttgccggtgcctgtgctcgttgaggatacctcttcatccagcgagtacggctccgtctcacctgacaccgagctgaaggtcgaccccttcagtttcaagacgagagccaagagctgcggcgaaagggacgtcaaaggtattaggactctgttcctggggatccctgacgagaatttcgaagatcattctgcacctccctcccccgaagagaaagattccggcttctttatgctcagaaaagattccgagaggcgggctacactgcacagaatcctgactgaagatcaggacaaaattgtgagaaatctgatggagtctctcgctcagggagctgaagagccaaagctcaaatgggagcacatcacgaccctgatcgcctccctgagagaattcgtcagatcaaccgaccgaaagattatcgccaccaccctgtctaaactgaagctggagctggatttcgactctcatggaatttcccaagtgcaggtcgtgttattcgggttccaggatgctgtcaacaaagttctgcggaatcataacatcaaaccacactggatgtttgccctggactcaattatccgtaaagcagtgcagacggcgatcacaattctggttccagagctccgcccgcatttctctttagcctccgagagcgacactgccgatcaggaagacctagacgtggaagatgatcatgaggagcagccgagcaatcagaccgtgagacgcccccaggctgtgatcgaggatgctgtcgccacttctggcgttagcactctatctagcactgtgtcccacgattcacagtccgcccaccggagcctcaacgttcagttgggccgaatgaaaattgagactaatagactgctcgaggagctggttcggaaagaaaaggaattgcaggcgcttctgcatagggcgattgaggaaaaggaccaagagattaagcatctaaaactcaaatctcagcccatcgagatacctgagctgcccgtatttcaccttaactccagcggtacaaatacggaggacagcgagcttactgattggctcagagttaacggcgcggatgaggacaccatctctcggtttttggcggaagattatacgctgctggatgtcctatactacgtcacccgggacgacctgaaatgcctgcgccttcggggtggcatgttgtgtacactctggaaggctataatcgacttcaggaacaagcagacctag

SEQ ID NO: 160339 - DNA, 4125 bp, Artificial Sequence
  derived and/or modified sequence
atgagcaccgaagctgatgaggggattactttcagcgtgccacctttcgcaccgtccgggttctgcacgatacctgagggcggtatatgtaggcgaggtggagctgcagccgtaggcgagggggaagagcatcagctcccgccccctcctccagggtccttttggaacgtcgaaagcgctgctgcacccggcatcggatgtcccgctgccactagcagtagcagtgcaactcgggggcggggaagttctgtgggtggcgggagccgaagaaccaccgtcgcttacgtaatcaatgaggcctcgcaaggccagctggtagtggcagaatctgaggcattgcagagcctgcgcgaggcctgcgagacagtgggcgccacactggaaaccttgcattttggaaagctggattttggagaaacaaccgtgctggacaggttttacaatgccgacatcgccgtcgttgagatgagcgacgccttcagacagccctcattattctaccacctaggcgtcagagaatcattttcaatggctaacaacatcatattgtactgtgacaccaactctgactcactgcagagtcttaaggaaatcatatgccagaagaatacaatgtgcactgggaattacactttcgtgccttatatgattacaccacacaataaagtgtattgttgtgatagttcttttatgaaggggctgaccgagctcatgcaaccaaacttcgagctgctcctagggcctatatgtcttccactggtggacaggttcatccagttattaaaggtggcacaggcgtcatctagtcagtactttcgagagagcatcttaaatgacatccgcaaagcacgaaacttatatacaggcaaagaactggctgccgagctagcgaggatccggcagagggtagataacattgaggtgcttactgcggatatagtaattaatctccttttgtcttaccgtgacatccaagactacgattcgatcgtcaagctcgtggaaaccttagaaaagcttccaaccttcgatctggccagccaccatcacgtgaaatttcattatgcatttgcgctgaaccgacgtaatctccctggtgatcgggccaaagcattagatatcatgattcccatggttcaaagcgaggggcaagttgcttccgacatgtattgcctggtcggacgaatatacaaggatatgttcttggacagtaattttaccgacaccgagtcacgggaccatggggcttcatggtttaagaaggcgttcgagtcagagcccacactgcaatccggaattaactatgcagtactgttgcttgccgcgggacaccaattcgagtctagcttcgagcttcgaaaggtcggcgtgaagctttcctccctactgggtaaaaaaggcaacctagagaagctacagtcctactgggaggtcgggttctttcttggagcttcggtgttggccaatgaccatatgcgggttatacaagcctctgaaaagctgttcaagctgaaaacacctgcttggtacctgaagagtatcgtggagacgattttgatctacaagcactttgtaaagttgactactgaacagcccgttgccaaacaggaactcgttgacttttggatggattttttagtggaagccaccaaaaccgatgtgacggtagtcagattccctgtgctgatcctggagcctactaagatctaccagccatcttacctttctatcaacaatgaggtggaggagaagactatttcgatctggcatgttctccccgatgacaaaaaaggcattcacgaatggaacttcagtgccagtagcgtcagaggagtgtcaatttccaagtttgaagagcgctgttgcttcctctatgttctgcataactccgacgactttcagatctacttctgtaccgaattgcactgcaagaaattttttgaaatggttaatacaattacagaggaaaagggtaggagcacagaagaaggcgattgcgagtccgatcttttagagtacgattacgagtatgatgaaaatggagatcgggtagtcctgggtaagggcacctatggaatagtgtacgccggcagagacctgtctaaccaggtgagaatcgcaattaaggagatccccgagcgtgattcccgctactcccaacctctgcacgaggagattgctcttcacaagcacctgaagcataaaaatatagttcagtacctgggcagcttctccgaaaacgggtttataaaaatcttcatggagcaggtgcccgggggctccctttctgccctgttaagaagcaagtgggggcccctaaaggacaatgagcagaccattggattttataccaagcagatcttggagggcctgaagtaccttcacgacaatcagatcgttcacagggacattaagggagacaacgtcctgataaatacttactccggcgtgctcaagattagcgatttcggtacctcaaaacgcctcgctggcatcaatccctgcaccgagacctttaccggtacactccaatacatggcccccgaaattatcgataaggggccgagagggtacggaaaagcagcggatatatggtcactgggctgcactattatcgaaatggctaccggcaaacctcccttctacgagcttggtgagcctcaagccgctatgttcaaggttgggatgttcaaggtacacccggaaatccccgaaagcatgtctgctgaagccaaggcctttatccttaaatgttttgaaccagacccagataagcgggcgtgtgctaacgatctcctcgtggatgagtttctgaaagttagctctaaaaagaagaaaacacagcccaaactgtcggctctgtcagctgggtccaacgagtatctgcgatctatcagccttcctgtgcccgtcttagtcgaggatacatcatcttcttctgagtacggcagcgtatctcctgacactgagctaaaagtggacccctttagtttcaaaacaagagcgaagtcttgcggcgagagggacgttaaaggaatccggacactgttccttggcattcccgatgagaatttcgaggaccactccgctccaccctcgccagaagagaaggatagtggctttttcatgttgcgaaaggacagcgaacgccgcgcaaccctgcaccggattctgacagaggatcaggacaagatcgtcagaaacctgatggaatccttggctcagggggccgaagagccaaagctcaagtgggagcatattacaactcttatcgccagcctgcgcgagtttgttaggtccaccgaccggaagatcattgctacaaccttatctaagctgaagttggaactggattttgattcccatgggatcagccaggtgcaagtggtcctgtttgggttccaagatgccgtcaacaaggtgttgagaaatcataatattaagccacactggatgttcgccctggacagtattattagaaaagcagtgcagaccgcgattaccatcctggtgccagaactccgtcctcacttttccttagcttccgagagcgatactgcggaccaggaggacctcgacgtggaagacgatcacgaggagcagccaagtaaccaaaccgttcgcagaccccaagctgtgatcgaggacgccgtcgccacgtcaggagtttctaccctgtcctcaacggtttcccacgatagccagagtgcacacagatcactgaacgtccaactcgggcgaatgaagattgagactaatcggctgctagaggagctggtgaggaaagagaaagagctgcaggctctcctgcacagggctatagaagaaaaagatcaagaaatcaaacatttgaaactcaagtctcagcctatcgaaatacctgaactcccagtttttcatctgaactcctcaggcacaaatacggaagatagcgagttgacagactggctgagggtaaatggggcagatgaggacacaatcagtaggttcctagcggaagattacaccctgcttgacgtactgtactatgtcacccgagatgatctgaaatgcctaaggcttcggggagggatgctgtgcaccctgtggaaagccataattgattttagaaataagcagacctag

SEQ ID NO: 160340 - DNA, 3771 bp, Artificial Sequence
  derived and/or modified sequence
acattgcagcgagcctcaggagctgctactgaggcccccagaagaagcgagccacccccagggtcaggcgtgccaagcggcgagagagcccccgaacgtcggcggagacgaggaggagagggcgcagcacgcgacggctcttgcctggcacggagggcccgatcatctcccgagctttggctggcaaggagatgtggatgggccggagatgccgccgccgttgccgcgaggccaggtgagatgtccactgaagcggacgagggaatcacgtttagcgttcccccctttgccccctccgggttctgcaccattccagagggaggcatatgtagacggggtggtgccgcagcagtcggagagggggaggaacaccaacttcccccccccccacctggatctttttggaatgtggaaagcgctgcagcccctggaatcgggtgtccagctgcaaccagtagtagttccgcaacacgagggagggggtcatccgtcgggggtggatcccggagaacaaccgttgcctacgttatcaacgaagcctctcagggccagctcgtggtggcggagtctgaggcattacagagcctgagagaggcttgtgaaactgtcggggccactctcgagactctgcacttcggtaagttagacttcggcgagacaaccgtgctggatcgcttctataacgccgatatagctgtagttgaaatgagcgatgcatttagacagcccagcttgttttaccacctgggtgtgagggaaagcttctcgatggcgaacaacatcatcctctactgcgatacgaatagtgactccctgcagtcgcttaaagagataatctgccagaaaaacactatgtgcaccggaaattatactttcgtaccttatatgatcaccccccacaacaaggtttactgctgtgactcgtcgttcatgaagggcctgaccgaactgatgcaacccaattttgaactgctactcggtcctatttgtctcccgctggtcgatcgtttcattcagctgcttaaggtcgcccaggctagtagtagccagtatttcagggagtctattctgaatgacattcgtaaggctcgcaacctctacaccggcaaagaattagcagcagaactggcaaggatcaggcagcgcgtcgacaatattgaggtgctaaccgccgatatcgtgatcaacttgctgttgtcataccgtgacatccaggattatgacagtatcgtgaagttggtggagaccctggaaaaactgccaacatttgaccttgcatcacatcaccacgtcaagttccactacgccttcgccctaaaccgccgcaacctcccgggggaccgcgccaaggctcttgacattatgattcctatggttcaatcggaaggacaggtggcatccgacatgtattgtctcgtgggacgcatatacaaggatatgttcctggactctaactttacagacaccgagtcacgggaccacggagcgtcatggttcaaaaaggccttcgagagcgaaccaaccctgcagtcaggaataaactacgccgtgctcctgctagcggccggccatcagttcgagtcaagttttgagctccgaaaggtgggggtgaaacttagctccctgctgggcaaaaagggcaacctggaaaagctccagtcgtactgggaggtagggttcttcctgggcgcctccgtccttgcgaatgaccacatgcgcgtgattcaagcatccgaaaagcttttcaagctaaagacgcccgcctggtatcttaagtccatagtagaaactatcctaatctataagcactttgttaaattgaccaccgagcagcccgtagccaagcaggagcttgtcgatttctggatggatttcttggtcgaggcaacaaagacggacgtcaccgtggttagattccccgtcctgattctcgaacctacaaagatctaccagcctagctacttatctatcaataacgaggtggaagagaaaaccatcagcatctggcacgtgctgcctgacgataaaaaaggcatccacgagtggaattttagcgctagctctgtcagaggtgtctcgatctctaaattcgaagaaaggtgttgttttctgtacgtactccataattccgatgattttcagatatacttttgcacagagctccactgtaagaagttcttcgaaatggtgaacactattaccgaggaaaagggaagaagtacagaggagggggactgtgagtccgatttgctggaatatgactatgaatacgatgagaacggcgaccgggtagtgcttgggaaggggacatatgggatagtgtacgcaggccgggacctctcaaatcaggttcgcattgcaattaaggaaattcccgagcgtgactcacggtactcccagcctcttcatgaggagattgcgctgcacaagcacctgaaacacaagaacatagttcagtacctcggctccttctcggagaatgggtttattaaaatctttatggagcaggtgccaggcggctctctgtcagccctactacggtccaagtgggggcccctcaaggacaatgagcagacaatcgggttctataccaaacaaatcctggaaggtctgaaatacctgcacgataaccagatcgtgcatagggatattaaaggggataatgtgttaattaatacttactcaggtgtgcttaagatatcagactttggtacttccaagagactcgccggcatcaacccctgtacagaaacattcaccggcacacttcagtatatggcccctgaaattattgacaagggtccacggggctatgggaaggccgccgatatttggtcactcggctgtacgataattgagatggcaacaggaaaaccccctttctacgaactgggtgagccccaggccgccatgttcaaagtgggaatgtttaaggtgcatcccgaaatccccgagagcatgtccgccgaggcaaaggctttcatcctgaaatgttttgagcctgacccagataagagggcctgtgccaacgatctgttagtagatgaatttctcaaagtttcctctaaaaaaaagaagactcagcccaaactgtccgatctgagcatcgcccaggccgagtacctgcggtcaatcagcctgccagtcccagtgctcgtcgaggacacttcatcaagcagcgagtatgggtccgtcagccccgacacagagcttaaggtggaccccttttctttcaagactcgcgctaagtcttgcggggagagagacgttaagggtatcaggacactctttcttggcattccagacgaaaacttcgaggaccatagcgcccccccaagccccgaagaaaaggattctggcttttttatgctgcggaaagacagtgaacgacgggcaaccctgcaccggatcctaacagaggatcaggataagatagtgagaaatctaatggagtccctggcccaaggcgctgaggagcccaaattgaagtgggagcatatcacaaccttaatcgcctcactgcgtgaattcgttcggtccactgaccgaaaaatcatcgcaaccactctttcaaaactgaagctggagctggatttcgacagtcatgggatttcacaggttcaggttgtgttgttcggctttcaggacgctgtcaataaggttctgcggaatcacaacatcaagcctcactggatgttcgccttggattccattattaggaaagctgtccagactgccatcaccattttggtgccaggaattaagccctag

SEQ ID NO: 160341 - DNA, 1866 bp, Artificial Sequence
  derived and/or modified sequence
atggagcaggtgcctgggggcagcctgagcgccctgctgcggagcaagtggggccccctgaaggacaatgagcagaccatcggcttctacaccaagcagatcctggagggcctgaagtacctgcatgacaaccagatcgtgcaccgggacatcaagggggacaacgtgctgatcaacacctacagcggcgtgctgaagatcagtgactttggcaccagcaagaggctggccggcatcaacccctgcacagagaccttcaccggcaccctgcagtacatggcccctgagatcatcgacaagggcccccggggctacggcaaggctgctgacatctggagcctgggctgcaccatcatcgagatggccaccgggaagccacccttctatgagctgggggagccccaggccgccatgttcaaggtgggcatgttcaaggtgcaccctgagatccctgagagcatgtctgctgaggccaaggccttcatcctgaagtgctttgagccagaccctgacaagagggcctgtgccaatgacctgctggtggatgagttcctgaaggtgagcagcaagaagaagaagacccagcccaagctgagcgccctgtctgctggcagcaatgagtacctgcggagcatcagcctgcctgtgcctgtgctggtggaggacaccagcagcagcagtgaatatggctctgtgtccccagacacagagctgaaggtggaccccttctccttcaagacccgggccaagagctgtggggagagagatgtgaagggcatccgcaccctcttcctgggcatcccagatgagaactttgaggaccacagcgccccacccagccctgaggagaaggacagcggcttcttcatgctgaggaaggacagcgagcggcgggccaccctgcaccgcatcctgacagaggaccaggacaagatcgtgaggaacctgatggagagcctggcccagggcgctgaggagcccaagctgaagtgggagcacatcaccaccctcatcgccagcctgcgggagtttgtgcgcagcacagacaggaagatcatcgccaccaccctgagcaagctgaagctggagctggactttgacagccacggcatcagccaggtgcaggtggtgctgtttggcttccaggatgctgtgaacaaggtgctgaggaaccacaacatcaagccccactggatgtttgccctggacagcatcatcaggaaggctgtgcagacagccatcaccatcctggtgcctgagctgcggccccacttcagcctggccagcgagagtgacacagctgaccaggaggacctggatgtggaggatgaccacgaggagcagcccagcaaccagacagtgagaagaccccaggccgtgattgaagatgctgtggccaccagcggcgtgtccaccctgagcagcacagtgtcccatgacagccagagcgcccacaggagcctgaatgtgcagctgggccgcatgaagattgagaccaaccggctgctggaggagctggtgaggaaggagaaggagctgcaggccctgctgcaccgggccatcgaggagaaggaccaggagatcaagcacctgaagctgaagagccagcccatcgagatccctgagctgcccgtcttccacctgaacagcagcggcaccaacacagaggacagcgagctgacagactggctgcgggtgaatggagcagatgaggacaccatcagccgcttcctggccgaggactacaccctgctggatgtgctgtactacgtgaccagagatgacctgaagtgcctgcggctgcggggcggcatgctgtgcaccctgtggaaggccatcatcgacttcaggaacaagcagacctag

SEQ ID NO: 160342 - DNA, 4125 bp, Artificial Sequence
  derived and/or modified sequence
atgagcacagaagcagatgagggcatcaccttctctgtgcccccatttgcccccagcggcttctgcaccatccctgagggcggcatctgcagaagaggaggagctgctgctgtgggggagggggaggagcaccagctgcccccacctcctcctggcagcttctggaatgtggagagcgctgctgcccctggcatcggctgcccagctgccaccagcagcagcagcgccacccggggccggggcagctctgtgggcggcggcagcaggaggaccaccgtggcctacgtgatcaatgaggccagccagggccagctggtggtggccgagagcgaggccctgcagagcctgcgggaggcctgtgagaccgtgggcgccaccctggagaccctgcactttgggaagctggactttggagagaccaccgtgctggaccgcttctacaatgctgacattgctgtggtggagatgtctgatgccttccggcagcccagcctcttctaccacctgggcgtgcgggagagcttctccatggccaacaacatcatcctgtactgtgacaccaacagcgacagcctgcagagcctgaaggagatcatctgccagaagaacaccatgtgcaccggcaactacacctttgtgccctacatgatcaccccccacaacaaggtgtactgctgtgacagcagcttcatgaagggcctgacagagctgatgcagcccaactttgagctgctgctgggccccatctgcctgcccctggtggaccgcttcatccagctgctgaaggtggcccaggccagcagcagccagtacttccgggagagcatcctgaatgacatcaggaaggccaggaacctgtacaccgggaaggagctggccgctgagctggcccgcatccggcagagggtggacaacatcgaggtgctgacagctgacatcgtcatcaacctgctgctgagctacagagacatccaggactatgacagcatcgtgaagctggtggagaccctggagaagctgcccacctttgacctggccagccaccaccacgtgaagttccactacgcctttgccctgaacagaagaaacctgcccggggaccgggccaaggccctggacatcatgatccccatggtgcagagcgagggccaggtggccagtgacatgtactgcctggtgggccgcatctacaaggacatgttcctggacagcaacttcacagacacagagagccgggaccacggggcctcctggttcaagaaggcctttgaaagtgagcccaccctgcagagcggcatcaactatgctgtgctgctgctggccgccggccaccagtttgagagcagctttgagctgaggaaggtgggcgtgaagctgagcagcctgctgggcaagaagggcaacctggagaagctgcagagctactgggaggtgggcttcttcctgggcgcctctgtgctggccaatgaccacatgagggtcatccaggccagcgagaagctgttcaagctgaagaccccagcctggtacctgaagagcatcgtggagaccatcctgatctacaagcactttgtgaagctgaccacagagcagcctgtggccaagcaggagctggtggacttctggatggacttcctggtggaggccaccaagacagatgtgacagtggtgcgcttccctgtgctgatcctggagcccaccaagatctaccagcccagctacctgagcatcaacaatgaggtggaggagaagaccatcagcatctggcacgtgctgcctgatgacaagaagggcatccacgagtggaacttcagcgccagctctgtgcggggcgtgtccatcagcaagtttgaggagcgctgctgcttcctgtatgtgctgcacaacagtgatgacttccagatctacttctgcacagagctgcactgcaagaagttctttgagatggtgaacaccatcacagaggagaagggccgcagcacagaggagggggactgtgagagtgacctgctggagtatgactatgaatatgatgaaaatggagacagagtggtgctgggcaagggcacctatggaattgtgtatgccggccgggacctgagcaaccaggtgcgcatcgccatcaaggagatccctgagcgggacagccgctacagccagcccctgcacgaggagatcgccctgcacaagcacctgaagcacaagaacatcgtgcagtacctgggcagcttctctgaaaatggcttcatcaagatcttcatggagcaggtgcctgggggcagcctgagcgccctgctgcggagcaagtggggccccctgaaggacaatgagcagaccatcggcttctacaccaagcagatcctggagggcctgaagtacctgcatgacaaccagatcgtgcaccgggacatcaagggggacaacgtgctgatcaacacctacagcggcgtgctgaagatcagtgactttggcaccagcaagaggctggccggcatcaacccctgcacagagaccttcaccggcaccctgcagtacatggcccctgagatcatcgacaagggcccccggggctacggcaaggctgctgacatctggagcctgggctgcaccatcatcgagatggccaccgggaagccacccttctatgagctgggggagccccaggccgccatgttcaaggtgggcatgttcaaggtgcaccctgagatccctgagagcatgtctgctgaggccaaggccttcatcctgaagtgctttgagccagaccctgacaagagggcctgtgccaatgacctgctggtggatgagttcctgaaggtgagcagcaagaagaagaagacccagcccaagctgagcgccctgtctgctggcagcaatgagtacctgcggagcatcagcctgcctgtgcctgtgctggtggaggacaccagcagcagcagtgaatatggctctgtgtccccagacacagagctgaaggtggaccccttctccttcaagacccgggccaagagctgtggggagagagatgtgaagggcatccgcaccctcttcctgggcatcccagatgaaaattttgaggaccacagcgccccacccagccctgaggagaaggacagcggcttcttcatgctgaggaaggacagcgagcggcgggccaccctgcaccgcatcctgacagaggaccaggacaagatcgtgaggaacctgatggagagcctggcccagggcgctgaggagcccaagctgaagtgggagcacatcaccaccctgattgccagcctgcgggagtttgtgcgcagcacagacaggaagatcatcgccaccaccctgagcaagctgaagctggagctggactttgacagccacggcatcagccaggtgcaggtggtgctgtttggcttccaggatgctgtgaacaaggtgctgaggaaccacaacatcaagccccactggatgtttgccctggacagcatcatcaggaaggctgtgcagacagccatcaccatcctggtgcctgagctgcggccccacttcagcctggccagcgagagtgacacagctgaccaggaggacctggatgtggaggatgaccacgaggagcagcccagcaaccagacagtgcggcggccccaggccgtgattgaagatgctgtggccaccagcggcgtgtccaccctgagcagcacagtgtcccatgacagccagagcgcccacaggagcctgaatgtgcagctgggccgcatgaagattgagaccaaccggctgctggaggagctggtgaggaaggagaaggagctgcaggccctgctgcaccgggccatcgaggagaaggaccaggagatcaagcacctgaagctgaagagccagcccatcgagatccctgagctgcctgtgttccacctgaacagcagcggcaccaacacagaagattctgagctgacagactggctgcgggtgaatggagcagatgaggacaccatcagccgcttcctggccgaggactacaccctgctggatgtgctgtactacgtgaccagagatgacctgaagtgcctgcggctgcggggcggcatgctgtgcaccctgtggaaggccatcatcgacttcaggaacaagcagacctag

SEQ ID NO: 160343 - DNA, 3771 bp, Artificial Sequence
  derived and/or modified sequence
accctgcagagggccagcggggccgccacagaggccccccggcgctctgagcccccacctggcagcggcgtgcccagcggggagcgggcccctgagaggagaagaagaagaggaggagagggcgccgccagagatggcagctgcctggcccggcgggcccggagcagccctgagctgtggctggcccggcgctgtggctgggccggagatgctgctgctgtggccgcccggcctggagagatgagcacagaagcagatgagggcatcaccttctctgtgcccccatttgcccccagcggcttctgcaccatccctgagggcggcatctgcagaagaggaggagctgctgctgtgggggagggggaggagcaccagctgcccccacctcctcctggcagcttctggaatgtggagagcgctgctgcccctggcatcggctgcccagctgccaccagcagcagcagcgccacccggggccggggcagctctgtgggcggcggcagcaggaggaccaccgtggcctacgtgatcaatgaggccagccagggccagctggtggtggccgagagcgaggccctgcagagcctgcgggaggcctgtgagaccgtgggcgccaccctggagaccctgcactttgggaagctggactttggagagaccaccgtgctggaccgcttctacaatgctgacattgctgtggtggagatgtctgatgccttccggcagcccagcctcttctaccacctgggcgtgcgggagagcttctccatggccaacaacatcatcctgtactgtgacaccaacagcgacagcctgcagagcctgaaggagatcatctgccagaagaacaccatgtgcaccggcaactacacctttgtgccctacatgatcaccccccacaacaaggtgtactgctgtgacagcagcttcatgaagggcctgacagagctgatgcagcccaactttgagctgctgctgggccccatctgcctgcccctggtggaccgcttcatccagctgctgaaggtggcccaggccagcagcagccagtacttccgggagagcatcctgaatgacatcaggaaggccaggaacctgtacaccgggaaggagctggccgctgagctggcccgcatccggcagagggtggacaacatcgaggtgctgacagctgacatcgtcatcaacctgctgctgagctacagagacatccaggactatgacagcatcgtgaagctggtggagaccctggagaagctgcccacctttgacctggccagccaccaccacgtgaagttccactacgcctttgccctgaacagaagaaacctgcccggggaccgggccaaggccctggacatcatgatccccatggtgcagagcgagggccaggtggccagtgacatgtactgcctggtgggccgcatctacaaggacatgttcctggacagcaacttcacagacacagagagccgggaccacggggcctcctggttcaagaaggcctttgaaagtgagcccaccctgcagagcggcatcaactatgctgtgctgctgctggccgccggccaccagtttgagagcagctttgagctgaggaaggtgggcgtgaagctgagcagcctgctgggcaagaagggcaacctggagaagctgcagagctactgggaggtgggcttcttcctgggcgcctctgtgctggccaatgaccacatgagggtcatccaggccagcgagaagctgttcaagctgaagaccccagcctggtacctgaagagcatcgtggagaccatcctgatctacaagcactttgtgaagctgaccacagagcagcctgtggccaagcaggagctggtggacttctggatggacttcctggtggaggccaccaagacagatgtgacagtggtgcgcttccctgtgctgatcctggagcccaccaagatctaccagcccagctacctgagcatcaacaatgaggtggaggagaagaccatcagcatctggcacgtgctgcctgatgacaagaagggcatccacgagtggaacttcagcgccagctctgtgcggggcgtgtccatcagcaagtttgaggagcgctgctgcttcctgtatgtgctgcacaacagtgatgacttccagatctacttctgcacagagctgcactgcaagaagttctttgagatggtgaacaccatcacagaggagaagggccgcagcacagaggagggggactgtgagagtgacctgctggagtatgactatgaatatgatgaaaatggagacagagtggtgctgggcaagggcacctatggaattgtgtatgccggccgggacctgagcaaccaggtgcgcatcgccatcaaggagatccctgagcgggacagccgctacagccagcccctgcacgaggagatcgccctgcacaagcacctgaagcacaagaacatcgtgcagtacctgggcagcttctctgaaaatggcttcatcaagatcttcatggagcaggtgcctgggggcagcctgagcgccctgctgcggagcaagtggggccccctgaaggacaatgagcagaccatcggcttctacaccaagcagatcctggagggcctgaagtacctgcatgacaaccagatcgtgcaccgggacatcaagggggacaacgtgctgatcaacacctacagcggcgtgctgaagatcagtgactttggcaccagcaagaggctggccggcatcaacccctgcacagagaccttcaccggcaccctgcagtacatggcccctgagatcatcgacaagggcccccggggctacggcaaggctgctgacatctggagcctgggctgcaccatcatcgagatggccaccgggaagccacccttctatgagctgggggagccccaggccgccatgttcaaggtgggcatgttcaaggtgcaccctgagatccctgagagcatgtctgctgaggccaaggccttcatcctgaagtgctttgagccagaccctgacaagagggcctgtgccaatgacctgctggtggatgagttcctgaaggtgagcagcaagaagaagaagacccagcccaagctgagtgacctgagcatcgcccaggccgagtacctgcggagcatcagcctgcctgtgcctgtgctggtggaggacaccagcagcagcagtgaatatggctctgtgtccccagacacagagctgaaggtggaccccttctccttcaagacccgggccaagagctgtggggagagagatgtgaagggcatccgcaccctcttcctgggcatcccagatgaaaattttgaggaccacagcgccccacccagccctgaggagaaggacagcggcttcttcatgctgaggaaggacagcgagcggcgggccaccctgcaccgcatcctgacagaggaccaggacaagatcgtgaggaacctgatggagagcctggcccagggcgctgaggagcccaagctgaagtgggagcacatcaccaccctgattgccagcctgcgggagtttgtgcgcagcacagacaggaagatcatcgccaccaccctgagcaagctgaagctggagctggactttgacagccacggcatcagccaggtgcaggtggtgctgtttggcttccaggatgctgtgaacaaggtgctgaggaaccacaacatcaagccccactggatgtttgccctggacagcatcatcaggaaggctgtgcagacagccatcaccatcctggtgcccggcatcaagccctag

SEQ ID NO: 160344 - DNA, 2999 bp, Artificial Sequence
  derived and/or modified sequence
ggtacctcaagtctattgtagagacaattttaatatataagcattttgtgaaactgaccacagaacagcctgtggccaagcaagaacttgtggacttttggatggatttcctggtcgaggccacaaagacagatgttactgtggttaggtttccagtattaatattagaaccaaccaaaatctatcaaccttcttatttgtctatcaacaatgaagttgaggaaaagacaatctctatttggcacgtgcttcctgatgacaagaaaggtatacatgagtggaattttagtgcctcttctgtcaggggagtgagtatttctaaatttgaagaaagatgctgctttctttatgtgcttcacaattctgatgatttccaaatctatttctgtacagaacttcattgtaaaaagttttttgagatggtgaacaccattaccgaagagaaggggagaagcacagaggaaggagactgtgaaagtgacttgctggagatactctcagcccctgcatgaagaaatagcattgcataaacacctgaagcacaaaaatattgtccagtatctgggctctttcagtgagaatggtttcattaaaatcttcatggagcaggtccctggaggaagtctttctgctctccttcgttccaaatggggtccattaaaagacaatgagcaaacaattggcttttatacaaagcaaatactggaaggattaaaatatctccatgacaatcagatagttcaccgggacataaagggtgacaatgtgttgattaatacctacagtggtgttctcaagatctctgacttcggaacatcaaagaggcttgctggcataaacccctgtactgaaacttttactggtaccctccagtatatggcaccagaaataatagataaaggaccaagaggctacggaaaagcagcagacatctggtctctgggctgtacaatcattgaaatggccacaggaaaacccccattttatgaactgggagaaccacaagcagctatgttcaaggtgggaatgtttaaagtccaccctgagatcccagagtccatgtctgcagaggccaaggcattcatactgaaatgttttgaaccagatcctgacaagagagcctgtgctaacgacttgcttgttgatgagtttttaaaagtttcaagcaaaaagaaaaagacacaacctaagctttcagctctttcagctggatcaaatgaatatctcaggagtatatccttgccggtacctgtgctggtggaggacaccagcagcagcagtgagtacggctcagtttcacccgacacggagttgaaagtggaccccttctctttcaaaacaagagccaagtcctgcggagaaagagatgtcaagggaattcggacactctttttgggcattccagatgagaattttgaagatcacagtgctcctccttcccctgaagaaaaagattctggattcttcatgctgaggaaggacagtgagaggcgagctacccttcacaggatcctgacggaagaccaagacaaaattgtgagaaacctaatggaatctttagctcagggggctgaagaaccgaaactaaaatgggaacacatcacaaccctcattgcaagcctcagagaatttgtgagatccactgaccgaaaaatcatagccaccacactgtcaaagctgaaactggagctggacttcgacagccatggcattagccaagtccaggtggtactctttggttttcaagatgctgtcaataaagttcttcggaatcataacatcaagccgcactggatgtttgccttagacagtatcattcggaaggcggtacagacagccattaccatcctggttccagaactaaggccacatttcagccttgcatctgagagtgatactgctgatcaagaagacttggatgtagaagatgaccatgaggaacagccttcaaatcaaactgtccgaagacctcaggctgtcattgaagatgctgtggctacctcaggcgtgagcacgctcagttctactgtgtctcatgattcccagagtgctcaccggtcactgaatgtacagcttggaaggatgaaaatagaaaccaatagattactggaagaattggttcggaaagagaaagaattacaagcactccttcatcgagctattgaagaaaaagaccaagaaattaaacacctgaagcttaagtcccaacccatagaaattcctgaattgcctgtatttcatctaaattcttctggcacaaatactgaagattctgaacttaccgactggctgagagtgaatggagctgatgaagacactataagccggtttttggctgaagattatacactattggatgttctctactatgttacacgtgatgacttaaaatgcttgagactaaggggagggatgctgtgcacactgtggaaggctatcattgactttcgaaacaaacagacttgactgttgctcaatctaatcttcgatggaaattctaaaaattaatacagagctgatcttcttgggggtgggaaaatcgaagggagaggagaaaggcgctgcactttaaatccagtatttgtttactcatgttaaaaaaaaaaaaaacagacaaaacacactgaaatttcctaactacatctatttctataatttttaaggactcttcataaggactcttaaaataatcctgaacattagaaccctaatgttcaggaagattttaatctaagcatttttatggaaatatttttaatgcagcagctattgcacttcagccaaatgtttatttcacacaaaacggatgtaacatttcatgtgatcgtgcaccactggaacaaaaccaaaatgtgaccataactgtttaggcttctgtgtgtttgtaatatgctctaataatctgagtagaaatgcgtaatttcaattactgtataaagtttatgtttttttaagtgtgcagaatctgagagcaatggtttttacttctctgtgttaat

SEQ ID NO: 160345 - DNA, 5197 bp, Artificial Sequence
  derived and/or modified sequence
cgagcgcggcgcccttgagctgcaccgcggcgcaggtttgcgagccgacttgtcagccggccaagaaaaggaagctccgtcccttcccgctcacccggcttccccaccccttgtactctaaactctgcagagggcgagcggcgcggccacggaggcgccgaggaggagcgagccgccgccgggcagcggcgtgccctcgggggagagggcgccggagaggaggcggcggcgcggcggcgagggcgcggcgcgcgatggcagctgcttagcccggcgggcgcggagcagccccgagctgtggctggccaggcggtgcggctgggcgggggacgccgccgccgttgctgcccggcccggagagatgagcacggaggcggacgagggcatcactttctctgtgccacccttcgccccctcgggcttctgcaccatccccgagggcggcatctgcaggaggggaggagcggcggcggtgggcgagggcgaggagcaccagctgccaccgccgccgccgggcagcttctggaacgtggagagcgccgctgcccctggcatcggttgtccggcggccacctcctcgagcagtgccacccgaggccggggcagctctgttggcgggggcagccgacggaccacggtggcatatgtgatcaacgaagcgagccaagggcaactggtggtggccgagagcgaggccctgcagagcttgcgggaggcgtgcgagacagtgggcgccaccctggaaaccctgcattttgggaaactcgactttggagaaaccaccgtgctggaccgcttttacaatgcagatattgcggtggtggagatgagcgatgccttccggcagccgtccttgttttaccaccttggggtgagagaaagtttcagcatggccaacaacatcatcctctactgtgatactaactcggactctctgcagtcactgaaggaaataatttgccagaagaatactatgtgcactgggaactacacctttgttccttacatgataactccacataacaaagtctactgctgtgacagcagcttcatgaaggggttgacagagctcatgcaaccgaacttcgagctgcttcttggacccatctgcttacctcttgtggatcgttttattcaacttttgaaggtggcacaagcaagttctagccagtacttccgggaatctatactcaatgacatcaggaaagctcgtaatttatacactggtaaagaattggcagctgagttggcaagaattcggcagcgagtagataatatcgaagtcttgacagcagatattgtcataaatctgttactttcctacagagatatccaggactatgattctattgtgaagctggtagagactttagaaaaactgccaacctttgatttggcctcccatcaccatgtgaagtttcattatgcatttgcactgaataggagaaatctccctggtgacagagcaaaagctcttgatattatgattcccatggtgcaaagcgaaggacaagttgcttcagatatgtattgcctagttggtcgaatctacaaagatatgtttttggactctaatttcacggacactgaaagcagagaccatggagcttcttggttcaaaaaggcatttgaatctgagccaacactacagtcaggaattaattatgcggtcctcctcctggcagctggacaccagtttgaatcttcctttgagctccggaaagttggggtgaagctaagtagtcttcttggtaaaaagggaaacttggaaaaactccagagctactgggaagttggattttttctgggggccagcgtcctagccaatgaccacatgagagtcattcaagcatctgaaaagctttttaaactgaagacaccagcatggtacctcaagtctattgtagagacaattttaatatataagcattttgtgaaactgaccacagaacagcctgtggccaagcaagaacttgtggacttttggatggatttcctggtcgaggccacaaagacagatgttactgtggttaggtttccagtattaatattagaaccaaccaaaatctatcaaccttcttatttgtctatcaacaatgaagttgaggaaaagacaatctctatttggcacgtgcttcctgatgacaagaaaggtatacatgagtggaattttagtgcctcttctgtcaggggagtgagtatttctaaatttgaagaaagatgctgctttctttatgtgcttcacaattctgatgatttccaaatctatttctgtacagaacttcattgtaaaaagttttttgagatggtgaacaccattaccgaagagaaggggagaagcacagaggaaggagactgtgaaagtgacttgctggagtatgactatgaatatgatgaaaatggtgacagagtcgttttaggaaaaggcacttatgggatagtctacgcaggtcgggacttgagcaaccaagtcagaattgctattaaggaaatcccagagagagacagcagatactctcagcccctgcatgaagaaatagcattgcataaacacctgaagcacaaaaatattgtccagtatctgggctctttcagtgagaatggtttcattaaaatcttcatggagcaggtccctggaggaagtctttctgctctccttcgttccaaatggggtccattaaaagacaatgagcaaacaattggcttttatacaaagcaaatactggaaggattaaaatatctccatgacaatcagatagttcaccgggacataaagggtgacaatgtgttgattaatacctacagtggtgttctcaagatctctgacttcggaacatcaaagaggcttgctggcataaacccctgtactgaaacttttactggtaccctccagtatatggcaccagaaataatagataaaggaccaagaggctacggaaaagcagcagacatctggtctctgggctgtacaatcattgaaatggccacaggaaaacccccattttatgaactgggagaaccacaagcagctatgttcaaggtgggaatgtttaaagtccaccctgagatcccagagtccatgtctgcagaggccaaggcattcatactgaaatgttttgaaccagatcctgacaagagagcctgtgctaacgacttgcttgttgatgagtttttaaaagtttcaagcaaaaagaaaaagacacaacctaagctttcagctctttcagctggatcaaatgaatatctcaggagtatatccttgccggtacctgtgctggtggaggacaccagcagcagcagtgagtacggctcagtttcacccgacacggagttgaaagtggaccccttctctttcaaaacaagagccaagtcctgcggagaaagagatgtcaagggaattcggacactctttttgggcattccagatgagaattttgaagatcacagtgctcctccttcccctgaagaaaaagattctggattcttcatgctgaggaaggacagtgagaggcgagctacccttcacaggatcctgacggaagaccaagacaaaattgtgagaaacctaatggaatctttagctcagggggctgaagaaccgaaactaaaatgggaacacatcacaaccctcattgcaagcctcagagaatttgtgagatccactgaccgaaaaatcatagccaccacactgtcaaagctgaaactggagctggacttcgacagccatggcattagccaagtccaggtggtactctttggttttcaagatgctgtcaataaagttcttcggaatcataacatcaagccgcactggatgtttgccttagacagtatcattcggaaggcggtacagacagccattaccatcctggttccagaactaaggccacatttcagccttgcatctgagagtgatactgctgatcaagaagacttggatgtagaagatgaccatgaggaacagccttcaaatcaaactgtccgaagacctcaggctgtcattgaagatgctgtggctacctcaggcgtgagcacgctcagttctactgtgtctcatgattcccagagtgctcaccggtcactgaatgtacagcttggaaggatgaaaatagaaaccaatagattactggaagaattggttcggaaagagaaagaattacaagcactccttcatcgagctattgaagaaaaagaccaagaaattaaacacctgaagcttaagtcccaacccatagaaattcctgaattgcctgtatttcatctaaattcttctggcacaaatactgaagattctgaacttaccgactggctgagagtgaatggagctgatgaagacactataagccggtttttggctgaagattatacactattggatgttctctactatgttacacgtgatgacttaaaatgcttgagactaaggggagggatgctgtgcacactgtggaaggctatcattgactttcgaaacaaacagacttgactgttgctcaatctaatcttcgatggaaattctaaaaattaatacagagctgatcttcttgggggtgggaaaatcgaagggagaggagaaaggcgctgcactttaaatccagtatttgtttactcatgttaaaaaaaaaaaaaacagacaaaacacactgaaatttcctaactacatctatttctataatttttaaggactcttcataaggactcttaaaataatcctgaacattagaaccctaatgttcaggaagattttaatctaagcatttttatggaaatatttttaatgcagcagctattgcacttcagccaaatgtttatttcacacaaaacggatgtaacatttcatgtgatcgtgcaccactggaacaaaaccaaaatgtgaccataactgtttaggcttctgtgtgtttgtaatatgctctaataatctgagtagaaatgcgtaatttcaattactgtataaagtttatgtttttttaagtgtgcagaatctgagagcaatggtttttacttctctgtgttaattgtaatattgactctattttgtaacttaagtttctgacctgtcgtacatttgtttgagtcgtttatgtactactgaactgtaccagttgcacatgcttgaactgtagtaatgttagcttgttctaaagctatccattgtgtcatatttactctaaaaattaaagagactctcaacata

SEQ ID NO: 160346 - DNA, 3889 bp, Artificial Sequence
  derived and/or modified sequence
cgagcgcggcgcccttgagctgcaccgcggcgcaggtttgcgagccgacttgtcagccggccaagaaaaggaagctccgtcccttcccgctcacccggcttccccaccccttgtactctaaactctgcagagggcgagcggcgcggccacggaggcgccgaggaggagcgagccgccgccgggcagcggcgtgccctcgggggagagggcgccggagaggaggcggcggcgcggcggcgagggcgcggcgcgcgatggcagctgcttagcccggcgggcgcggagcagccccgagctgtggctggccaggcggtgcggctgggcgggggacgccgccgccgttgctgcccggcccggagagatgagcacggaggcggacgagggcatcactttctctgtgccacccttcgccccctcgggcttctgcaccatccccgagggcggcatctgcaggaggggaggagcggcggcggtgggcgagggcgaggagcaccagctgccaccgccgccgccgggcagcttctggaacgtggagagcgccgctgcccctggcatcggttgtccggcggccacctcctcgagcagtgccacccgaggccggggcagctctgttggcgggggcagccgacggaccacggtggcatatgtgatcaacgaagcgagccaagggcaactggtggtggccgagagcgaggccctgcagagcttgcgggaggcgtgcgagacagtgggcgccaccctggaaaccctgcattttgggaaactcgactttggagaaaccaccgtgctggaccgcttttacaatgcagatattgcggtggtggagatgagcgatgccttccggcagccgtccttgttttaccaccttggggtgagagaaagtttcagcatggccaacaacatcatcctctactgtgatactaactcggactctctgcagtcactgaaggaaataatttgccagaagaatactatgtgcactgggaactacacctttgttccttacatgataactccacataacaaagtctactgctgtgacagcagcttcatgaaggggttgacagagctcatgcaaccgaacttcgagctgcttcttggacccatctgcttacctcttgtggatcgttttattcaacttttgaaggtggcacaagcaagttctagccagtacttccgggaatctatactcaatgacatcaggaaagctcgtaatttatacactggtaaagaattggcagctgagttggcaagaattcggcagcgagtagataatatcgaagtcttgacagcagatattgtcataaatctgttactttcctacagagatatccaggactatgattctattgtgaagctggtagagactttagaaaaactgccaacctttgatttggcctcccatcaccatgtgaagtttcattatgcatttgcactgaataggagaaatctccctggtgacagagcaaaagctcttgatattatgattcccatggtgcaaagcgaaggacaagttgcttcagatatgtattgcctagttggtcgaatctacaaagatatgtttttggactctaatttcacggacactgaaagcagagaccatggagcttcttggttcaaaaaggcatttgaatctgagccaacactacagtcaggaattaattatgcggtcctcctcctggcagctggacaccagtttgaatcttcctttgagctccggaaagttggggtgaagctaagtagtcttcttggtaaaaagggaaacttggaaaaactccagagctactgggaagttggattttttctgggggccagcgtcctagccaatgaccacatgagagtcattcaagcatctgaaaagctttttaaactgaagacaccagcatggtacctcaagtctattgtagagacaattttaatatataagcattttgtgaaactgaccacagaacagcctgtggccaagcaagaacttgtggacttttggatggatttcctggtcgaggccacaaagacagatgttactgtggttaggtttccagtattaatattagaaccaaccaaaatctatcaaccttcttatttgtctatcaacaatgaagttgaggaaaagacaatctctatttggcacgtgcttcctgatgacaagaaaggtatacatgagtggaattttagtgcctcttctgtcaggggagtgagtatttctaaatttgaagaaagatgctgctttctttatgtgcttcacaattctgatgatttccaaatctatttctgtacagaacttcattgtaaaaagttttttgagatggtgaacaccattaccgaagagaaggggagaagcacagaggaaggagactgtgaaagtgacttgctggagtatgactatgaatatgatgaaaatggtgacagagtcgttttaggaaaaggcacttatgggatagtctacgcaggtcgggacttgagcaaccaagtcagaattgctattaaggaaatcccagagagagacagcagatactctcagcccctgcatgaagaaatagcattgcataaacacctgaagcacaaaaatattgtccagtatctgggctctttcagtgagaatggtttcattaaaatcttcatggagcaggtccctggaggaagtctttctgctctccttcgttccaaatggggtccattaaaagacaatgagcaaacaattggcttttatacaaagcaaatactggaaggattaaaatatctccatgacaatcagatagttcaccgggacataaagggtgacaatgtgttgattaatacctacagtggtgttctcaagatctctgacttcggaacatcaaagaggcttgctggcataaacccctgtactgaaacttttactggtaccctccagtatatggcaccagaaataatagataaaggaccaagaggctacggaaaagcagcagacatctggtctctgggctgtacaatcattgaaatggccacaggaaaacccccattttatgaactgggagaaccacaagcagctatgttcaaggtgggaatgtttaaagtccaccctgagatcccagagtccatgtctgcagaggccaaggcattcatactgaaatgttttgaaccagatcctgacaagagagcctgtgctaacgacttgcttgttgatgagtttttaaaagtttcaagcaaaaagaaaaagacacaacctaagctttcagatctgtccatagcacaagcagaatatctcaggagtatatccttgccggtacctgtgctggtggaggacaccagcagcagcagtgagtacggctcagtttcacccgacacggagttgaaagtggaccccttctctttcaaaacaagagccaagtcctgcggagaaagagatgtcaagggaattcggacactctttttgggcattccagatgagaattttgaagatcacagtgctcctccttcccctgaagaaaaagattctggattcttcatgctgaggaaggacagtgagaggcgagctacccttcacaggatcctgacggaagaccaagacaaaattgtgagaaacctaatggaatctttagctcagggggctgaagaaccgaaactaaaatgggaacacatcacaaccctcattgcaagcctcagagaatttgtgagatccactgaccgaaaaatcatagccaccacactgtcaaagctgaaactggagctggacttcgacagccatggcattagccaagtccaggtggtactctttggttttcaagatgctgtcaataaagttcttcggaatcataacatcaagccgcactggatgtttgccttagacagtatcattcggaaggcggtacagacagccattaccatcctggttccaggaataaagccc

SEQ ID NO: 160347 - DNA, 1866 bp, Artificial Sequence
  derived and/or modified sequence
atggagcaggtgcccggcggcagcctgagcgccctgctgcggagcaagtggggcccccttaaagataatgagcaaaccatcgggttttataccaagcagatcctggagggcctgaaatacctgcatgataatcaaatcgtgcatagagacatcaaaggagacaatgtgcttatcaatacctatagcggggtgctgaagatctccgattttggcacttccaagaggctggctgggatcaacccctgcacggaaacctttaccggtacactgcaatacatggctccagagattatagacaaagggccaaggggctatgggaaggcggccgacatttggagtctgggctgcacaatcatcgagatggctactgggaagccgcccttctacgagctgggagaaccgcaggcagctatgttcaaggtgggaatgttcaaagtgcaccccgaaattccagaatcaatgtccgctgaagcgaaagcctttatactgaagtgcttcgagccagaccccgataaacgcgcttgtgctaacgatttgctcgtggacgaattcctcaaagtgtcgtctaagaaaaagaaaactcagccgaagttgagcgccctgagtgctggcagcaacgaatatttaagaagcatatcactgcccgtccctgttctggtggaagacacgagcagttcttccgagtatggatctgtgtctcccgacactgagcttaaagtggatccattctcttttaagacaagggctaagtcctgcggggaaagagacgttaagggcatccgtacgctgtttctcggcatccccgatgagaactttgaggaccattccgcgccgccttccccagaggagaaagattcaggattcttcatgctgaggaaagatagcgagaggcgtgcgaccctccatcgcattcttaccgaggaccaggataagatcgttaggaacctcatggaatcccttgcccaaggcgcagaagagcctaaacttaagtgggagcacatcaccacactgatcgcctccctaagagagttcgtgcgctctactgatcgtaaaatcattgccactacactttcaaagctaaagctggagttagacttcgattctcatggaatttctcaggtgcaagtagttcttttcggattccaggacgcagtaaataaagtgctacggaatcacaatattaagccgcactggatgtttgccctggattccattatccgtaaagccgtgcagacggcaataactatactggtgcccgagctccgacctcacttctcgttggcttctgaatccgacaccgccgatcaggaggacctcgatgtggaagacgatcacgaggaacaaccatccaaccaaaccgtgaggagaccccaggctgtcatagaggacgcagtcgccacaagcggagtctcaaccttgtccagcaccgtttcccacgacagccagtccgcgcaccgaagccttaatgtccagctgggtaggatgaagattgagactaacaggctgttggaggagttggtgcgtaaagagaaagagctacaggctctcctgcatcgcgctatcgaggaaaaagatcaagaaatcaagcacctcaaactgaagtcccagcccatcgagatcccagagctccccgtgtttcacctcaacagctctgggaccaatacggaggacagcgagttgaccgattggctgcgcgtaaatggtgccgacgaggacacaatttctaggttcctcgccgaggactatacgctgctggatgttctctattatgtcactagggatgacctgaagtgcctgaggctcagagggggaatgctctgtaccctgtggaaggcaataattgactttcgaaataagcagacttag

SEQ ID NO: 160348 - DNA, 4125 bp, Artificial Sequence
  derived and/or modified sequence
atgagcaccgaggccgacgagggcatcaccttcagcgtgcccccctttgcccccagcggcttctgtactatccccgaggggggcatctgtagacgcgggggtgctgccgcagttggtgagggtgaggaacaccagcttcccccaccacccccaggaagcttctggaacgtcgagagtgccgcggcaccaggcattgggtgtcccgctgcgacctcttcctctagcgcaacgcgtggacggggatctagcgtggggggggggtcccggaggaccaccgttgcttacgtgatcaacgaagcttctcaggggcagttggtggtggccgagagtgaggctctccaatcactgagagaggcttgcgagacagtaggagcgacattagaaactctgcacttcggcaaactggacttcggggagaccaccgtgctcgataggttttataatgcggacattgctgtggtggagatgtcagatgcgtttagacagccatcattattctaccatctgggcgttcgggaatctttcagcatggccaacaatatcatcctgtactgcgatactaactccgattcgctgcagtccttaaaggaaatcatctgccaaaagaacactatgtgtactggtaattatacattcgtaccgtacatgataacaccacacaacaaggtttactgctgtgatagtagcttcatgaaaggattgaccgagttgatgcagcctaattttgagttgctcctgggtcctatctgcctgccccttgttgacagattcattcagctgttgaaggtcgcccaagcgtcctcctcccagtatttccgagagtctatcctcaatgatatacgcaaagcacgcaacctctatactggaaaggagctggccgctgagctggcacgtattcggcagcgtgttgacaatattgaggttctcacagccgatattgttattaacctgcttctgagctatagggatattcaagactacgactcgattgtgaaactggttgagacactagagaaactgcccactttcgacctggcgagccatcaccacgtcaagtttcattatgcctttgccctgaacagacggaatttgcccggggaccgtgcaaaagccttggatattatgattcccatggttcagagtgagggtcaggtagccagcgacatgtactgtcttgtggggagaatctacaaggacatgttccttgattctaactttaccgacaccgagagcagggaccacggtgcttcctggttcaaaaaagccttcgaatctgagccaaccctgcagagtggcattaactatgccgtgctactcctagccgctggccaccagttcgaatcctcgttcgagctgaggaaagtgggtgtgaagcttagctctttgttgggtaaaaaaggaaatcttgaaaaattgcagagctactgggaggtaggattttttctgggagcctctgttctggcaaatgaccacatgagagtgattcaggcaagtgagaagttgtttaaactcaagacccctgcctggtatcttaaatccatagtagagaccattctgatttataagcacttcgtgaagctcactacagagcagccagtagccaagcaagagttagtggatttctggatggattttctcgtggaagccactaagaccgatgtaacagtggtccgctttcctgtactaatccttgagcccactaaaatttaccagcccagctacttatctattaataacgaggtggaggaaaagaccatctctatctggcacgtgcttccagatgacaagaaagggatacatgagtggaatttctcagcctctagcgttcgcggcgtgtccatcagtaagtttgaagaacggtgttgctttctgtatgtactacacaacagtgacgattttcagatttatttctgcacagagttgcattgcaaaaaattcttcgagatggtgaacaccattaccgaggaaaaggggcgctctaccgaagaaggcgactgtgaatcagatttgctggagtatgactacgagtacgacgagaatggcgaccgagttgtcttaggaaagggcacgtacggcatcgtctacgcaggccgcgatctgagcaaccaggttaggatcgctataaaagaaatcccagagagagacagtagatacagccagccgctgcacgaggagatcgcactccacaaacacctgaaacacaagaatattgtccagtatttaggcagcttttccgagaatggctttatcaaaatcttcatggaacaagtcccagggggcagtttgagtgcactcctccggagcaagtggggccctcttaaagacaacgagcagacaataggattctacacaaaacaaatccttgagggcttgaaatacttgcatgataatcagattgtccaccgtgacattaaaggcgataacgtgcttattaacacatattctggggttctgaaaatcagtgatttcggaaccagcaaacgcctggccggtatcaacccctgcaccgagacgttcacaggcacacttcagtacatggcaccggaaattatcgataagggtccacgagggtatggcaaggcggcggatatttggtcattggggtgtaccatcattgagatggcgacagggaaaccgcctttttacgagctgggagagccacaagcggctatgttcaaggtgggaatgttcaaggtccatcccgagatccctgaaagcatgagcgctgaggccaaagcctttatcctgaaatgctttgagcccgacccagacaagcgggcttgcgccaacgacctccttgttgatgagtttcttaaggtatcctctaaaaaaaagaagacgcagcccaaactcagcgcgttatcagctggatccaacgagtacctgcgctctattagtttacccgtgccggtcctggtggaagatacgtcatcgagcagcgaatacggatccgtttcccctgacactgaactgaaggtggaccccttttcattcaagacccgcgctaagagctgcggcgaacgggacgtcaagggcatacggaccctgttcctgggtatacctgacgagaattttgaagatcactctgcccctccgtcacccgaagagaaggatagcgggttctttatgttgcggaaagattcagagagacgtgcaaccctgcatcgcattctcacagaggaccaggataagatcgtgaggaaccttatggagagtctggcccagggagctgaagaacccaaacttaaatgggaacacattactacacttatcgcaagccttagggagttcgtgcgctccacagaccggaagattatagctaccactctctccaaattgaagctggagcttgattttgatagccacggcatctctcaggttcaggttgttctattcggattccaggacgccgtcaacaaggtgttgcggaatcacaacataaaacctcactggatgtttgccctcgatagcattattagaaaggcagtgcagaccgctatcacaattctggtgccggaattgagaccacattttagcctggcatctgaatctgataccgcagatcaggaggacctggatgtggaggacgatcacgaagaacaaccatctaaccagaccgtccggcgtccgcaggccgtgattgaggatgctgtggccaccagtggtgtgtcaactctgagttccacggtctcccacgattctcagtccgcccatcggagcctcaatgtccaactcgggcggatgaagattgaaacaaacagactcctggaagagctggttcggaaggagaaggaactgcaggcactgttgcaccgggcgattgaagaaaaagaccaagaaatcaaacacctcaagttgaagtctcaaccaattgagatcccagagcttcccgtcttccacctcaattcatcaggcacaaacactgaagactctgaactcactgattggctgagagttaatggagctgacgaggacacaatcagccggtttctggcagaggattatacactcctggatgtactgtactatgtgacccgggatgaccttaaatgtctaaggcttagaggcggaatgctctgcactctgtggaaggcaatcattgatttccgtaacaagcagacttag

SEQ ID NO: 160349 - DNA, 3771 bp, Artificial Sequence
  derived and/or modified sequence
accctgcagcgggccagcggcgccgccaccgaggccccccggcggagtgaacctccccctggcagcggtgtgccctcaggtgagcgcgctccagaacggagacggcggcggggcggagaaggcgccgcccgtgatggatcatgcctcgcccgtcgcgcgcgatcaagcccagaactgtggctggccagaaggtgcggctgggctggcgatgccgcagcggtcgctgcgcgacctggagagatgagcacagaggctgacgagggcatcacattttccgtgcctccatttgctcccagtgggttttgtaccattcccgagggcggcatctgtcgacgcggtggggcagcagctgtgggggagggggaggaacatcagctgcccccaccgccaccgggtagtttctggaatgtggaaagcgccgctgctccaggcatcgggtgccctgcagctacctcaagctcttccgcgactagggggagaggttcttcagtgggcggcggatccaggcgtacaacagtggcctacgttattaacgaggcatcccagggccaactcgtggtcgctgaatccgaggctctgcagagcctccgagaggcctgcgagaccgttggcgctacactcgagacgctccatttcggcaagttagatttcggggagactactgtgctcgataggttttacaacgccgacatcgctgtcgtggagatgtctgacgccttccggcagccctcactgttctatcacctgggcgtacgggagtccttttcaatggctaataatattatcctgtattgcgatactaactccgactccctgcaaagtctcaaagagatcatctgccaaaagaacacaatgtgcacaggcaattatacgtttgtgccttatatgataactccacacaataaagtgtattgctgcgacagtagctttatgaaagggctcacagagctgatgcaaccaaactttgagctgctgctgggccccatatgcttaccgcttgttgacaggtttatccagctgttgaaagtggcgcaagcctcatcaagtcagtacttccgtgagagcattctcaacgatatccgaaaggcacggaacctgtataccgggaaggaacttgcggcggagcttgccaggatccgacaaagagtcgataacattgaggtgctcacagccgacatcgtgattaatttgctgctgtcttatagggacattcaggattatgactctattgtgaaattagtcgaaacattagaaaaactgcctactttcgacctggcgtcccaccatcacgtcaagttccattacgctttcgctctcaatcgcagaaatctgcccggggatagagccaaggcattggatataatgattccaatggtgcagtcagagggccaagttgccagcgacatgtattgcttggtgggcagaatctataaagatatgttccttgactcaaactttacagataccgagtctcgtgatcacggggcgtcctggttcaagaaagcatttgagtcagagcccaccttgcagtcaggcattaattacgctgtactcctcctggccgcaggacaccaatttgaatcgagctttgagttgagaaaagttggagtgaagctctctagcctgctaggcaagaagggaaatttggaaaagttgcagtcatattgggaggttggattttttttgggtgctagcgtacttgctaacgaccacatgagggtgattcaggcctcagaaaagctgtttaaacttaaaactcccgcttggtatctgaaaagtattgtcgagaccatcctgatctacaagcatttcgtgaagctcaccaccgagcagccagtggccaagcaggagcttgtcgatttttggatggattttctcgttgaggccaccaagacagacgtgaccgtggttagattccccgttcttatcctcgagccaaccaagatctatcagccgagttacttgtctatcaataacgaagtggaggagaagactatctcaatttggcacgttttacctgacgacaagaagggaatccatgagtggaacttctctgccagttcggtcagaggagtttccatctccaagtttgaagagcgctgctgctttctgtatgtcctgcacaattctgacgacttccaaatatatttttgcaccgaactgcactgtaaaaagttcttcgaaatggtgaatactatcactgaggagaaaggaaggtccactgaggaaggcgactgcgaaagcgaccttctggaatatgactatgagtacgatgagaatggcgatcgggtagtcctgggtaaaggcacttatgggatcgtatacgcaggcagggatttatccaatcaggttcgtatcgccatcaaagaaatcccagagcgcgattcccgttattctcaacctttgcacgaagagatcgcgcttcataagcacctaaagcacaagaacatagtgcagtacttgggctcattttcagagaatggattcataaaaatttttatggagcaggttcccggcgggtccctgtccgccctgctgcggagcaaatggggtccgttgaaagataacgagcagacaattggcttctacacaaagcaaattctggagggattgaagtatcttcacgataaccagattgtgcaccgtgatattaagggcgacaatgtccttatcaacacttattcaggtgttctcaagatcagcgactttgggacctcgaagagactggccgggatcaatccctgcactgaaacctttaccggaaccctacagtacatggcaccagagattattgacaaaggcccgagaggctatggtaaagccgccgacatctggagcttggggtgcactattatcgaaatggccacgggcaagccacccttttatgagcttggtgaaccccaggcagcgatgttcaaggtgggcatgtttaaggtgcacccagagattcctgaatcaatgtctgccgaggctaaggccttcattttaaaatgcttcgagccggacccagataagcgcgcttgcgctaacgacctgctagtggatgagtttttgaaggtcagctctaaaaaaaagaagacacagcccaagcttagtgacttatccatagctcaggcggagtatttgaggagcatatccttgccggtgcccgtgctcgttgaggatacctcctcctcaagtgagtatgggtccgtctcacctgatactgagctgaaggtggatcctttttctttcaagactagggccaaatcgtgcggcgaacgcgacgtgaaaggcatacgtactttattcctgggtatacccgacgagaacttcgaggaccacagcgcccccccgagccccgaggagaaggactccggtttttttatgctgaggaaagattctgaacgccgagccaccctccaccgaatcctgaccgaggatcaggataagattgtaagaaatctcatggagagcttggcacagggcgccgaggagcccaagttaaagtgggaacacattactacactgatagcctctctaagggagttcgtccgttccactgaccgtaagattatcgccaccactctgagtaagcttaagttggagctcgacttcgacagtcacgggatttctcaggtacaggtggttctgtttgggttccaggacgcagtcaacaaggtactacgcaatcacaacataaagccccattggatgttcgccctcgattctataatcagaaaggctgtacagacagctattactatcttggtccccggcatcaaaccatag

SEQ ID NO: 160350 - DNA, 1866 bp, Artificial Sequence
  derived and/or modified sequence
atggagcaggttcccggaggaagcttgtccgccttgctcaggagcaagtggggtccactgaaagataacgagcaaactattgggttctacactaagcaaattctggagggcctcaaatacttgcacgacaatcagatagtccatcgtgatattaagggtgacaacgtgctcattaatacttactctggcgtgctgaagatttctgacttcggcaccagcaagcgactggcgggaattaatccatgtacagagacttttaccgggaccctccagtacatggcaccagaaattatcgataagggaccaagggggtacggtaaagcagcagatatctggagcctcggatgcaccataatcgaaatggccacggggaagcccccattctatgagttgggggaaccacaggccgcaatgtttaaggtcggtatgtttaaggtgcatcctgagatccccgaaagtatgagtgcggaggcaaaagctttcatcctgaagtgcttcgagcctgatcccgacaagagagcctgtgcgaacgatttgctcgtagatgagtttctgaaggtgtcgagtaagaaaaaaaaaacacaaccgaaactctcggcactgagtgccggaagtaacgagtacctaaggagcatctccctccccgtgccggtgctcgtggaggatacgtcgtccagcagtgagtacggttcagtgtcacctgacaccgagctgaaagttgatccattttcattcaagaccagggccaaatcttgtggcgagagggacgtcaaagggatcagaacacttttcctcggcattccggatgaaaactttgaagatcactccgccccaccttctccagaggagaaagatagtggattcttcatgttaagaaaggattctgaaagacgggctacacttcaccgcatccttacggaggaccaagacaagatagtccgaaaccttatggagtccctcgctcaaggtgccgaagagcctaagttgaagtgggaacatataacaaccctgattgcctctctacgcgagttcgttagaagcactgaccgtaaaattatagcaacgacccttagcaaactgaaactggaactggacttcgatagtcacggaatttcccaagtgcaggttgtcttattcggcttccaggacgctgttaacaaagtgttgcgcaaccacaacatcaagccacactggatgtttgctctggacagcattatcagaaaagcagtacaaacagccatcacaattctggtgcctgagttgaggccacatttctcactagccagcgaatctgacaccgcggaccaggaggaccttgacgttgaagatgaccacgaggagcagccatccaatcagactgttcgtcggcctcaggcagtgatcgaggacgctgttgctacaagcggcgtgagcacgttatcttctaccgtcagccatgactcacagagcgctcatcggtccttgaacgttcagttaggtcgtatgaagatcgaaacgaacagactcctagaggagctcgtgcgtaaggagaaggagctccaggccctgttgcatagggccattgaggagaaggaccaagagatcaagcacctcaaacttaaaagccagcccattgaaattcctgagctgccagttttccatctaaacagctcagggacgaatacggaagattccgagctgacagactggctaagggtgaacggcgcagatgaggacaccatttccaggtttcttgctgaggactacaccctgctggacgtgctgtattacgtcacgcgagatgacttaaagtgtttaagactgagggggggtatgctgtgtactctgtggaaggccatcattgattttcgaaacaagcagacttag

SEQ ID NO: 160351 - DNA, 4125 bp, Artificial Sequence
  derived and/or modified sequence
atgtcaaccgaggctgatgaagggattaccttctcagtgcctccttttgctccatccggcttttgtaccataccagagggaggcatatgcagacgcggaggcgctgccgctgtgggggaaggagaagaacatcagctgcccccaccacctccaggctctttttggaatgtggaaagcgccgcagcacctggaatcggctgccctgctgccacctcatcctcttcggccactcgcggtaggggaagttctgtgggcggtgggtctagacgaactaccgttgcttatgtgatcaacgaagcgtctcagggccagctcgttgtggcagagtctgaggcgctgcaaagtttgcgggaagcctgcgaaaccgtgggcgctactctagagaccctgcactttgggaagctggacttcggagaaacaactgtgttggaccgcttttacaacgccgacattgccgtcgtggaaatgtcagacgcctttaggcagccttctctcttctaccacttgggcgtgcgagaaagcttctcaatggccaataatattatcctgtattgcgacaccaattccgactctctgcagtccctgaaggaaatcatctgccagaaaaacaccatgtgtactggcaactataccttcgtgccgtacatgatcaccccccacaacaaagtttactgttgcgattcctcttttatgaaagggcttacagagctgatgcaacctaattttgagctcctgctcgggccaatctgtctcccactggtagaccgcttcattcagttgcttaaggtggcccaggcctcatctagccaatacttccgcgagtccattctcaacgacattaggaaagccaggaacctgtatactggaaaggaactggcagccgagctagcgcgtatcaggcagcgggtggacaatatcgaggttcttaccgccgacatcgtgatcaacctgttgttgtcctatagagatattcaagactatgattccattgtcaaactggtggagaccctggagaagcttccaacattcgatctcgcatctcaccatcatgtcaaattccactacgcatttgctcttaaccgccgaaacctccctggagatcgggctaaggcactcgatatcatgatccctatggtccagtctgaaggacaggtggcaagcgacatgtattgcctcgtgggccgaatctataaagacatgtttctggactcaaatttcactgataccgaatctagggaccacggcgcttcctggtttaaaaaagctttcgagtccgaacccactctccagagcggcataaattatgccgttctgcttcttgccgctggccaccagtttgagtcatcatttgagcttcggaaagtaggagtgaaactgtcgagcctcctgggcaaaaagggcaatctggagaaactgcagagctactgggaagttggatttttcttgggcgcttcggtcttggccaatgatcacatgcgggtgattcaagcatccgaaaaactctttaaactgaagactcccgcatggtatctgaaatcaatcgtggaaaccatcctgatttacaagcattttgtgaaactgaccacagagcaaccggtggcaaagcaggaactggtcgatttctggatggactttctcgtcgaggcgactaagacagatgtgacagtagtgaggttcccagtcctcattctggaacctaccaaaatataccagccgtcttacctgtctatcaataatgaggtagaggagaagaccatatccatctggcatgtactccccgatgacaagaagggaatccatgagtggaattttagcgcttcctctgtgcggggtgtttccataagtaagttcgaggaaaggtgctgttttctgtacgtcctgcataactcggacgacttccagatatacttctgtacggagctacactgtaaaaagttcttcgagatggtcaatacaataactgaggagaaaggacgctctactgaagaaggggactgtgaatccgacctgcttgagtatgactacgaatacgatgaaaatggagacagagtggtgcttggtaagggtacctatggaattgtgtacgctggcagggacctaagtaaccaggtgcgtatagccattaaagagatccccgagcgtgatagcaggtacagccagcccttgcatgaggagatagccttgcacaagcatttgaagcacaaaaatatcgtccaataccttgggtcatttagcgagaatggcttcatcaagatctttatggagcaggtgccaggtggatcactctccgccctgctgcgttccaaatggggtcctcttaaggacaatgaacagacaatcggattttatactaagcagatcctggaaggactcaaatacctgcacgataatcaaatcgtgcatcgcgacatcaagggagataatgttctaatcaacacctactccggagtgctgaagatttctgacttcggcaccagcaaaaggttagccggtattaatccctgtactgaaaccttcaccggcacactccaatacatggcccctgagatcattgataaaggcccacgcggttatgggaaggctgctgacatctggtccctcggctgtacaattatagagatggccaccggaaaaccacccttttacgagttaggcgagccccaggccgctatgtttaaggttgggatgttcaaggtacatccggagattcccgagtctatgtcagctgaagccaaagcatttatcctcaaatgctttgaaccagaccctgataagcgggcatgcgccaatgatctccttgtggatgagttcctcaaggtgtcctcaaaaaagaagaagacacagcccaaactgtccgccctgtcagcgggttcaaatgaatatctgcggtccattagtctgccggttcctgtgctcgtcgaagatacatcgagctcctccgagtatggctcagtcagtcctgacacagagctgaaggtcgacccattttccttcaaaacacgcgcaaagtcctgtggcgaaagagacgtgaaggggatacgtaccctgttcctgggcatcccagacgagaacttcgaagaccactctgcgcctccgagcccagaagagaaggatagtgggtttttcatgctccgtaaagattctgaacgaagggccaccctccataggatcttaacagaggaccaggataagattgtacgaaatctcatggagtctctggcccagggggctgaggaaccgaagttgaaatgggaacacattactacactgattgccagcctacgcgagttcgtccggtcaaccgatcggaagataattgctacgacactgagtaagctgaagctggagctggatttcgactcccatggcatctcgcaagtacaagttgtgctcttcgggttccaagacgccgtaaataaagttctgagaaaccataatatcaagccccactggatgttcgccctggactccattatacgcaaggctgttcagacagccatcacaatcctcgttcctgaactcaggccccacttcagcctggcctctgagtcggatacagccgaccaggaggatctcgacgtggaggacgaccatgaggaacagcctagcaaccaaaccgtacgacgtccacaggccgtcatcgaggatgctgtggctacttccggagtctcaactctatcctcaactgtgtcacacgattcccagagcgctcaccggagtttaaatgtacagctcggcaggatgaaaattgagacaaaccgcctacttgaggagttagtgcgcaaggagaaggagcttcaggccctgctccatcgggctattgaagaaaaagaccaggagatcaaacacctgaaactcaagtcccagcccatcgagattcctgagttgccggtgttccacctgaactcttccggaactaacaccgaggattccgaactcaccgattggctcagggtgaatggggctgatgaggatacgatcagccgattcctggcagaagattacaccttgctggacgtcttgtactacgtgacacgcgatgatctcaagtgtttgagactgcggggagggatgctgtgcacactgtggaaggctatcattgattttagaaacaaacagacctag

SEQ ID NO: 160352 - DNA, 3771 bp, Artificial Sequence
  derived and/or modified sequence
acccttcagagggcttcgggagccgcaaccgaagcaccaagaagatcagaaccgcctcctggcagcggcgtaccttccggcgagcgcgctccagagcgaaggcggaggagaggaggtgagggcgctgcccgtgacgggtcttgtttagcgaggagggcacgatctagcccagagctgtggcttgccaggcggtgtgggtgggccggtgatgcagctgctgtagctgccaggcccggagagatgtccaccgaagcagacgagggaataactttctcggtgcctccctttgccccaagcggtttctgtaccatccccgagggaggaatatgccgtagaggaggggcagccgcagtcggagagggggaggagcaccagctgcctcctccaccgccagggagcttctggaatgtggaaagtgccgctgcgccaggaatcggatgcccagcagctaccagttcctcaagtgcaacgagaggcaggggttcgtctgtcggtggaggctcaaggagaaccaccgtggcgtatgtgatcaatgaggctagccaaggacaactggtggtcgcagagagcgaggcccttcaaagtctgagggaggcctgcgaaacagtcggtgctacgcttgaaacgctgcacttcggcaagctggacttcggcgagactacagtgctggatagattctacaacgccgacattgccgtcgtcgaaatgagtgacgctttccggcagccttctctgttttatcacttaggcgtgagggaatcttttagcatggctaataatatcattctctattgtgacacaaatagcgactcacttcagtccttaaaggagatcatctgccagaagaacactatgtgcacaggcaactacacttttgttccctacatgatcaccccccataacaaagtatattgctgcgatagctcttttatgaagggcctcacagaactgatgcagcccaattttgaattgctgcttggcccaatctgcctgcctctggtggacagattcattcagttgttgaaagtggcccaggcctcctcctcacagtactttcgggagagcatcctgaatgatattcgaaaagcacgaaacctgtacaccgggaaggagctcgcagccgagcttgccaggattaggcaacgggtcgacaatatagaagtgttaaccgccgacatcgtgattaatttgctgctgtcctaccgtgacattcaggactatgatagcatagtgaagctcgtggagactctagagaaactgcccacatttgacttagcttctcaccaccacgttaaattccattacgcgtttgcactcaatcgccgaaaccttccaggggatcgagcaaaggcactggacattatgatccctatggtgcagtccgagggccaggtggcctcagacatgtattgcctcgtgggtcgcatatacaaggacatgtttttagactctaactttacagacacagaatctagggaccacggcgctagctggtttaaaaaagcttttgagtctgagcctacgctgcagtccggaataaactatgccgtgctcctacttgctgcaggacaccagtttgaaagtagctttgagctgcgtaaggtgggggtgaagctttcctcactgctcggaaagaaaggaaacttggagaagcttcaaagctactgggaggtcgggttcttcctgggggcatccgttctggccaatgatcatatgcgagtgatacaggcctctgagaaactgtttaaactgaaaaccccggcttggtacctcaaatccatcgtcgagactattctgatctataagcactttgtgaagctgaccacagagcaacccgtggccaagcaggaactggtggacttctggatggactttctggttgaggcaaccaaaaccgatgtcacagtcgtcagattccccgtgctcatcctggagcccacaaagatttatcagccctcctacttaagcatcaacaacgaggtcgaggaaaaaacgatcagcatatggcatgtgctgcccgatgacaaaaaaggcatccatgaatggaacttcagtgcttcctcggtgcggggtgtctctatcagtaaatttgaagagcgctgttgctttctttacgtgctgcacaactccgatgactttcaaatctatttctgtacggagctccattgtaagaaattctttgaaatggtgaacacaatcactgaagagaaaggacgcagtaccgaagagggcgattgcgaatctgacctgctggagtatgactatgaatacgatgagaacggcgatcgcgtggtcctgggaaaaggtacatacggcattgtctacgctggccgagacctgtcaaaccaggtcagaatagccatcaaagaaattcctgagagagactctcggtacagccagccattgcatgaggagattgcactgcataagcatctgaaacataaaaacattgtccagtatctaggctccttctccgagaacggcttcattaaaatctttatggagcaggttcctggaggatctctttccgccctgctacgatctaagtggggacccctgaaagacaatgaacagacaatcggtttttacactaaacagattttggaaggcttgaagtacctgcacgataaccagattgttcacagggacatcaagggagacaatgtgcttatcaatacttactcaggtgtgctgaaaatttccgacttcggtacctctaagaggctagcaggaatcaacccatgcaccgaaacctttacaggtaccctccaatacatggctcctgagattatagacaaagggccacgaggatatgggaaagcagctgacatctggagcctgggatgcaccattatcgaaatggcgactggaaagcccccattttacgaattgggcgagcctcaggccgctatgtttaaagtcggaatgtttaaggtgcatccagagatccccgagtccatgagtgcggaagccaaggcttttattctcaagtgttttgagccagatccagacaaaagagcctgcgcgaacgacctactggtcgatgaattccttaaggtttcttcaaagaagaagaagactcagcctaagttaagcgacctcagcattgctcaagctgagtacctgagatctataagccttcccgtacccgtgctcgtcgaggatactagttcatcctcagagtatggatcagtctctcccgatacagagctcaaggtagacccattttcatttaaaactcgcgctaagagctgcggcgagcgcgacgttaagggaatcagaacactgttcttgggaatacccgacgagaattttgaagaccattcagccccaccctctccagaggaaaaggacagcggtttttttatgctgagaaaagatagtgaacggagggccacacttcaccggatcctcactgaagatcaagacaagatcgtgcgcaacctgatggaatcactggcccagggagcggaagaaccaaaactcaagtgggagcacattaccaccttgatcgctagtctgagggagttcgttcgctcaacagacagaaagatcattgcaacaacgctgagcaaattgaagctcgaactagatttcgatagccacgggatttcacaggttcaggtggtgttgttcggctttcaggatgcagtgaataaagtgttgcgtaaccataacatcaagcctcactggatgtttgctctcgacagtattatcagaaaggccgtgcaaacagcgatcactattttggtacccggaattaagccctag

SEQ ID NO: 160353 - DNA, 1866 bp, Artificial Sequence
  derived and/or modified sequence
atggagcaggtgcccggcggcagcctgagcgccctgctgagaagcaagtggggccccctgaaggacaacgagcagaccatcggcttctacaccaagcagatcctggagggcctgaagtacctgcacgacaaccagatcgtgcacagagacatcaagggcgacaacgtgctgatcaacacctacagcggcgtgctgaagatcagcgacttcggcaccagcaagagactggccggcatcaacccctgcaccgagaccttcaccggcaccctgcagtacatggcccccgagatcatcgacaagggccccagaggctacggcaaggccgccgacatctggagcctgggctgcaccatcatcgagatggccaccggcaagccccccttctacgagctgggcgagccccaggccgccatgttcaaggtgggcatgttcaaggtgcaccccgagatccccgagagcatgagcgccgaggccaaggccttcatcctgaagtgcttcgagcccgaccccgacaagagagcctgcgccaacgacctgctggtggacgagttcctgaaggtgagcagcaagaagaagaagacccagcccaagctgagcgccctgagcgccggcagcaacgagtacctgagaagcatcagcctgcccgtgcccgtgctggtggaggacaccagcagcagcagcgagtacggcagcgtgagccccgacaccgagctgaaggtggaccccttcagcttcaagaccagagccaagagctgcggcgagagagacgtgaagggcatcagaaccctgttcctgggcatccccgacgagaacttcgaggaccacagcgccccccccagccccgaggagaaggacagcggcttcttcatgctgagaaaggacagcgagagaagagccaccctgcacagaatcctgaccgaggaccaggacaagatcgtgagaaacctgatggagagcctggcccagggcgccgaggagcccaagctgaagtgggagcacatcaccaccctgatcgccagcctgagagagttcgtgagaagcaccgacagaaagatcatcgccaccaccctgagcaagctgaagctggagctggacttcgacagccacggcatcagccaggtgcaggtggtgctgttcggcttccaggacgccgtgaacaaggtgctgagaaaccacaacatcaagccccactggatgttcgccctggacagcatcatcagaaaggccgtgcagaccgccatcaccatcctggtgcccgagctgagaccccacttcagcctggccagcgagagcgacaccgccgaccaggaggacctggacgtggaggacgaccacgaggagcagcccagcaaccagaccgtgagaagaccccaggccgtgatcgaggacgccgtggccaccagcggcgtgagcaccctgagcagcaccgtgagccacgacagccagagcgcccacagaagcctgaacgtgcagctgggcagaatgaagatcgagaccaacagactgctggaggagctggtgagaaaggagaaggagctgcaggccctgctgcacagagccatcgaggagaaggaccaggagatcaagcacctgaagctgaagagccagcccatcgagatccccgagctgcccgtgttccacctgaacagcagcggcaccaacaccgaggacagcgagctgaccgactggctgagagtgaacggcgccgacgaggacaccatcagcagattcctggccgaggactacaccctgctggacgtgctgtactacgtgaccagagacgacctgaagtgcctgagactgagaggcggcatgctgtgcaccctgtggaaggccatcatcgacttcagaaacaagcagacctag

SEQ ID NO: 160354 - DNA, 4125 bp, Artificial Sequence
  derived and/or modified sequence
atgagcaccgaggccgacgagggcatcaccttcagcgtgccccccttcgcccccagcggcttctgcaccatccccgagggcggcatctgcagaagaggcggcgccgccgccgtgggcgagggcgaggagcaccagctgcccccccccccccccggcagcttctggaacgtggagagcgccgccgcccccggcatcggctgccccgccgccaccagcagcagcagcgccaccagaggcagaggcagcagcgtgggcggcggcagcagaagaaccaccgtggcctacgtgatcaacgaggccagccagggccagctggtggtggccgagagcgaggccctgcagagcctgagagaggcctgcgagaccgtgggcgccaccctggagaccctgcacttcggcaagctggacttcggcgagaccaccgtgctggacagattctacaacgccgacatcgccgtggtggagatgagcgacgccttcagacagcccagcctgttctaccacctgggcgtgagagagagcttcagcatggccaacaacatcatcctgtactgcgacaccaacagcgacagcctgcagagcctgaaggagatcatctgccagaagaacaccatgtgcaccggcaactacaccttcgtgccctacatgatcaccccccacaacaaggtgtactgctgcgacagcagcttcatgaagggcctgaccgagctgatgcagcccaacttcgagctgctgctgggccccatctgcctgcccctggtggacagattcatccagctgctgaaggtggcccaggccagcagcagccagtacttcagagagagcatcctgaacgacatcagaaaggccagaaacctgtacaccggcaaggagctggccgccgagctggccagaatcagacagagagtggacaacatcgaggtgctgaccgccgacatcgtgatcaacctgctgctgagctacagagacatccaggactacgacagcatcgtgaagctggtggagaccctggagaagctgcccaccttcgacctggccagccaccaccacgtgaagttccactacgccttcgccctgaacagaagaaacctgcccggcgacagagccaaggccctggacatcatgatccccatggtgcagagcgagggccaggtggccagcgacatgtactgcctggtgggcagaatctacaaggacatgttcctggacagcaacttcaccgacaccgagagcagagaccacggcgccagctggttcaagaaggccttcgagagcgagcccaccctgcagagcggcatcaactacgccgtgctgctgctggccgccggccaccagttcgagagcagcttcgagctgagaaaggtgggcgtgaagctgagcagcctgctgggcaagaagggcaacctggagaagctgcagagctactgggaggtgggcttcttcctgggcgccagcgtgctggccaacgaccacatgagagtgatccaggccagcgagaagctgttcaagctgaagacccccgcctggtacctgaagagcatcgtggagaccatcctgatctacaagcacttcgtgaagctgaccaccgagcagcccgtggccaagcaggagctggtggacttctggatggacttcctggtggaggccaccaagaccgacgtgaccgtggtgagattccccgtgctgatcctggagcccaccaagatctaccagcccagctacctgagcatcaacaacgaggtggaggagaagaccatcagcatctggcacgtgctgcccgacgacaagaagggcatccacgagtggaacttcagcgccagcagcgtgagaggcgtgagcatcagcaagttcgaggagagatgctgcttcctgtacgtgctgcacaacagcgacgacttccagatctacttctgcaccgagctgcactgcaagaagttcttcgagatggtgaacaccatcaccgaggagaagggcagaagcaccgaggagggcgactgcgagagcgacctgctggagtacgactacgagtacgacgagaacggcgacagagtggtgctgggcaagggcacctacggcatcgtgtacgccggcagagacctgagcaaccaggtgagaatcgccatcaaggagatccccgagagagacagcagatacagccagcccctgcacgaggagatcgccctgcacaagcacctgaagcacaagaacatcgtgcagtacctgggcagcttcagcgagaacggcttcatcaagatcttcatggagcaggtgcccggcggcagcctgagcgccctgctgagaagcaagtggggccccctgaaggacaacgagcagaccatcggcttctacaccaagcagatcctggagggcctgaagtacctgcacgacaaccagatcgtgcacagagacatcaagggcgacaacgtgctgatcaacacctacagcggcgtgctgaagatcagcgacttcggcaccagcaagagactggccggcatcaacccctgcaccgagaccttcaccggcaccctgcagtacatggcccccgagatcatcgacaagggccccagaggctacggcaaggccgccgacatctggagcctgggctgcaccatcatcgagatggccaccggcaagccccccttctacgagctgggcgagccccaggccgccatgttcaaggtgggcatgttcaaggtgcaccccgagatccccgagagcatgagcgccgaggccaaggccttcatcctgaagtgcttcgagcccgaccccgacaagagagcctgcgccaacgacctgctggtggacgagttcctgaaggtgagcagcaagaagaagaagacccagcccaagctgagcgccctgagcgccggcagcaacgagtacctgagaagcatcagcctgcccgtgcccgtgctggtggaggacaccagcagcagcagcgagtacggcagcgtgagccccgacaccgagctgaaggtggaccccttcagcttcaagaccagagccaagagctgcggcgagagagacgtgaagggcatcagaaccctgttcctgggcatccccgacgagaacttcgaggaccacagcgccccccccagccccgaggagaaggacagcggcttcttcatgctgagaaaggacagcgagagaagagccaccctgcacagaatcctgaccgaggaccaggacaagatcgtgagaaacctgatggagagcctggcccagggcgccgaggagcccaagctgaagtgggagcacatcaccaccctgatcgccagcctgagagagttcgtgagaagcaccgacagaaagatcatcgccaccaccctgagcaagctgaagctggagctggacttcgacagccacggcatcagccaggtgcaggtggtgctgttcggcttccaggacgccgtgaacaaggtgctgagaaaccacaacatcaagccccactggatgttcgccctggacagcatcatcagaaaggccgtgcagaccgccatcaccatcctggtgcccgagctgagaccccacttcagcctggccagcgagagcgacaccgccgaccaggaggacctggacgtggaggacgaccacgaggagcagcccagcaaccagaccgtgagaagaccccaggccgtgatcgaggacgccgtggccaccagcggcgtgagcaccctgagcagcaccgtgagccacgacagccagagcgcccacagaagcctgaacgtgcagctgggcagaatgaagatcgagaccaacagactgctggaggagctggtgagaaaggagaaggagctgcaggccctgctgcacagagccatcgaggagaaggaccaggagatcaagcacctgaagctgaagagccagcccatcgagatccccgagctgcccgtgttccacctgaacagcagcggcaccaacaccgaggacagcgagctgaccgactggctgagagtgaacggcgccgacgaggacaccatcagcagattcctggccgaggactacaccctgctggacgtgctgtactacgtgaccagagacgacctgaagtgcctgagactgagaggcggcatgctgtgcaccctgtggaaggccatcatcgacttcagaaacaagcagacctag

SEQ ID NO: 160355 - DNA, 3771 bp, Artificial Sequence
  derived and/or modified sequence
accctgcagagagccagcggcgccgccaccgaggcccccagaagaagcgagcccccccccggcagcggcgtgcccagcggcgagagagcccccgagagaagaagaagaagaggcggcgagggcgccgccagagacggcagctgcctggccagaagagccagaagcagccccgagctgtggctggccagaagatgcggctgggccggcgacgccgccgccgtggccgccagacccggcgagatgagcaccgaggccgacgagggcatcaccttcagcgtgccccccttcgcccccagcggcttctgcaccatccccgagggcggcatctgcagaagaggcggcgccgccgccgtgggcgagggcgaggagcaccagctgcccccccccccccccggcagcttctggaacgtggagagcgccgccgcccccggcatcggctgccccgccgccaccagcagcagcagcgccaccagaggcagaggcagcagcgtgggcggcggcagcagaagaaccaccgtggcctacgtgatcaacgaggccagccagggccagctggtggtggccgagagcgaggccctgcagagcctgagagaggcctgcgagaccgtgggcgccaccctggagaccctgcacttcggcaagctggacttcggcgagaccaccgtgctggacagattctacaacgccgacatcgccgtggtggagatgagcgacgccttcagacagcccagcctgttctaccacctgggcgtgagagagagcttcagcatggccaacaacatcatcctgtactgcgacaccaacagcgacagcctgcagagcctgaaggagatcatctgccagaagaacaccatgtgcaccggcaactacaccttcgtgccctacatgatcaccccccacaacaaggtgtactgctgcgacagcagcttcatgaagggcctgaccgagctgatgcagcccaacttcgagctgctgctgggccccatctgcctgcccctggtggacagattcatccagctgctgaaggtggcccaggccagcagcagccagtacttcagagagagcatcctgaacgacatcagaaaggccagaaacctgtacaccggcaaggagctggccgccgagctggccagaatcagacagagagtggacaacatcgaggtgctgaccgccgacatcgtgatcaacctgctgctgagctacagagacatccaggactacgacagcatcgtgaagctggtggagaccctggagaagctgcccaccttcgacctggccagccaccaccacgtgaagttccactacgccttcgccctgaacagaagaaacctgcccggcgacagagccaaggccctggacatcatgatccccatggtgcagagcgagggccaggtggccagcgacatgtactgcctggtgggcagaatctacaaggacatgttcctggacagcaacttcaccgacaccgagagcagagaccacggcgccagctggttcaagaaggccttcgagagcgagcccaccctgcagagcggcatcaactacgccgtgctgctgctggccgccggccaccagttcgagagcagcttcgagctgagaaaggtgggcgtgaagctgagcagcctgctgggcaagaagggcaacctggagaagctgcagagctactgggaggtgggcttcttcctgggcgccagcgtgctggccaacgaccacatgagagtgatccaggccagcgagaagctgttcaagctgaagacccccgcctggtacctgaagagcatcgtggagaccatcctgatctacaagcacttcgtgaagctgaccaccgagcagcccgtggccaagcaggagctggtggacttctggatggacttcctggtggaggccaccaagaccgacgtgaccgtggtgagattccccgtgctgatcctggagcccaccaagatctaccagcccagctacctgagcatcaacaacgaggtggaggagaagaccatcagcatctggcacgtgctgcccgacgacaagaagggcatccacgagtggaacttcagcgccagcagcgtgagaggcgtgagcatcagcaagttcgaggagagatgctgcttcctgtacgtgctgcacaacagcgacgacttccagatctacttctgcaccgagctgcactgcaagaagttcttcgagatggtgaacaccatcaccgaggagaagggcagaagcaccgaggagggcgactgcgagagcgacctgctggagtacgactacgagtacgacgagaacggcgacagagtggtgctgggcaagggcacctacggcatcgtgtacgccggcagagacctgagcaaccaggtgagaatcgccatcaaggagatccccgagagagacagcagatacagccagcccctgcacgaggagatcgccctgcacaagcacctgaagcacaagaacatcgtgcagtacctgggcagcttcagcgagaacggcttcatcaagatcttcatggagcaggtgcccggcggcagcctgagcgccctgctgagaagcaagtggggccccctgaaggacaacgagcagaccatcggcttctacaccaagcagatcctggagggcctgaagtacctgcacgacaaccagatcgtgcacagagacatcaagggcgacaacgtgctgatcaacacctacagcggcgtgctgaagatcagcgacttcggcaccagcaagagactggccggcatcaacccctgcaccgagaccttcaccggcaccctgcagtacatggcccccgagatcatcgacaagggccccagaggctacggcaaggccgccgacatctggagcctgggctgcaccatcatcgagatggccaccggcaagccccccttctacgagctgggcgagccccaggccgccatgttcaaggtgggcatgttcaaggtgcaccccgagatccccgagagcatgagcgccgaggccaaggccttcatcctgaagtgcttcgagcccgaccccgacaagagagcctgcgccaacgacctgctggtggacgagttcctgaaggtgagcagcaagaagaagaagacccagcccaagctgagcgacctgagcatcgcccaggccgagtacctgagaagcatcagcctgcccgtgcccgtgctggtggaggacaccagcagcagcagcgagtacggcagcgtgagccccgacaccgagctgaaggtggaccccttcagcttcaagaccagagccaagagctgcggcgagagagacgtgaagggcatcagaaccctgttcctgggcatccccgacgagaacttcgaggaccacagcgccccccccagccccgaggagaaggacagcggcttcttcatgctgagaaaggacagcgagagaagagccaccctgcacagaatcctgaccgaggaccaggacaagatcgtgagaaacctgatggagagcctggcccagggcgccgaggagcccaagctgaagtgggagcacatcaccaccctgatcgccagcctgagagagttcgtgagaagcaccgacagaaagatcatcgccaccaccctgagcaagctgaagctggagctggacttcgacagccacggcatcagccaggtgcaggtggtgctgttcggcttccaggacgccgtgaacaaggtgctgagaaaccacaacatcaagccccactggatgttcgccctggacagcatcatcagaaaggccgtgcagaccgccatcaccatcctggtgcccggcatcaagccctag

SEQ ID NO: 160356 - protein, 304 aa, Artificial Sequence
  derived and/or modified sequence
MEHPLFGCLRSPHATAQGLHPFSQSSLALHGRSDHMSYPELSTSSSSCIIAGYPNEEGMFASQHHRGHHHHHHHHHHHHHQQQQHQALQTNWHLPQMSSPPSAARHSLCLQPDSGGPPELGSSPPVLCSNSSSLGSSTPTGAACAPGDYGRQALSPAEAEKRSGGKRKSDSSDSQEGNYKSEVNSKPRKERTAFTKEQIRELEAEFAHHNYLTRLRRYEIAVNLDLTERQVKVWFQNRRMKWKRVKGGQQGAAAREKELVNVKKGTLLPSELSGIGAATLQQTGDSIANEDSHDSDHSSEHAHL

SEQ ID NO: 160357 - DNA, 2383 bp, Artificial Sequence
  derived and/or modified sequence
gaaagcagttctctgggaccaccttcttttggcttcaacctctcccactcttgacatctgagtagctcagggaagctcttccaggtccgactgttcatatgtaaaggagactggccgctggggctcaggaccgggattatccgagctctgcagaagtgcaccgctattgctttgggaggttaaaaaaaaaatcacacggtttccagtgaaaaagtgacagagggtggtggcctttggaaccgccgtgaagtcttctgcctggaacccgaaacttgcatgctatggaacacccgctctttggctgcctgcgcagccctcacgccacggcgcaaggcttgcacccgttctcccaatcctctctcgccctccatggaagatctgaccatatgtcttaccccgagctctctacttcttcctcatcttgcataatcgcgggataccccaacgaagagggcatgtttgccagccagcatcacagggggcaccaccaccaccaccaccaccaccaccatcaccaccatcagcagcagcagcaccaggctctgcaaaccaactggcacctcccgcagatgtcttccccaccgagtgcggctcggcacagcctctgcctccagcccgactctggagggcccccagagttggggagcagcccgcccgtcctgtgctccaactcttccagcttgggctccagcaccccgactggggccgcgtgcgcgccgggggactacggccgccaggcactgtcacctgcggaggcggagaagcgaagcggcggcaagaggaaaagcgacagctcagactcccaggaaggaaattacaagtcagaagtcaacagcaaacccaggaaagaaaggacagcatttaccaaagagcaaatcagagaacttgaagcagaatttgcccatcataattatctcaccagactgaggcgatacgagatagcagtgaatctggatctcactgaaagacaggtgaaagtctggttccaaaacaggcggatgaagtggaagagggtaaagggtggacagcaaggagctgcggctcgggaaaaggaactggtgaatgtgaaaaagggaacacttctcccatcagagctgtcgggaattggtgcagccaccctccagcaaacaggggactctatagcaaatgaagacagtcacgacagtgaccacagctcagagcatgcgcacttatgatataaacagaggaccagctccattctcaggaaagaaatgttgtgatggcaagccttacccaaatatcgtttacacagagagatgactatggcagtgatgtttaatattattaaatccaggcatttcgaatctgtttttcatgatttatagagggtttacacaaagtgccacttattaaagagcttccacagtgaagatggagaaggtgaacttgctttgaatattccagatgtgtttggtcgtgcgtatggcagtgagcaggtatgtgtttgcttttgcttgcactgaaaattaaattgctatcaagagcaaactatgaacggttttttattcaagatgtctccagagtgaagatgccgaggatgaacttgcattgaacattccagatgtgtgagatcatgtgtattacagtgggcaggtatttgcttttgcttgcactgaaaattaaattgctatcaagaataaaccatgaaacattttatcctgaacagccacagtgcctgaattcactcaagtggataaaaagtgtattttaactctgtatatattacccttaagtcattttcctgtcttcactaatttagcaatgcattcatattagctgatgaaaataggcactcacaatgacaaccagagccagtttcttgtcttttttatacattttgtcatcccagagacaatcagtatgtgcttacctgtgttcaagtagagaaaaatacagtagagtctgataggacatattcttgtaccacagacaaaacaaatcttatgttgcatttactatcaactgctgctaatacgttattataaaacttacctagctcctgaattcttcctatcttatagcttaaaacaattaggatcataggcaaatcagttaccttgcagaaagagctttgtatgacagacattgtcttattttatttctgtaaaatattagctgtatgaatatgatttaattaacaagaaaacatttcttcctgattgacaacagtgttagacaaggtgcaaagcgaaactggttgctcaagttgatagaaaacaaaattctgaatatcttcaaattaaattcggtaaaaacacattattttttcatatgtgatgtattcatgcagaacaactatctttgtattttgtttttaaaatgtgtttaataaatgatcctttgtaaataaaaaaaaaaaaaa

SEQ ID NO: 160358 - DNA, 915 bp, Artificial Sequence
  derived and/or modified sequence
atggagcacccgctctttggttgcctcagatcccctcatgccactgcccagggactgcaccccttctctcaaagttctctcgctctgcacggaaggagtgaccatatgtcctatcccgagctgtcaacttcttcatccagttgtattatcgccggctatccaaacgaagaggggatgtttgcatctcaacatcataggggacaccaccatcaccaccatcaccatcaccaccaccatcaccaacagcaacagcaccaggctcttcaaacgaactggcatttacctcagatgtccagccctccctcagccgccaggcattctctgtgtttgcagcccgattctggcggtccacctgaacttggcagctcaccacctgttctatgttctaatagctcttctctgggaagctccactccgacgggcgctgcgtgtgctcccggggactacgggcgccaggcactgtcccccgccgaggcggaaaaacggagtgggggcaagcggaagtctgactcttccgactcccaggagggcaattataagagcgaggttaattcaaagcctaggaaagagcgcacggcctttaccaaggaacagatacgagagttggaagcggagttcgcacatcataattatcttacgagactgaggaggtacgaaatcgctgtgaacctggaccttaccgaacgccaagtgaaagtttggtttcaaaataggcgaatgaaatggaagagagtcaagggtgggcagcagggtgctgctgcccgggaaaaagaattagtgaatgtgaaaaagggtactcttctcccatctgagctttctggtattggcgccgcaacactgcagcagactggagactctattgccaatgaggacagccacgactccgatcattcttccgaacacgcgcatctgtag

SEQ ID NO: 160359 - DNA, 915 bp, Artificial Sequence
  derived and/or modified sequence
atggagcaccccctgtttggctgcctgcggagcccccacgccacagcccagggcctgcaccccttcagccagagcagcctggccctgcacggccgcagtgaccacatgagctacccagagctgagcaccagcagcagcagctgcatcatcgccggctacccaaatgaggagggcatgtttgccagccagcaccaccggggccaccaccaccaccaccaccaccaccaccaccaccaccaccagcagcagcagcaccaggccctgcagaccaactggcacctgccccagatgagcagcccccccagcgctgcccggcacagcctgtgcctgcagcctgacagcggcggccccccagagctgggcagcagcccccctgtgctgtgcagcaacagcagcagcctgggcagcagcacccccaccggggccgcctgtgcccctggggactatggccggcaggccctgagccctgctgaggccgagaagaggtctgggggcaagaggaagagtgacagcagtgacagccaggagggcaactacaagtctgaggtgaacagcaagcccaggaaggagaggacagccttcaccaaggagcagatccgggagctggaggccgagtttgcccaccacaactacctgacccggctgcggcgctatgaaattgctgtgaacctggacctgacagagcggcaggtgaaggtgtggttccagaacagaaggatgaagtggaagagggtgaagggcggccagcagggcgctgctgcccgggagaaggagctggtgaatgtgaagaagggcaccctgctgcccagcgagctgtctggaattggagctgccaccctgcagcagacaggagacagcatcgccaatgaagacagccatgacagcgaccacagcagcgagcacgcccacctgtag

SEQ ID NO: 160360 - DNA, 2500 bp, Artificial Sequence
  derived and/or modified sequence
ctgggagcgcgtggcgcaggctgagcgggagttttggagggagtttgcatgtggtcaactctgggctcctaagccagcccccagctcacgttacactctatttataacttctcagagccatttccccctgaaagcagttctctgggaccaccttcttttggcttcaacctctcccactcttgacatctgagtagctcagggaagctcttccaggtccgactgttcatatgtaaaggagactggccgctggggctcaggaccgggattatccgagctctgcagaagtgcaccgctattgctttgggaggttaaaaaaaaaatcacacggtttccagtgaaaaagtgacagagggtggtggcctttggaaccgccgtgaagtcttctgcctggaacccgaaacttgcatgctatggaacacccgctctttggctgcctgcgcagccctcacgccacggcgcaaggcttgcacccgttctcccaatcctctctcgccctccatggaagatctgaccatatgtcttaccccgagctctctacttcttcctcatcttgcataatcgcgggataccccaacgaagagggcatgtttgccagccagcatcacagggggcaccaccaccaccaccaccaccaccaccatcaccaccatcagcagcagcagcaccaggctctgcaaaccaactggcacctcccgcagatgtcttccccaccgagtgcggctcggcacagcctctgcctccagcccgactctggagggcccccagagttggggagcagcccgcccgtcctgtgctccaactcttccagcttgggctccagcaccccgactggggccgcgtgcgcgccgggggactacggccgccaggcactgtcacctgcggaggcggagaagcgaagcggcggcaagaggaaaagcgacagctcagactcccaggaaggaaattacaagtcagaagtcaacagcaaacccaggaaagaaaggacagcatttaccaaagagcaaatcagagaacttgaagcagaatttgcccatcataattatctcaccagactgaggcgatacgagatagcagtgaatctggatctcactgaaagacaggtgaaagtctggttccaaaacaggcggatgaagtggaagagggtaaagggtggacagcaaggagctgcggctcgggaaaaggaactggtgaatgtgaaaaagggaacacttctcccatcagagctgtcgggaattggtgcagccaccctccagcaaacaggggactctatagcaaatgaagacagtcacgacagtgaccacagctcagagcatgcgcacttatgatataaacagaggaccagctccattctcaggaaagaaatgttgtgatggcaagccttacccaaatatcgtttacacagagagatgactatggcagtgatgtttaatattattaaatccaggcatttcgaatctgtttttcatgatttatagagggtttacacaaagtgccacttattaaagagcttccacagtgaagatggagaaggtgaacttgctttgaatattccagatgtgtttggtcgtgcgtatggcagtgagcaggtatgtgtttgcttttgcttgcactgaaaattaaattgctatcaagagcaaactatgaacggttttttattcaagatgtctccagagtgaagatgccgaggatgaacttgcattgaacattccagatgtgtgagatcatgtgtattacagtgggcaggtatttgcttttgcttgcactgaaaattaaattgctatcaagaataaaccatgaaacattttatcctgaacagccacagtgcctgaattcactcaagtggataaaaagtgtattttaactctgtatatattacccttaagtcattttcctgtcttcactaatttagcaatgcattcatattagctgatgaaaataggcactcacaatgacaaccagagccagtttcttgtcttttttatacattttgtcatcccagagacaatcagtatgtgcttacctgtgttcaagtagagaaaaatacagtagagtctgataggacatattcttgtaccacagacaaaacaaatcttatgttgcatttactatcaactgctgctaatacgttattataaaacttacctagctcctgaattcttcctatcttatagcttaaaacaattaggatcataggcaaatcagttaccttgcagaaagagctttgtatgacagacattgtcttattttatttctgtaaaatattagctgtatgaatatgatttaattaacaagaaaacatttcttcctgattgacaacagtgttagacaaggtgcaaagcgaaactggttgctcaagttgatagaaaacaaaattctgaatatcttcaaattaaattcggtaaaaacacattattttttcatatgtgatgtattcatgcagaacaactatctttgtattttgtttttaaaatgtgtttaataaatgatcctttgtaaataa

SEQ ID NO: 160361 - DNA, 915 bp, Artificial Sequence
  derived and/or modified sequence
atggagcaccccctgttcggctgcctgcggagcccccacgccaccgcacagggtctccacccgttcagtcagtccagcctggcgctccatggaaggtcagaccacatgtcttaccccgagctcagcacatcctcatcatcttgcatcatcgctgggtatccgaatgaagaaggcatgtttgctagccagcaccacaggggccatcatcaccatcaccatcatcaccaccatcaccaccaccagcagcaacagcatcaggctctgcagacgaactggcatcttccccagatgagcagcccaccctctgccgctcggcattctctttgcctgcagcccgacagcggtggacccccggagctggggtcaagtccaccagtgctttgttccaactcctccagcttagggtcaagcacacccactggtgccgcgtgcgcccccggggactatgggcgtcaggccctgtctccagccgaagctgaaaaacgaagtggaggcaaacgcaaaagtgattccagcgattctcaagaaggcaactataagtctgaggtgaacagtaagccccggaaggaacgaactgcatttaccaaggaacaaattcgtgaactggaggcagaatttgcccaccataattacttgaccaggctcagacggtacgagatcgccgttaatctggatctgaccgaaagacaagtgaaggtatggtttcagaaccgaaggatgaagtggaagagggtgaagggtggacagcaaggagctgccgcgcgcgaaaaagaactagtgaatgtgaaaaagggtacgctcctcccctccgagctgagcggcattggcgctgctacgcttcaacagaccggagattctatcgctaacgaggatagtcacgatagtgatcactcctccgagcacgcgcacctgtag

SEQ ID NO: 160362 - DNA, 915 bp, Artificial Sequence
  derived and/or modified sequence
atggaacaccccctcttcggatgcctccgcagccctcatgcaactgcccagggccttcatcctttttcccagagttcccttgccctgcacggaaggtcggaccatatgagttatcccgagctctctactagttcctcctcatgcataatcgcaggctatcctaacgaagagggcatgtttgcctcccagcatcatagagggcaccatcaccaccaccaccaccaccaccatcaccaccaccagcaacagcagcatcaggccctgcagacgaactggcatctacctcagatgagctcgccccctagcgccgcacggcatagcctatgtttacagcctgattcagggggacccccagaattgggtagctcacctcctgttctctgctcaaattcttcatctttgggttctagcacccccactggtgcggcatgcgcgcctggtgactacggacggcaggctctgtcccccgcagaagcagagaaaagatctggcggtaagcgcaagtcagattcgtccgactcacaggaagggaactacaagtccgaagtaaactccaaacctcgtaaggaaaggacagcgttcacaaaagagcaaataagagagttagaggccgagtttgctcaccacaattatttaactcgcctgcgtaggtacgagatcgccgtgaatcttgacctgaccgaaagacaggtcaaggtttggtttcagaatcggagaatgaagtggaaacgtgtgaaagggggacaacagggcgcagctgccagagaaaaggagctcgtgaacgtgaaaaaagggacactgctgccttctgaactgtccggcatcggcgcagccacgttgcaacagactggcgacagtatcgctaacgaagattcccacgattctgatcacagctccgagcatgcacacctgtag

SEQ ID NO: 160363 - DNA, 915 bp, Artificial Sequence
  derived and/or modified sequence
atggagcaccccctgttcggctgcctgagaagcccccacgccaccgcccagggcctgcaccccttcagccagagcagcctggccctgcacggcagaagcgaccacatgagctaccccgagctgagcaccagcagcagcagctgcatcatcgccggctaccccaacgaggagggcatgttcgccagccagcaccacagaggccaccaccaccaccaccaccaccaccaccaccaccaccaccagcagcagcagcaccaggccctgcagaccaactggcacctgccccagatgagcagcccccccagcgccgccagacacagcctgtgcctgcagcccgacagcggcggcccccccgagctgggcagcagcccccccgtgctgtgcagcaacagcagcagcctgggcagcagcacccccaccggcgccgcctgcgcccccggcgactacggcagacaggccctgagccccgccgaggccgagaagagaagcggcggcaagagaaagagcgacagcagcgacagccaggagggcaactacaagagcgaggtgaacagcaagcccagaaaggagagaaccgccttcaccaaggagcagatcagagagctggaggccgagttcgcccaccacaactacctgaccagactgagaagatacgagatcgccgtgaacctggacctgaccgagagacaggtgaaggtgtggttccagaacagaagaatgaagtggaagagagtgaagggcggccagcagggcgccgccgccagagagaaggagctggtgaacgtgaagaagggcaccctgctgcccagcgagctgagcggcatcggcgccgccaccctgcagcagaccggcgacagcatcgccaacgaggacagccacgacagcgaccacagcagcgagcacgcccacctgtag

SEQ ID NO: 160364 - protein, 387 aa, Artificial Sequence
  derived and/or modified sequence
MPRPRLLAALCGALLCAPSLLVALDICSKNPCHNGGLCEEISQEVRGDVFPSYTCTCLKGYAGNHCETKCVEPLGLENGNIANSQIAASSVRVTFLGLQHWVPELARLNRAGMVNAWTPSSNDDNPWIQVNLLRRMWVTGVVTQGASRLASHEYLKAFKVAYSLNGHEFDFIHDVNKKHKEFVGNWNKNAVHVNLFETPVEAQYVRLYPTSCHTACTLRFELLGCELNGCANPLGLKNNSIPDKQITASSSYKTWGLHLFSWNPSYARLDKQGNFNAWVAGSYGNDQWLQVDLGSSKEVTGIITQGARNFGSVQFVASYKVAYSNDSANWTEYQDPRTGSSKIFPGNWDNHSHKKNLFETPILARYVRILPVAWHNRIALRLELLGC

SEQ ID NO: 160365 - DNA, 1164 bp, Artificial Sequence
  derived and/or modified sequence
atgcctaggcccagattacttgcggctctatgcggcgccctcttgtgcgcgccctccctgcttgtcgcactcgatatctgttctaagaatccctgccacaatggagggctctgcgaggagatatcacaggaagtgcgcggagacgtctttccgagctatacctgtacttgcctgaagggctacgctggcaatcactgcgagactaaatgtgtggaacctttaggtttggagaacggaaatattgccaattctcaaattgccgcctcttctgtgcgcgtgacctttctgggcctccagcactgggtgcctgagctcgctagactgaaccgggcaggcatggtgaatgcttggaccccctccagcaacgacgacaatccatggatccaagtaaacttgcttcggagaatgtgggtgactggagtggtgacccagggtgcctccaggcttgcatcacatgaatacctcaaggcatttaaagtggcatactcactgaacggacacgagttcgacttcatacacgacgtgaataagaagcacaaagaatttgtgggcaattggaacaaaaacgccgtacatgtaaatctcttcgagacgccggtagaggcgcagtacgtcagactttatcctacgtcttgtcacactgcctgtactttgcgctttgagctgttgggctgtgagctgaatggatgcgcaaacccgctgggcctcaagaataacagtatccccgataaacagataaccgcctcttctagctataagacctggggactgcatctcttttcctggaatccctcatacgcacgtctcgataaacagggcaactttaacgcgtgggtagccgggagttacggaaacgaccagtggttgcaagtggacctcggcagctccaaggaggtaactggcatcatcacgcagggggcacgtaactttggcagtgtgcagttcgtggcatcctataaagtggcttattcaaacgactccgcaaattggacagagtatcaggatcctagaacaggttcctcaaagatttttccaggtaactgggataatcatagccacaagaaaaacttgttcgagacccccattctggcgcgttatgtccgtattctcccagtggcatggcataatcggatcgctctacgccttgaacttttaggctgttag

SEQ ID NO: 160366 - DNA, 1164 bp, Artificial Sequence
  derived and/or modified sequence
atgccccggccccggctgctggccgccctgtgtggggccctgctgtgtgcccccagcctgctggtggccctggacatctgcagcaagaacccctgccacaacggcggcctgtgtgaggagatcagccaggaggtgagaggagatgtgttccccagctacacctgcacctgcctgaagggctacgccggcaaccactgtgagaccaagtgtgtggagcccctgggcctggagaatggaaatattgccaacagccagattgctgccagctctgtgcgggtgaccttcctgggcctgcagcactgggtgcctgagctggcccggctgaacagagctggcatggtgaatgcctggacccccagcagcaatgatgacaacccctggatccaggtgaacctgctgcggaggatgtgggtgactggagtggtgacccagggcgccagccggctggccagccatgagtacctgaaggccttcaaggtggcctacagcctgaatggacatgaatttgacttcatccatgatgtgaacaagaagcacaaggagtttgtgggcaactggaacaagaatgctgtgcacgtgaacctgtttgagacccctgtggaggcccagtatgtgcggctgtaccccaccagctgccacacagcctgcaccctgcgctttgagctgctgggctgtgagctgaatggctgtgccaaccccctgggcctgaagaacaacagcatcccagacaagcagatcacagccagcagcagctacaagacctggggcctgcacctgttctcctggaaccccagctatgcccggctggacaagcagggcaacttcaatgcctgggtggccggcagctatggaaatgaccagtggctgcaggtggacctgggcagcagcaaggaggtgacaggcatcatcacccagggcgccaggaactttggatctgtgcagtttgtggccagctacaaggtggcctacagcaatgattctgccaactggacagagtaccaggaccccaggacaggcagcagcaagatcttccctggcaactgggacaaccacagccacaagaagaacctgtttgagacccccatcctggcccgctacgtgcgcatcctgcctgtggcctggcacaaccgcatcgccctgcggctggagctgctgggctgctag

SEQ ID NO: 160367 - DNA, 1937 bp, Artificial Sequence
  derived and/or modified sequence
tgatttattccggtcccagaggagaaggcgccagaaccccgcggggtctgagcagcccagcgtgcccattccagcgcccgcgtccccgcagcatgccgcgcccccgcctgctggccgcgctgtgcggcgcgctgctctgcgcccccagcctcctcgtcgccctggatatctgttccaaaaacccctgccacaacggtggtttatgcgaggagatttcccaagaagtgcgaggagatgtcttcccctcgtacacctgcacgtgccttaagggctacgcgggcaaccactgtgagacgaaatgtgtcgagccactgggcctggagaatgggaacattgccaactcacagatcgccgcctcgtctgtgcgtgtgaccttcttgggtttgcagcattgggtcccggagctggcccgcctgaaccgcgcaggcatggtcaatgcctggacacccagcagcaatgacgataacccctggatccaggtgaacctgctgcggaggatgtgggtaacaggtgtggtgacgcagggtgccagccgcttggccagtcatgagtacctgaaggccttcaaggtggcctacagccttaatggacacgaattcgatttcatccatgatgttaataaaaaacacaaggagtttgtgggtaactggaacaaaaacgcggtgcatgtcaacctgtttgagacccctgtggaggctcagtacgtgagattgtaccccacgagctgccacacggcctgcactctgcgctttgagctactgggctgtgagctgaacggatgcgccaatcccctgggcctgaagaataacagcatccctgacaagcagatcacggcctccagcagctacaagacctggggcttgcatctcttcagctggaacccctcctatgcacggctggacaagcagggcaacttcaacgcctgggttgcggggagctacggtaacgatcagtggctgcaggtggacctgggctcctcgaaggaggtgacaggcatcatcacccagggggcccgtaactttggctctgtccagtttgtggcatcctacaaggttgcctacagtaatgacagtgcgaactggactgagtaccaggaccccaggactggcagcagtaagatcttccctggcaactgggacaaccactcccacaagaagaacttgtttgagacgcccatcctggctcgctatgtgcgcatcctgcctgtagcctggcacaaccgcatcgccctgcgcctggagctgctgggctgttagtggccacctgccacccccaggtcttcctgctttccatgggcccgctgcctcttggcttctcagcccctttaaatcaccatagggctggggactggggaaggggagggtgttcagaggcagcaccaccacacagtcacccctccctccctctttcccaccctccacctctcacgggccctgccccagcccctaagccccgtcccctaacccccagtcctcactgtcctgttttcttaggcactgagggatctgagtaggtctgggatggacaggaaagggcaaagtagggcgtgtggtttccctgcccctgtccggaccgccgatcccaggtgcgtgtgtctctgtctctcctagcccctctctcacacatcacattcccatggtggcctcaagaaaggcccggaagcgccaggctggagataacagcctcttgcccgtcggccctgcgtcggccctggggtaccatgtggccacaactgctgtggccccctgtccccaagacacttccccttgtctccctggttgcctctcttgccccttgtcctgaagcccagcgacacagaagggggtggggcgggtctatggggagaaagggagcgaggtcagaggagggcatgggttggcagggtgggcgtttggggccctctatgctggcttttcaccccagaggacacaggcagc

SEQ ID NO: 160368 - DNA, 1164 bp, Artificial Sequence
  derived and/or modified sequence
atgccccggccccggctgctggccgccctgtgcggcgccctgctgtgtgcaccaagccttctggtagctctcgacatttgcagcaaaaacccatgtcataacggcggactgtgcgaagaaatcagccaggaagtgcgcggggacgtcttcccttcttacacatgcacgtgcttgaaaggctacgccggtaaccactgtgagacgaaatgcgtggagcctttgggcctggagaatgggaatattgctaattcccagatagcagcctcctcagtgagggtgacgtttctgggactgcagcactgggtccccgaattagcccgacttaatcgagcaggtatggtgaacgcctggacaccttcttctaacgacgataacccgtggattcaggtgaacttattgaggaggatgtgggtcaccggcgtcgttacccagggcgcctccaggctggctagccatgagtatttaaaagccttcaaagtagcgtactcacttaacggtcacgagttcgattttatccacgacgtgaataagaaacacaaagagttcgtaggcaactggaacaagaatgccgtgcatgttaaccttttcgaaacaccagtggaggctcagtacgtgagactttatccaacctcatgtcataccgcctgtaccttgcggtttgagctgctcggttgcgagctcaacggctgtgccaaccctctgggcctgaaaaataacagcatccccgataaacagattaccgctagctcatcctataagacttggggattgcatctatttagttggaatccctcctacgctagattagataagcagggaaactttaatgcatgggtggccgggtcttacgggaacgaccagtggctgcaggtcgatcttggttctagtaaggaggtgacaggcatcatcacacagggcgcccggaacttcggctctgtgcagttcgtggcctcctataaggtggcctactccaacgatagtgcaaattggactgagtaccaagatcctcggacagggtcctctaagatctttccaggaaactgggataaccattcacacaaaaagaacctgttcgaaacccctatactcgcgaggtatgtcaggattctgcccgttgcttggcacaataggattgcgttgcgcctggaattgctggggtgctag

SEQ ID NO: 160369 - DNA, 1164 bp, Artificial Sequence
  derived and/or modified sequence
atgccgaggccaagattgctggctgcactgtgcggagctctcctctgtgccccttcacttttggttgccctggacatatgctctaaaaatccctgtcacaatgggggactgtgtgaggaaatcagtcaggaagttcggggagatgtctttcctagctacacttgcacctgcctcaagggctatgctggcaatcactgtgaaacgaagtgtgttgagcccctcgggctggaaaatggaaatatcgccaattcccagatcgccgcaagcagcgtgcgagtcacattccttggcttgcagcattgggttcccgagcttgctaggctgaatagagcaggtatggtcaacgcctggacaccatccagcaatgatgataacccctggattcaggttaatctgctgcgacggatgtgggttacaggcgtcgtcacccaaggagcttcacgtttggcctcccatgagtatctcaaggccttcaaggttgcctactcactgaacggccacgagttcgattttattcatgatgtgaacaaaaagcataaggaattcgtggggaactggaataaaaatgctgtccacgtcaaccttttcgagactccagtggaagcgcaatatgtcaggctttatccaactagttgtcatacagcttgcacacttagatttgaacttctcggctgtgagctgaatgggtgcgcgaaccccctcggcttgaaaaacaatagcattccggataagcaaatcacagcctcaagctcctacaagacatggggtctgcatttgttctcttggaatcctagttatgccaggttggataaacaggggaatttcaacgcttgggttgcagggtcctatgggaacgaccaatggctgcaagtcgatctgggtagcagcaaggaggtcaccgggattataacacaaggggcacgcaattttggcagtgtgcagttcgtggcctcatacaaagtcgcatatagtaacgattcagctaactggacggagtaccaagacccacgcacaggtagtagtaagatctttcctgggaactgggataaccatagccataagaaaaacctgtttgaaacccccatcttagctcggtacgtgagaatattgccagtggcatggcacaacagaatcgcactccggctggaattactaggctgctag

SEQ ID NO: 160370 - DNA, 1164 bp, Artificial Sequence
  derived and/or modified sequence
atgcccagacccagactgctggccgccctgtgcggcgccctgctgtgcgcccccagcctgctggtggccctggacatctgcagcaagaacccctgccacaacggcggcctgtgcgaggagatcagccaggaggtgagaggcgacgtgttccccagctacacctgcacctgcctgaagggctacgccggcaaccactgcgagaccaagtgcgtggagcccctgggcctggagaacggcaacatcgccaacagccagatcgccgccagcagcgtgagagtgaccttcctgggcctgcagcactgggtgcccgagctggccagactgaacagagccggcatggtgaacgcctggacccccagcagcaacgacgacaacccctggatccaggtgaacctgctgagaagaatgtgggtgaccggcgtggtgacccagggcgccagcagactggccagccacgagtacctgaaggccttcaaggtggcctacagcctgaacggccacgagttcgacttcatccacgacgtgaacaagaagcacaaggagttcgtgggcaactggaacaagaacgccgtgcacgtgaacctgttcgagacccccgtggaggcccagtacgtgagactgtaccccaccagctgccacaccgcctgcaccctgagattcgagctgctgggctgcgagctgaacggctgcgccaaccccctgggcctgaagaacaacagcatccccgacaagcagatcaccgccagcagcagctacaagacctggggcctgcacctgttcagctggaaccccagctacgccagactggacaagcagggcaacttcaacgcctgggtggccggcagctacggcaacgaccagtggctgcaggtggacctgggcagcagcaaggaggtgaccggcatcatcacccagggcgccagaaacttcggcagcgtgcagttcgtggccagctacaaggtggcctacagcaacgacagcgccaactggaccgagtaccaggaccccagaaccggcagcagcaagatcttccccggcaactgggacaaccacagccacaagaagaacctgttcgagacccccatcctggccagatacgtgagaatcctgcccgtggcctggcacaacagaatcgccctgagactggagctgctgggctgctag

SEQ ID NO: 160371 - protein, 738 aa, Artificial Sequence
  derived and/or modified sequence
MRGPSGALWLLLALRTVLGGMEVRWCATSDPEQHKCGNMSEAFREAGIQPSLLCVRGTSADHCVQLIAAQEADAITLDGGAIYEAGKEHGLKPVVGEVYDQEVGTSYYAVAVVRRSSHVTIDTLKGVKSCHTGINRTVGWNVPVGYLVESGRLSVMGCDVLKAVSDYFGGSCVPGAGETSYSESLCRLCRGDSSGEGVCDKSPLERYYDYSGAFRCLAEGAGDVAFVKHSTVLENTDGKTLPSWGQALLSQDFELLCRDGSRADVTEWRQCHLARVPAHAVVVRADTDGGLIFRLLNEGQRLFSHEGSSFQMFSSEAYGQKDLLFKDSTSELVPIATQTYEAWLGHEYLHAMKGLLCDPNRLPPYLRWCVLSTPEIQKCGDMAVAFRRQRLKPEIQCVSAKSPQHCMERIQAEQVDAVTLSGEDIYTAGKTYGLVPAAGEHYAPEDSSNSYYVVAVVRRDSSHAFTLDELRGKRSCHAGFGSPAGWDVPVGALIQRGFIRPKDCDVLTAVSEFFNASCVPVNNPKNYPSSLCALCVGDEQGRNKCVGNSQERYYGYRGAFRCLVENAGDVAFVRHTTVFDNTNGHNSEPWAAELRSEDYELLCPNGARAEVSQFAACNLAQIPPHAVMVRPDTNIFTVYGLLDKAQDLFGDDHNKNGFKMFDSSNYHGQDLLFKDATVRAVPVGEKTTYRGWLGLDYVAALEGMSSQQCSGAAAPAPGAPLLPLLLPALAARLLPPAL

SEQ ID NO: 160372 - DNA, 2217 bp, Artificial Sequence
  derived and/or modified sequence
atgcgtggacctagcggagctctctggctgctactagcccttagaactgtgctgggaggaatggaggtgcgctggtgcgcaacctccgatccagagcagcacaaatgtggtaacatgagcgaagctttcagagaagccggcatccagccctctctcttatgcgtaagaggtaccagcgccgaccactgtgtgcaactcatcgccgcacaagaggcggacgctatcacactcgatggaggtgccatttatgaggctggtaaggagcacggcttaaaacccgtggtcggagaagtctatgaccaagaagtcggtacttcttattacgccgtggcagtcgtgcggagaagctcgcacgttaccatcgacaccctgaagggagtgaaaagctgccatacaggtatcaaccggaccgtcggatggaatgtccccgtgggataccttgtcgagtccggtaggctctcagtgatggggtgcgatgtgctcaaggcggtgagcgactactttggcggcagttgcgtccccggcgctggcgagaccagctatagtgaaagtctctgccggctttgcagaggagatagcagcggagagggagtgtgtgacaaaagccccctcgaaagatattatgactacagcggggccttcaggtgtctggcggagggagctggcgatgtggcctttgttaaacactccaccgtactggaaaacacagatggtaagaccctgcccagctgggggcaggcactgctgtcacaggattttgaactgttgtgccgtgacggcagccgcgctgatgttacagaatggcgacagtgtcaccttgcccgggtgccggcccatgcggtcgtggtgagagccgataccgacggagggctgatctttaggttactgaacgaaggtcagagattgttctctcatgaagggtcctccttccaaatgttctccagcgaggcctatgggcaaaaggacctgctcttcaaggactcaaccagcgagcttgttcccatcgccactcagacctatgaagcatggttgggccacgagtatctgcatgctatgaaaggtctcctgtgcgatcctaatagactgcctccgtaccttaggtggtgcgtcctctctacccccgagatccagaagtgtggagatatggccgtggcctttcgccgccagcgcctgaaacccgaaattcagtgcgtgtcggccaaatccccgcagcactgcatggagcgcatccaagctgaacaagtcgatgctgtgaccctaagcggagaagacatatacacagcaggcaagacatatggacttgtccctgcagcgggcgagcattacgcccctgaagactcctctaactcttattacgtagttgctgtcgttaggcgcgatagcagccacgcctttaccctggacgaactgagggggaaacgaagctgccacgccggcttcggcagccctgccggctgggatgttcccgtgggggccctgattcaacggggcttcatccggcccaaagattgcgatgtactcaccgcggtatctgaattttttaacgcaagttgcgtacccgttaataacccgaagaactatccaagttctctgtgtgccttgtgcgtaggagacgaacagggaaggaacaaatgtgtggggaattcacaggaaagatattacggatatagaggcgccttcaggtgtcttgtagagaatgccggggacgtggcctttgtacgtcacactacagtcttcgacaacaccaacggtcacaacagcgaaccttgggcagctgaacttcggtctgaagactacgagctattatgtcctaacggggccagggctgaggtctcacagtttgcagcgtgtaatctggcccagatccctcctcacgctgtgatggtgcggccggacaccaacatctttacagtttatggcctcctcgacaaggcacaggacctcttcggagatgaccacaacaaaaatggatttaaaatgtttgatagttctaactaccacggtcaagaccttctgttcaaagatgcaaccgtgagagccgttccagtgggtgagaagacaacataccgcggttggctcggcctcgactacgtagctgcactggaaggcatgtccagccaacagtgttcaggtgctgcggcccctgctccaggggccccgctgttaccgctgctcctacctgcgctggccgccagactgttaccgcctgccctatag

SEQ ID NO: 160373 - DNA, 2217 bp, Artificial Sequence
  derived and/or modified sequence
atgaggggccccagcggggccctgtggctgctgctggccctgaggacagtgctgggcggcatggaggtgcgctggtgtgccaccagtgaccctgagcagcacaagtgtggcaacatgtctgaggccttccgggaggccggcatccagcccagcctgctgtgtgtgcggggcaccagcgctgaccactgtgtgcagctgattgctgcccaggaggctgatgccatcaccctggatggaggagccatctatgaagctgggaaggagcacggcctgaagcctgtggtgggggaggtgtatgaccaggaggtgggcaccagctactatgctgtggccgtggtgcggcgcagcagccacgtgaccatcgacaccctgaagggcgtgaagagctgccacacaggcatcaacagaacagtgggctggaatgtgcctgtgggctacctggtggagagcggccgcctgtctgtgatgggctgtgatgtgctgaaggctgtgtctgactactttggaggcagctgtgtgcctggggccggggagaccagctacagcgagagcctgtgccgcctgtgccgcggggacagcagcggggagggcgtgtgtgacaagagccccctggagcgctactatgactacagcggggccttccgctgcctggccgagggcgctggagatgtggcctttgtgaagcacagcacagtgctggagaacacagatggcaagaccctgcccagctggggccaggccctgctgagccaggactttgagctgctgtgcagagatggcagcagagcagatgtgacagagtggaggcagtgccacctggcccgggtgcctgcccatgctgtggtggtgcgggctgacacagatggcggcctcatcttccggctgctgaatgaaggccagaggctcttcagccatgagggcagcagcttccagatgttcagcagcgaggcctacggccagaaggacctgctcttcaaggacagcaccagcgagctggtgcccatcgccacccagacctatgaggcctggctgggccacgagtacctgcacgccatgaagggcctgctgtgtgaccccaaccggctgcccccctacctgcgctggtgtgtgctgagcaccccagagatccagaagtgtggggacatggctgtggccttccggcggcagaggctgaagccagagatccagtgtgtgtctgccaagagcccccagcactgcatggagcgcatccaggccgagcaggtggatgctgtgaccctgtctggagaggacatctacacagctgggaagacctacggcctggtgcctgctgctggggagcactacgcccctgaggacagcagcaacagctactacgtggtggccgtggtgcggcgggacagcagccacgccttcaccctggatgagctgcggggcaagaggagctgccacgccggcttcggcagccctgctggctgggatgtgcctgtgggcgccctgatccagaggggcttcatccggcccaaggactgtgatgtgctgacagctgtgtctgagttcttcaatgccagctgtgtgcctgtgaacaaccccaagaactaccccagcagcctgtgtgccctgtgtgtgggagatgagcagggcaggaacaagtgtgtgggcaacagccaggagcgctactacggctacagaggagccttccgctgcctggtggagaatgctggagatgtggcctttgtgcgccacaccaccgtgtttgacaacaccaacggccacaacagcgagccctgggccgctgagctgcggagtgaagattatgagctgctgtgccccaatggagcccgggcagaggtgtcccagtttgctgcctgcaacctggcccagatcccccctcatgctgtgatggtgcggccagacaccaacatcttcaccgtgtatggcctgctggacaaggcccaggacctgtttggagatgaccacaacaagaatggcttcaagatgtttgacagcagcaactaccacggccaggacctgctcttcaaggatgccaccgtgcgggctgtgcctgtgggggagaagaccacctaccggggctggctgggcctggactatgtggccgccctggagggcatgagcagccagcagtgcagcggggctgctgccccagcccctggggcccccctgctgcccctgctgctgcctgccctggccgcccggctgctgcccccagccctgtag

SEQ ID NO: 160374 - DNA, 2217 bp, Artificial Sequence
  derived and/or modified sequence
atgcggggccccagcggcgccctgtggctgctgctggccctgcggactgtcctcggcggcatggaggtacggtggtgtgccacgtccgatcccgaacaacacaagtgcggaaacatgtccgaagcgttcagagaggcgggaattcagccttctctcctgtgcgtacgtggaacttcagctgaccattgtgtccaattgatcgcagcccaggaagcggatgctatcacactggatgggggagcaatctacgaggccggtaaagagcacggactgaagcccgtcgtgggcgaagtatacgaccaagaggttgggacctcttattatgctgtggcagtggtgcgacgctcttcgcatgtcaccatagacacgctgaaaggagtcaagtcatgtcatacaggcataaataggactgtgggctggaacgtgccagtcggctacctggtggaatcgggtagattgagtgtaatgggctgcgacgtcctaaaggcagtgagtgactatttcggggggagctgcgtgcctggagccggggagacgtcgtactctgagtcactttgccgcctgtgtagaggcgacagctccggcgaaggcgtatgtgacaaatcccctctcgaaagatactacgattacagtggcgcctttcggtgtctggccgaaggcgccggtgatgtagcattcgtcaagcactccacagtgctggaaaatacagacgggaaaactcttccttcttgggggcaggccctgctcagccaggacttcgaattactttgtagggacggtagccgagcagatgtcacagaatggagacaatgtcacctggcacgggtgcctgcccacgctgtggtcgtaagagctgatacggatggaggcctgatcttccgtctgttgaatgaaggccagaggctgttctcacacgaaggttctagctttcaaatgttttcgagcgaggcttatggtcaaaaggatctgctgtttaaagattctacgagcgagttagtgcccatagcgacccagacctacgaagcttggctaggccacgaatacttgcacgccatgaagggcctattatgcgaccccaacaggctgcctccctacctcaggtggtgcgtgctgagcaccccagagatccagaagtgcggagatatggccgttgcctttcgcaggcagcgacttaaacccgagatccagtgtgtctcagctaagagcccacagcactgtatggaacggatccaggctgagcaagtagacgctgttaccttaagtggtgaagatatctatactgcgggtaaaacctacggattggtgcccgccgcaggcgagcactacgctccggaagattctagcaattcctattacgtggtggcagtcgtgcgcagagattcaagccatgcattcacgctcgatgaactgcggggaaaacggagctgtcacgctggatttggctctcctgcgggatgggatgtgccagtgggcgctcttatccaacgaggctttatccgacctaaagactgcgatgtacttacagcagtctccgaatttttcaatgcatcttgcgtgccagttaataatcctaaaaattatccttcttctctgtgtgccttatgcgtaggggatgagcagggcagaaacaagtgcgtcgggaatagtcaggagagatactatggctatcggggggcattcagatgtctcgtagaaaacgcgggggacgtcgctttcgtgcggcatactacggtctttgacaacactaatggacacaattcagagccttgggccgctgagctgaggagcgaggactacgagctgctgtgccccaacggagccagagctgaagtatcacaattcgctgcgtgcaacctagctcagattcccccccacgccgtgatggttcgccctgatactaatatattcacagtgtatggtttactggataaggcgcaagacttgtttggcgacgaccacaacaagaatggctttaagatgttcgattctagtaattaccatggccaagaccttcttttcaaagacgcgacagtgcgcgctgttcccgtcggggaaaagaccacctatcgcgggtggctgggcctggattacgttgcggctttggaaggtatgagctcccagcagtgtagcggagcggccgcgccagcacctggagctccactgctgcctttattgttaccggcccttgccgccagactcctccccccagcactttag

SEQ ID NO: 160375 - DNA, 2217 bp, Artificial Sequence
  derived and/or modified sequence
atgcgcggtcctagcggggcactgtggctcctgctcgccctgagaacggtcctgggcggtatggaagttagatggtgcgccacctctgaccctgagcagcacaagtgcggaaacatgagcgaggcttttcgggaggccggaatacagccatctctgttatgtgtgagagggaccagcgctgatcactgcgtccagctcatcgctgcacaggaggcagatgccatcaccctggatgggggtgctatctacgaagccggaaaggagcacggcctcaagcctgtcgtgggagaggtttacgaccaggaggtaggtacctcctattatgccgtggccgtagttcggagatcttctcacgtgaccatcgacacactgaaaggggtcaagtcatgccacacaggaattaatcgcaccgtgggatggaatgtcccagttggctacttagtggagagcggcagactatctgtcatgggatgtgatgttctgaaggccgtgtctgactactttggtggctcttgcgtgcctggggcaggcgagacaagttactctgaatccctgtgccgtctgtgtcgaggtgacagttccggggagggggtctgcgacaaaagccctctggagaggtactacgactactctggggcattccgatgtctggccgaaggggctggtgatgtcgcctttgttaaacattctactgtgcttgaaaacaccgatggaaaaaccctgccatcatgggggcaagcgcttttaagccaggactttgagttgctgtgtagggacggcagtcgcgctgatgtaactgagtggcgacagtgccacctcgcgagggtgcccgctcatgccgtggtagtgcgggctgacacggacgggggactgatattcagactgctcaatgaaggacaacgcttgttttcccatgagggctccagtttccagatgttcagcagcgaggcatacgggcagaaagatctgcttttcaaggatagcactagtgaattagttcccatagcgacccagacttacgaagcctggctgggacacgagtacctccacgcaatgaagggcctcctctgtgaccccaatcggctccccccatacctgaggtggtgcgtgctgagtacccctgagatacagaagtgtggagatatggctgtggccttccggagacagagattaaagccagaaattcagtgtgtctctgctaaatcaccgcagcattgcatggagagaattcaggcggaacaggtagacgcagtgactctttccggagaagatatttacacagccggtaagacctacgggttagtgcccgctgctggagaacattacgctcccgaagacagctcaaactcgtactatgtcgtggctgtcgtgcgccgagattcgtctcatgccttcaccctggatgaactgcggggaaaacggtcctgtcatgccggattcgggtccccggcaggttgggatgtccccgtcggggctctgattcagcggggttttatccgccctaaggactgcgatgtcttaaccgctgtctcagaattctttaacgcgtcttgtgtccctgtaaacaaccccaagaattacccctcatctctatgtgctttgtgtgtgggagatgagcagggacgcaataaatgtgtgggcaacagtcaagaaaggtactacggctacaggggcgcattcaggtgtctcgttgagaatgcaggcgatgtggctttcgtcagacacacaacagtgtttgacaacaccaatggccacaacagcgagccttgggctgcagaactaagaagcgaagactatgaactgttgtgtccaaacggggctagagcggaggttagtcagtttgccgcttgcaatttggcccaaatccctcctcatgcagtgatggtacgccctgataccaatatctttaccgtctatggcctcctcgacaaggcacaagacctgtttggagatgatcacaacaaaaatggattcaagatgttcgattcctcaaactaccacggacaggacctgcttttcaaagatgcgaccgtccgggctgtgcccgtgggggaaaaaacaacatatagaggctggctgggattggattacgtggcagctttggaaggtatgtcaagtcaacagtgtagcggggctgccgctccggctcctggggctcctctgctccctttgctgctccccgctttggctgccagacttcttcctcccgcattatag

SEQ ID NO: 160376 - DNA, 3963 bp, Artificial Sequence
  derived and/or modified sequence
cacttaaggagctcgggccagcgcgagggggagcagggaggaagcccggctgctgcggacctcctcggacccggacccagccccagcccggccccagccagccccgacggcgccatgcggggtccgagcggggctctgtggctgctcctggctctgcgcaccgtgctcggtggcatggaggtgcggtggtgcgccacctcggacccagagcagcacaagtgcggcaacatgagcgaggccttccgggaagcgggcatccagccctccctcctctgcgtccggggcacctccgccgaccactgcgtccagctcatcgcggcccaggaggctgacgccatcactctggatggaggagccatctatgaggcgggaaaggagcacggcctgaagccggtggtgggcgaagtgtacgatcaagaggtcggtacctcctattacgccgtggctgtggtcaggaggagctcccatgtgaccattgacaccctgaaaggcgtgaagtcctgccacacgggcatcaatcgcacagtgggctggaacgtgcccgtgggctacctggtggagagcggccgcctctcggtgatgggctgcgatgtactcaaagctgtcagcgactattttgggggcagctgcgtcccgggggcaggagagaccagttactctgagtccctctgtcgcctctgcaggggtgacagctctggggaaggggtgtgtgacaagagccccctggagagatactacgactacagcggggccttccggtgcctggcggaaggggcaggggacgtggcttttgtgaagcacagcacggtactggagaacacggatgggaagacgcttccctcctggggccaggccctgctgtcacaggacttcgagctgctgtgccgggatggtagccgggccgatgtcaccgagtggaggcagtgccatctggcccgggtgcctgctcacgccgtggtggtccgggccgacacagatgggggcctcatcttccggctgctcaacgaaggccagcgtctgttcagccacgagggcagcagcttccagatgttcagctctgaggcctatggccagaaggatctactcttcaaagactctacctcggagcttgtgcccatcgccacacagacctatgaggcgtggctgggccatgagtacctgcacgccatgaagggtctgctctgtgaccccaaccggctgcccccctacctgcgctggtgtgtgctctccactcccgagatccagaagtgtggagacatggccgtggccttccgccggcagcggctcaagccagagatccagtgcgtgtcagccaagtccccccaacactgcatggagcggatccaggctgagcaggtcgacgctgtgaccctgagtggcgaggacatttacacggcggggaagacgtacggcctggttcccgcagccggggagcactatgccccggaagacagcagcaactcgtactacgtggtggccgtggtgagacgggacagctcccacgccttcaccttggatgagcttcggggcaagcgctcctgccacgccggtttcggcagccctgcaggctgggatgtccccgtgggtgcccttattcagagaggcttcatccggcccaaggactgtgacgtcctcacagcagtgagcgagttcttcaatgccagctgcgtgcccgtgaacaaccccaagaactacccctcctcgctgtgtgcactgtgcgtgggggacgagcagggccgcaacaagtgtgtgggcaacagccaggagcggtattacggctaccgcggcgccttcaggtgcctggtggagaatgcgggtgacgttgccttcgtcaggcacacaaccgtctttgacaacacaaacggccacaattccgagccctgggctgctgagctcaggtcagaggactatgaactgctgtgccccaacggggcccgagccgaggtgtcccagtttgcagcctgcaacctggcacagataccaccccacgccgtgatggtccggcccgacaccaacatcttcaccgtgtatggactgctggacaaggcccaggacctgtttggagacgaccacaataagaacgggttcaaaatgttcgactcctccaactatcatggccaagacctgcttttcaaggatgccaccgtccgggcggtgcctgtcggagagaaaaccacctaccgcggctggctggggctggactacgtggcggcgctggaagggatgtcgtctcagcagtgctcgggcgcagcggccccggcgcccggggcgcccctgctcccgctgctgctgcccgccctcgccgcccgcctgctcccgcccgccctctgagcccggccgccccgccccagagctccgatgcccgcccggggagtttccgcggcggcttcgcgctggaatccagaaggaagctcgcgaaggccgggcccggcgtgggcgggagcaggcgcctccccgggagccccgccgcccacgggcgccacctggcgctgctacctgaggcgccgcccccgggcccgcgcggcccttcccgccaaccgccgcctcccgccacctggagccgcgcgggccgcgccggaggaggccggttgcccaggaaaccgctgagtccgggcttcccgccgcccgccccgcggtgtcgcccgaggggcccgcccgcctcctccccgcagccccgcgcccccgtccgcgaggccccctggggacgcggtggccgccgaggcgcctacacccgcaggccgcggccaggccgtcccaggaggccccggcgccaacgggacccggcgcgtgggacagcggcctctgctggcggcggcgggagggaggccggaccggggcgacggggagaagccttcgcccgcgggaccgtgtccggggtgggggctccagttcctccgaccgcccgtgcgctgggagggaggccgagcccggggaacgccgcgtgccctgcctcgtcccccactgtggccgcgccagctccatcccgggccagccgcgtccacgggccccctcccgagtctcctcaggctctcgcctcccctacccccgtgggatgcccaccgcccgcacccacgcccgagcctggcggcagcagccgccccccgcctgaagggagccggaggtgacccaggccgcgggctcccgaggcccctgaagggctgcgcgtggggacccgccatgcttctgggttccgaacgggggtgagctccgtctcctcacccggccccgcacccgctgggcctggggacccctcactccccgtgcccgcccctccgcgaggcagcagaaagcgcccggccggggcctctctctactccatcttgccacagttgtctgagaagccagaaaaagtttccagaactggcagcccttaaaaaaaatgaagaggaagagaagaaatgggagcaggcagccctcgtcagcagaccgggagccgcgtgggcgcggagccatttgcattccggtctgcgggggctcggggatgctggtgacaggcccggttcccggtggctcgcccccacctgcgggcgtcgggaaggatcccttccatctctcagccgcagaggaggccctggcagcgccccggctgtagccatgcaaccccgaggagtcccgggcaccttcaccccaccgggaggggccacaaggacctgggcctcggccaccaagctttgtcccctctcgctgtggggggctagtgattctcctccgacctgacgattgcttggttttttcaaaagggagttttgtgcggtgagaagtgtgtttctgtgtggctaactctgggctagcgtgccgtggccattgaaggtgtggcctgcgtgggtgcagtgtaagtgacgctggattgtcaggtggcagcaggggacccctgctgtgtcagtgctaatgaaacatgttggttggtttctaaaataaagccaaacaagccagcacatgcagaggcttggaccctgatagaaa

SEQ ID NO: 160377 - DNA, 2217 bp, Artificial Sequence
  derived and/or modified sequence
atgagaggccccagcggcgccctgtggctgctgctggccctgagaaccgtgctgggcggcatggaggtgagatggtgcgccaccagcgaccccgagcagcacaagtgcggcaacatgagcgaggccttcagagaggccggcatccagcccagcctgctgtgcgtgagaggcaccagcgccgaccactgcgtgcagctgatcgccgcccaggaggccgacgccatcaccctggacggcggcgccatctacgaggccggcaaggagcacggcctgaagcccgtggtgggcgaggtgtacgaccaggaggtgggcaccagctactacgccgtggccgtggtgagaagaagcagccacgtgaccatcgacaccctgaagggcgtgaagagctgccacaccggcatcaacagaaccgtgggctggaacgtgcccgtgggctacctggtggagagcggcagactgagcgtgatgggctgcgacgtgctgaaggccgtgagcgactacttcggcggcagctgcgtgcccggcgccggcgagaccagctacagcgagagcctgtgcagactgtgcagaggcgacagcagcggcgagggcgtgtgcgacaagagccccctggagagatactacgactacagcggcgccttcagatgcctggccgagggcgccggcgacgtggccttcgtgaagcacagcaccgtgctggagaacaccgacggcaagaccctgcccagctggggccaggccctgctgagccaggacttcgagctgctgtgcagagacggcagcagagccgacgtgaccgagtggagacagtgccacctggccagagtgcccgcccacgccgtggtggtgagagccgacaccgacggcggcctgatcttcagactgctgaacgagggccagagactgttcagccacgagggcagcagcttccagatgttcagcagcgaggcctacggccagaaggacctgctgttcaaggacagcaccagcgagctggtgcccatcgccacccagacctacgaggcctggctgggccacgagtacctgcacgccatgaagggcctgctgtgcgaccccaacagactgcccccctacctgagatggtgcgtgctgagcacccccgagatccagaagtgcggcgacatggccgtggccttcagaagacagagactgaagcccgagatccagtgcgtgagcgccaagagcccccagcactgcatggagagaatccaggccgagcaggtggacgccgtgaccctgagcggcgaggacatctacaccgccggcaagacctacggcctggtgcccgccgccggcgagcactacgcccccgaggacagcagcaacagctactacgtggtggccgtggtgagaagagacagcagccacgccttcaccctggacgagctgagaggcaagagaagctgccacgccggcttcggcagccccgccggctgggacgtgcccgtgggcgccctgatccagagaggcttcatcagacccaaggactgcgacgtgctgaccgccgtgagcgagttcttcaacgccagctgcgtgcccgtgaacaaccccaagaactaccccagcagcctgtgcgccctgtgcgtgggcgacgagcagggcagaaacaagtgcgtgggcaacagccaggagagatactacggctacagaggcgccttcagatgcctggtggagaacgccggcgacgtggccttcgtgagacacaccaccgtgttcgacaacaccaacggccacaacagcgagccctgggccgccgagctgagaagcgaggactacgagctgctgtgccccaacggcgccagagccgaggtgagccagttcgccgcctgcaacctggcccagatccccccccacgccgtgatggtgagacccgacaccaacatcttcaccgtgtacggcctgctggacaaggcccaggacctgttcggcgacgaccacaacaagaacggcttcaagatgttcgacagcagcaactaccacggccaggacctgctgttcaaggacgccaccgtgagagccgtgcccgtgggcgagaagaccacctacagaggctggctgggcctggactacgtggccgccctggagggcatgagcagccagcagtgcagcggcgccgccgcccccgcccccggcgcccccctgctgcccctgctgctgcccgccctggccgccagactgctgccccccgccctgtag

SEQ ID NO: 160378 - protein, 804 aa, Artificial Sequence
  derived and/or modified sequence
MEEPGVTPQPYLGLLLEELRRVVAALPEGMRPDSNLYGFPWELVICAAVVGFFAVLFFLWRSFRSVRSRLYVGREKKLALMLSGLIEEKSKLLEKFSLVQKEYEGYEVESSLKDASFEKEATEAQSLEATCEKLNRSNSELEDEILCLEKELKEEKSKHSEQDELMADISKRIQSLEDESKSLKSQVAEAKMTFKIFQMNEERLKIAIKDALNENSQLQESQKQLLQEAEVWKEQVSELNKQKVTFEDSKVHAEQVLNDKESHIKTLTERLLKMKDWAAMLGEDITDDDNLELEMNSESENGAYLDNPPKGALKKLIHAAKLNASLKTLEGERNQIYIQLSEVDKTKEELTEHIKNLQTEQASLQSENTHFENENQKLQQKLKVMTELYQENEMKLHRKLTVEENYRLEKEEKLSKVDEKISHATEELETYRKRAKDLEEELERTIHSYQGQIISHEKKAHDNWLAARNAERNLNDLRKENAHNRQKLTETELKFELLEKDPYALDVPNTAFGREHSPYGPSPLGWPSSETRAFLSPPTLLEGPLRLSPLLPGGGGRGSRGPGNPLDHQITNERGESSCDRLTDPHRAPSDTGSLSPPWDQDRRMMFPPPGQSYPDSALPPQRQDRFCSNSGRLSGPAELRSFNMPSLDKMDGSMPSEMESSRNDTKDDLGNLNVPDSSLPAENEATGPGFVPPPLAPIRGPLFPVDARGPFLRRGPPFPPPPPGAMFGASRDYFPPGDFPGPPPAPFAMRNVYPPRGFPPYLPPRPGFFPPPPHSEGRSEFPSGLIPPSNEPATEHPEPQQET

SEQ ID NO: 160379 - protein, 771 aa, Artificial Sequence
  derived and/or modified sequence
MEEPGVTPQPYLGLLLEELRRVVAALPEGMRPDSNLYGFPWELVICAAVVGFFAVLFFLWRSFRSVRSRLYVGREKKLALMLSGLIEEKSKLLEKFSLVQKEYEGYEVESSLKDASFEKEATEAQSLEATCEKLNRSNSELEDEILCLEKELKEEKSKHSEQDELMADISKRIQSLEDESKSLKSQVAEAKMTFKIFQMNEERLKIAIKDALNENSQLQESQKQLLQEAEVWKEQVSELNKQKVTFEDSKVHAEQVLNDKESHIKTLTERLLKMKDWAAMLGEDITDDDNLELEMNSESENGAYLDNPPKGALKKLIHAAKLNASLKTLEGERNQIYIQLSEVDKTKEELTEHIKNLQTEQASLQSENTHFENENQKLQQKLKVMTELYQENEMKLHRKLTVEENYRLEKEEKLSKVDEKISHATEELETYRKRAKDLEEELERTIHSYQGQIISHEKKAHDNWLAARNAERNLNDLRKENAHNRQKLTETELKFELLEKDPYALDVPNTAFGREHSPYGPSPLGWPSSETRAFLSPPTLLEGPLRLSPLLPGGGGRGSRGPGNPLDHQITNERGESSCDRLTDPHRAPSDTGSLSPPWDQDRRMMFPPPGQSYPDSALPPQRQDRFCSNSGRLSGPAELRSFNMPSLDKMDGSMPSEMESSRNDTKDDLGNLNVPDSSLPAENEATGPGFVPPPLAPIRGPLFPVDARGPFLRRGPPFPPPPPGAMFGASRDYFPPGDFPGPPPAPFASARSPPGAGAPASGRGLGGPQK

SEQ ID NO: 160380 - DNA, 2415 bp, Artificial Sequence
  derived and/or modified sequence
atggaggagcccggcgtgaccccccagccctacctgggcctgctgctggaggagctgagaagagtggtggccgccctgcccgagggcatgagacccgacagcaacctgtacggcttcccctgggagctggtgatctgcgccgccgtggtgggcttcttcgccgtgctgttcttcctgtggagaagcttcagaagcgtgagaagcagactgtacgtgggcagagagaagaagctggccctgatgctgagcggcctgatcgaggagaagagcaagctgctggagaagttcagcctggtgcagaaggagtacgagggctacgaggtggagagcagcctgaaggacgccagcttcgagaaggaggccaccgaggcccagagcctggaggccacctgcgagaagctgaacagaagcaacagcgagctggaggacgagatcctgtgcctggagaaggagctgaaggaggagaagagcaagcacagcgagcaggacgagctgatggccgacatcagcaagagaatccagagcctggaggacgagagcaagagcctgaagagccaggtggccgaggccaagatgaccttcaagatcttccagatgaacgaggagagactgaagatcgccatcaaggacgccctgaacgagaacagccagctgcaggagagccagaagcagctgctgcaggaggccgaggtgtggaaggagcaggtgagcgagctgaacaagcagaaggtgaccttcgaggacagcaaggtgcacgccgagcaggtgctgaacgacaaggagagccacatcaagaccctgaccgagagactgctgaagatgaaggactgggccgccatgctgggcgaggacatcaccgacgacgacaacctggagctggagatgaacagcgagagcgagaacggcgcctacctggacaacccccccaagggcgccctgaagaagctgatccacgccgccaagctgaacgccagcctgaagaccctggagggcgagagaaaccagatctacatccagctgagcgaggtggacaagaccaaggaggagctgaccgagcacatcaagaacctgcagaccgagcaggccagcctgcagagcgagaacacccacttcgagaacgagaaccagaagctgcagcagaagctgaaggtgatgaccgagctgtaccaggagaacgagatgaagctgcacagaaagctgaccgtggaggagaactacagactggagaaggaggagaagctgagcaaggtggacgagaagatcagccacgccaccgaggagctggagacctacagaaagagagccaaggacctggaggaggagctggagagaaccatccacagctaccagggccagatcatcagccacgagaagaaggcccacgacaactggctggccgccagaaacgccgagagaaacctgaacgacctgagaaaggagaacgcccacaacagacagaagctgaccgagaccgagctgaagttcgagctgctggagaaggacccctacgccctggacgtgcccaacaccgccttcggcagagagcacagcccctacggccccagccccctgggctggcccagcagcgagaccagagccttcctgagcccccccaccctgctggagggccccctgagactgagccccctgctgcccggcggcggcggcagaggcagcagaggccccggcaaccccctggaccaccagatcaccaacgagagaggcgagagcagctgcgacagactgaccgacccccacagagcccccagcgacaccggcagcctgagccccccctgggaccaggacagaagaatgatgttccccccccccggccagagctaccccgacagcgccctgcccccccagagacaggacagattctgcagcaacagcggcagactgagcggccccgccgagctgagaagcttcaacatgcccagcctggacaagatggacggcagcatgcccagcgagatggagagcagcagaaacgacaccaaggacgacctgggcaacctgaacgtgcccgacagcagcctgcccgccgagaacgaggccaccggccccggcttcgtgcccccccccctggcccccatcagaggccccctgttccccgtggacgccagaggccccttcctgagaagaggcccccccttccccccccccccccccggcgccatgttcggcgccagcagagactacttcccccccggcgacttccccggccccccccccgcccccttcgccatgagaaacgtgtacccccccagaggcttccccccctacctgccccccagacccggcttcttccccccccccccccacagcgagggcagaagcgagttccccagcggcctgatcccccccagcaacgagcccgccaccgagcaccccgagccccagcaggagacctag

SEQ ID NO: 160381 - DNA, 2316 bp, Artificial Sequence
  derived and/or modified sequence
atggaggagcccggcgtgaccccccagccctacctgggcctgctgctggaggagctgagaagagtggtggccgccctgcccgagggcatgagacccgacagcaacctgtacggcttcccctgggagctggtgatctgcgccgccgtggtgggcttcttcgccgtgctgttcttcctgtggagaagcttcagaagcgtgagaagcagactgtacgtgggcagagagaagaagctggccctgatgctgagcggcctgatcgaggagaagagcaagctgctggagaagttcagcctggtgcagaaggagtacgagggctacgaggtggagagcagcctgaaggacgccagcttcgagaaggaggccaccgaggcccagagcctggaggccacctgcgagaagctgaacagaagcaacagcgagctggaggacgagatcctgtgcctggagaaggagctgaaggaggagaagagcaagcacagcgagcaggacgagctgatggccgacatcagcaagagaatccagagcctggaggacgagagcaagagcctgaagagccaggtggccgaggccaagatgaccttcaagatcttccagatgaacgaggagagactgaagatcgccatcaaggacgccctgaacgagaacagccagctgcaggagagccagaagcagctgctgcaggaggccgaggtgtggaaggagcaggtgagcgagctgaacaagcagaaggtgaccttcgaggacagcaaggtgcacgccgagcaggtgctgaacgacaaggagagccacatcaagaccctgaccgagagactgctgaagatgaaggactgggccgccatgctgggcgaggacatcaccgacgacgacaacctggagctggagatgaacagcgagagcgagaacggcgcctacctggacaacccccccaagggcgccctgaagaagctgatccacgccgccaagctgaacgccagcctgaagaccctggagggcgagagaaaccagatctacatccagctgagcgaggtggacaagaccaaggaggagctgaccgagcacatcaagaacctgcagaccgagcaggccagcctgcagagcgagaacacccacttcgagaacgagaaccagaagctgcagcagaagctgaaggtgatgaccgagctgtaccaggagaacgagatgaagctgcacagaaagctgaccgtggaggagaactacagactggagaaggaggagaagctgagcaaggtggacgagaagatcagccacgccaccgaggagctggagacctacagaaagagagccaaggacctggaggaggagctggagagaaccatccacagctaccagggccagatcatcagccacgagaagaaggcccacgacaactggctggccgccagaaacgccgagagaaacctgaacgacctgagaaaggagaacgcccacaacagacagaagctgaccgagaccgagctgaagttcgagctgctggagaaggacccctacgccctggacgtgcccaacaccgccttcggcagagagcacagcccctacggccccagccccctgggctggcccagcagcgagaccagagccttcctgagcccccccaccctgctggagggccccctgagactgagccccctgctgcccggcggcggcggcagaggcagcagaggccccggcaaccccctggaccaccagatcaccaacgagagaggcgagagcagctgcgacagactgaccgacccccacagagcccccagcgacaccggcagcctgagccccccctgggaccaggacagaagaatgatgttccccccccccggccagagctaccccgacagcgccctgcccccccagagacaggacagattctgcagcaacagcggcagactgagcggccccgccgagctgagaagcttcaacatgcccagcctggacaagatggacggcagcatgcccagcgagatggagagcagcagaaacgacaccaaggacgacctgggcaacctgaacgtgcccgacagcagcctgcccgccgagaacgaggccaccggccccggcttcgtgcccccccccctggcccccatcagaggccccctgttccccgtggacgccagaggccccttcctgagaagaggcccccccttccccccccccccccccggcgccatgttcggcgccagcagagactacttcccccccggcgacttccccggccccccccccgcccccttcgccagcgccagaagcccccccggcgccggcgcccccgccagcggcagaggcctgggcggcccccagaagtag

SEQ ID NO: 160382 - DNA, 3860 bp, Artificial Sequence
  derived and/or modified sequence
tgcccggccgaaaccaaaccgaggggtggggtggcgaggacagggtacgtcgcaggcttgtgcgggtcgggctcggacctgcgctgcctcgggatgtaaagtataacaagagggtcgggatgggcagcgtaggcctgtgaggcctgcgggtgcccctgtcccccagctccccccgcagccggctccgcagtggtccactccggttgccgggtgcggattcgggttccggaccgaaggctgtgtgttctccgccgtttattgtggccccgacaggccggggttactgtggcgaccacgagagcagctttggcgctatggaggagcccggggttacccctcaaccgtatttggggctgctcctggaggagctacgcagggttgtggcagcactgcctgaaggtatgagaccagattctaatctttatggttttccatgggaattggtgatatgtgcagctgttgttggattttttgctgttctcttttttttgtggagaagttttagatcggttaggagtcggctttatgtgggacgagagaaaaagcttgctctaatgctttctggactaattgaagaaaaaagtaaactacttgaaaaatttagccttgttcaaaaagagtatgaaggctatgaagtagagtcatctttaaaggatgccagctttgagaaggaggcaacagaagcacaaagtttggaggcaacctgtgaaaagctgaacaggtccaattctgaacttgaggatgaaatactctgtctagaaaaagagttaaaagaagagaaatccaaacattctgaacaagatgaattgatggcggatatttcaaaaaggatacagtctctagaagatgagtcaaaatccctcaaatcacaagtagctgaagccaaaatgaccttcaagatatttcaaatgaatgaagaacgactgaagatagcaataaaagatgctttgaatgaaaattctcaacttcaggaaagccagaaacagcttttgcaagaagctgaagtatggaaagaacaagtgagtgaacttaataaacagaaagtaacatttgaagactccaaagtacatgcagaacaagttctaaatgataaagaaagtcacatcaagactctgactgaacgcttgttaaagatgaaagattgggctgctatgcttggagaagacataacggatgatgataacttggaattagaaatgaacagtgaatcggaaaatggtgcttacttagataatcctccaaaaggagctttgaagaaactgattcatgctgctaagttaaatgcttctttaaaaaccttagaaggagaaagaaaccaaatttatattcagttgtctgaagttgataaaacaaaggaagagcttacagagcatattaaaaatcttcagactgaacaagcatctttgcagtcagaaaacacacattttgaaaatgagaatcagaagcttcaacagaaacttaaagtaatgactgaattatatcaagaaaatgaaatgaaactccacaggaaattaacagtagaggaaaattatcggttagagaaagaagagaaactttctaaagtagatgaaaagatcagccatgccactgaagagctggagacctatagaaagcgagccaaagatcttgaagaagaattggagagaactattcattcttatcaagggcagattatttcccatgagaaaaaagcacatgataattggttggcagctcggaatgctgaaagaaacctcaatgatttaaggaaagaaaatgctcacaacagacaaaaattaactgaaacagagcttaaatttgaacttttagaaaaagatccttatgcactcgatgttccaaatacagcatttggcagagagcattccccatatggtccctcaccattgggttggccttcatctgaaacaagagcttttctctctcctccaactttgttggagggtccactcagactctcacctttgcttccagggggaggaggaagaggctcacgaggcccagggaatcctctggaccatcagattaccaatgaaagaggagaatcaagctgtgataggttaaccgatcctcatagggctccctctgacactgggtctctgtcacctccatgggaccaggaccgtaggatgatgtttcctccgccaggacaatcatatcctgattcagcccttcctccacaaaggcaagacagattttgttctaattctggtagactgtctggaccagcagaactcagaagttttaatatgccttctttggataaaatggatgggtcaatgccttcagaaatggaatccagtagaaatgataccaaagatgatcttggtaatttaaatgtgcctgattcatctctccctgctgaaaatgaagccactggccctggctttgttcctccacctcttgctccaatcagaggtccattgtttccagtggatgcaagaggcccattcttgagaagaggacctcctttccccccacctcctccaggagccatgtttggagcttctcgagattattttccaccaggggatttcccaggtccaccacctgctccatttgcaatgagaaatgtctatccaccgaggggttttcctccttaccttcccccaagacctggatttttccccccacccccacattctgaaggtagaagtgagttcccctcaggtttgattccaccttcaaatgagcctgctactgaacatccagaaccacagcaagaaacctgacaatatttttgctctcttcaaaagtaattttgactgatctcattttcagtttaagtaactgctgttacttaagtgattacacttttgctcaaattgaagcttaatggaattataattctcaggatagtattttgtaaataaagatgatttaaatatgaatcttatgagtaaattatttcaattttattttagacggtataactatttcaatttgattaatccactattatataaacaatagtgggagttttatatatgtaatctttcaggtggggaggctttaaattctgaagtctgtgtctttatgccaagaactgtatttactgtggttgtggacaaatgtgaaagtaactttatgcttaaataaattatagttgatttaaagatttgtttggcattgataataataaaatcagtagtttttctataactatggctctattaacttttttccttttaccaataactttgaggtgcaaaactcaaacttatgtgggtcttttgtgttcaattatgttatgacaaatgtgctctctttcttgtaaatagacatgagtggcccaaagcaacaaattaatacacttttaaaagtcaaaattgattatattttaaagataaccaggatattatctaatggtgaattgtagaattttgatcttcttattcactgagtttcttgcacggtttctttattgcttttttttccccgcctgttcttttgtaaggtatttactattttctgtggaggatattgagatgtactacaggataactgtagtgaatgatgtgtcatcattttgagctttggactcaatatctttagtgtttccctaaatcagatttgtaggtcatgttaagcttcttgcacattaatatgattatggaaggaaaggcagtgaagcataactaataaacatcataatacttaacgttgcccagttggttgttttagtattagacttttttttcaatgccaaaagatagaagattaaatattcttgaataaagcagtgatatatattggaacacttcaccccagcatttccccaggtgttgtttggaacactgatcttgtgaagtatttttgctccctttctattctaaccctcacctcaaaaaaaaaaaacaaaa

SEQ ID NO: 160383 - DNA, 2652 bp, Artificial Sequence
  derived and/or modified sequence
cgcctccccgccttctcgcggctgcccggccgaaaccaaaccgaggggtggggtggcgaggacagggtacgtcgcaggcttgtgcgggtcgggctcggacctgcgctgcctcgggatgtaaagtataacaagagggtcgggatgggcagcgtaggcctgtgaggcctgcgggtgcccctgtcccccagctccccccgcagccggctccgcagtggtccactccggttgccgggtgcggattcgggttccggaccgaaggctgtgtgttctccgccgtttattgtggccccgacaggccggggttactgtggcgaccacgagagcagctttggcgctatggaggagcccggggttacccctcaaccgtatttggggctgctcctggaggagctacgcagggttgtggcagcactgcctgaaggtatgagaccagattctaatctttatggttttccatgggaattggtgatatgtgcagctgttgttggattttttgctgttctcttttttttgtggagaagttttagatcggttaggagtcggctttatgtgggacgagagaaaaagcttgctctaatgctttctggactaattgaagaaaaaagtaaactacttgaaaaatttagccttgttcaaaaagagtatgaaggctatgaagtagagtcatctttaaaggatgccagctttgagaaggaggcaacagaagcacaaagtttggaggcaacctgtgaaaagctgaacaggtccaattctgaacttgaggatgaaatactctgtctagaaaaagagttaaaagaagagaaatccaaacattctgaacaagatgaattgatggcggatatttcaaaaaggatacagtctctagaagatgagtcaaaatccctcaaatcacaagtagctgaagccaaaatgaccttcaagatatttcaaatgaatgaagaacgactgaagatagcaataaaagatgctttgaatgaaaattctcaacttcaggaaagccagaaacagcttttgcaagaagctgaagtatggaaagaacaagtgagtgaacttaataaacagaaagtaacatttgaagactccaaagtacatgcagaacaagttctaaatgataaagaaagtcacatcaagactctgactgaacgcttgttaaagatgaaagattgggctgctatgcttggagaagacataacggatgatgataacttggaattagaaatgaacagtgaatcggaaaatggtgcttacttagataatcctccaaaaggagctttgaagaaactgattcatgctgctaagttaaatgcttctttaaaaaccttagaaggagaaagaaaccaaatttatattcagttgtctgaagttgataaaacaaaggaagagcttacagagcatattaaaaatcttcagactgaacaagcatctttgcagtcagaaaacacacattttgaaaatgagaatcagaagcttcaacagaaacttaaagtaatgactgaattatatcaagaaaatgaaatgaaactccacaggaaattaacagtagaggaaaattatcggttagagaaagaagagaaactttctaaagtagatgaaaagatcagccatgccactgaagagctggagacctatagaaagcgagccaaagatcttgaagaagaattggagagaactattcattcttatcaagggcagattatttcccatgagaaaaaagcacatgataattggttggcagctcggaatgctgaaagaaacctcaatgatttaaggaaagaaaatgctcacaacagacaaaaattaactgaaacagagcttaaatttgaacttttagaaaaagatccttatgcactcgatgttccaaatacagcatttggcagagagcattccccatatggtccctcaccattgggttggccttcatctgaaacaagagcttttctctctcctccaactttgttggagggtccactcagactctcacctttgcttccagggggaggaggaagaggctcacgaggcccagggaatcctctggaccatcagattaccaatgaaagaggagaatcaagctgtgataggttaaccgatcctcatagggctccctctgacactgggtctctgtcacctccatgggaccaggaccgtaggatgatgtttcctccgccaggacaatcatatcctgattcagcccttcctccacaaaggcaagacagattttgttctaattctggtagactgtctggaccagcagaactcagaagttttaatatgccttctttggataaaatggatgggtcaatgccttcagaaatggaatccagtagaaatgataccaaagatgatcttggtaatttaaatgtgcctgattcatctctccctgctgaaaatgaagccactggccctggctttgttcctccacctcttgctccaatcagaggtccattgtttccagtggatgcaagaggcccattcttgagaagaggacctcctttccccccacctcctccaggagccatgtttggagcttctcgagattattttccaccaggggatttcccaggtccaccacctgctccatttgcaagcgcacgctctccgcccggggcaggagccccggcttcaggtaggggcctaggagggccccagaaatga

SEQ ID NO: 160384 - DNA, 3071 bp, Artificial Sequence
  derived and/or modified sequence
aaaggagaaatagcaatcttgagttctgaaaagctaggccgcattttggtcctgaaaaatcacttgctgtgaacttgggccagtttttgattttttaaatggcataacagttcgttgctacaagaggttacatcaggaaaatttcctaaggatttaagattttgttcatctattgagttcttttgggtgatttgtttaggaggaagtatctgctcctttttgagttgcttcaccaaagtacttgagtgagaaggcagaatataatgagaatgatcatgctggcaaggaagacatatatatgagatgggttatcctttacacctacgtcagctaaaaccgtctcctacgaacaaatccagcacttggcactttattcgacggtcctaaaaatagagtcctaaatttagaaggcaaggtgctacttttagctcctcttctcggaggaaaacagcacgcaccgcgccaggccaaggtccacggggatttgatttagcatttgggtaactggccgctaatggaactgaagacagctgggcctaacaagtgcccaggtgactcaggttgtggcagcactgcctgaaggtatgagaccagattctaatctttatggttttccatgggaattggtgatatgtgcagctgttgttggattttttgctgttctcttttttttgtggagaagttttagatcggttaggagtcggctttatgtgggacgagagaaaaagcttgctctaatgctttctggactaattgaagaaaaaagtaaactacttgaaaaatttagccttgttcaaaaagagtatgaaggctatgaagtagagtcatctttaaaggatgccagctttgagaaggaggcaacagaagcacaaagtttggaggcaacctgtgaaaagctgaacaggtccaattctgaacttgaggatgaaatactctgtctagaaaaagagttaaaagaagagaaatccaaacattctgaacaagatgaattgatggcggatatttcaaaaaggatacagtctctagaagatgagtcaaaatccctcaaatcacaagtagctgaagccaaaatgaccttcaagatatttcaaatgaatgaagaacgactgaagatagcaataaaagatgctttgaatgaaaattctcaacttcaggaaagccagaaacagcttttgcaagaagctgaagtatggaaagaacaagtgagtgaacttaataaacagaaagtaacatttgaagactccaaagtacatgcagaacaagttctaaatgataaagaaagtcacatcaagactctgactgaacgcttgttaaagatgaaagattgggctgctatgcttggagaagacataacggatgatgataacttggaattagaaatgaacagtgaatcggaaaatggtgcttacttagataatcctccaaaaggagctttgaagaaactgattcatgctgctaagttaaatgcttctttaaaaaccttagaaggagaaagaaaccaaatttatattcagttgtctgaagttgataaaacaaaggaagagcttacagagcatattaaaaatcttcagactgaacaagcatctttgcagtcagaaaacacacattttgaaaatgagaatcagaagcttcaacagaaacttaaagtaatgactgaattatatcaagaaaatgaaatgaaactccacaggaaattaacagtagaggaaaattatcggttagagaaagaagagaaactttctaaagtagatgaaaagatcagccatgccactgaagagctggagacctatagaaagcgagccaaagatcttgaagaagaattggagagaactattcattcttatcaagggcagattatttcccatgagaaaaaagcacatgataattggttggcagctcggaatgctgaaagaaacctcaatgatttaaggaaagaaaatgctcacaacagacaaaaattaactgaaacagagcttaaatttgaacttttagaaaaagatccttatgcactcgatgttccaaatacagcatttggcagagagcattccccatatggtccctcaccattgggttggccttcatctgaaacaagagcttttctctctcctccaactttgttggagggtccactcagactctcacctttgcttccagggggaggaggaagaggctcacgaggcccagggaatcctctggaccatcagattaccaatgaaagaggagaatcaagctgtgataggttaaccgatcctcatagggctccctctgacactgggtctctgtcacctccatgggaccaggaccgtaggatgatgtttcctccgccaggacaatcatatcctgattcagcccttcctccacaaaggcaagacagattttgttctaattctggtagactgtctggaccagcagaactcagaagttttaatatgccttctttggataaaatggatgggtcaatgccttcagaaatggaatccagtagaaatgataccaaagatgatcttggtaatttaaatgtgcctgattcatctctccctgctgaaaatgaagccactggccctggctttgttcctccacctcttgctccaatcagaggtccattgtttccagtggatgcaagaggcccattcttgagaagaggacctcctttccccccacctcctccaggagccatgtttggagcttctcgagattattttccaccaggggatttcccaggtccaccacctgctccatttgcaatgagaaatgtctatccaccgaggggttttcctccttaccttcccccaagacctggatttttccccccacccccacattctgaaggtagaagtgagttcccctcaggtttgattccaccttcaaatgagcctgctactgaacatccagaaccacagcaagaaacctgacaatatttttgctctcttcaaaagtaattttgactgatctcattttcagtttaagtaactgctgttacttaagtgattacacttttgctcaaattgaagcttaatggaattataattctcaggatagtattttgtaaataaagatgatttaaatatgaa

SEQ ID NO: 160385 - DNA, 2415 bp, Artificial Sequence
  derived and/or modified sequence
atggaggagccgggagtaaccccccagccatacctgggtttactgctggaagagctgcgtagagtggtggcagcactgcctgagggcatgcgtcccgacagtaatctatacggtttcccctgggagcttgttatttgtgccgcggtcgtgggcttctttgctgtcctctttttcctgtggcggtcatttaggtccgtccgatcacgcttgtacgtcggtagggaaaagaaactcgctctgatgttgtctggcttgatcgaggagaagtcaaaacttctcgagaagttctccttagttcagaaagagtatgagggctatgaagtagaaagctcgctcaaagatgccagtttcgaaaaagaggcgactgaagcccagtcccttgaagccacctgtgagaagttgaatcgtagcaattctgagcttgaggacgaaatcctctgtttggagaaggagctgaaagaggaaaagtcaaaacattctgagcaggatgagctgatggcggacattagcaagcgaattcagtcactggaggatgaatctaaatctctgaagtcgcaagtggccgaggcgaagatgacattcaaaatcttccagatgaacgaagaaaggctcaaaattgctatcaaggatgcactcaatgagaactcccagcttcaagagagccagaagcaactcctacaggaggctgaggtttggaaagaacaggtgagtgaactgaataaacagaaagtcacattcgaggattccaaggtgcacgccgaacaggtcctcaatgataaggagtcccatattaagactctgaccgaaagactcctgaagatgaaagactgggcggcaatgttaggagaagatattaccgatgatgataacctggagcttgagatgaactccgaatctgagaatggcgcctacttggataaccccccaaagggcgcacttaagaagttaattcatgcagccaagttgaacgcttcgctcaaaacactcgagggcgaacggaaccaaatctacattcaactttctgaggttgacaaaacgaaggaggagctaacagagcacatcaaaaatctccagactgagcaggcatccctgcaatcggaaaacacccactttgagaatgaaaatcagaaacttcagcagaagttgaaagtgatgaccgagctgtatcaggagaatgagatgaaactgcaccggaagttaaccgttgaggagaattacagactagaaaaggaggagaagctgtccaaggtggacgagaagattagccacgccactgaggaactggaaacctacagaaagcgcgcaaaggatctcgaagaagaactggaacggaccatccacagttaccaaggccaaatcattagccacgaaaagaaagcccacgataactggctggcagctaggaatgcggagcgaaacctgaatgaccttcgcaaggaaaatgcccataaccgccagaagttgacagagaccgagttgaagttcgagctgctggaaaaggacccatatgccctcgacgtgcctaacacagcttttggccgggaacactccccatatggaccgagtcccctggggtggccatcttcagagactcgggcatttctctctccacctacccttcttgaaggaccgctcagactgtctcccctgttacctgggggaggcggcagaggttcacgcgggcccgggaatcccttggatcaccagataacaaacgaacgcggggagtcttcctgtgaccgcctgacagaccctcatcgagccccctctgataccgggtccctgtcccctccatgggaccaggaccggagaatgatgtttccacccccagggcagtcatacccagatagtgcactgcctccacaacgtcaggaccgtttttgcagtaactctggacgactgtccggacctgcagagttgaggtccttcaatatgccctccctagacaaaatggacggttccatgccaagcgagatggagagctcaaggaatgatacaaaggacgacctgggcaacctgaatgtacctgactcatccctgccagcagagaacgaggccactggccccgggttcgtgccaccccctctggctccaatccgtggaccactcttccctgtcgatgccagaggacctttcctaaggagaggccctccttttccccctccaccacctggcgcaatgttcggcgcaagccgggattattttcctcctggcgatttcccagggcctccccccgcccctttcgccatgagaaacgtctacccgccgcggggattcccaccgtacttgcccccacggccagggtttttcccacccccaccccactcagaaggccgttctgaattcccgagcgggctaatccctccctctaatgagcctgctaccgagcacccagagccccagcaagagacatag

SEQ ID NO: 160386 - DNA, 2316 bp, Artificial Sequence
  derived and/or modified sequence
atggaggagcccggagtgaccccacaaccttatctaggactgctgttggaagagctgcgaagggtggtggcagccctgcctgaaggaatgagaccagattccaatctgtatgggttcccctgggaactggtgatttgtgccgccgtcgtaggcttttttgctgttttgttcttcctctggcgatcatttcggtctgtgcgcagtagactgtatgtgggtagagaaaagaagctagcactaatgctcagtgggctgatcgaggaaaagtcaaaattactcgaaaaattctccctggtccagaaggaatatgaagggtacgaagtggaatcatcattaaaggatgcaagttttgagaaagaagctacagaagcccagtcgctggaagccacctgcgaaaagctgaaccgcagtaattccgaactcgaagacgagatcctgtgcctggagaaggagctgaaggaggagaaatctaagcatagcgaacaggacgaactgatggccgacatctccaagagaatccagagcctggaagacgagtccaaaagcctaaagtcccaggtggcagaggcaaagatgaccttcaaaatctttcagatgaatgaggagcgattaaagatcgccattaaggatgccctgaatgagaattcccagctgcaggagagccagaaacaacttctgcaggaggccgaggtctggaaagagcaggttagcgaactaaataaacaaaaagtgacctttgaggattcaaaggtgcatgccgagcaagtgctgaacgacaaagaaagccatattaagaccctcaccgagagactgctgaagatgaaggattgggctgctatgctcggagaggacattacggatgacgacaatctagagctggagatgaacagcgaatctgaaaatggcgcctatcttgacaatcctcccaagggggccctgaaaaagctgattcacgcagcaaaactgaacgcttcactgaaaacactcgagggcgagaggaaccagatatatatccagttatccgaggtcgacaaaacaaaggaggagctgacagagcacatcaaaaatctgcaaactgagcaggcgtccctccaatctgagaatacgcactttgaaaacgaaaaccagaaactgcagcagaaactaaaggtcatgaccgagctgtatcaggagaatgagatgaagttacatcgtaagttgacggtagaagaaaactatcggctggaaaaggaggagaaactgagcaaggtcgacgaaaagatctcccatgctacagaggaattagagacctatcgcaagcgagccaaggacttggaagaagagctggaaagaaccatccacagctaccagggccaaatcataagccacgagaaaaaagcacacgataactggctggccgcaaggaacgcggagaggaatttgaacgatctacgtaaagagaacgcacataataggcagaagctgactgagacagagctcaaatttgagctgttggaaaaagatccttacgcactggacgtgcctaacaccgcctttggtagagaacactctccatacggcccctctccccttgggtggccttcttcagaaacccgagcatttctgtcacctcctactttacttgaggggccccttcggctctcaccactgctccctggggggggtggccgtggcagtaggggacccgggaacccgctagatcatcaaattactaacgaaagaggggaatcaagctgcgaccgcctgaccgacccacaccgcgccccatctgacaccggaagcctatcccccccttgggatcaagatcgcaggatgatgtttcctccacccggccaatcctatcctgattccgcgttgcctccacagcgccaggaccgcttttgcagcaatagcggcaggctgagcggtccggctgaactgcgaagttttaatatgcccagcctcgataagatggatgggagtatgccttcagagatggaatcatccagaaacgataccaaagatgatttgggcaatctgaatgtgcccgatagttccctgccggctgaaaatgaagcgaccggacccgggttcgtccctccccccctggctcccatacgcggaccgctttttcccgtagacgccagaggcccattcctcaggcgtggtcctccctttcctccaccaccaccaggtgcaatgttcggggccagtagagactacttccctccaggagattttcctggacccccaccagcaccttttgccagtgcccggtctccaccgggagccggcgcccctgctagcggacgagggctggggggtcctcagaagtag

SEQ ID NO: 160387 - DNA, 2415 bp, Artificial Sequence
  derived and/or modified sequence
atggaggagcccggggtgaccccccagccctacctgggcctgctgctggaggagctgcggcgggtggtggccgccctgcctgagggcatgaggccagacagcaacctgtatggcttcccctgggagctggtgatctgtgccgctgtggtgggcttctttgctgtgctcttcttcctgtggaggagcttccgctctgtgcgcagccggctgtatgtgggccgggagaagaagctggccctgatgctgagcggcctcatcgaggagaagagcaagctgctggagaagttcagcctggtgcagaaggagtatgagggctatgaggtggagagcagcctgaaggatgccagctttgagaaggaggccacagaggcccagagcctggaggccacctgtgagaagctgaacagaagcaacagcgagctggaggatgagatcctgtgcctggagaaggagctgaaggaggagaagagcaagcacagcgagcaggatgagctgatggctgacatcagcaagaggatccagagcctggaggatgagagcaagagcctgaagagccaggtggccgaggccaagatgaccttcaagatcttccagatgaatgaggagcggctgaagatcgccatcaaggatgccctgaatgaaaacagccagctgcaggagagccagaagcagctgctgcaggaggccgaggtgtggaaggagcaggtgtctgagctgaacaagcagaaggtgacctttgaggacagcaaggtgcatgctgagcaggtgctgaatgacaaggagagccacatcaagaccctgacagagcggctgctgaagatgaaggactgggccgccatgctgggggaggacatcacagatgatgacaacctggagctggagatgaacagcgagagtgaaaatggagcctacctggacaacccccccaagggggccctgaagaagctgattcatgctgccaagctgaatgccagcctgaagaccctggagggggagaggaaccagatctacatccagctgtctgaggtggacaagaccaaggaggagctgacagagcacatcaagaacctgcagacagagcaggccagcctgcagagcgagaacacccactttgaaaatgaaaaccagaagctgcagcagaagctgaaggtgatgacagagctgtaccaggagaatgagatgaagctgcacaggaagctgactgtggaggagaactaccgcctggagaaggaggagaagctgagcaaggtggatgagaagatcagccacgccacagaggagctggagacctacaggaagagggccaaggacctggaggaggagctggagaggaccatccacagctaccagggccagatcatcagccatgagaagaaggcccatgacaactggctggccgccagaaatgctgagaggaacctgaatgacctgaggaaagaaaatgcccacaaccggcagaagctgacagaaacagagctgaagtttgagctgctggagaaggacccctatgccctggatgtgcccaacacagccttcggccgggagcacagcccctacggccccagccccctgggctggcccagcagcgagacccgggccttcctgagcccccccaccctgctggagggccccctgcggctgagccccctgctgcccggcggcggcggccggggcagccggggccctggcaaccccctggaccaccagatcaccaatgaaagaggagagagcagctgtgaccggctgacagacccccaccgggcccccagcgacaccggcagcctgagccccccctgggaccaggacaggaggatgatgttccccccacctggccagagctacccagattctgccctgcccccccagaggcaggaccgcttctgcagcaacagcggccgcctgagcggccctgctgagctgcggagcttcaacatgcccagcctggacaagatggatggctccatgcccagcgagatggagagcagcagaaatgacaccaaggatgacctgggcaacctgaatgtgcctgacagcagcctgcctgcagaaaatgaggccactggacctggctttgtgcccccacccctggcccccatccggggccccctcttccctgtggatgcccggggccccttcctgcggcggggcccccccttccccccacctcctcctggggccatgtttggagccagccgggactacttccccccaggggacttccctggccccccaccagccccctttgccatgagaaatgtgtacccaccccggggcttccccccctacctgccccccaggcctggcttcttccccccaccaccccacagcgagggccgctctgagttccccagcggcctcatcccccccagcaatgaaccagccacagagcaccctgagccccagcaggagacctag

SEQ ID NO: 160388 - DNA, 2316 bp, Artificial Sequence
  derived and/or modified sequence
atggaggagcccggggtgaccccccagccctacctgggcctgctgctggaggagctgcggcgggtggtggccgccctgcctgagggcatgaggccagacagcaacctgtatggcttcccctgggagctggtgatctgtgccgctgtggtgggcttctttgctgtgctcttcttcctgtggaggagcttccgctctgtgcgcagccggctgtatgtgggccgggagaagaagctggccctgatgctgagcggcctcatcgaggagaagagcaagctgctggagaagttcagcctggtgcagaaggagtatgagggctatgaggtggagagcagcctgaaggatgccagctttgagaaggaggccacagaggcccagagcctggaggccacctgtgagaagctgaacagaagcaacagcgagctggaggatgagatcctgtgcctggagaaggagctgaaggaggagaagagcaagcacagcgagcaggatgagctgatggctgacatcagcaagaggatccagagcctggaggatgagagcaagagcctgaagagccaggtggccgaggccaagatgaccttcaagatcttccagatgaatgaggagcggctgaagatcgccatcaaggatgccctgaatgaaaacagccagctgcaggagagccagaagcagctgctgcaggaggccgaggtgtggaaggagcaggtgtctgagctgaacaagcagaaggtgacctttgaggacagcaaggtgcatgctgagcaggtgctgaatgacaaggagagccacatcaagaccctgacagagcggctgctgaagatgaaggactgggccgccatgctgggggaggacatcacagatgatgacaacctggagctggagatgaacagcgagagtgaaaatggagcctacctggacaacccccccaagggggccctgaagaagctgattcatgctgccaagctgaatgccagcctgaagaccctggagggggagaggaaccagatctacatccagctgtctgaggtggacaagaccaaggaggagctgacagagcacatcaagaacctgcagacagagcaggccagcctgcagagcgagaacacccactttgaaaatgaaaaccagaagctgcagcagaagctgaaggtgatgacagagctgtaccaggagaatgagatgaagctgcacaggaagctgactgtggaggagaactaccgcctggagaaggaggagaagctgagcaaggtggatgagaagatcagccacgccacagaggagctggagacctacaggaagagggccaaggacctggaggaggagctggagaggaccatccacagctaccagggccagatcatcagccatgagaagaaggcccatgacaactggctggccgccagaaatgctgagaggaacctgaatgacctgaggaaagaaaatgcccacaaccggcagaagctgacagaaacagagctgaagtttgagctgctggagaaggacccctatgccctggatgtgcccaacacagccttcggccgggagcacagcccctacggccccagccccctgggctggcccagcagcgagacccgggccttcctgagcccccccaccctgctggagggccccctgcggctgagccccctgctgcccggcggcggcggccggggcagccggggccctggcaaccccctggaccaccagatcaccaatgaaagaggagagagcagctgtgaccggctgacagacccccaccgggcccccagcgacaccggcagcctgagccccccctgggaccaggacaggaggatgatgttccccccacctggccagagctacccagattctgccctgcccccccagaggcaggaccgcttctgcagcaacagcggccgcctgagcggccctgctgagctgcggagcttcaacatgcccagcctggacaagatggatggctccatgcccagcgagatggagagcagcagaaatgacaccaaggatgacctgggcaacctgaatgtgcctgacagcagcctgcctgcagaaaatgaggccactggacctggctttgtgcccccacccctggcccccatccggggccccctcttccctgtggatgcccggggccccttcctgcggcggggcccccccttccccccacctcctcctggggccatgtttggagccagccgggactacttccccccaggggacttccctggccccccaccagccccctttgccagcgcccggagccccccaggagctggggccccagccagcggccggggcctgggcggcccccagaagtag

SEQ ID NO: 160389 - DNA, 2415 bp, Artificial Sequence
  derived and/or modified sequence
atggaggagcccggcgtgaccccccagccctacctgggcctgctgttggaggaactccggcgcgttgttgctgccctgcctgagggcatgcgtccagacagcaacctgtacggcttcccatgggaactggtgatttgtgccgctgtagtgggattcttcgccgtcctgttttttctttggaggtcctttcgctcagttcgcagcaggttgtacgtgggaagagagaagaagcttgcacttatgttgtctggactgattgaagaaaaaagcaagttacttgaaaagtttagcctggtccagaaagagtatgaaggatacgaggtcgaatcaagtctcaaggacgcttcgttcgaaaaagaggctactgaggcacagtccctcgaagcaacgtgcgaaaagctaaacagatcaaactcagaacttgaagatgagatactttgtctggagaaggagctaaaagaagagaagtctaagcacagtgaacaggacgagctgatggccgacatctccaaaaggattcagtccttggaggatgagtccaaaagtctcaagtctcaagtggcagaggctaagatgacttttaagatcttccagatgaacgaagaacgccttaaaattgccataaaggatgcactcaacgaaaattcgcagctgcaggaatctcaaaaacaactattacaagaggctgaggtttggaaggagcaggtgtccgagttaaacaagcagaaagttactttcgaggactccaaagttcatgcagaacaggtattaaatgataaagagtcccatatcaaaaccctcactgaaaggctcctcaaaatgaaagactgggccgcaatgcttggagaagacatcacagatgacgacaatctagaactcgagatgaatagcgagagtgagaacggcgcttatctggacaatccaccaaagggcgccctcaaaaaactgatacacgccgcaaagcttaacgcttctctcaagaccctggagggggagagaaatcaaatctacatacagctgagcgaagtggacaagaccaaggaagaactcaccgagcacatcaagaatctacagacagaacaggcctctttacaatctgagaatacgcacttcgagaacgaaaatcagaagctgcaacagaagctgaaggtgatgactgagctgtaccaggagaatgagatgaagctgcacagaaaactgacagtcgaagagaattaccggctggagaaggaggagaagctcagcaaggtcgacgagaagatttcccacgcaacagaggagcttgagacttaccgcaagcgtgccaaggacctcgaggaggagctagaacggaccattcatagctatcagggccaaattatctcacatgaaaagaaggcccatgacaactggctggccgccagaaacgctgagcgcaatctgaatgacctcagaaaagagaacgctcataatcgacagaagcttactgagacagaattgaaattcgaactgctggaaaaggacccttacgcactggacgtccccaatactgcttttggacgcgaacactccccctatgggccctctcctcttggttggccatcctccgagactagagcctttctgtcccctcctactctgctggaagggcctctccgcttatcaccgctcctgcctgggggagggggtaggggatctcggggacccggtaaccctttggatcaccagataaccaatgagcggggggagtcctcatgcgacaggctcaccgaccctcatagagccccctccgacacaggttcccttagtcctccttgggatcaggataggcgtatgatgttcccccccccaggccagagctatcccgacagcgctttgccgccccagcgccaggacagattctgttctaacagcggtcgattgtccgggccagccgagctgaggagcttcaacatgccatccctggataaaatggatggctctatgcccagcgaaatggagagctcgcgtaatgatacaaaagacgatctgggcaacctgaacgttcctgattcatcactgcctgccgaaaacgaagcaacaggccccgggttcgtgcctccacctttggcgcccataaggggaccactgttccctgtcgatgctcggggtccatttcttcgacggggaccaccctttccgccacctccccccggagctatgttcggagccagcagggactacttcccacccggagattttccaggtcccccgcctgccccctttgctatgaggaacgtgtacccaccaagaggcttccccccgtatctgccccccaggcccgggttctttccaccgccgccacattccgagggccgttcagagttcccatctggacttatacctccctccaacgagcctgcgacagaacaccctgaacctcagcaggagacctag

SEQ ID NO: 160390 - DNA, 2316 bp, Artificial Sequence
  derived and/or modified sequence
atggaggagcccggcgtgaccccccagccctacctgggcctgctgctcgaggagttgcggcgagtggtggcagcgcttccagaggggatgcgcccagacagcaatttgtatggctttccctgggagttggttatatgtgccgctgtggtcggtttctttgccgtacttttttttctttggcggagctttcgatcagtgagatcacgactgtacgtcgggcgcgaaaagaagctcgcgctgatgttgtccggtcttattgaggagaaatccaaactactggaaaagtttagcctggtgcagaaagaatacgaggggtacgaggtcgaaagtagtcttaaggacgcatctttcgaaaaggaggccactgaagctcaatccctggaggcgacgtgcgaaaaactgaataggagtaactcagagctggaggacgaaattttgtgcctcgagaaagagctcaaggaggaaaaaagcaaacacagtgagcaggatgaactaatggctgatatttctaaacgcatccagtcattggaagatgaaagtaagtcactcaagagccaggtcgcagaggctaaaatgacctttaagatcttccagatgaacgaggaacgcctgaaaattgctattaaggacgccctgaatgagaacagtcaactgcaagaatcgcagaaacagctgctgcaggaggcagaggtatggaaggaacaggtctcagaactaaataagcagaaagtcactttcgaagactccaaagtgcacgctgagcaggtcctcaatgacaaggaatctcatataaaaactctgaccgaacgcctactcaaaatgaaagattgggccgccatgctgggggaggatataaccgacgacgacaacttggaactcgaaatgaattctgagagtgagaacggtgcataccttgacaacccccctaaaggtgccctcaagaagctcattcacgctgccaaactgaacgcgtcactgaagacccttgagggtgagagaaaccaaatctatatccagctcagcgaggtggataaaaccaaggaggagttaaccgagcatattaaaaatcttcagactgaacaggctagtttacaatccgaaaacacacacttcgagaacgaaaatcagaagttgcaacaaaagttgaaggtgatgaccgagctctaccaggagaacgaaatgaagctccatcgtaaactcaccgtggaagaaaactatcgattggagaaagaagaaaaactgagtaaagtggacgagaagatttcccatgccacagaggagctggaaacataccggaagagagccaaagatctggaagaagaactggagcgtaccatccactcctaccagggtcaaatcatatcacatgagaagaaagcacacgacaattggttagccgcgagaaacgctgaaaggaacttgaatgacctcaggaaggagaatgcccataaccggcaaaagctgacagagacggagctgaagttcgagctgttagagaaggacccgtacgcactcgacgtgcccaacacagctttcggaagagagcattctccatacggccccagcccactggggtggccatcaagtgagactagggcatttctgagccctccaacgttactcgaaggaccacttaggctatccccgctgctgccgggaggcgggggacgtggatcccgggggcctggtaatccactggaccatcagataaccaacgagagaggggagtctagttgtgaccgactgacagacccccaccgagcacctagcgatactgggagtctctctcctccttgggaccaagatcgaaggatgatgtttcctccgcctggccagtcataccctgactcagctctgcccccgcagaggcaagaccgtttctgcagcaatagcggacggttatccggcccagctgagcttaggtcttttaacatgccctctctcgataagatggacgggagcatgcctagtgagatggaaagttcgcgcaatgatacaaaagacgaccttggcaacctaaatgtgcctgacagcagccttccggccgaaaacgaggctactgggcctgggttcgtgccacctcctctagcgccgatacgggggccgctgtttcctgtcgacgcgaggggacctttcctgcgcaggggacctccatttccgccaccccctcctggagccatgtttggagctagccgggactattttcctcccggcgattttcctggcccccctccggcgccgttcgccagcgcaagatctcctccaggagccggtgctcccgccagcggtcgcggtctcggcgggccgcagaaatag

SEQ ID NO: 160391 - DNA, 2415 bp, Artificial Sequence
  derived and/or modified sequence
atggaggagcccggagtgacacctcaaccatatttaggtctgctgctggaggagctgaggagagttgtcgcagctcttccagaagggatgaggccagactccaacctctacggatttccatgggagctggtcatctgcgcagcggtggtggggttcttcgcggtcctgttcttcctttggcgctcattccgcagcgtgcggagcagattgtacgtgggccgtgaaaagaaactagcgctcatgctatcgggccttatcgaggaaaagtctaagttactggagaagtttagcttagtgcagaaggagtacgaaggttatgaagtcgagagtagcctgaaggatgcaagctttgaaaaggaggcgactgaggctcagtctctcgaagccacctgtgagaagctgaatcggagcaacagtgaacttgaggacgagattctgtgtctggaaaaggaacttaaggaggaaaaatctaagcacagtgaacaggatgaattaatggcggacatctctaagcggatacagagcctggaggacgaaagtaagtccttaaagtcccaggtcgccgaggcgaagatgactttcaagatctttcagatgaatgaagaacggttaaagatcgctattaaggacgccctgaatgagaatagtcagctgcaggaatcccagaaacagctcctccaggaagcagaagtttggaaagagcaggtgtcggagctaaacaagcagaaggtgacattcgaggactctaaagtgcatgctgagcaggtgctgaatgacaaggaatcccacatcaaaacactcaccgaacgcctgctgaagatgaaggactgggctgccatgctgggcgaggacatcacagacgatgacaatttggagctcgagatgaatagtgagagcgagaacggggcatacctcgacaatcctccaaagggagcattgaaaaagcttatacacgccgcaaagctgaatgcatctctcaaaaccctggagggagaacgaaatcagatctacatccagttgtctgaggtggataaaacaaaggaggaactgaccgagcatatcaagaatttgcagactgaacaggcaagtctgcaaagtgaaaacacacacttcgaaaatgagaatcaaaaactgcagcagaagcttaaagtgatgaccgaattgtaccaggagaacgaaatgaagctccatcgtaaactgaccgtggaggagaactacaggctggaaaaagaggaaaagttatcaaaggtggacgagaagatctcccatgccacagaggagctagagacatacaggaagcgagccaaagatcttgaagaggaacttgaacggacaatccatagttatcaaggccagattattagccacgaaaagaaggctcacgataattggctggctgccaggaatgcggagaggaatcttaatgacttaagaaaggaaaacgcccacaatcgccagaagctgactgaaacggagcttaaatttgagttgctggaaaaagacccatacgctctcgacgtccccaatacagcttttggcagagagcatagcccatacggccctagtccactgggttggcccagtagcgagactagggcatttctgtcacccccaacattgctcgagggtcccctcagactctccccccttctccccggaggtggcggtcggggaagtcggggtccaggcaaccccttggatcatcaaattacaaatgagcggggtgagagtagttgtgaccggctcacagatcctcacagagctccttcagatactgggagcctgagcccgccttgggatcaagaccgcaggatgatgtttcctcccccagggcagtcctaccctgattcggcactgccaccgcaaaggcaagaccgcttctgctctaacagcggtaggctaagcgggccagccgagctgaggtcctttaacatgccatcccttgacaagatggacggctccatgccatctgagatggagtcatccaggaatgacacgaaggatgaccttgggaatctcaatgtcccagatagtagtttgcccgctgagaatgaggcgactgggccaggtttcgtaccaccaccattagcgccaatcaggggtcccctcttcccagtggatgccaggggcccatttctgcggcgaggccctcccttcccaccaccccctccaggtgccatgttcggggcatccagagattacttcccaccaggtgactttccaggacctcctccagcgccatttgccatgaggaatgtctatcctccaaggggctttcctccgtacctcccccctcgcccaggattctttccgcctccaccccacagtgagggtaggtcggaatttcctagcggtctaattccacccagcaatgagcctgcgacggagcaccctgaacctcaacaggaaacttag

SEQ ID NO: 160392 - DNA, 2316 bp, Artificial Sequence
  derived and/or modified sequence
atggaggaacctggcgtgacaccacagccctacctcggcctactgctggaagagctccgccgagtcgtggccgctctccctgaggggatgagacctgacagcaacctgtatggctttccttgggaattggtaatctgcgccgcagttgtgggtttcttcgcggtgctgttctttttgtggcggtcttttcgttcagtccggtcacgtctgtatgtaggtcgggaaaaaaaactggcccttatgctcagcggattgatcgaggagaagtcaaagctgctggagaagtttagcctggtacagaaagagtatgaaggctatgaagtggagagcagtttgaaggacgctagtttcgaaaaagaggctaccgaggctcagagcctggaggccacttgcgaaaagctgaaccgcagcaacagcgaacttgaggatgagattctctgtcttgagaaagagttaaaggaggaaaagagcaagcactccgagcaagacgagttgatggcagacatctccaaacgtattcaaagcctggaagacgaatccaaaagcctgaaatcacaggtcgctgaagctaagatgacatttaagattttccagatgaacgaggaaaggttaaaaattgccataaaagatgcactaaatgagaactcccagctgcaggagagccaaaaacaactgctgcaggaagccgaggtttggaaggagcaagtgtctgagcttaataaacaaaaagtcacctttgaggattctaaggttcatgccgagcaggtcctgaatgacaaggaaagtcacattaagacactgaccgagcgcctcctaaagatgaaagactgggccgcaatgctgggtgaagatattactgatgacgacaatctcgagttggaaatgaacagcgaatctgagaatggagcctacctggataatcctccaaaaggcgctctgaaaaagctcatccacgcggcaaaactgaatgcgagtctgaagactctagagggcgagcggaaccagatatatattcagttgtccgaggtggacaagactaaggaagagttaacggaacacattaagaatctccagacggaacaggctagcctgcagtcggaaaacacgcacttcgagaacgaaaatcagaaattgcaacagaaactgaaagttatgactgagctgtaccaggaaaacgaaatgaaactgcataggaagctcacagtggaggaaaattacagactagagaaggaggagaagctgtccaaagtggatgagaaaatctcgcacgctaccgaagaacttgagacgtatagaaagagagcaaaagatctggaggaagagctcgagagaactattcactcttatcagggacaaattatttcacatgagaaaaaggcgcacgataactggttggcggcacgcaatgcagaaaggaatcttaacgatttacggaaagagaacgcccacaatcgtcagaagctgactgaaactgaattgaaatttgagctcttggaaaaagatccatacgcactcgacgtccccaacaccgcgttcgggagggagcactcgccctatggaccttctcccctgggctggccctcctccgagaccagagcttttctgtcccctcctacattactcgagggccctctgaggctaagccctttacttcctggcggaggtgggagagggtccagaggcccaggcaatcctctggatcatcagatcacaaacgaacgcggagaatccagctgtgataggttaacagaccctcatcgagccccaagcgacaccggtagtttatcccctccatgggaccaagacaggaggatgatgtttccacccccaggccagtcgtatccggactccgcactgccccctcaacggcaggatcgattttgttccaatagcggccgactaagcggacccgctgagctgcgctcctttaacatgcctagcttggataagatggatgggagtatgcccagtgagatggagagctctagaaacgacaccaaggacgatctggggaatctgaatgtcccagacagttctctcccggctgaaaatgaagccacaggcccaggattcgtcccaccacctctggctcctatccggggaccgctgttccccgtggacgcacgcggtcctttcctccggcgtgggcctccatttcctcctcctcccccaggggcaatgttcggagcttctcgggattactttcctccgggagatttccctggtccccctcccgctccctttgcttcggcccgatctccccctggggcaggcgctcccgcatcagggagaggcctcggcggaccccagaagtag

SEQ ID NO: 160393 - protein, 383 aa, Artificial Sequence
  derived and/or modified sequence
MGLGRVLLFLAVAFPFAPPAAAAEPHSLRYNLMVLSQDGSVQSGFLAEGHLDGQPFLRYDRQKRRAKPQGQWAENVLGAKTWDTETEDLTENGQDLRRTLTHIKDQKGGLHSLQEIRVCEIHEDSSTRGSRHFYYDGELFLSQNLETQESTVPQSSRAQTLAMNVTNFWKEDAMKTKTHYRAMQADCLQKLQRYLKSGVAIRRTVPPMVNVTCSEVSEGNITVTCRASSFYPRNITLTWRQDGVSLSHNTQQWGDVLPDGNGTYQTWVATRIRQGEEQRFTCYMEHSGNHGTHPVPSGKALVLQSQRTDFPYVSAAMPCFVIIIILCVPCCKKKTSAAEGPELVSLQVLDQHPVGTGDHRDAAQLGFQPLMSATGSTGSTEGT

SEQ ID NO: 160394 - protein, 383 aa, Artificial Sequence
  derived and/or modified sequence
MGLGRVLLFLAVAFPFAPPAAAAEPHSLRYNLMVLSQDGSVQSGFLAEGHLDGQPFLRYDRQKRRAKPQGQWAEDVLGAKTWDTETEDLTENGQDLRRTLTHIKDQKGGLHSLQEIRVCEIHEDSSTRGSRHFYYDGELFLSQNLETQESTVPQSSRAQTLAMNVTNFWKEDAMKTKTHYRAMQADCLQKLQRYLKSGVAIRRTVPPMVNVICSEVSEGNITVTCRASSFYPRNITLTWRQDGVSLSHNTQQWGDVLPDGNGTYQTWVATRIRQGEEQRFTCYMEHSGNHGTHPVPSGKALVLQSQRTDFPYVSAAMPCFVIIIILCVPCCKKKTSAAEGPELVSLQVLDQHPVGTGDHRDAAQLGFQPLMSATGSTGSTEGT

SEQ ID NO: 160395 - protein, 360 aa, Artificial Sequence
  derived and/or modified sequence
  misc_feature (1)..(1): Xaa can be any naturally occurring amino acid
XPHSLRYNLMVLSQDGSVQSGFLAEGHLDGQPFLRYDRQKRRAKPQGQWAEDVLGAKTWDTETEDLTENGQDLRRTLTHIKDQKGGLHSLQEIRVCEIHEDSSTRGSRHFYYDGELFLSQNLETQESTVPQSSRAQTLAMNVTNFWKEDAMKTKTHYRAMQADCLQKLQRYLKSGVAIRRTVPPMVNVTCSEVSEGNITVTCRASSFYPRNITLTWRQDGVSLSHNTQQWGDVLPDGNGTYQTWVATRIRQGEEQRFTCYMEHSGNHGTHPVPSGKALVLQSQRTDFPYVSAAMPCFVIIIILCVPCCKKKTSAAEGPELVSLQVLDQHPVGTGDHRDAAQLGFQPLMSATGSTGSTEGA

SEQ ID NO: 160396 - protein, 383 aa, Artificial Sequence [sequence omitted]

SEQ ID NO: 160397 - protein, 383 aa, Artificial Sequence
  derived and/or modified sequence
MGLGRVLLFLAVAFPFAPPAAAAEPHSLRYNLMVLSQDGSVQSGFLAEGHLDGQPFLRYDRQKRRAKPQGQWAEDVLGAETWDTETEDLTENGQDLRRTLTHIKDQKGGLHSLQEIRVCEIHEDSSTRGSRHFYYNGELFLSQNLETQESTVPQSSRAQTLAMNVTNFWKEDAMKTKTHYRAMQADCLQKLQRYLKSGVAIRRTVPPMVNVTCSEVSEGNITVTCRASSFYPRNITLTWRQDGVSLSHNTQQWGDVLPDGNGTYQTWVATRIRQGEEQRFTCYMEHSGNHGTHPVPSGKALVLQSQRTDFPYVSAAMPCFVIIIILCVPCCKKKTSAAEGPELVSLQVLDQHPVGTGDHRDAAQLGFQPLMSATGSTGSTEGA

SEQ ID NO: 160398 - protein, 383 aa, Artificial Sequence
  derived and/or modified sequence
MGLGRVLLFLAVAFPFAPPAAAAEPHSLRYNLMVLSQDGSVQSGFLAEGHLDGQPFLRYDRQKRRAKPQGQWAEDVLGAETWDTETEDLTENGQDLRRTLTHIKDQKGGLHSLQEIRVCEMHEDSSTRGSRHFYYNGELFLSQNLETQESTVPQSSRAQTLAMNVTNFWKEDAMKTKTHYRAMQADCLQKLQRYLKSGVAIRRTVPPMVNVTCSEVSEGNITVTCRASSFYPRNITLTWRQDGVSLSHNTQQWGDVLPDGNGTYQTWVATRIRQGEEQRFTCYMEHSGNHGTHPVPSGKALVLQSQRTDFPYVSAAMPCFVIIIILCVPCCKKKTSAAEGPELVSLQVLDQHPVGTGDHRDAAQLGFQPLMSATGSTGSTEGA

SEQ ID NO: 160399 - protein, 351 aa, Artificial Sequence
  derived and/or modified sequence
MVLSQDGSVQSGFLAEGHLDGQPFLRYDRQKRRAKPQGQWAENVLGAKTWDTETEDLTENGQDLRRTLTHIKDQKGGLHSLQEIRVCEIHEDSSTRGSRHFYYDGELFLSQNLETQESTVPQSSRAQTLAMNVTNFWKEDAMKTKTHYRAMQADCLQKLQRYLKSGVAIRRTVPPMVNVTCSEVSEGNITVTCRASSFYPRNITLTWRQDGVSLSHNTQQWGDVLPDGNGTYQTWVATRIRQGEEQRFTCYMEHSGNHGTHPVPSGKALVLQSQRTDFPYVSAAMPCFVIIIILCVPCCKKKTSAAEGPELVSLQVLDQHPVGTGDHRDAAQLGFQPLMSATGSTGSTEGT

SEQ ID NO: 160400 - DNA, 1152 bp, Artificial Sequence
  derived and/or modified sequence
atggggcttggcagagttttgctttttcttgccgtcgctttcccctttgcacccccagccgcagctgcagaacctcatagcttgaggtacaacctgatggttttgtcccaggatgggtccgtacaatcaggctttcttgctgaaggccacctggatggccagcctttcctgagatatgacaggcaaaagaggagagctaagcctcagggccagtgggctgagaacgtcctgggtgcaaagacttgggatacagaaaccgaagatctgaccgagaacggtcaggatctacgccgaacactgactcacatcaaagaccagaagggcggactgcattccctccaggagatcagagtctgtgaaatccatgaggacagcagcacccgcgggagtcgtcacttctactacgacggcgagcttttcctgagccaaaatctagaaacccaggagtctacagttccacagagttccagagctcagacactggcaatgaacgtcactaacttctggaaggaggacgccatgaaaaccaagacacactatcgggcaatgcaggctgattgcctccaaaagctgcagcggtacttaaaatcgggagtggccattaggcgcacggtgcctccaatggtcaacgtcacctgtagtgaggtgtctgagggaaacatcaccgtcacatgtcgggcttcatccttttatccccggaacatcaccttgacgtggcggcaggacggagtgtcccttagccacaacacccagcagtggggggacgttctgcccgatgggaatggtacataccaaacctgggtcgctacacgcattcgccagggcgaagagcagaggttcacctgttacatggaacacagcggaaaccacggcacacaccccgtaccatcagggaaagcattggtactccagtcacaacgtaccgattttccatatgtgtccgcagctatgccgtgcttcgtcatcattattattttgtgcgtgccctgttgcaaaaaaaagactagcgcagctgagggacctgagctagtgtcactccaggtcctggatcagcatccggtgggaacaggagaccacagagacgccgcccagctgggctttcagccactcatgtccgctacaggctccaccggcagcactgaagggacttag

SEQ ID NO: 160401 - DNA, 1152 bp, Artificial Sequence
  derived and/or modified sequence
atgggcctcggacgtgtcctgctcttcctggcagtggcattcccatttgcccctcccgctgcggccgccgagcctcacagtcttcgttacaatttgatggtactgtctcaggatgggagtgtacagtcaggtttcctggccgaaggccatcttgacggtcagccatttctgaggtatgacaggcagaaacgtcgagctaaacctcagggtcagtgggctgaagacgtgttgggcgcgaagacttgggacactgaaactgaggatctaactgaaaatggtcaggaccttaggagaaccctgacacacattaaagatcagaagggggggctccacagtctgcaggagattcgagtttgcgagatacatgaggactcatctactcgagggagccgccacttctactacgatggcgagctgttcctgagtcaaaacctcgaaacccaagagagtaccgttccccagagtagcagagcacagactttggcgatgaatgtcacaaatttctggaaagaggacgccatgaaaacgaagacacactaccgggctatgcaagctgattgcctgcagaagctccaacgctaccttaaatccggcgtagccatcaggcgaaccgtgccccccatggttaatgtgatttgctcagaagtgagtgaggggaatattaccgtcacgtgtagggccagctctttctaccctcgcaacatcaccttgacctggcgccaggacggtgtgagcttgtcccacaatacccagcagtggggagatgtcctgcccgacggtaacgggacatatcaaacgtgggtggcaacaaggattcggcagggggaagagcaacggttcacttgttacatggaacattcgggaaatcacggaacccatcctgtgccctctggcaaggccctggttttgcaatcccagaggacagacttcccttacgtgagcgccgctatgccttgtttcgtaataataatcattctgtgcgtcccgtgttgtaaaaagaaaactagcgccgccgagggtccagagctagtgtcattgcaggtgttagaccaacatcctgtgggtactggcgatcatcgtgacgctgcacagctgggatttcaacccttgatgagcgctactggctccacaggttctactgaagggacttag

SEQ ID NO: 160402 - DNA, 1083 bp, Artificial Sequence
  derived and/or modified sequence
tgaccacattctctccgatacaatctcatggtcttgtcgcaggatggctccgtgcagagcggctttctggctgaaggacacctcgatggccagccctttctcagatacgataggcagaagcgccgggctaaaccgcaggggcagtgggcggaagatgttctcggggcaaaaacttgggacactgagacggaggacctgacggaaaatggccaggacctcagacggacactaacacatatcaaggaccaaaagggggggcttcacagtttgcaggaaatccgcgtctgcgagatacacgaggattcaagcactcgggggtctcgccatttttactacgacggagaactatttctcagccaaaatctggagacgcaagagtcaaccgtgccgcaatcaagcagggctcaaactcttgccatgaatgtgaccaacttttggaaggaagatgctatgaaaacaaagacccactatagggccatgcaggctgattgcctgcagaaacttcagcgttacctaaaaagcggcgtggctattcgccggactgtgccccccatggtgaatgttacttgcagcgaggtgagcgaaggtaacattaccgtgacatgccgggcgagctctttttaccctagaaacatcacattgacctggaggcaagacggcgtgtccctctcccacaacacccaacagtggggcgacgtcttgccagacggtaatgggacttaccagacttgggtggccaccagaatcagacagggcgaagaacagaggttcacttgttacatggaacactccggcaaccatggcacccatccagtcccatccggcaaggctttggtgctgcagagccaacgaactgacttcccttatgtgagcgccgcaatgccctgtttcgtgattattatcatcttatgtgtcccttgctgtaagaagaaaactagcgcagcagaaggcccagaactggtatctctgcaggtgttagaccaacaccctgtagggaccggcgaccaccgcgacgctgcccaactgggttttcaaccgctgatgagtgctactgggtccaccggttcaaccgagggagcctag

SEQ ID NO: 160403 - DNA, 1152 bp, Artificial Sequence
  derived and/or modified sequence
atgggactgggacgcgtgttgcttttcctggctgtggcctttccttttgccccgcccgcagccgctgcagaaccccactccctacgttataatctgatggtcttatcccaggacggctctgtacagagtggatttctcgcggagggacatctcgacggccagccattcctgaggtatgacagacagaaacgcagagccaagccccaggggcagtgggcagaggacgtcctaggcgcaaagacatgggataccgagactgaggatttgacagaaaacggtcaggacctgcgccggacacttacccatataaaggatcagaaaggagggttacatagtctgcaagaaattcgtgtctgtgagattcatgaggattcaagcacacgcggttctcgacacttctattatgatggggaattgttcctctcccagaacctggagacacaggagagtacagtgcctcagagcagtcgagcgcaaactcttgccatgaatgtgaccaacttctggaaggaggatgccatgaaaaccaaaacacactaccgtgctatgcaagctgattgccttcagaagctccaacggtaccttaagagcggggtcgctatccggcgcacagtcccccctatggtgaacgtgacctgtagtgaagtctcggagggcaacatcacagtgacatgccgagctagctccttttacccccgaaacatcaccttgacatggaggcaggatggagtgtccctctctcacaacactcagcagtggggagacgtcctcccagatggtaacggaacctatcagacgtgggtcgctacacggatcagacagggtgaggagcagcggtttacatgctatatggaacactccggtaaccatggcacccatcctgtgccatctggcaaggcgctagtcctgcaatcacagagaactgattttccttatgtcagcgccgctatgccctgctttgtgatcattatcattctgtgcgtgccctgttgcaagaaaaagacgagcgcagctgaaggtcctgagctggtaagcctgcaagtgctagaccagcaccccgtgggaaccggtgatcacagagacgctgcccagttgggctttcagcctcttatgagtgcaacaggttcaacagggtctacggagggtgcatag

SEQ ID NO: 160404 - DNA, 1152 bp, Artificial Sequence
  derived and/or modified sequence
atgggactcggaagggtgctcctgtttctggccgtggcattcccattcgccccacccgccgcagccgccgagcctcactccctgcgctacaacctgatggtgttgagccaggacggctcagtgcagtcagggtttctggctgaaggacatctcgacggacaaccctttttgaggtatgacaggcagaagcgtcgcgcaaaacctcagggccagtgggctgaagatgtgttaggtgcagagacatgggacacagagaccgaggatttgaccgagaatgggcaggacctgcgaagaaccctgacgcacattaaagatcagaaaggcgggctgcactcattacaagagatacgagtttgcgagattcacgaggactcctccacacggggcagcaggcacttttattataacggggagttgtttctttcacaaaacctggaaacgcaggagtcgactgttcctcagtcttcaagggcacagactctagccatgaatgttacgaacttttggaaggaagacgcgatgaaaacaaagacacactaccgagcgatgcaggctgactgtctccaaaagctccaaagatatcttaagtcaggtgttgctattagaaggacggtcccaccaatggtaaacgtgacatgcagtgaggtgtcagagggcaacatcactgtgacctgtcgggcatcctctttctacccaaggaacattaccctcacttggcggcaggatggagtaagtctttctcacaacacgcagcagtggggggatgtgcttcccgatggcaatggtacctatcagacgtgggtggccactcgtattaggcaaggcgaagagcagaggttcacctgctatatggagcatagtggtaatcacggaacccatcccgtcccctcaggcaaggccctggtgctgcagagtcagcggacggactttccttacgtttccgcggccatgccatgcttcgtgataattatcatcctgtgcgtgccttgttgcaaaaaaaaaacctccgcagcggaaggcccagagttagtgagcctacaagttctggaccagcaccccgttgggacaggggatcaccgggatgctgcccagctgggctttcagcccctgatgtccgctacgggcagtacaggaagtactgagggcgcatag

SEQ ID NO: 160405 - DNA, 1152 bp, Artificial Sequence
  derived and/or modified sequence
atgggtctcggcagagttcttctgttcctggcagtggccttcccatttgcaccccccgcagctgccgcagagccacattcattgcgttacaacctgatggtcctgagccaggatggatccgtacagagcggctttcttgctgagggtcacttggacgggcagcctttccttagatatgaccgacagaaacggagggccaaaccacaggggcagtgggcagaggacgtgcttggggcaaagacttgggatacagaaaccgaggatttaacagagaacgggcaagacctgcgaaggactctcacccatatcaaggaccagaaggggggcttgcactccctgcaggagatcagggtttgcgaaatccacgaggatagcagcactaggggctcaaggcacttctactacgacggtgaactgtttctttcacaaaacctggaaacacaggagtctacagttcctcagtcaagccgcgcccagacattggctatgaacgtgactaacttttggaaagaggatgccatgaaaacgaagactcattacagagccatgcaggccgactgtttacagaagcttcagcgttacctaaaatcaggagtcgcgatccgcagaaccgtcccacccatggtcaacgtgacatgcagcgaggtatcagaaggtaatataacagtcacttgtcgagcctcctccttctaccccaggaatatcactcttacttggagacaggatggagtcagcctgagtcacaatacccagcagtggggcgacgtgttgccagacggaaatggaacataccagacatgggtggccacccggatccgccagggcgaagaacagagatttacctgctacatggaacactcagggaaccatggcactcatccggttccgtccggaaaggccttggtgttgcaatctcagcggactgacttcccttatgtctcggccgccatgccctgctttgtcattatcattatactgtgtgtgccatgttgtaagaagaaaacctctgccgcagagggcccagagcttgtgtcactgcaagtcctcgaccagcatcctgtcgggactggggatcaccgggatgcggctcagctgggtttccagccccttatgagcgctacaggtagcaccggatctaccgagggcgcttag

SEQ ID NO: 160406 - DNA, 1152 bp, Artificial Sequence
  derived and/or modified sequence
atgggactgggccgtgtactgctgttcctggccgtggcgttccctttcgcgccccctgccgcagcagccgagccccactctctgcgttacaatctcatggtcttgtcacaagatgggtctgtacaatccggatttctggctgaaggacatctggacggacagcctttcctccgctatgatagacagaagcgccgcgctaagccgcaaggacaatgggccgagaatgttttgggggcgaaaacatgggacacagagacggaagacctgacagagaacgggcaggatcttcgacgcaccctgacccacatcaaagatcagaaaggaggcctacattctctccaagagataagggtctgcgagatacacgaagactcaagtacccggggctctaggcacttctactatgatggcgaactcttcttgtcacagaacttggagacacaggaaagcacagtcccacagtctagcagggctcaaactctggccatgaacgtgactaacttctggaaagaggacgcaatgaaaaccaagacccattatcgcgccatgcaagccgactgtttgcagaagctgcagcggtatctgaaaagtggtgtggctataaggcggactgttccgcctatggtgaacgtgacatgtagcgaggtgagtgagggtaatatcaccgttacatgccgggccagcagcttttacccaagaaacatcaccttaacttggcggcaggatggcgtaagcctaagccataacacgcagcaatggggcgatgtactgcccgatggcaatggaacataccagacgtgggtggccaccagaatacgccagggcgaggagcagcgctttacgtgctacatggagcacagtggaaatcatggcactcacccagtcccctcgggaaaggcccttgtcctgcagagccaacggacagatttcccatacgtttccgccgcgatgccctgtttcgtgataataatcatactctgtgttccgtgttgcaagaaaaaaacctccgctgccgaaggccctgaactggtttcccttcaggtgttggaccagcaccccgtggggaccggcgaccatcgtgatgcggcgcaactgggcttccagcccctgatgagcgccactggttcaacgggctctacagagggtacttag

SEQ ID NO: 160407 - DNA, 1152 bp, Artificial Sequence
  derived and/or modified sequence
atggggttgggacgggttttgctgttcctggccgtcgcctttccgtttgctccccccgctgctgctgcagaacctcattctttgaggtataatctgatggtgctgagccaagatggctctgtgcagtcaggttttttagctgagggccatttggatggacaacctttcttgcggtacgacaggcaaaaacgaagagcaaagccgcaggggcagtgggccgaagatgttctgggcgccgagacctgggacaccgaaaccgaagacctaaccgaaaacggacaggacctccgacgtactctgacccacattaaagatcagaagggcggcctccatagcctgcaggaaattagagtttgcgagatgcacgaggattcttcaacccgggggtccaggcacttttattataacggcgagctttttctgagtcagaacctcgagacccaggagtccaccgtgcctcagtcttccagggcgcaaacgcttgctatgaatgtcacaaacttctggaaggaggacgcaatgaaaacaaaaacgcactatcgcgctatgcaagcagactgcctgcagaaactacagaggtacctgaagtcaggcgtggctattagaagaacagtgcctccgatggtcaacgttacctgttcagaggtgagcgaaggcaacatcaccgtgacatgccgcgcctctagcttttatccaagaaacatcacattaacctggcgacaagacggggtgagcctttctcataacacacaacagtggggcgatgtgctgccagatgggaacggaacctaccagacatgggttgctacacgcatccgccaaggcgaggagcagaggtttacttgctatatggaacacagtggtaaccacggaacccaccctgtgccatcaggtaaagcactggtcctgcagagccagcggaccgacttcccctatgtgtctgctgcgatgccttgcttcgtgattattattattctgtgcgtgccatgttgcaagaagaaaactagtgccgctgaaggaccagaactcgtaagcctgcaggtgctcgaccaacaccccgttggcaccggagaccaccgagatgccgcccagttaggattccagccgttgatgtcagcaaccgggtcgactggaagtacagagggtgcttag

SEQ ID NO: 160408 - DNA, 1152 bp, Artificial Sequence
  derived and/or modified sequence
atgggcctgggccgggtgctgctcttcctggccgtggccttcccctttgcccccccagctgctgctgctgagccccacagcctgcgctacaacctgatggtgctgagccaggacggctctgtgcagagcggcttcctggccgagggccacctggatggccagcccttcctgcgctatgaccggcagaagaggcgggccaagccccagggccagtgggccgagaatgtgctgggcgccaagacctgggacacagaaacagaggacctgacagaaaatggccaggacctgcggaggaccctgacccacatcaaggaccagaagggcggcctgcacagcctgcaggagatccgggtgtgtgagatccacgaggacagcagcacccggggcagccgccacttctactatgatggagagctgttcctgagccagaacctggagacccaggagagcacagtgccccagagcagccgggcccagaccctggccatgaatgtgaccaacttctggaaggaggatgccatgaagaccaagacccactaccgggccatgcaggccgactgcctgcagaagctgcagcgctacctgaagtctggagtggccatccggaggacagtgccccccatggtgaatgtgacctgcagcgaggtgtctgagggcaacatcaccgtgacctgccgggccagcagcttctaccccaggaacatcaccctgacctggaggcaggatggagtgtccctgagccacaacacccagcagtggggagatgtgctgcctgatggaaatggcacctaccagacctgggtggccacccgcatccggcagggcgaggagcagcgcttcacctgctacatggagcacagcggcaaccacggcacccaccctgtgcccagcggcaaggccctggtgctgcagagccagaggacagacttcccctacgtgtctgctgccatgccctgcttcgtcatcatcatcatcctgtgtgtgccctgctgcaagaagaagaccagcgctgctgagggccctgagctggtgtccctgcaggtgctggaccagcaccctgtgggcaccggggaccacagagatgctgcccagctgggcttccagcccctgatgtctgccaccggcagcacaggcagcacagagggcacctag

SEQ ID NO: 160409 - DNA, 1152 bp, Artificial Sequence
  derived and/or modified sequence
atgggcctgggccgggtgctgctcttcctggccgtggccttcccctttgcccccccagctgctgctgctgagccccacagcctgcgctacaacctgatggtgctgagccaggacggctctgtgcagagcggcttcctggccgagggccacctggatggccagcccttcctgcgctatgaccggcagaagaggcgggccaagccccagggccagtgggccgaggatgtgctgggcgccaagacctgggacacagaaacagaggacctgacagaaaatggccaggacctgcggaggaccctgacccacatcaaggaccagaagggcggcctgcacagcctgcaggagatccgggtgtgtgagatccacgaggacagcagcacccggggcagccgccacttctactatgatggagagctgttcctgagccagaacctggagacccaggagagcacagtgccccagagcagccgggcccagaccctggccatgaatgtgaccaacttctggaaggaggatgccatgaagaccaagacccactaccgggccatgcaggccgactgcctgcagaagctgcagcgctacctgaagtctggagtggccatccggaggacagtgccccccatggtgaatgtcatctgcagcgaggtgtctgagggcaacatcaccgtgacctgccgggccagcagcttctaccccaggaacatcaccctgacctggaggcaggatggagtgtccctgagccacaacacccagcagtggggagatgtgctgcctgatggaaatggcacctaccagacctgggtggccacccgcatccggcagggcgaggagcagcgcttcacctgctacatggagcacagcggcaaccacggcacccaccctgtgcccagcggcaaggccctggtgctgcagagccagaggacagacttcccctacgtgtctgctgccatgccctgcttcgtcatcatcatcatcctgtgtgtgccctgctgcaagaagaagaccagcgctgctgagggccctgagctggtgtccctgcaggtgctggaccagcaccctgtgggcaccggggaccacagagatgctgcccagctgggcttccagcccctgatgtctgccaccggcagcacaggcagcacagagggcacctag

SEQ ID NO: 160410 - DNA, 1083 bp, Artificial Sequence
  derived and/or modified sequence
tgaccccacagcctgcgctacaacctgatggtgctgagccaggacggctctgtgcagagcggcttcctggccgagggccacctggatggccagcccttcctgcgctatgaccggcagaagagaagagccaagccccagggccagtgggccgaggatgtgctgggcgccaagacctgggacacagaaacagaggacctgacagaaaatggccaggacctgcggaggaccctgacccacatcaaggaccagaagggcggcctgcacagcctgcaggagatccgggtgtgtgagatccacgaggacagcagcacccggggcagccgccacttctactatgatggagagctgttcctgagccagaacctggagacccaggagagcacagtgccccagagcagccgggcccagaccctggccatgaatgtgaccaacttctggaaggaggatgccatgaagaccaagacccactaccgggccatgcaggccgactgcctgcagaagctgcagcgctacctgaagagcggcgtggccatcagaagaacagtgccccccatggtgaatgtgacctgcagcgaggtgtctgagggcaacatcaccgtgacctgccgggccagcagcttctaccccaggaacatcaccctgacctggaggcaggatggagtgtccctgagccacaacacccagcagtggggagatgtgctgcctgatggaaatggcacctaccagacctgggtggccacccgcatccggcagggcgaggagcagcgcttcacctgctacatggagcacagcggcaaccacggcacccaccctgtgcccagcggcaaggccctggtgctgcagagccagaggacagacttcccctacgtgtctgctgccatgccctgctttgtgatcatcatcatcctgtgtgtgccctgctgcaagaagaagaccagcgctgctgagggccctgagctggtgtccctgcaggtgctggaccagcaccctgtgggcactggagaccacagagatgctgcccagctgggcttccagcccctgatgtctgccaccggcagcacaggcagcacagaaggagcctag

SEQ ID NO: 160411 - DNA, 1152 bp, Artificial Sequence
  derived and/or modified sequence
atgggcctgggccgggtgctgctcttcctggccgtggccttcccctttgcccccccagctgctgctgctgagccccacagcctgcgctacaacctgatggtgctgagccaggacggctctgtgcagagcggcttcctggccgagggccacctggatggccagcccttcctgcgctatgaccggcagaagaggcgggccaagccccagggccagtgggccgaggatgtgctgggcgccaagacctgggacacagaaacagaggacctgacagaaaatggccaggacctgcggaggaccctgacccacatcaaggaccagaagggcggcctgcacagcctgcaggagatccgggtgtgtgagatccacgaggacagcagcacccggggcagccgccacttctactatgatggagagctgttcctgagccagaacctggagacccaggagagcacagtgccccagagcagccgggcccagaccctggccatgaatgtgaccaacttctggaaggaggatgccatgaagaccaagacccactaccgggccatgcaggccgactgcctgcagaagctgcagcgctacctgaagtctggagtggccatccggaggacagtgccccccatggtgaatgtgacctgcagcgaggtgtctgagggcaacatcaccgtgacctgccgggccagcagcttctaccccaggaacatcaccctgacctggaggcaggatggagtgtccctgagccacaacacccagcagtggggagatgtgctgcctgatggaaatggcacctaccagacctgggtggccacccgcatccggcagggcgaggagcagcgcttcacctgctacatggagcacagcggcaaccacggcacccaccctgtgcccagcggcaaggccctggtgctgcagagccagaggacagacttcccctacgtgtctgctgccatgccctgcttcgtcatcatcatcatcctgtgtgtgccctgctgcaagaagaagaccagcgctgctgagggccctgagctggtgtccctgcaggtgctggaccagcaccctgtgggcaccggggaccacagagatgctgcccagctgggcttccagcccctgatgtctgccaccggcagcacaggcagcacagagggcgcctag

SEQ ID NO: 160412 - DNA, 1152 bp, Artificial Sequence
  derived and/or modified sequence
atgggcctgggccgggtgctgctcttcctggccgtggccttcccctttgcccccccagctgctgctgctgagccccacagcctgcgctacaacctgatggtgctgagccaggacggctctgtgcagagcggcttcctggccgagggccacctggatggccagcccttcctgcgctatgaccggcagaagaggcgggccaagccccagggccagtgggccgaggatgtgctgggcgctgagacctgggacacagaaacagaggacctgacagaaaatggccaggacctgcggaggaccctgacccacatcaaggaccagaagggcggcctgcacagcctgcaggagatccgggtgtgtgagatccacgaggacagcagcacccggggcagccgccacttctactacaacggggagctgttcctgagccagaacctggagacccaggagagcacagtgccccagagcagccgggcccagaccctggccatgaatgtgaccaacttctggaaggaggatgccatgaagaccaagacccactaccgggccatgcaggccgactgcctgcagaagctgcagcgctacctgaagtctggagtggccatccggaggacagtgccccccatggtgaatgtgacctgcagcgaggtgtctgagggcaacatcaccgtgacctgccgggccagcagcttctaccccaggaacatcaccctgacctggaggcaggatggagtgtccctgagccacaacacccagcagtggggagatgtgctgcctgatggaaatggcacctaccagacctgggtggccacccgcatccggcagggcgaggagcagcgcttcacctgctacatggagcacagcggcaaccacggcacccaccctgtgcccagcggcaaggccctggtgctgcagagccagaggacagacttcccctacgtgtctgctgccatgccctgcttcgtcatcatcatcatcctgtgtgtgccctgctgcaagaagaagaccagcgctgctgagggccctgagctggtgtccctgcaggtgctggaccagcaccctgtgggcaccggggaccacagagatgctgcccagctgggcttccagcccctgatgtctgccaccggcagcacaggcagcacagagggcgcctag

SEQ ID NO: 160413 - DNA, 1152 bp, Artificial Sequence
  derived and/or modified sequence
atgggcctgggccgggtgctgctcttcctggccgtggccttcccctttgcccccccagctgctgctgctgagccccacagcctgcgctacaacctgatggtgctgagccaggacggctctgtgcagagcggcttcctggccgagggccacctggatggccagcccttcctgcgctatgaccggcagaagaggcgggccaagccccagggccagtgggccgaggatgtgctgggcgctgagacctgggacacagaaacagaggacctgacagaaaatggccaggacctgcggaggaccctgacccacatcaaggaccagaagggcggcctgcacagcctgcaggagatccgggtgtgtgagatgcatgaggacagcagcacccggggcagccgccacttctactacaacggggagctgttcctgagccagaacctggagacccaggagagcacagtgccccagagcagccgggcccagaccctggccatgaatgtgaccaacttctggaaggaggatgccatgaagaccaagacccactaccgggccatgcaggccgactgcctgcagaagctgcagcgctacctgaagtctggagtggccatccggaggacagtgccccccatggtgaatgtgacctgcagcgaggtgtctgagggcaacatcaccgtgacctgccgggccagcagcttctaccccaggaacatcaccctgacctggaggcaggatggagtgtccctgagccacaacacccagcagtggggagatgtgctgcctgatggaaatggcacctaccagacctgggtggccacccgcatccggcagggcgaggagcagcgcttcacctgctacatggagcacagcggcaaccacggcacccaccctgtgcccagcggcaaggccctggtgctgcagagccagaggacagacttcccctacgtgtctgctgccatgccctgcttcgtcatcatcatcatcctgtgtgtgccctgctgcaagaagaagaccagcgctgctgagggccctgagctggtgtccctgcaggtgctggaccagcaccctgtgggcaccggggaccacagagatgctgcccagctgggcttccagcccctgatgtctgccaccggcagcacaggcagcacagagggcgcctag

SEQ ID NO: 160414 - DNA, 2446 bp, Artificial Sequence
  derived and/or modified sequence
aaatttcgacggggtcttctcacgggtttcattcagttggccactgctgagcagctgagaaggtggcgacgtaggggccatggggctgggccgggtcctgctgtttctggccgtcgccttcccttttgcacccccggcagccgccgctgagccccacagtcttcgttacaacctcatggtgctgtcccaggatggatctgtgcagtcagggtttctcgctgagggacatctggatggtcagcccttcctgcgctatgacaggcagaaacgcagggcaaagccccagggacagtgggcagaaaatgtcctgggagctaagacctgggacacagagaccgaggacttgacagagaatgggcaagacctcaggaggaccctgactcatatcaaggaccagaaaggaggcttgcattccctccaggagattagggtctgtgagatccatgaagacagcagcaccaggggctcccggcatttctactacgatggggagctcttcctctcccaaaacctggagactcaagaatcgacagtgccccagtcctccagagctcagaccttggctatgaacgtcacaaatttctggaaggaagatgccatgaagaccaagacacactatcgcgctatgcaggcagactgcctgcagaaactacagcgatatctgaaatccggggtggccatcaggagaacagtgccccccatggtgaatgtcacctgcagcgaggtctcagagggcaacatcaccgtgacatgcagggcttccagcttctatccccggaatatcacactgacctggcgtcaggatggggtatctttgagccacaacacccagcagtggggggatgtcctgcctgatgggaatggaacctaccagacctgggtggccaccaggattcgccaaggagaggagcagaggttcacctgctacatggaacacagcgggaatcacggcactcaccctgtgccctctgggaaggcgctggtgcttcagagtcaacggacagactttccatatgtttctgctgctatgccatgttttgttattattattattctctgtgtcccttgttgcaagaagaaaacatcagcggcagagggtccagagcttgtgagcctgcaggtcctggatcaacacccagttgggacaggagaccacagggatgcagcacagctgggatttcagcctctgatgtcagctactgggtccactggttccactgagggcacctagactctacagccaggcggccaggattcaactccctgcctggatctcaccagcactttccctctgtttcctgacctatgaaacagagaaaataacatcacttatttattgttgttggatgctgcaaagtgttagtaggtatgaggtgtttgctgctctgccacgtagagagccagcaaagggatcatgaccaactcaacattccattggaggctatatgatcaaacagcaaattgtttatcatgaatgcaggatgtgggcaaactcacgactgctcctgccaacagaaggtttgctgagggcattcactccatggtgctcattggagttatctactgggtcatctagagcctattgtttgaggaatgcagtcttacaagcctactctggacccagcagctgactccttcttccacccctcttcttgctatctcctataccaataaatacgaagggctgtggaagatcagagcccttgttcacgagaagcaagaagccccctgaccccttgttccaaatatactcttttgtctttctctttattcccacgttcgccctttgttcagtccaatacagggttgtggggcccttaacagtgccatattaattggtatcattatttctgttgtttttgtttttgtttttgtttttgtttttgagacagagtctcactctgtcacccaggctgcagttcactggtgtgatctcagctcactgcaacctctgcctcccaggttcaagcacttctcgtacctcagactcccgaatagctgggattacagacaggcaccaccacacccagctaatttttgtattttttgtagagacggggtttcgccaagttgaccagcccagtttcaaactcctgacctcaggtgatctgcctgccttggcatcccaaagtgctgggattacaagaatgagccaccgtgcctggcctattttattatattgtaatatattttattatattagccaccatgcctgtcctattttcttatgttttaatatattttaatatattacatgtgcagtaattagattatcatgggtgaactttatgagtgagtatcttggtgatgactcctcctgaccagcccaggaccagctttcttgtcaccttgaggtcccctcgccccgtcacaccgttatgcattactctgtgtctactattatgtgtgcataatttataccgtaaatgtttactctttaaataga

SEQ ID NO: 160415 - DNA, 2446 bp, Artificial Sequence
  derived and/or modified sequence
aaatttccacggggtcttctcaccgttttcattcagttggccactgctgagcagctgagaaggtggcgacgtaggggccatggggctgggccgggtcctgctgtttctggccgtcgccttcccttttgcacccccggcagccgccgctgagccccacagtcttcgttacaacctcatggtgctgtcccaggatggatctgtgcagtcagggtttctcgctgagggacatctggatggtcagcccttcctgcgctatgacaggcagaaacgcagggcaaagccccagggacagtgggcagaagatgtcctgggagctaagacctgggacacagagaccgaggacttgacagagaatgggcaagacctcaggaggaccctgactcatatcaaggaccagaaaggaggcttgcattccctccaggagattagggtctgtgagatccatgaagacagcagcaccaggggctcccggcatttctactacgatggggagctcttcctctcccaaaacctggagactcaagaatcgacagtgccccagtcctccagagctcagaccttggctatgaacgtcacaaatttctggaaggaagatgccatgaagaccaagacacactatcgcgctatgcaggcagactgcctgcagaaactacagcgatatctgaaatccggggtggccatcaggagaacagtgccccccatggtgaatgtcatctgcagcgaggtctcagagggcaacatcaccgtgacatgcagggcttccagcttctatccccggaatatcacactgacctggcgtcaggatggggtatctttgagccacaacacccagcagtggggggatgtcctgcctgatgggaatggaacctaccagacctgggtggccaccaggattcgccaaggagaggagcagaggttcacctgctacatggaacacagcgggaatcacggcactcaccctgtgccctctgggaaggcgctggtgcttcagagtcaacggacagactttccatatgtttctgctgctatgccatgttttgttattattattattctctgtgtcccttgttgcaagaagaaaacatcagcggcagagggtccagagcttgtgagcctgcaggtcctggatcaacacccagttgggacaggagaccacagggatgcagcacagctgggatttcagcctctgatgtcagctactgggtccactggttccactgagggcacctagactctacagccaggcggccaggattcaactccctgcctggatctcaccagcactttccctctgtttcctgacctatgaaacagagaaaataacatcacttatttattgttgttggatgctgcaaagtgttagtaggtatgaggtgtttgctgctctgccacgtagagagccagcaaagggatcatgaccaactcaacattccattggaggctatatgatcaaacagcaaattgtttatcatgaatgcaggatgtgggcaaactcacgactgctcctgccaacagaaggtttgctgagggcattcactccatggtgctcattggagttatctactgggtcatctagagcctattgtttgaggaatgcagtcttacaagcctactctggacccagcagctgactccttcttccacccctcttcttgctatctcctataccaataaatacgaagggctgtggaagatcagagcccttgttcacgagaagcaagaagccccctgaccccttgttccaaatatactcttttgtctttctctttattcccacgttcgccctttgttcagtccaatacagggttgtggggcccttaacagtgccatattaattggtatcattatttctgttgtttttgtttttgtttttgtttttgtttttgagacagagtctcactctgtcacccaggctgcagttcactggtgtgatctcagctcactgcaacctctgcctcccaggttcaagcacttctcgtacctcagactcccgaatagctgggattacagacaggcaccaccacacccagctaatttttgtattttttgtagagacggggtttcgccaagttgaccagcccagtttcaaactcctgacctcaggtgatctgcctgccttggcatcccaaagtgctgggattacaagaatgagccaccgtgcctggcctattttattatattgtaatatattttattatattagccaccatgcctgtcctattttcttatgttttaatatattttaatatattacatgtgcagtaattagattatcatgggtgaactttatgagtgagtatcttggtgatgactcctcctgaccagcccaggaccagctttcttgtcaccttgaggtcccctcgccccgtcacaccgttatgcattactctgtgtctactattatgtgtgcataatttataccgtaaatgtttactctttaaataga

SEQ ID NO: 160416 - DNA, 2295 bp, Artificial Sequence
  derived and/or modified sequence
agccccacagtcttcgttacaacctcatggtgctgtcccaggatggatctgtgcagtcagggtttctcgctgagggacatctggatggtcagcccttcctgcgctatgacaggcagaaacgcagggcaaagccccagggacagtgggcagaagatgtcctgggagctaagacctgggacacagagaccgaggacttgacagagaatgggcaagacctcaggaggaccctgactcatatcaaggaccagaaaggaggcttgcattccctccaggagattagggtctgtgagatccatgaagacagcagcaccaggggctcccggcatttctactacgatggggagctcttcctctcccaaaacctggagactcaagaatcgacagtgccccagtcctccagagctcagaccttggctatgaacgtcacaaatttctggaaggaagatgccatgaagaccaagacacactatcgcgctatgcaggcagactgcctgcagaaactacagcgatatctgaaatccggggtggccatcaggagaacagtgccccccatggtgaatgtcacctgcagcgaggtctcagagggcaacatcaccgtgacatgcagggcttccagcttctatccccggaatatcacactgacctggcgtcaggatggggtatctttgagccacaacacccagcagtggggggatgtcctgcctgatgggaatggaacctaccagacctgggtggccaccaggattcgccaaggagaggagcagaggttcacctgctacatggaacacagcgggaatcacggcactcaccctgtgccctctgggaaggcgctggtgcttcagagtcaacggacagactttccatatgtttctgctgctatgccatgttttgttattattattattctctgtgtcccttgttgcaagaagaaaacatcagcggcagagggtccagagcttgtgagcctgcaggtcctggatcaacacccagttgggacaggagaccacagggatgcagcacagctgggatttcagcctctgatgtcagctactgggtccactggttccactgagggcgcctagactctacagccaggcggccaggattcaactccctgcctggatctcaccagcactttccctctgtttcctgacctatgaaacagaaaataacatcacttatttattgttgttggatgctgcaaagtgttagtaggtatgaggtgtttgctgctctgccacgtagagagccagcaaagggatcatgaccaactcaacattccattggaggctatatgatcaaacagcaaattgtttatcatgaatgcaggatgtgggcaaactcacgactgctcctgccaacagaaggtttgctgagggcattcactccatggtgctcattggagttatctactgggtcatctagagcctattgtttgaggaatgcagtcttacaagcctactctggacccagcagctgactccttcttccacccctcttcttgctatctcctataccaataaatacgaagggctgtggaagatcagagcccttgttcacgagaagcaagaagccccctgaccccttgttccaaatatactcttttgtctttctctttattcccacgttcgccctttgttcagtccaatacagggttgtggggcccttaacagtgccatattaattggtatcattatttctgttgtttttgtttttgtttttgtttttgtttttgagacagagtctcactctgtcacccaggctgcagttcactggtgtgatctcagctcactgcaacctctgcctcccaggttcaagcacttctcgtacctcagactcccgaatagctgggattacagacaggcaccaccacacccagctaatttttgtattttttgtagagacggggtttcgccaagttgaccagcccagtttcaaactcctgacctcaggtgatctgcctgccttggcatcccaaagtgctgggattacaagaatgagccaccgtgcctggcctattttattatattgtaatatattttattatattagccaccatgcctgtcctattttcttatgttttaatatattttaatatattacatgtgcagtaattagattatcatgggtgaactttatgagtgagtatcttggtgatgactcctcctgaccagcccaggaccagctttcttgtcaccttgaggtcccctcgccccgtcacaccgttatgcattactctgtgtctactattatgtgtgcataatttataccgtaaatgtttactctttaaataga

SEQ ID NO: 160417 - DNA, 2438 bp, Artificial Sequence
  derived and/or modified sequence
aaatttcgacggggtcttctcaccggtttcattcagttggccactgctgagcagctgagaaggtggcgacgtaggggccatggggctgggccgggtcctgctgtttctggccgtcgccttcccttttgcacccccggcagccgccgctgagccccacagtcttcgttacaacctcatggtgctgtcccaggatggatctgtgcagtcagggtttctcgctgagggacatctggatggtcagcccttcctgcgctatgacaggcagaaacgcagggcaaagccccagggacagtgggcagaagatgtcctgggagctaagacctgggacacagagaccgaggacttgacagagaatgggcaagacctcaggaggaccctgactcatatcaaggaccagaaaggaggcttgcattccctccaggagattagggtctgtgagatccatgaagacagcagcaccaggggctcccggcatttctactacgatggggagctcttcctctcccaaaacctggagactcaagaatcgacagtgccccagtcctccagagctcagaccttggctatgaacgtcacaaatttctggaaggaagatgccatgaagaccaagacacactatcgcgctatgcaggcagactgcctgcagaaactacagcgatatctgaaatccggggtggccatcaggagaacagtgccccccatggtgaatgtcacctgcagcgaggtctcagagggcaacatcaccgtgacatgcagggcttccagcttctatccccggaatatcacactgacctggcgtcaggatggggtatctttgagccacaacacccagcagtggggggatgtcctgcctgatgggaatggaacctaccagacctgggtggccaccaggattcgccaaggagaggagcagaggttcacctgctacatggaacacagcgggaatcacggcactcaccctgtgccctctgggaaggcgctggtgcttcagagtcaacggacagactttccatatgtttctgctgctatgccatgttttgttattattattattctctgtgtcccttgttgcaagaagaaaacatcagcggcagagggtccagagcttgtgagcctgcaggtcctggatcaacacccagttgggacaggagaccacagggatgcagcacagctgggatttcagcctctgatgtcagctactgggtccactggttccactgagggcgcctagactctacagccaggcggccaggattcaactccctgcctggatctcaccagcactttccctctgtttcctgacctatgaaacagaaaataacatcacttatttattgttgttggatgctgcaaagtgttagtaggtatgaggtgtttgctgctctgccacgtagagagccagcaaagggatcatgaccaactcaacattccattggaggctatatgatcaaacagcaaattgtttatcatgaatgcaggatgtgggcaaactcacgactgctcctgccaacagaaggtttgctgagggcattcactccatggtgctcattggagttatctactgggtcatctagagcctattgtttgaggaatgcagtcttacaagcctactctggacccagcagctgactccttcttccacccctcttcttgctatctcctataccaataaatacgaagggctgtggaagatcagagcccttgttcacgagaagcaagaagccccctgaccccttgttccaaatatactcttttgtctttctctttattcccacgttcgccctttgttcagtccaatacagggttgtggggcccttaacagtgccatattaattggtatcattatttctgttgtttttgtttttgtttttgtttttgagacagagtctcactctgtcacccaggctgcagttcactggtgtgatctcagctcactgcaacctctgcctcccaggttcaagcacttctcgtacctcagactcccgaatagctgggattacagacaggcaccaccacacccagctaatttttgtattttttgtagagacgggatttcgccaagttgaccagcccagtttcaaactcctgacctcaggtgatctgcctgccttggcatcccaaagtgctgggattacaagaatgagccaccgtgcctggcctattttattatattgtaatatattttattatattagccaccatgcctgtcctattttcttatgttttaatatattttaatatattacatgtgcagtaattagattatcatgggtgaactttatgagtgagtatcttggtgatgactcctcctgaccagcccaggaccagctttcttgtcaccttgaggtcccctcgccccgtcacaccgttatgcattactctgtgtctactattatgtgtgcataatttataccgtaaatgtttactctttaaataga

SEQ ID NO: 160418 - DNA, 2444 bp, Artificial Sequence
  derived and/or modified sequence
aaatttcgacggggtcttctcaccggtttcattcagttggccactgctgagcagctgagaaggtggcgacgtaggggccatggggctgggccgggtcctgctgtttctggccgtcgccttcccttttgcacccccggcagccgccgctgagccccacagtcttcgttacaacctcatggtgctgtcccaggatggatctgtgcagtcagggtttctcgctgagggacatctggatggtcagcccttcctgcgctatgacaggcagaaacgcagggcaaagccccagggacagtgggcagaagatgtcctgggagctgagacctgggacacagagaccgaggacttgacagagaatgggcaagacctcaggaggaccctgactcatatcaaggaccagaaaggaggcttgcattccctccaggagattagggtctgtgagatccatgaagacagcagcaccaggggctcccggcatttctactacaatggggagctcttcctctcccaaaacctggagactcaagaatcgacagtgccccagtcctccagagctcagaccttggctatgaacgtcacaaatttctggaaggaagatgccatgaagaccaagacacactatcgcgctatgcaggcagactgcctgcagaaactacagcgatatctgaaatccggggtggccatcaggagaacagtgccccccatggtgaatgtcacctgcagcgaggtctcagagggcaacatcaccgtgacatgcagggcttccagcttctatccccggaatatcacactgacctggcgtcaggatggggtatctttgagccacaacacccagcagtggggggatgtcctgcctgatgggaatggaacctaccagacctgggtggccaccaggattcgccaaggagaggagcagaggttcacctgctacatggaacacagcgggaatcacggcactcaccctgtgccctctgggaaggcgctggtgcttcagagtcaacggacagactttccatatgtttctgctgctatgccatgttttgttattattattattctctgtgtcccttgttgcaagaagaaaacatcagcggcagagggtccagagcttgtgagcctgcaggtcctggatcaacacccagttgggacaggagaccacagggatgcagcacagctgggatttcagcctctgatgtcagctactgggtccactggttccactgagggcgcctagactctacagccaggcggccaggattcaactccctgcctggatctcaccagcactttccctctgtttcctgacctatgaaacagaaaataacatcacttatttattgttgttggatgctgcaaagtgttagtaggtatgaggtgtttgctgctctgccacgtagagagccagcaaagggatcatgaccaactcaacattccattggaggctatatgatcaaacagcaaattgtttatcatgaatgcaggatgtgggcaaactcacgactgctcctgccaacagaaggtttgctgagggcattcactccatggtgctcattggagttatctactgggtcatctagagcctattgtttgaggaatgcagtcttacaagcctactctggacccagcagctgactccttcttccacccctcttcttgctatctcctataccaataaatacgaagggctgtggaagatcagagcccttgttcacgagaagcaagaagccccctgaccccttgttccaaatatactcttttgtctttctctttattcccacgttcgccctttgttcagtccaatacagggttgtggggcccttaacagtgccatattaattggtatcattatttctgttgtttttgtttttgtttttgtttttgtttttgagacagagtctcactctgtcacccaggctgcagttcactggtgtgatctcagctcactgcaacctctgcctcccaggttcaagcacttctcgtacctcagactcccgaatagctgggattacagacaggcaccaccacacccagctaatttttgtattttttgtagagacggggtttcgccaagttgaccagcccagtttcaaactcctgacctcaggtgatctgcctgccttggcatcccaaagtgctgggattacaagaatgagccaccgtgcctggcctattttattatattgtaatatattttattatattagccaccatgcctgtcctattttcttatgttttaatatattttaatatattacatgtgcagtaattagattatcatgggtgaactttatgagtgagtatcttggtgatgactcctcctgaccagcccaggaccagctttcttgtcaccttgaggtcccctcgccccgtcacaccgttatgcattactctgtgtctactattatgtgtgcataatttataccgtaaatgtttactctttaaataga

SEQ ID NO: 160419 - DNA, 2450 bp, Artificial Sequence
  derived and/or modified sequence
aaatttcgacggggtcttctcaccggtttcattcagttggccactgctgagcagctgagaaggtggcgacgtaggggccatggggctgggccgggtcctgctgtttctggccgtcgccttcccttttgcacccccggcagccgccgctgagccccacagtcttcgttacaacctcatggtgctgtcccaggatggatctgtgcagtcagggtttctcgctgagggacatctggatggtcagcccttcctgcgctatgacaggcagaaacgcagggcaaagccccagggacagtgggcagaagatgtcctgggagctaagacctgggacacagagaccgaggacttgacagagaatgggcaagacctcaggaggaccctgactcatatcaaggaccagaaaggaggcttgcattccctccaggagattagggtctgtgagatccatgaagacagcagcaccaggggctcccggcatttctactacgatggggagctcttcctctcccaaaacctggagactcaagaatcgacagtgccccagtcctccagagctcagaccttggctatgaacgtcacaaatttctggaaggaagatgccatgaagaccaagacacactatcgcgctatgcaggcagactgcctgcagaaactacagcgatatctgaaatccggggtggccatcaggagaacagtgccccccatggtgaatgtcacctgcagcgaggtctcagagggcaacatcaccgtgacatgcagggcttccagcttctatccccggaatatcacactgacctggcgtcaggatggggtatctttgagccacaacacccagcagtggggggatgtcctgcctgatgggaatggaacctaccagacctgggtggccaccaggattcgccaaggagaggagcagaggttcacctgctacatggaacacagcgggaatcacggcactcaccctgtgccctctgggaaggcgctggtgcttcagagtcaacggacagactttccatatgtttctgctgctatgccatgttttgttattattattattctctgtgtcccttgttgcaagaagaaaacatcagcggcagagggtccagagcttgtgagcctgcaggtcctggatcaacacccagttgggacaggagaccacagggatgcagcacagctgggatttcagcctctgatgtcagctactgggtccactggttccactgagggcgcctagactctacagccaggcggccaggattcaactccctgcctggatctcaccagcactttccctctgtttcctgacctatgaaacagaaaataacatcacttatttattgttgttggatgctgcaaagtgttagtaggtatgaggtgtttgctgctctgccacgtagagagccagcaaagggatcatgaccaactcaacattccattggaggctatatgatcaaacagcaaattgtttatcatgaatgcaggatgtgggcaaactcacgactgctcctgccaacagaaggtttgctgagggcattcactccatggtgctcattggagttatctactgggtcatctagagcctattgtttgaggaatgcagtcttacaagcctactctggacccagcagctgactccttcttccacccctcttcttgctatctcctataccaataaatacgaagggctgtggaagatcagagcccttgttcacgagaagcaagaagccccctgaccccttgttccaaatatactcttttgtctttctctttattcccacgttcgccctttgttcagtccaatacagggttgtggggcccttaacagtgccatattaattggtatcattatttctgttgtttttgtttttgtttttgtttttgtttttgtttttgagacagagtctcactctgtcacccaggctgcagttcactggtgtgatctcagctcactgcaacctctgcctcccaggttcaagcacttctcgtacctcagactcccgaatagctgggattacagacaggcaccaccacacccagctaatttttgtattttttgtagagacggggtttcgccaagttgaccagcccagtttcaaactcctgacctcaggtgatctgcctgccttggcatcccaaagtgctgggattacaagaatgagccaccgtgcctggcctattttattatattgtaatatattttattatattagccaccatgcctgtcctattttcttatgttttaatatattttaatatattacatgtgcagtaattagattatcatgggtgaactttatgagtgagtatcttggtgatgactcctcctgaccagcccaggaccagctttcttgtcaccttgaggtcccctcgccccgtcacaccgttatgcattactctgtgtctactattatgtgtgcataatttataccgtaaatgtttactctttaaataga

SEQ ID NO: 160420 - DNA, 2444 bp, Artificial Sequence
  derived and/or modified sequence
aaatttcgacggggtcttctcaccggtttcattcagttggccactgctgagcagctgagaaggtggcgacgtaggggccatggggctgggccgggtcctgctgtttctggccgtcgccttcccttttgcacccccggcagccgccgctgagccccacagtcttcgttacaacctcatggtgctgtcccaggatggatctgtgcagtcagggtttctcgctgagggacatctggatggtcagcccttcctgcgctatgacaggcagaaacgcagggcaaagccccagggacagtgggcagaagatgtcctgggagctgagacctgggacacagagaccgaggacttgacagagaatgggcaagacctcaggaggaccctgactcatatcaaggaccagaaaggaggcttgcattccctccaggagattagggtctgtgagatgcatgaagacagcagcaccaggggctcccggcatttctactacaatggggagctcttcctctcccaaaacctggagactcaagaatcgacagtgccccagtcctccagagctcagaccttggctatgaacgtcacaaatttctggaaggaagatgccatgaagaccaagacacactatcgcgctatgcaggcagactgcctgcagaaactacagcgatatctgaaatccggggtggccatcaggagaacagtgccccccatggtgaatgtcacctgcagcgaggtctcagagggcaacatcaccgtgacatgcagggcttccagcttctatccccggaatatcacactgacctggcgtcaggatggggtatctttgagccacaacacccagcagtggggggatgtcctgcctgatgggaatggaacctaccagacctgggtggccaccaggattcgccaaggagaggagcagaggttcacctgctacatggaacacagcgggaatcacggcactcaccctgtgccctctgggaaggcgctggtgcttcagagtcaacggacagactttccatatgtttctgctgctatgccatgttttgttattattattattctctgtgtcccttgttgcaagaagaaaacatcagcggcagagggtccagagcttgtgagcctgcaggtcctggatcaacacccagttgggacaggagaccacagggatgcagcacagctgggatttcagcctctgatgtcagctactgggtccactggttccactgagggcgcctagactctacagccaggcggccaggattcaactccctgcctggatctcaccagcactttccctctgtttcctgacctatgaaacagaaaataacatcacttatttattgttgttggatgctgcaaagtgttagtaggtatgaggtgtttgctgctctgccacgtagagagccagcaaagggatcatgaccaactcaacattccattggaggctatatgatcaaacagcaaattgtttatcatgaatgcaggatgtgggcaaactcacgactgctcctgccaacagaaggtttgctgagggcattcactccatggtgctcattggagttatctactgggtcatctagagcctattgtttgaggaatgcagtcttacaagcctactctggacccagcagctgactccttcttccacccctcttcttgctatctcctataccaataaatacgaagggctgtggaagatcagagcccttgttcacgagaagcaagaagccccctgaccccttgttccaaatatactcttttgtctttctctttattcccacgttcgccctttgttcagtccaatacagggttgtggggcccttaacagtgccatattaattggtatcattatttctgttgtttttgtttttgtttttgtttttgtttttgagacagagtctcactctgtcacccaggctgcagttcactggtgtgatctcagctcactgcaacctctgcctcccaggttcaagcacttctcgtacctcagactcccgaatagctgggattacagacaggcaccaccacacccagctaatttttgtattttttgtagagacggggtttcgccaagttgaccagcccagtttcaaactcctgacctcaggtgatctgcctgccttggcatcccaaagtgctgggattacaagaatgagccaccgtgcctggcctattttattatattgtaatatattttattatattagccaccatgcctgtcctattttcttatgttttaatatattttaatatattacatgtgcagtaattagattatcatgggtgaactttatgagtgagtatcttggtgatgactcctcctgaccagcccaggaccagctttcttgtcaccttgaggtcccctcgccccgtcacaccgttatgcattactctgtgtctactattatgtgtgcataatttataccgtaaatgtttactctttaaataga

SEQ ID NO: 160421 - DNA, 1485 bp, Artificial Sequence
  derived and/or modified sequence
gaattttgtgagcgaccgcgctgggccgtttctctttcttttccggaccctgcagtggcgcctaaagtctgcgaggaggaagtcgcctctgtgctcgtgagtccagggatctaagagccccacagtcttcgttacaacctcatggtgctgtcccaggatggatctgtgcagtcagggtttctcgctgagggacatctggatggtcagcccttcctgcgctatgacaggcagaaacgcagggcaaagccccagggacagtgggcagaaaatgtcctgggagctaagacctgggacacagagaccgaggacttgacagagaatgggcaagacctcaggaggaccctgactcatatcaaggaccagaaaggaggcttgcattccctccaggagattagggtctgtgagatccatgaagacagcagcaccaggggctcccggcatttctactacgatggggagctcttcctctcccaaaacctggagactcaagaatcgacagtgccccagtcctccagagctcagaccttggctatgaacgtcacaaatttctggaaggaagatgccatgaagaccaagacacactatcgcgctatgcaggcagactgcctgcagaaactacagcgatatctgaaatccggggtggccatcaggagaacagtgccccccatggtgaatgtcacctgcagcgaggtctcagagggcaacatcaccgtgacatgcagggcttccagcttctatccccggaatatcacactgacctggcgtcaggatggggtatctttgagccacaacacccagcagtggggggatgtcctgcctgatgggaatggaacctaccagacctgggtggccaccaggattcgccaaggagaggagcagaggttcacctgctacatggaacacagcgggaatcacggcactcaccctgtgccctctgggaaggcgctggtgcttcagagtcaacggacagactttccatatgtttctgctgctatgccatgttttgttattattattattctctgtgtcccttgttgcaagaagaaaacatcagcggcagagggtccagagcttgtgagcctgcaggtcctggatcaacacccagttgggacaggagaccacagggatgcagcacagctgggatttcagcctctgatgtcagctactgggtccactggttccactgagggcacctagactctacagccaggcggccaggattcaactccctgcctggatctcaccagcactttccctctgtttcctgacctatgaaacagagaaaataacatcacttatttattgttgttggatgctgcaaagtgttagtaggtatgaggtgtttgctgctctgccacgtagagagccagcaaagggatcatgaccaactcaacattccattggaggctatatgatcaaacagcaaattgtttatcatgaatgcaggatgtgggcaaactcacgactgctcctgccaacagaagg

SEQ ID NO: 160422 - DNA, 1483 bp, Artificial Sequence
  derived and/or modified sequence
gaattttgtgagcgcccgcgctgggccgtttctctttcttttccggaccctgcagtggcgcctaaagtctgcgaggaggaagtcgcctctgtgctcgtgagtccagggatctaagagccccacagtcttcgttacaacctcatggtgctgtcccaggatggatctgtgcagtcagggtttctcgctgagggacatctggatggtcagcccttcctgcgctatgacaggcagaaacgcagggcaaagccccagggacagtgggcagaagatgtcctgggagctgagacctgggacacagagaccgaggacttgacagagaatgggcaagacctcaggaggaccctgactcatatcaaggaccagaaaggaggcttgcattccctccaggagattagggtctgtgagatgcatgaagacagcagcaccaggggctcccggcatttctactacaatggggagctcttcctctcccaaaacctggagactcaagaatcgacagtgccccagtcctccagagctcagaccttggctatgaacgtcacaaatttctggaaggaagatgccatgaagaccaagacacactatcgcgctatgcaggcagactgcctgcagaaactacagcgatatctgaaatccggggtggccatcaggagaacagtgccccccatggtgaatgtcacctgcagcgaggtctcagagggcaacatcaccgtgacatgcagggcttccagcttctatccccggaatatcacactgacctggcgtcaggatggggtatctttgagccacaacacccagcagtggggggatgtcctgcctgatgggaatggaacctaccagacctgggtggccaccaggattcgccaaggagaggagcagaggttcacctgctacatggaacacagcgggaatcacggcactcaccctgtgccctctgggaaggcgctggtgcttcagagtcaacggacagactttccatatgtttctgctgctatgccatgttttgttattattattattctctgtgtcccttgttgcaagaagaaaacatcagcggcagagggtccagagcttgtgagcctgcaggtcctggatcaacacccagttgggacaggagaccacagggatgcagcacagctgggatttcagcctctgatgtcagctactgggtccactggttccactgagggcgcctagactctacagccaggcggccaggattcaactccctgcctggatctcaccagcactttccctctgtttcctgacctatgaaacagaaaataacatcacttatttattgttgttggatgctgcaaagtgttagtaggtatgaggtgtttgctgctctgccacgtagagagccagcaaagggatcatgaccaactcaacattccattggaggctatatgatcaaacagcaaattgtttatcatgaatgcaggatgtgggcaaactcacgactgctcctgccaacagaagg

SEQ ID NO: 160423 - DNA, 1485 bp, Artificial Sequence
  derived and/or modified sequence
gaattttgtgagcgaccgcgctgggccgtttctctttcttttccggaccctgcagtggcgcctaaagtctgcgaggaggaagtcgcctctgtgcttgtgagtccagggatctaagagccccacagtcttcgttacaacctcatggtgctgtcccaggatggatctgtgcagtcagggtttctcgctgagggacatctggatggtcagcccttcctgcgctatgacaggcagaaacgcagggcaaagccccagggacagtgggcagaagatgtcctgggagctaagacctgggacacagagaccgaggacttgacagagaatgggcaagacctcaggaggaccctgactcatatcaaggaccagaaaggaggcttgcattccctccaggagattagggtctgtgagatccatgaagacagcagcaccaggggctcccggcatttctactacgatggggagctcttcctctcccaaaacctggagactcaagaatcgacagtgccccagtcctccagagctcagaccttggctatgaacgtcacaaatttctggaaggaagatgccatgaagaccaagacacactatcgcgctatgcaggcagactgcctgcagaaactacagcgatatctgaaatccggggtggccatcaggagaacagtgccccccatggtgaatgtcatctgcagcgaggtctcagagggcaacatcaccgtgacatgcagggcttccagcttctatccccggaatatcacactgacctggcgtcaggatggggtatctttgagccacaacacccagcagtggggggatgtcctgcctgatgggaatggaacctaccagacctgggtggccaccaggattcgccaaggagaggagcagaggttcacctgctacatggaacacagcgggaatcacggcactcaccctgtgccctctgggaaggcgctggtgcttcagagtcaacggacagactttccatatgtttctgctgctatgccatgttttgttattattattattctctgtgtcccttgttgcaagaagaaaacatcagcggcagagggtccagagcttgtgagcctgcaggtcctggatcaacacccagttgggacaggagaccacagggatgcagcacagctgggatttcagcctctgatgtcagctactgggtccactggttccactgagggcacctagactctacagccaggcggccaggattcaactccctgcctggatctcaccagcactttccctctgtttcctgacctatgaaacagagaaaataacatcacttatttattgttgttggatgctgcaaagtgttagtaggtatgaggtgtttgctgctctgccacgtagagagccagcaaagggatcatgaccaactcaacattccattggaggctatatgatcaaacagcaaattgtttatcatgaatgcaggatgtgggcaaactcacgactgctcctgccaacagaagg

SEQ ID NO: 160424 - DNA, 1483 bp, Artificial Sequence
  derived and/or modified sequence
gaattttgtgagcgcccgcgctgggccgtttctctttcttttccggaccctgcagtggcgcctaaagtctgcgaggaggaagtcgcctctgtgctcgtgagtccagggatctaagagccccacagtcttcgttacaacctcatggtgctgtcccaggatggatctgtgcagtcagggtttctcgctgagggacatctggatggtcagcccttcctgcgctatgacaggcagaaacgcagggcaaagccccagggacagtgggcagaagatgtcctgggagctgagacctgggacacagagaccgaggacttgacagagaatgggcaagacctcaggaggaccctgactcatatcaaggaccagaaaggaggcttgcattccctccaggagattagggtctgtgagatccatgaagacagcagcaccaggggctcccggcatttctactacaatggggagctcttcctctcccaaaacctggagactcaagaatcgacagtgccccagtcctccagagctcagaccttggctatgaacgtcacaaatttctggaaggaagatgccatgaagaccaagacacactatcgcgctatgcaggcagactgcctgcagaaactacagcgatatctgaaatccggggtggccatcaggagaacagtgccccccatggtgaatgtcacctgcagcgaggtctcagagggcaacatcaccgtgacatgcagggcttccagcttctatccccggaatatcacactgacctggcgtcaggatggggtatctttgagccacaacacccagcagtggggggatgtcctgcctgatgggaatggaacctaccagacctgggtggccaccaggattcgccaaggagaggagcagaggttcacctgctacatggaacacagcgggaatcacggcactcaccctgtgccctctgggaaggcgctggtgcttcagagtcaacggacagactttccatatgtttctgctgctatgccatgttttgttattattattattctctgtgtcccttgttgcaagaagaaaacatcagcggcagagggtccagagcttgtgagcctgcaggtcctggatcaacacccagttgggacaggagaccacagggatgcagcacagctgggatttcagcctctgatgtcagctactgggtccactggttccactgagggcgcctagactctacagccaggcggccaggattcaactccctgcctggatctcaccagcactttccctctgtttcctgacctatgaaacagaaaataacatcacttatttattgttgttggatgctgcaaagtgttagtaggtatgaggtgtttgctgctctgccacgtagagagccagcaaagggatcatgaccaactcaacattccattggaggctatatgatcaaacagcaaattgtttatcatgaatgcaggatgtgggcaaactcacgactgctcctgccaacagaagg

SEQ ID NO: 160425 - DNA, 1152 bp, Artificial Sequence
  derived and/or modified sequence
atgggcctgggccgggtgctgctgttcctggccgtggccttccccttcgctccgcctgccgccgccgccgagcctcactctcttagatacaacctgatggtcctatctcaagatggcagcgtacagagcggattcctcgcagaaggacatctcgacggccagcccttcctgaggtacgatcgccagaaacgtagagccaaaccacaaggacagtgggccgaaaacgtgttgggagcgaaaacctgggacactgaaactgaagacctgactgagaatgggcaggatctcaggagaaccctcacacacatcaaggaccaaaagggaggtctacactcactccaggagattcgggtctgtgaaattcacgaagattcaagcaccagaggctcaaggcacttttattacgatggtgagctctttcttagccagaacttggaaacgcaggagtctactgtgccacaatcttccagagcccaaacgctggctatgaatgtcacaaacttctggaaggaggatgctatgaagactaagactcattacagagctatgcaggcggactgccttcagaagctgcaacgatacctgaagagtggcgtggcaattaggaggacagtacctccaatggtgaacgtcacctgcagcgaggtgagcgaagggaacattactgtcacttgtcgtgcctcctccttctacccaaggaacattaccttaacctggcgacaggatggagtgtccctgtcacataacactcaacagtggggtgacgtcctgcccgacgggaatggtacttatcagacctgggtggctactcgcatcaggcaaggagaggagcagcggttcacatgttatatggaacattccggtaaccatgggacccaccctgtgcccagcggcaaggccttggtactccaatcacagcgtacagattttccatacgtctccgccgccatgccctgcttcgtgattattataatcttgtgtgtcccatgctgtaaaaaaaagacctctgcagccgaaggtccagaactcgtgtctctgcaagtccttgaccaacaccctgtagggactggagatcaccgggatgctgcgcagcttggcttccagccgctaatgtccgccaccggaagcacagggtccacagaaggaacatag

SEQ ID NO: 160426 - DNA, 1152 bp, Artificial Sequence
  derived and/or modified sequence
atgggcctgggccgggtgctgctgttcctggccgtggccttcccctttgcaccacctgctgctgctgccgagccccacagcctaaggtataacctgatggtgctgtcacaggatggttcagtgcagagcggtttcctcgctgaggggcatttggatggtcaaccgttcctccgttacgatcgccagaagcggcgggcgaaaccacaaggtcagtgggcggaggacgtgctcggcgcaaagacctgggacacagagactgaggatctaactgaaaacggacaggacctgcggaggaccttgactcacattaaagatcagaaaggcgggctccactccctccaggagatcagggtgtgtgaaatccacgaagattctagcacacgcggatcacggcacttctattacgatggggaactctttctgagtcagaatcttgagacacaggaatctactgttccgcaatcgtcacgggcccagacactcgcaatgaatgtgaccaatttctggaaggaggacgctatgaagactaagactcactatcgcgccatgcaggcagactgcctgcagaagctgcagcgctatctgaaaagcggcgttgccatacgaagaaccgtccctccaatggttaacgtaatttgtagcgaggtgtccgagggcaatatcaccgtaacttgcagagcttcctcattctatccacgcaatatcactctcacctggcgccaggacggggtgtccctgtcccacaacacacagcagtggggcgacgtgctgcccgatggcaatgggacttatcaaacatgggttgctacacgaattcgccaaggtgaagaacagcggttcacctgttatatggagcacagcggcaaccacggaacccaccctgtccccagcgggaaggcactggtgttacaaagccagcgaactgactttccttacgtgtcagccgcaatgccgtgttttgtgattattatcatactatgcgtgccttgctgcaagaagaagacatctgccgccgaaggtcctgagctggtttcccttcaggtccttgaccagcaccctgttggaaccggtgatcatagagacgccgcccaactcggctttcagcctctaatgtcggctaccggttcgacaggatccaccgaaggaacgtag

SEQ ID NO: 160427 - DNA, 1083 bp, Artificial Sequence
  derived and/or modified sequence
tgaccccacagcctgcggtacaacctgatggtgctgagccaggacggctcagtacagagcgggtttctcgccgaggggcacctggacggtcagccttttctcaggtatgaccgtcagaagcgaagggccaaaccccagggccagtgggccgaagacgtgctcggcgccaaaacttgggatacggaaacagaggacctgaccgaaaacggccaggacttgaggcgtactcttacgcatattaaggaccagaagggggggctgcactccctccaagagatccgggtctgcgagatccatgaagattcatcgacacgtggaagcaggcatttctattatgacggagagttgttcttgagccagaacctggaaacacaggaatctactgtgccccagagcagtcgagcccagacactcgctatgaatgtgacaaatttttggaaggaagatgctatgaaaaccaaaactcattaccgcgctatgcaggcagactgcctacagaaactccagagatacttaaaatctggcgtcgccatcaggaggacggtccctccaatggtgaacgttacctgttctgaggtgtccgaaggtaacatcactgttacgtgtagggccagctctttctatcctagaaacatcacactgacgtggcgacaggacggcgtttcactgtcccataatacacagcaatggggggacgtgttgccagatggcaacggcacgtaccaaacttgggtggcaacacgcataaggcagggcgaagagcaaagattcacatgttacatggagcactccggcaaccacggaactcatcccgttcccagcggcaaggctctcgtactgcaatcacaacggactgacttcccctatgtcagcgcagccatgccttgcttcgtcattattattatactgtgtgtgccttgctgcaagaaaaaaacttccgccgcagaggggccagagctcgtatctttgcaagtgttggaccagcaccctgtcgggacaggggaccatcgggacgcagcacagttaggcttccagcctcttatgtctgctacaggatccacgggcagcaccgagggcgcctag

SEQ ID NO: 160428 - DNA, 1152 bp, Artificial Sequence
  derived and/or modified sequence
atgggcctgggccgggtgctgctgttcctggccgtggccttcccctttgccccaccggcggctgccgcggagcctcacagcctccgatataatttgatggtgctgtcccaggacggtagcgtgcagagtggtttcctggcggagggccacctggacggacaaccctttttgcgatatgatcgacagaagaggcgcgccaagcctcagggtcaatgggcggaagatgtactgggcgcgaaaacctgggacacagagactgaggacctgacagaaaacgggcaggaccttaggagaactctgacccacattaaagaccagaagggagggcttcattccttacaggaaatcagggtatgtgagatccacgaggactcttccacccgcggctcccgccatttctattatgacggcgaactttttctctcgcaaaatctggagactcaagagagcaccgtccctcagtcatctagggcccaaacacttgcaatgaatgttacaaatttttggaaggaggacgccatgaagacaaagacgcattaccgagcgatgcaggctgactgcctgcagaagctccagagatatctgaagtccggcgtggccattagacgcacagtgcccccaatggtcaatgtcacatgttccgaagtctccgaaggaaacatcactgtgacttgtcgcgcctcttcattctatcctcgaaacattacacttacctggaggcaggacggagtgtctctgtctcacaatactcagcagtggggcgatgtcttaccagatggaaacggaacttaccagacctgggtagccacccgcatccgacaaggcgaggaacaacggttcacctgctatatggagcactccgggaaccatggcacacatcccgtcccgtctggtaaagccctggtgctgcagtctcaacgcacagactttccttacgtttcagccgcaatgccttgtttcgttattattattatcttgtgtgtcccttgctgcaagaagaagacgtctgcagctgagggccctgagctcgtgtccctccaggtcctggatcagcaccccgtgggcactggggaccacagggacgcagctcagctgggttttcagccacttatgtcggccacagggtcgacaggctctacggaaggagcctag

SEQ ID NO: 160429 - DNA, 1152 bp, Artificial Sequence
  derived and/or modified sequence
atgggcctgggccgggtgctgctgttcctggccgtggccttccccttcgccccccctgcagcggccgccgaaccccactcactgcggtacaacctcatggttctgagtcaggacggctccgttcagtcaggtttcctggcagaagggcatctggatggacagcctttcctccgttatgaccggcagaagcggcgcgctaagccgcaaggacaatgggcagaggacgtcctgggagccgaaacttgggacactgaaactgaagatctcacagagaatgggcaggacttgagaaggacactgacgcacatcaaggatcagaaaggaggtctccactctctccaggagattcgagtgtgtgagatacatgaagatagctcgacccggggcagccggcacttctattataatggcgagctgtttctctcccaaaacctggaaacccaggagagcaccgtgccgcagtctagtcgcgctcagacactggccatgaatgtcactaacttctggaaggaagacgctatgaagacaaagacgcactaccgcgccatgcaagccgattgcctccaaaagctgcagagatacctcaaaagtggcgttgctatcaggcgtacagtccctccaatggtcaacgtgacctgttccgaggtctcagaagggaacatcacagtgacttgtagggcctcttccttctaccctaggaacatcaccctgacctggcgacaagacggcgtttctctctcgcacaacacacagcagtggggtgacgtgctccccgacggaaatggcacatatcagacctgggtggctacacggatacgccagggagaagaacagaggttcacctgttatatggagcattccgggaaccatggcactcatccagtccctagtggtaaagccctggtattacaaagccaaaggacagacttcccttacgtctcagcagccatgccgtgcttcgtgattatcattatcttgtgcgttccatgctgcaagaagaaaacttccgccgccgaagggccagagctggttagcctacaggtgctggatcagcacccggtcggaaccggggatcaccgggatgctgcccagctcggatttcaaccactcatgagcgctacagggagtactggaagcacagagggcgcttag

SEQ ID NO: 160430 - DNA, 1152 bp, Artificial Sequence
  derived and/or modified sequence
atgggcctgggccgggtgctgctgttcctggccgtggccttcccctttgcgcccccagccgcggcggccgaaccccattccctccgttataatctcatggtgctgagccaggacggaagcgtacagagtggttttcttgctgagggccacctggatggtcagcctttcctacgctatgatcggcagaaacgtcgagcaaagccacagggacagtgggccgaggacgtactgggagccaagacatgggacaccgagaccgaggacttgaccgagaacggtcaggacctgcgtcgcacactcacccatatcaaggaccagaagggaggccttcactcactacaggaaatccgggtttgcgaaatccatgaggacagcagcactaggggatcccgccacttttactacgatggcgaattgtttttgagccagaacctggaaactcaggaaagtaccgttccacagtctagcagagcacagacattggcaatgaacgtgacaaacttctggaaggaggatgctatgaaaaccaagacccattatcgggccatgcaggctgactgcttgcagaaactgcagcggtacctgaagagcggtgtcgccatacgtcgcacggtgcctcccatggtcaatgtcacatgcagcgaagtctccgagggcaacataaccgtaacctgtcgagcaagttcattctacccacggaacattaccctgacctggcggcaggacggtgtgtctcttagtcacaatacacagcagtggggcgacgtacttcctgacggtaatggaacataccagacttgggtggccactcgaattcgtcaaggcgaagaacagagattcacttgctacatggaacactcaggcaaccatggaacgcaccctgttccgtccgggaaagccctcgtgctacaatcgcagcgcaccgactttccctacgtatctgccgccatgccctgttttgtgattatcataatcctgtgcgtgccatgttgtaagaagaagacctcagcggccgaggggcctgagctagtttcattacaggtgttagaccagcacccggtaggaactggagatcacagggacgctgcgcagctgggcttccaacctttaatgtctgctacaggatcaactggatccaccgaaggggcctag

SEQ ID NO: 160431 - DNA, 1152 bp, Artificial Sequence
  derived and/or modified sequence
atgggcctgggccgggtgctgctgttcctggccgtggccttcccctttgcccccccagctgcagccgcagaaccccattcacttagatacaatctcatggtgctgtcacaggacggctcagttcagagcggctttttggcagaggggcacctggacgggcaacccttcctccggtatgatcgccaaaagagaagagccaagcctcagggtcagtgggctgagaatgtgttgggggccaagacatgggatacggaaacggaagacctgacagagaacgggcaggacctccgcaggactctgactcacatcaaagatcaaaagggggggctccactctctgcaggagattcgggtctgcgagattcacgaagacagcagtacacgcgggagccggcatttttattatgacggtgagctttttctcagccagaatctagaaacacaggagtccaccgtgcctcagagctccagggctcagactctagctatgaacgtgactaatttctggaaggaggacgcaatgaaaaccaaaacccactatcgggcaatgcaggcagactgtctgcagaagctacagaggtatcttaaatccggcgtcgctatccggagaaccgtaccacctatggtcaacgtcacgtgcagcgaagttagtgagggcaacattactgtgacctgcagggcttcgagcttctatccgagaaatataaccctgacctggaggcaggacggggtttcactgtctcacaacacacagcagtggggcgatgtgctacctgacggaaacgggacctaccaaacatgggtggctaccaggattcgccagggcgaagaacagcggtttacatgctatatggagcattccggtaatcacggtacacaccccgtgccatccggcaaagcgctagtgctacaaagccagaggacggattttccctacgtgtccgcagccatgccctgcttcgtgatcataatcattttgtgtgtaccctgctgcaagaaaaagacatcagccgccgaaggtcctgagcttgtgtctttacaggtgttggatcaacatccggttggaaccggagatcaccgcgatgccgcccagctgggcttccagccattaatgtccgccaccggatcgaccggcagtactgagggcacttag

SEQ ID NO: 160432 - DNA, 1152 bp, Artificial Sequence
  derived and/or modified sequence
atgggcctgggccgggtgctgctgttcctggccgtggccttccccttcgctcccccagccgccgctgcggagcctcattctttgcgctacaatctgatggtgttgagccaggacggtagcgtccaatctgggttcctggcggaaggccacttagacggccaacccttcttaagatatgacaggcagaaaagacgagctaaaccacagggccaatgggccgaggacgtcctgggcgccgagacctgggacaccgagaccgaagacctcaccgaaaatggccaggaccttcggcgcactctaactcatatcaaagatcaaaagggggggttgcattctttacaggaaattcgggtgtgcgaaatgcacgaagatagctctacacgaggtagtaggcacttctattataacggcgagctcttcctgagccagaacctggaaactcaggaatccacagtgcctcagagttcaagggcccagacactggctatgaacgtcacaaacttctggaaggaagatgctatgaaaaccaagacccactatagggcaatgcaagctgattgtttgcagaagctgcagcgttacttgaaaagcggcgtggctattaggcgaactgtgccccccatggtaaatgtgacttgtagcgaggtgtccgagggaaacataactgtgacatgtcgcgcgagcagtttttatccccggaacataaccctaacgtggcgacaggacggggtatctctctcacacaatacccaacagtggggtgacgtgctgcctgatggaaatggaacatatcagacctgggtggcaaccaggatccgccagggagaggaacagcgctttacatgctatatggaacactccgggaaccatggaacccatcctgttcccagtggaaaagctctcgtgttgcagtctcagagaactgacttcccttatgtctctgcggcaatgccgtgctttgtgatcattatcatcctttgtgtgccttgctgcaagaaaaaaaccagtgctgccgagggtcctgagttagtcagcctgcaggtcctggaccagcacccggtgggaactggtgaccatagggacgctgcacaactcgggttccaaccactgatgtccgccaccggttctacaggatcaacagagggcgcttag

SEQ ID NO: 160433 - DNA, 1152 bp, Artificial Sequence
  derived and/or modified sequence
atgggtctgggcagggtacttctcttcctggcagtagccttcccatttgcacctccagctgctgctgctgaaccccatagcttacggtacaacctgatggtgctgtcacaggatgggtccgtgcagtctggtttcctggccgaagggcacctcgatgggcaacccttcttgcgatatgatcgccagaaacggagggcaaaacctcaggggcagtgggcagagaatgtgcttggtgctaaaacctgggataccgagactgaggatctgacagaaaatgggcaggatctccgaagaaccctgacccatataaaggaccagaaagggggacttcatagtctgcaagagattcgggtgtgcgaaattcacgaagactcttccactaggggctcaagacacttttactacgacggggagttgtttttgagccagaatcttgagacccaggaatcaaccgtcccccagagttcccgtgcacagacactagcaatgaacgtgacaaacttctggaaagaagacgctatgaaaactaaaacacactatagagctatgcaagctgactgcctccagaagttacagcggtatctcaaaagcggagtggccatccgcaggaccgtgccacccatggtgaacgtcacgtgttctgaggtgtctgaagggaatattactgtgacgtgtagagccagctccttttacccgagaaatatcaccctcacatggcgtcaggacggcgtaagcctcagccataatactcagcagtggggggacgttcttcccgacggaaacggcacttatcaaacctgggttgcgactcgcatccgacagggcgaggaacaaagatttacctgttacatggaacacagcggtaatcacggaacgcacccagtgccatctggtaaggccttagtgttgcagtcccagcggacagacttcccctacgtctcagccgctatgccttgctttgtaattatcatcatcctgtgcgtcccgtgttgcaaaaagaagacatctgctgctgagggaccagagttagtttcccttcaggtgttagaccagcaccctgtagggaccggggatcaccgcgacgcggctcagctggggttccagcctttgatgtcagctaccgggtctactggctcgaccgaaggcacatag

SEQ ID NO: 160434 - DNA, 1152 bp, Artificial Sequence
  derived and/or modified sequence
atggggctgggcagggttctactgttcttggcagtggccttcccatttgcgcctcccgctgcggctgcggagcctcatagtttacgctacaatctcatggtcctcagccaagatggatcagtccagtcaggcttcctggctgagggacacctggacggccaacctttcttgcgctacgatcgccagaagcggagagcaaagccacaggggcagtgggccgaagacgttctcggagccaagacctgggataccgaaactgaagacctgaccgagaatggacaggacctgcgccgaaccctgacccatatcaaggaccagaagggcggtttgcatagcctgcaggagattcgagtatgcgagatccacgaagattcctcaactagaggaagccgccacttctattatgatggagaactatttctgtctcagaatttggaaactcaggagtcaaccgtaccccagtcctctcgggctcagactctcgccatgaatgtcaccaatttctggaaggaagacgcaatgaaaactaagactcactaccgagctatgcaggctgactgtcttcagaagctccaaaggtatctcaagagtggtgtagccatacgtcgtacagtgccgccaatggtgaacgtaatctgcagcgaagtatccgaggggaacatcaccgtaacctgcagggccagtagcttctatcccaggaatatcacgctgacatggcggcaagacggcgtttcgttgtcccacaatactcaacaatggggggatgtcctgcccgatggaaacggtacttaccagacatgggtggcaaccagaatcaggcagggagaagaacaacgatttacctgttatatggaacacagtggcaaccacgggacccaccccgtgccatctggaaaagccctcgtgctccagtcccagcggaccgactttccttatgtaagtgctgccatgccatgctttgtgataattatcattttgtgtgtgccatgctgcaagaaaaagacgagtgcggcagagggaccggagctcgtttccctccaagtgctagatcagcatccggtaggcacaggcgaccacagggacgctgcccagctagggttccaaccactgatgtctgctaccggcagtaccggcagcaccgagggaacatag

SEQ ID NO: 160435 - DNA, 1083 bp, Artificial Sequence
  derived and/or modified sequence
tagccccattctctacgctacaacctgatggtgctgagtcaggatggctccgtgcagtctggtttcttggctgagggtcatctggacgggcagccttttctgagatacgacaggcagaagagacgggcaaaacctcaggggcagtgggcagaagacgtgctgggtgctaaaacttgggacactgagactgaagatttaacggaaaacgggcaggatctgcgccgtacactcactcacattaaggatcagaaggggggacttcactccctgcaggagatccgggtgtgcgagattcacgaagatagtagcacacggggatctcggcatttttactatgatggagaactgttcctttcacagaacctggaaacccaggaaagcactgtcccgcagagctcacgagcccaaaccttagctatgaatgtgaccaatttttggaaagaggacgccatgaaaactaagacccactatcgcgcaatgcaggccgactgcctccaaaaactccaaagatatctcaagtctggggtggctatcagaaggacggtcccccctatggtcaacgtaacgtgtagtgaagtgtccgaaggaaatatcacagtgacttgccgagcaagctctttctacccacgcaatatcactctgacctggagacaggacggcgtttccctgtcacataatacccaacagtggggagatgttctgcccgatggaaacggaacatatcaaacatgggttgctacccgcatacggcagggagaggagcaaagattcacttgctacatggagcatagcggaaatcacggcacgcacccagtgcctagcgggaaggcgttagttctgcagtcacaacgcaccgatttcccctacgttagcgccgctatgccatgcttcgtgatcatcattattttatgcgtcccttgctgcaagaaaaaaacttccgcagccgagggccctgagcttgtttcactgcaggtgctggatcagcaccccgtgggaacaggtgaccatagggacgctgcccagctgggtttccagccactgatgtctgccaccggcagcacgggatccaccgaaggagcctag

SEQ ID NO: 160436 - DNA, 1152 bp, Artificial Sequence
  derived and/or modified sequence
atgggattgggcagagttctgctgtttctcgctgtggctttcccattcgctcccccagctgcagcagctgagcctcacagcctacggtataatctgatggtgctgtctcaagacggaagcgtccaaagtggttttctggctgaaggacacctcgatggccaacctttcctccggtacgaccggcagaagcggagagccaagcctcagggtcaatgggccgaggatgtcctgggcgcaaaaacttgggacactgagaccgaagacctaactgagaatggtcaggaccttagaaggacccttacacacataaaggaccagaaggggggattgcatagcctgcaagaaatcagggtctgcgagattcacgaagattccagcaccagggggtcaagacacttctactatgatggggaactgttcctgagtcagaacttggagacccaggagtccactgttccacagtctagccgggcacagaccctggctatgaatgtaaccaacttctggaaagaagacgcaatgaaaactaagacacactacagggctatgcaagccgattgcctccagaaactccagagatacctgaagagcggagttgcgattcgccgaacagtgccaccaatggtgaatgtcacttgctccgaggtgtcagaaggaaacatcacagtcacatgccgcgcaagtagcttttatcctcgcaacatcactttgacgtggcgtcaagatggtgtgtccttatcacacaatacccagcagtggggcgatgtgctgcccgacggcaacggcacctaccagacttgggtagcaactagaatacggcaaggagaggagcagcgcttcacatgttacatggagcacagcggaaaccatggcacccaccccgtgccctcaggtaaagcccttgtcctgcagtcccaaaggacagactttccttatgtttcagctgcaatgccatgttttgtgataataattattctgtgtgtcccgtgctgtaaaaaaaaaacttctgcggctgaggggccagaactggtgtctttgcaagtcctggaccaacaccctgtgggaacaggagatcatagagacgcagctcagctcggattccagccactgatgtctgctaccggttctaccggctcaactgagggagcctag

SEQ ID NO: 160437 - DNA, 1152 bp, Artificial Sequence
  derived and/or modified sequence
atgggcttaggaagggtgttgcttttcctcgcagtggcatttccttttgcccctccagcagctgccgcagagcctcatagcctcagatataacttaatggtcctgagccaggacggttccgtccagtcgggatttcttgccgaaggtcacctcgatggacaaccttttctgcgctacgatcgacagaaaaggcgcgcaaaacctcagggccagtgggctgaggatgtgttgggagcagagacttgggataccgaaacagaggacttgaccgaaaacggccaagatctacgcaggactttgacgcacatcaaggaccagaagggtgggctccacagtctccaagaaattcgcgtttgtgagatacacgaggactcgtcgacgcgaggttccaggcacttctattacaatggggagctgttcttgagccagaaccttgaaactcaggagtcaaccgtgccccaaagctctcgcgcacagaccttggcaatgaacgtgaccaatttctggaaggaggacgctatgaagacaaagacccactatcgggctatgcaggccgactgtctgcagaagttacaacgatacctgaaatctggcgtggccatacggagaacggtgccacctatggtgaatgttacatgtagcgaggtatctgaaggcaacataacagtgacatgtcgagcatctagcttctatcctagaaacattactctgacctggcgacaggatggcgtgagcctctcccataatactcagcagtggggggatgtgctcccggatggcaacggcacataccagacatgggtggccacccggattcggcagggagaagagcagaggttcacttgctacatggagcactccggcaatcatggcacccacccggtgcccagtggcaaggccctcgtcctgcagtcgcagagaacagattttccctacgtcagcgcagctatgccttgcttcgtaattataattatcctctgtgtaccctgctgtaagaaaaaaactagtgccgctgaagggcctgaactggtgtctctgcaagtgctggaccagcatcctgtggggactggcgatcaccgggacgcagcacagcttggatttcagccccttatgagcgccactggctctacagggagcactgagggagcctag

SEQ ID NO: 160438 - DNA, 1152 bp, Artificial Sequence
  derived and/or modified sequence
atgggccttggccgagttctcctttttcttgccgtggcatttcctttcgctccacctgctgcagctgccgagccgcactcccttaggtataatctgatggttttgtcacaggatggaagtgtccaaagcggattcctggcagaagggcatctggatggtcagccatttctccggtatgaccggcagaagcggagggcaaagccccagggccagtgggccgaggacgtccttggtgccaagacatgggatacggagaccgaagacttgacagagaatggacaggatttgagaagaactttgacccatatcaaagatcagaagggtgggttacacagtctgcaggaaattagagtttgcgagatccacgaggattcatctaccagggggagccggcacttctattatgacggcgagctgtttctgtcccagaacctcgagacccaagagtccacagtcccccagagcagccgagcccagaccctcgcaatgaatgtgactaacttctggaaggaggacgctatgaagactaagacacactatagagccatgcaggccgattgcctccagaagttgcagcgatacctgaagagcggtgtcgccatcaggcgaacggtgccccctatggtcaacgttacttgttcagaagtcagtgagggcaacattacagttacttgtcgcgctagttctttttatcccagaaacatcacactaacatggcgccaggacggagtgagcctgtcccacaatactcagcagtggggtgatgtactccccgatggcaacggcacataccagacttgggtggctacccgcataaggcagggcgaggagcagcggtttacctgctacatggagcatagcgggaaccatggaacccatcctgtgcctagcggcaaggccctagttctacagagccagcggactgatttcccctatgtgtctgcagcaatgccctgttttgtgatcatcattattttgtgcgtcccgtgttgcaagaagaagacttctgcggctgaggggccagaactcgtgtcattgcaggtgctcgaccagcacccagtgggcactggcgaccatagggacgcggctcaattagggttccagcctctgatgtcagcaacaggttcgactggctcaacagaaggggcatag

SEQ ID NO: 160439 - DNA, 1152 bp, Artificial Sequence
  derived and/or modified sequence
atggggttgggtagggtgctgctcttccttgctgtcgcattcccttttgcccctcccgcagcggctgcagagccgcactcacttcggtacaatctgatggttctttcacaggatggcagtgttcagagtgggtttttggcagagggtcatttagacggccaaccattcctgagatacgataggcagaaacgtagagcaaagccccagggacaatgggcagaaaacgtgctaggcgctaagacatgggacaccgaaaccgaggaccttactgagaacggccaagatctgagaagaactctgacacacatcaaggatcagaaaggcggacttcattcactgcaggaaatacgcgtgtgcgagatccacgaagactcctccactcgaggcagccgccatttctactatgatggagagcttttcctgtcccagaacctggaaacacaggaatctaccgtcccacagtcatcccgcgcacaaacactcgccatgaatgtgacaaatttttggaaagaagacgctatgaagactaagacacattatagggctatgcaggccgattgccttcagaaactgcaaaggtatttgaagagcggcgtggcgatccggaggactgtccctcctatggtcaatgtgacctgtagtgaagtatccgaaggcaacattaccgtgacatgcagagcatccagtttttaccctaggaatatcactcttacttggcgccaagacggggtaagtctttcccataacacacagcagtggggcgacgtactccccgatggcaacggaacatatcaaacatgggtggcaacacggattcgccagggcgaggaacagaggtttacatgttatatggagcacagcggcaaccacgggactcaccctgtgccgtctggtaaagcactggtgctgcagtctcaaaggaccgacttcccatacgtgagtgctgctatgccctgcttcgttattattattatcctgtgcgtgccatgttgcaaaaaaaagacaagtgccgctgaaggccctgagcttgtctccctccaggtgcttgatcagcaccccgtgggcaccggagaccacagagatgctgcccagttgggcttccagcccctgatgagtgctactggctccacaggttccacagagggcacatag

SEQ ID NO: 160440 - DNA, 1152 bp, Artificial Sequence
  derived and/or modified sequence
atgggattggggagggtgctgttattcctggcagtagccttcccattcgctccacctgccgctgccgcagagccacattctcttagatataatctgatggtgctttcccaggacgggagtgtacagtcaggttttttggcagaggggcatctagatggacagccctttctgcgttatgatcggcagaaacgcagagctaagcctcaggggcagtgggcagaggatgtgctgggggctgagacttgggacaccgaaaccgaggatttgacagagaatggacaggacctgcggaggacacttacgcatatcaaagatcaaaagggtggtctgcactcactgcaggagattagggtgtgcgaaatgcatgaggacagttccacaagggggtcaagacatttctactataacggtgagctttttctttctcaaaacctagagacacaggagtcaactgtgccccagtccagtagggcccagacgttagcaatgaatgtcaccaatttctggaaagaagacgcaatgaagaccaaaacccactaccgcgcaatgcaggccgattgcttacaaaagttgcagcgctatctaaaaagcggcgtagccataaggcggaccgttcccccaatggtgaacgtgacttgttctgaggtgagtgaaggaaatatcactgtgacctgcagagctagctccttttaccccaggaacataactttgacttggaggcaggacggagtgtccctaagtcacaacactcagcagtggggggacgtgctgcccgacgggaatggaacgtaccagacctgggttgccacgcgaatccgtcagggggaggagcagcgctttacatgctatatggagcactcaggcaaccatgggacacacccggtaccctccggcaaggcactggtgctgcagagccaaaggactgacttcccttacgtgtccgccgcaatgccctgttttgtgatcattattatcctttgcgtcccctgctgcaaaaagaagacctccgccgcagagggtccggaactggtaagtctgcaagtcttggaccagcatcccgtgggaacaggagaccaccgggacgccgcacaactgggcttccaacctctcatgagtgctaccgggtccaccggtagtactgaaggagcatag

SEQ ID NO: 160441 - DNA, 1152 bp, Artificial Sequence
  derived and/or modified sequence
atgggcctgggcagagtgctgctgttcctggccgtggccttccccttcgccccccccgccgccgccgccgagccccacagcctgagatacaacctgatggtgctgagccaggacggcagcgtgcagagcggcttcctggccgagggccacctggacggccagcccttcctgagatacgacagacagaagagaagagccaagccccagggccagtgggccgagaacgtgctgggcgccaagacctgggacaccgagaccgaggacctgaccgagaacggccaggacctgagaagaaccctgacccacatcaaggaccagaagggcggcctgcacagcctgcaggagatcagagtgtgcgagatccacgaggacagcagcaccagaggcagcagacacttctactacgacggcgagctgttcctgagccagaacctggagacccaggagagcaccgtgccccagagcagcagagcccagaccctggccatgaacgtgaccaacttctggaaggaggacgccatgaagaccaagacccactacagagccatgcaggccgactgcctgcagaagctgcagagatacctgaagagcggcgtggccatcagaagaaccgtgccccccatggtgaacgtgacctgcagcgaggtgagcgagggcaacatcaccgtgacctgcagagccagcagcttctaccccagaaacatcaccctgacctggagacaggacggcgtgagcctgagccacaacacccagcagtggggcgacgtgctgcccgacggcaacggcacctaccagacctgggtggccaccagaatcagacagggcgaggagcagagattcacctgctacatggagcacagcggcaaccacggcacccaccccgtgcccagcggcaaggccctggtgctgcagagccagagaaccgacttcccctacgtgagcgccgccatgccctgcttcgtgatcatcatcatcctgtgcgtgccctgctgcaagaagaagaccagcgccgccgagggccccgagctggtgagcctgcaggtgctggaccagcaccccgtgggcaccggcgaccacagagacgccgcccagctgggcttccagcccctgatgagcgccaccggcagcaccggcagcaccgagggcacctag

SEQ ID NO: 160442 - DNA, 1152 bp, Artificial Sequence
  derived and/or modified sequence
atgggcctgggcagagtgctgctgttcctggccgtggccttccccttcgccccccccgccgccgccgccgagccccacagcctgagatacaacctgatggtgctgagccaggacggcagcgtgcagagcggcttcctggccgagggccacctggacggccagcccttcctgagatacgacagacagaagagaagagccaagccccagggccagtgggccgaggacgtgctgggcgccaagacctgggacaccgagaccgaggacctgaccgagaacggccaggacctgagaagaaccctgacccacatcaaggaccagaagggcggcctgcacagcctgcaggagatcagagtgtgcgagatccacgaggacagcagcaccagaggcagcagacacttctactacgacggcgagctgttcctgagccagaacctggagacccaggagagcaccgtgccccagagcagcagagcccagaccctggccatgaacgtgaccaacttctggaaggaggacgccatgaagaccaagacccactacagagccatgcaggccgactgcctgcagaagctgcagagatacctgaagagcggcgtggccatcagaagaaccgtgccccccatggtgaacgtgatctgcagcgaggtgagcgagggcaacatcaccgtgacctgcagagccagcagcttctaccccagaaacatcaccctgacctggagacaggacggcgtgagcctgagccacaacacccagcagtggggcgacgtgctgcccgacggcaacggcacctaccagacctgggtggccaccagaatcagacagggcgaggagcagagattcacctgctacatggagcacagcggcaaccacggcacccaccccgtgcccagcggcaaggccctggtgctgcagagccagagaaccgacttcccctacgtgagcgccgccatgccctgcttcgtgatcatcatcatcctgtgcgtgccctgctgcaagaagaagaccagcgccgccgagggccccgagctggtgagcctgcaggtgctggaccagcaccccgtgggcaccggcgaccacagagacgccgcccagctgggcttccagcccctgatgagcgccaccggcagcaccggcagcaccgagggcacctag

SEQ ID NO: 160443 - DNA, 1083 bp, Artificial Sequence
  derived and/or modified sequence
tgaccccacagcctgagatacaacctgatggtgctgagccaggacggcagcgtgcagagcggcttcctggccgagggccacctggacggccagcccttcctgagatacgacagacagaagagaagagccaagccccagggccagtgggccgaggacgtgctgggcgccaagacctgggacaccgagaccgaggacctgaccgagaacggccaggacctgagaagaaccctgacccacatcaaggaccagaagggcggcctgcacagcctgcaggagatcagagtgtgcgagatccacgaggacagcagcaccagaggcagcagacacttctactacgacggcgagctgttcctgagccagaacctggagacccaggagagcaccgtgccccagagcagcagagcccagaccctggccatgaacgtgaccaacttctggaaggaggacgccatgaagaccaagacccactacagagccatgcaggccgactgcctgcagaagctgcagagatacctgaagagcggcgtggccatcagaagaaccgtgccccccatggtgaacgtgacctgcagcgaggtgagcgagggcaacatcaccgtgacctgcagagccagcagcttctaccccagaaacatcaccctgacctggagacaggacggcgtgagcctgagccacaacacccagcagtggggcgacgtgctgcccgacggcaacggcacctaccagacctgggtggccaccagaatcagacagggcgaggagcagagattcacctgctacatggagcacagcggcaaccacggcacccaccccgtgcccagcggcaaggccctggtgctgcagagccagagaaccgacttcccctacgtgagcgccgccatgccctgcttcgtgatcatcatcatcctgtgcgtgccctgctgcaagaagaagaccagcgccgccgagggccccgagctggtgagcctgcaggtgctggaccagcaccccgtgggcaccggcgaccacagagacgccgcccagctgggcttccagcccctgatgagcgccaccggcagcaccggcagcaccgagggcgcctag

SEQ ID NO: 160444 - DNA, 1152 bp, Artificial Sequence
  derived and/or modified sequence
atgggcctgggcagagtgctgctgttcctggccgtggccttccccttcgccccccccgccgccgccgccgagccccacagcctgagatacaacctgatggtgctgagccaggacggcagcgtgcagagcggcttcctggccgagggccacctggacggccagcccttcctgagatacgacagacagaagagaagagccaagccccagggccagtgggccgaggacgtgctgggcgccaagacctgggacaccgagaccgaggacctgaccgagaacggccaggacctgagaagaaccctgacccacatcaaggaccagaagggcggcctgcacagcctgcaggagatcagagtgtgcgagatccacgaggacagcagcaccagaggcagcagacacttctactacgacggcgagctgttcctgagccagaacctggagacccaggagagcaccgtgccccagagcagcagagcccagaccctggccatgaacgtgaccaacttctggaaggaggacgccatgaagaccaagacccactacagagccatgcaggccgactgcctgcagaagctgcagagatacctgaagagcggcgtggccatcagaagaaccgtgccccccatggtgaacgtgacctgcagcgaggtgagcgagggcaacatcaccgtgacctgcagagccagcagcttctaccccagaaacatcaccctgacctggagacaggacggcgtgagcctgagccacaacacccagcagtggggcgacgtgctgcccgacggcaacggcacctaccagacctgggtggccaccagaatcagacagggcgaggagcagagattcacctgctacatggagcacagcggcaaccacggcacccaccccgtgcccagcggcaaggccctggtgctgcagagccagagaaccgacttcccctacgtgagcgccgccatgccctgcttcgtgatcatcatcatcctgtgcgtgccctgctgcaagaagaagaccagcgccgccgagggccccgagctggtgagcctgcaggtgctggaccagcaccccgtgggcaccggcgaccacagagacgccgcccagctgggcttccagcccctgatgagcgccaccggcagcaccggcagcaccgagggcgcctag

SEQ ID NO: 160445 - DNA, 1152 bp, Artificial Sequence
  derived and/or modified sequence
atgggcctgggcagagtgctgctgttcctggccgtggccttccccttcgccccccccgccgccgccgccgagccccacagcctgagatacaacctgatggtgctgagccaggacggcagcgtgcagagcggcttcctggccgagggccacctggacggccagcccttcctgagatacgacagacagaagagaagagccaagccccagggccagtgggccgaggacgtgctgggcgccgagacctgggacaccgagaccgaggacctgaccgagaacggccaggacctgagaagaaccctgacccacatcaaggaccagaagggcggcctgcacagcctgcaggagatcagagtgtgcgagatccacgaggacagcagcaccagaggcagcagacacttctactacaacggcgagctgttcctgagccagaacctggagacccaggagagcaccgtgccccagagcagcagagcccagaccctggccatgaacgtgaccaacttctggaaggaggacgccatgaagaccaagacccactacagagccatgcaggccgactgcctgcagaagctgcagagatacctgaagagcggcgtggccatcagaagaaccgtgccccccatggtgaacgtgacctgcagcgaggtgagcgagggcaacatcaccgtgacctgcagagccagcagcttctaccccagaaacatcaccctgacctggagacaggacggcgtgagcctgagccacaacacccagcagtggggcgacgtgctgcccgacggcaacggcacctaccagacctgggtggccaccagaatcagacagggcgaggagcagagattcacctgctacatggagcacagcggcaaccacggcacccaccccgtgcccagcggcaaggccctggtgctgcagagccagagaaccgacttcccctacgtgagcgccgccatgccctgcttcgtgatcatcatcatcctgtgcgtgccctgctgcaagaagaagaccagcgccgccgagggccccgagctggtgagcctgcaggtgctggaccagcaccccgtgggcaccggcgaccacagagacgccgcccagctgggcttccagcccctgatgagcgccaccggcagcaccggcagcaccgagggcgcctag

SEQ ID NO: 160446 - DNA, 1152 bp, Artificial Sequence
  derived and/or modified sequence
atgggcctgggcagagtgctgctgttcctggccgtggccttccccttcgccccccccgccgccgccgccgagccccacagcctgagatacaacctgatggtgctgagccaggacggcagcgtgcagagcggcttcctggccgagggccacctggacggccagcccttcctgagatacgacagacagaagagaagagccaagccccagggccagtgggccgaggacgtgctgggcgccgagacctgggacaccgagaccgaggacctgaccgagaacggccaggacctgagaagaaccctgacccacatcaaggaccagaagggcggcctgcacagcctgcaggagatcagagtgtgcgagatgcacgaggacagcagcaccagaggcagcagacacttctactacaacggcgagctgttcctgagccagaacctggagacccaggagagcaccgtgccccagagcagcagagcccagaccctggccatgaacgtgaccaacttctggaaggaggacgccatgaagaccaagacccactacagagccatgcaggccgactgcctgcagaagctgcagagatacctgaagagcggcgtggccatcagaagaaccgtgccccccatggtgaacgtgacctgcagcgaggtgagcgagggcaacatcaccgtgacctgcagagccagcagcttctaccccagaaacatcaccctgacctggagacaggacggcgtgagcctgagccacaacacccagcagtggggcgacgtgctgcccgacggcaacggcacctaccagacctgggtggccaccagaatcagacagggcgaggagcagagattcacctgctacatggagcacagcggcaaccacggcacccaccccgtgcccagcggcaaggccctggtgctgcagagccagagaaccgacttcccctacgtgagcgccgccatgccctgcttcgtgatcatcatcatcctgtgcgtgccctgctgcaagaagaagaccagcgccgccgagggccccgagctggtgagcctgcaggtgctggaccagcaccccgtgggcaccggcgaccacagagacgccgcccagctgggcttccagcccctgatgagcgccaccggcagcaccggcagcaccgagggcgcctag

SEQ ID NO: 160447 - protein, 713 aa, Artificial Sequence
  derived and/or modified sequence
MLCVGRLGGLGARAAALPPRRAGRGSLEAGIRARRVSTSWSPVGAAFNVKPQGSRLDLFGERRGLFGVPELSAPEGFHIAQEKALRKTELLVDRACSTPPGPQTVLIFDELSDSLCRVADLADFVKIAHPEPAFREAAEEACRSIGTMVEKLNTNVDLYQSLQKLLADKKLVDSLDPETRRVAELFMFDFEISGIHLDKEKRKRAVDLNVKILDLSSTFLMGTNFPNKIEKHLLPEHIRRNFTSAGDHIIIDGLHAESPDDLVREAAYKIFLYPNAGQLKCLEELLSSRDLLAKLVGYSTFSHRALQGTIAKNPETVMQFLEKLSDKLSERTLKDFEMIRGMKMKLNPQNSEVMPWDPPYYSGVIRAERYNIEPSLYCPFFSLGACMEGLNILLNRLLGISLYAEQPAKGEVWSEDVRKLAVVHESEGLLGYIYCDFFQRADKPHQDCHFTIRGGRLKEDGDYQLPVVVLMLNLPRSSRSSPTLLTPSMMENLFHEMGHAMHSMLGRTRYQHVTGTRCPTDFAEVPSILMEYFANDYRVVNQFARHYQTGQPLPKNMVSRLCESKKVCAAADMQLQVFYATLDQIYHGKHPLRNSTTDILKETQEKFYGLPYVPNTAWQLRFSHLVGYGARYYSYLMSRAVASMVWKECFLQDPFNRAAGERYRREMLAHGGGREPMLMVEGMLQKCPSVDDFVSALVSDLDLDFETFLMDSE

SEQ ID NO: 160448 - DNA, 2142 bp, Artificial Sequence
  derived and/or modified sequence
atgttatgcgtgggccgccttggaggcttaggggcacgcgccgcggcattacccccgagacgggctggccggggatctctggaggccggtattcgagcccggcgggttagcacatcctggagtcctgtcggcgctgcatttaatgtgaagcctcagggcagccggctggatttatttggggagaggcgcggattattcggcgtcccagagctttcagctcccgaagggttccatatcgcacaggaaaaggcgcttagaaaaaccgagctgctcgtagaccgcgcctgctcaacccctcccggcccgcagaccgttctcatctttgatgagctctctgactcactttgcagggttgctgacttggccgatttcgtgaaaattgcacaccctgagccagcatttagagaagcagcagaagaggcttgccgttcaatagggaccatggtggaaaagttgaacacaaacgtggatctttaccagtccctacagaagctgttggcggacaagaagttggtggacagcctagaccccgaaacaaggcgcgtcgccgagttatttatgttcgacttcgagatcagcggcatccacctggataaggagaagcggaaaagagccgtggacctcaacgtgaagatactggacctttctagtacctttctaatgggcacaaactttccaaacaaaatcgagaagcacctccttccggagcacataaggcggaatttcaccagcgcgggtgaccatattatcatcgacggcttacacgccgaaagtcccgacgatctggtgcgtgaagccgcatataagatctttctttatcctaacgctgggcagttgaaatgtctcgaggaactgttgtcctcccgtgacctgctcgctaaactagtcggctattctactttcagccaccgcgcattacagggcacaattgctaagaatcctgagacagtgatgcaatttctggagaagctgtcagacaagttgtcagaacgcaccctcaaggactttgaaatgataaggggcatgaaaatgaagctcaacccccagaattctgaagtcatgccctgggaccctccctattactctggcgtgatcagagcagagcggtacaacatcgagccaagcctgtactgtcctttcttcagcctgggtgcatgtatggaggggctaaatattttactaaaccggctcctgggcatcagcctgtatgctgagcagcctgctaagggcgaggtttggagcgaggacgtgcgcaaactagccgtggtacacgaatctgaggggttgctcggctacatttattgcgacttttttcagcgcgccgataagccgcaccaggattgccattttaccatccggggtggccgactcaaggaagacggagactaccagctgccggtagtggtactgatgttgaatttgcctaggtcctcacggagctcgcccactctgttaacacctagtatgatggaaaacctgttccacgaaatgggtcatgcgatgcactccatgctcggaagaacacgctatcaacatgtgaccggcaccagatgccctacagacttcgcagaagtcccctccatcctaatggaatattttgccaatgactaccgcgtggtgaaccaattcgccaggcactatcaaaccggacaacccctgcctaagaacatggtgtcaagactctgcgagagtaaaaaggtgtgcgcagctgcagacatgcagttacaggtgttttacgctactctcgaccagatctatcacgggaagcaccccctgcgaaacagtacaaccgacatcctgaaggagacccaggagaagttttacggcctgccctacgtccccaatacagcctggcagctcagattctcacacctcgtagggtatggcgcccgatactattcctatcttatgtctcgggcagttgcttcgatggtttggaaggaatgcttcttacaagacccattcaacagggctgccggggagaggtaccgacgggagatgctggcacacgggggtgggcgagaacctatgctcatggtagaaggaatgctgcagaaatgcccatctgtggacgattttgtctctgccctcgtttctgatctggacctggactttgagacgttcctaatggactcggaatag

SEQ ID NO: 160449 - DNA, 2142 bp, Artificial Sequence
  derived and/or modified sequence
atgctgtgtgtgggccgcctgggcggcctgggcgcccgggctgctgccctgcccccccggcgggccggccggggcagcctggaggccggcatccgggcccggcgggtgtccacctcctggagccctgtgggcgccgccttcaacgtgaagccccagggcagccggctggacctgtttggagagcggcggggcctgtttggagtgcctgagctgagcgcccctgagggcttccacatcgcccaggagaaggccctgaggaagacagagctgctggtggaccgggcctgcagcaccccacctggcccccagacagtgctgatctttgatgagctgagtgacagcctgtgccgggtggccgacctggccgactttgtgaagatcgcccaccctgagcccgccttccgggaggccgctgaggaggcctgccgcagcatcggcaccatggtggagaagctgaacaccaacgtggacctgtaccagagcctgcagaagctgctggccgacaagaagctggtggacagcctggaccctgagacccggcgggtggccgagctgttcatgtttgattttgagatcagcggcatccacctggacaaggagaagaggaagagagctgtggacctgaatgtgaagatcctggacctgagcagcaccttcctgatgggcaccaacttccccaacaagattgagaagcacctgctgcctgagcacatcagaagaaacttcaccagcgctggggaccacatcatcattgatggcctgcacgccgagagcccagatgacctggtgcgggaggccgcctacaagatcttcctgtacccaaatgccggccagctgaagtgcctggaggagctgctgagcagccgggacctgctggccaagctggtgggctacagcaccttcagccaccgggccctgcagggcaccatcgccaagaaccctgagaccgtgatgcagttcctggagaagctgagtgacaagctgtctgagaggaccctgaaggactttgagatgatccggggcatgaagatgaagctgaacccccagaacagcgaggtgatgccctgggaccccccctactacagcggggtcatccgggcagagcgctacaacatcgagcccagcctgtactgccccttcttcagcctgggcgcctgcatggagggcctgaacatcctgctgaaccggctgctgggcatcagcctgtatgcagagcagcctgccaagggggaggtgtggagcgaagatgtgaggaagctggccgtggtgcatgagagcgagggcctgctgggctacatctactgtgacttcttccagagagctgacaagccccaccaggactgccacttcaccatccggggcggccgcctgaaggaggatggagactaccagctgcctgtggtggtgctgatgctgaacctgcccaggagcagccgcagcagccccaccctgctgacccccagcatgatggagaacctcttccacgagatgggccacgccatgcacagcatgctgggccgcacccgctaccagcacgtgacaggcacccgctgccccacagactttgctgaggtgcccagcatcctgatggagtactttgccaatgactacagagtggtgaaccagtttgcccggcactaccagacaggccagcccctgcccaagaacatggtgtcccggctgtgtgagagcaagaaggtgtgtgccgctgctgacatgcagctgcaggtgttctacgccaccctggaccagatctaccacggcaagcaccccctgaggaacagcaccacagacatcctgaaggagacccaggagaagttctacggcctgccctacgtgcccaacacagcctggcagctgcgcttcagccacctggtgggctacggggcccgctactacagctacctgatgagcagagctgtggcctccatggtgtggaaggagtgcttcctgcaggaccccttcaacagagctgctggggagcgctaccgccgggagatgctggcccacggcggcggccgggagcccatgctgatggtggagggcatgctgcagaagtgccccagcgtggatgactttgtgtctgccctggtgtctgacctggacctggactttgagaccttcctgatggacagcgagtag

SEQ ID NO: 160450 - DNA, 2400 bp, Artificial Sequence
  derived and/or modified sequence
cggcgtgggctgctgccttggaaacgcggagcgcgcgctcccagcgaaagcagcagggcagggatctgcgttggaggaagggactgctctggtgctagaatgctgtgcgtcggaaggctgggcggcttgggagccagagcagcagctctgccgccccgccgggcgggccggggaagcctcgaagccgggatccgggcccgaagggtcagcaccagctggtctcccgtgggcgccgccttcaatgtcaagccccagggcagccgcttggacctgttcggcgagcgccggggtctttttggagttcctgagctgagtgccccagaaggatttcatattgcacaagaaaaagccttgagaaagacagaattgcttgtggaccgtgcatgttccaccccacctgggccccagaccgtgctgatcttcgatgagctctcggattccttatgcagagtggccgacttggctgattttgtgaaaatcgctcaccctgagccagcattcagagaagctgcggaagaagcttgtagaagtattggcaccatggtagagaagttgaacacaaatgtggatttatatcaaagtttgcaaaaattactagctgataaaaaacttgtggattcccttgatccagaaacaaggcgagtggctgaactgtttatgtttgattttgaaattagtggaatccatctagacaaagaaaagcgtaaaagagcagtggacctcaatgttaaaatcttggatttgagtagtacatttcttatgggaaccaattttcccaacaagattgagaagcatctcttaccagaacacattcgtcgtaactttacatctgctggggatcatatcataattgatggtctccacgcagaatcaccagatgacttggtgcgagaagctgcttataaaatttttctttatcccaatgctggtcaattgaaatgtttagaagaattgctcagcagcagagatcttctggcaaagttggtggggtattccacgttttctcacagggctctccaaggaacgatagctaaaaatccagagactgtcatgcagttccttgaaaaactatctgacaaactttctgaaagaactctgaaagattttgagatgatacgagggatgaaaatgaaactgaatcctcaaaattccgaagtaatgccctgggaccccccttactacagtggtgtgattcgtgcagaaaggtataatattgagcccagcctatattgcccgtttttctctcttggagcatgcatggaaggcctgaatattttgcttaacagactgttggggatttcattatatgcagagcagcctgcaaaaggagaggtgtggagcgaagatgtccgaaaactggctgttgttcatgaatctgaaggattgttggggtacatttactgtgatttttttcagcgagcagacaaaccacatcaggattgccatttcactatccgtggaggcagactaaaggaagatggagactatcaactcccagttgtagttcttatgctgaatcttccccgttcctcaaggagttctccaactttgctaactcctagcatgatggaaaatcttttccatgaaatgggacatgccatgcattcaatgctaggacgtactcgttaccaacacgtcactgggaccaggtgccctactgattttgctgaggttccttctattctgatggagtactttgcaaatgattatcgagtagttaaccaatttgccagacattatcagactggacagccactgccaaaaaatatggtgtctcgtctttgtgaatctaaaaaggtttgtgctgcagctgatatgcaacttcaggtcttttatgccactctggatcaaatctaccatgggaagcatcccctgaggaattcaaccacagacattctcaaggaaacacaagagaaattctatggcctaccatatgttccaaatactgcctggcagctgcgattcagccacctcgtggggtatggtgctagatattactcttacctcatgtccagagcggtcgcctccatggtttggaaggagtgttttctacaggatcctttcaacagggctgccggggagcgctatcgcagggagatgctggcccacggtggaggcagggagcccatgctcatggttgaaggtatgcttcagaagtgtccttctgttgatgacttcgtaagtgccctcgtttccgacttggatctggacttcgaaactttcctcatggattctgaataaaagaaacactctacacctcttaaatcaaggtcatgtagataatgactttgttataaatgctacagctgtgagagcttgtttctgatttcattgttcgcttctgtaattctgaaaaactttaaactggtagaacttggaataaataatttgttttaatta

SEQ ID NO: 160451 - DNA, 2142 bp, Artificial Sequence
  derived and/or modified sequence
atgctgtgcgtgggccggctgggcggcctgggcgcccgggccgccgctctcccaccgcgaagagctgggcgcggctctctggaggctggaatcagggctagacgcgtgagcacaagctggtctccagtgggcgccgcattcaatgtgaagccccagggcagtcggctggacctgttcggagagcgccggggattgtttggagtccccgagttatcagctcccgaaggcttccatatagcacaagaaaaagcgctgcgaaaaacagagttacttgtggaccgggcctgcagcaccccccccggccctcaaactgtcctgatctttgacgaattgagtgactccctctgtcgcgtggccgaccttgccgattttgtgaaaattgctcatcctgagccggcattcagagaagccgcggaggaagcatgccggtcaatagggaccatggtcgaaaagttgaacacaaacgtcgacttgtaccagtctttgcagaaactgctcgctgacaagaagctggtggactccctggatccagagacccgcagagtcgccgaattgttcatgttcgactttgagatcagtggcatccatctggataaagaaaagcggaagcgcgcagtagacctgaatgttaagatcttggatctctcatctaccttcctgatgggcacaaatttcccaaataaaatcgaaaagcacctactcccagaacatattcggcgaaatttcacctccgccggcgatcacatcattatcgatggcctgcacgcggaaagccctgatgaccttgtacgtgaggctgcttataagattttcctgtacccaaatgccgggcaactcaagtgtcttgaggagctgttgtcttccagagatctcttggctaagttggtgggatactccacattctctcatcgggctctgcagggtactatcgctaagaaccccgagactgttatgcagttcctggaaaaactgagtgataagctgagtgagcgaactctgaaggacttcgaaatgattagaggaatgaaaatgaagctcaatccacagaattcagaagtaatgccgtgggaccccccatattactctggagttattagggctgagaggtataatatagaaccgtccctgtactgtcctttcttttcactgggggcttgcatggaaggactgaatatactgttgaaccggcttctcggcatcagtttgtacgcagagcaacctgccaaaggtgaggtgtggtctgaggatgtgcgcaagctggctgttgtacatgagtcggagggcctgctgggctacatttattgcgatttcttccagagggcagacaaaccacatcaggactgccatttcacgatccgaggcggaagacttaaggaggacggcgattaccagcttccagtggttgtcttgatgctgaacttgccccgaagtagcaggtctagcccaactctgttaactccgtccatgatggagaatcttttccatgagatgggccacgcaatgcacagcatgctcggacgtacacgttaccaacatgtgacaggaacgagatgccccacagatttcgccgaagttcccagtattcttatggaatactttgcaaacgactatcgagtggtcaaccaatttgcccgccactatcaaaccggtcagccacttcccaaaaatatggtttcgcgcctttgcgaaagcaaaaaagtgtgtgcagccgcggatatgcagctacaggttttctatgcgaccctggaccagatctaccacgggaaacatcctcttagaaacagcacgactgacatccttaaagagacacaggagaaattttacggcctgccgtacgttcccaacaccgcttggcagttgcgtttttcccatctcgtgggttatggggcacggtattactcttatttaatgtctcgggctgtggcaagcatggtctggaaagagtgttttctgcaggacccttttaacagagccgcaggggagcgctacagaagggaaatgctcgcccacggaggcggccgagaaccaatgctgatggttgaaggaatgctgcaaaaatgtccctccgtagacgattttgtgagtgctttggtgtccgatctcgacctggacttcgagacatttcttatggattctgagtag

SEQ ID NO: 160452 - DNA, 2142 bp, Artificial Sequence
  derived and/or modified sequence
atgctgtgtgtgggacgccttggagggcttggcgcaagggcagctgctctgccaccacgcagggctggccgaggcagccttgaagccggtattagggcacggagagtgtcaactagctggtccccagttggggcagccttcaacgtaaaaccgcagggatctcggcttgatctgttcggtgagcgaaggggtctattcggggttcctgagctctcggctccagaggggtttcacattgcccaggaaaaggccctccggaagaccgaactcctggtggacagagcctgttcaacacccccaggcccacagaccgttctgattttcgacgaactctcagattccttgtgtcgcgtagcagacctagctgacttcgtgaaaatcgcgcatcctgagcccgcattccgcgaggccgcagaagaggcatgccgctcgattgggaccatggtggagaaacttaataccaatgtcgatctgtatcagagtcttcaaaagctactggccgacaagaagcttgttgatagcctggatcccgaaaccagacgagtggccgagctcttcatgttcgacttcgagattagcgggatccatctggataaggaaaaaagaaagagggcagtcgatctcaacgtcaaaatcctggacctgagttccacattccttatgggaacgaattttcccaacaagatagaaaagcacctgttacccgagcatattaggaggaacttcacaagcgccggagatcatattataatagatgggctgcatgccgagagtccggacgatctcgttagggaagcggcatataaaatttttctataccctaatgctggacagctgaagtgtcttgaggagctgctgtcctcacgtgatctgctcgccaagctggtcgggtattcaaccttctctcaccgcgctctgcagggtactattgccaaaaatcccgaaaccgtcatgcagttcctggaaaagttgagtgataagctgagcgaacggaccctcaaggattttgaaatgattcgcggtatgaaaatgaaactcaacccacagaatagtgaagtcatgccgtgggatcctccttactacagcggagtcattagggcagaaagatacaatattgaaccgtccctctactgcccattctttagcctgggagcctgtatggagggtctcaacatcctgttgaacagactcttgggtatctcactatatgctgagcaaccggctaaaggtgaggtatggtctgaagacgtccgcaagctggccgttgttcatgagtccgagggactactggggtatatctactgtgatttctttcagagggccgataagccccaccaagactgccactttacaatccggggaggcagactaaaagaggacggagactaccagttgcccgtggtggtactgatgctgaatctgcctcgaagcagcaggtccagcccgacactgctgactcccagtatgatggaaaacctcttccacgagatgggacacgctatgcattcaatgttgggacgtaccaggtatcagcacgttactggaactaggtgtcctaccgacttcgcagaggtgccctccattctgatggaatacttcgctaatgattacagggttgtgaaccagtttgctagacactaccagacaggacaaccactaccaaagaacatggtctctcggttgtgcgaaagcaaaaaagtgtgtgccgctgcagatatgcagttgcaggtgttctacgctaccttggaccaaatataccacgggaaacaccccttaagaaattctacaaccgacatcttgaaggagactcaggagaagttttacgggctgccttacgttcccaatacagcgtggcagttacgctttagtcacctagtaggatatggagctcgttactacagttaccttatgtctcgagcagtggcttcaatggtttggaaggaatgtttcctacaggatccttttaaccgtgccgcaggcgagcggtaccgcagggaaatgctggctcacgggggtggtagagagcccatgttgatggtggaaggcatgctccagaagtgtccatctgtggacgattttgtgtctgctcttgtgagcgacttggatcttgatttcgagactttcctgatggatagtgaatag

SEQ ID NO: 160453 - DNA, 2142 bp, Artificial Sequence
  derived and/or modified sequence
atgctgtgcgtgggcagactgggcggcctgggcgccagagccgccgccctgccccccagaagagccggcagaggcagcctggaggccggcatcagagccagaagagtgagcaccagctggagccccgtgggcgccgccttcaacgtgaagccccagggcagcagactggacctgttcggcgagagaagaggcctgttcggcgtgcccgagctgagcgcccccgagggcttccacatcgcccaggagaaggccctgagaaagaccgagctgctggtggacagagcctgcagcaccccccccggcccccagaccgtgctgatcttcgacgagctgagcgacagcctgtgcagagtggccgacctggccgacttcgtgaagatcgcccaccccgagcccgccttcagagaggccgccgaggaggcctgcagaagcatcggcaccatggtggagaagctgaacaccaacgtggacctgtaccagagcctgcagaagctgctggccgacaagaagctggtggacagcctggaccccgagaccagaagagtggccgagctgttcatgttcgacttcgagatcagcggcatccacctggacaaggagaagagaaagagagccgtggacctgaacgtgaagatcctggacctgagcagcaccttcctgatgggcaccaacttccccaacaagatcgagaagcacctgctgcccgagcacatcagaagaaacttcaccagcgccggcgaccacatcatcatcgacggcctgcacgccgagagccccgacgacctggtgagagaggccgcctacaagatcttcctgtaccccaacgccggccagctgaagtgcctggaggagctgctgagcagcagagacctgctggccaagctggtgggctacagcaccttcagccacagagccctgcagggcaccatcgccaagaaccccgagaccgtgatgcagttcctggagaagctgagcgacaagctgagcgagagaaccctgaaggacttcgagatgatcagaggcatgaagatgaagctgaacccccagaacagcgaggtgatgccctgggaccccccctactacagcggcgtgatcagagccgagagatacaacatcgagcccagcctgtactgccccttcttcagcctgggcgcctgcatggagggcctgaacatcctgctgaacagactgctgggcatcagcctgtacgccgagcagcccgccaagggcgaggtgtggagcgaggacgtgagaaagctggccgtggtgcacgagagcgagggcctgctgggctacatctactgcgacttcttccagagagccgacaagccccaccaggactgccacttcaccatcagaggcggcagactgaaggaggacggcgactaccagctgcccgtggtggtgctgatgctgaacctgcccagaagcagcagaagcagccccaccctgctgacccccagcatgatggagaacctgttccacgagatgggccacgccatgcacagcatgctgggcagaaccagataccagcacgtgaccggcaccagatgccccaccgacttcgccgaggtgcccagcatcctgatggagtacttcgccaacgactacagagtggtgaaccagttcgccagacactaccagaccggccagcccctgcccaagaacatggtgagcagactgtgcgagagcaagaaggtgtgcgccgccgccgacatgcagctgcaggtgttctacgccaccctggaccagatctaccacggcaagcaccccctgagaaacagcaccaccgacatcctgaaggagacccaggagaagttctacggcctgccctacgtgcccaacaccgcctggcagctgagattcagccacctggtgggctacggcgccagatactacagctacctgatgagcagagccgtggccagcatggtgtggaaggagtgcttcctgcaggaccccttcaacagagccgccggcgagagatacagaagagagatgctggcccacggcggcggcagagagcccatgctgatggtggagggcatgctgcagaagtgccccagcgtggacgacttcgtgagcgccctggtgagcgacctggacctggacttcgagaccttcctgatggacagcgagtag

SEQ ID NO: 160454 - protein, 3931 aa, Artificial Sequence
  derived and/or modified sequence
MAHSCRWRFPARPGTTGGGGGGGRRGLGGAPRQRVPALLLPPGPPVGGGGPGAPPSPPAVAAAAAAAGSSGAGVPGGAAAASAASSSSASSSSSSSSSASSGPALLRVGPGFDAALQVSAAIGTNLRRFRAVFGESGGGGGSGEDEQFLGFGSDEEVRVRSPTRSPSVKTSPRKPRGRPRSGSDRNSAILSDPSVFSPLNKSETKSGDKIKKKDSKSIEKKRGRPPTFPGVKIKITHGKDISELPKGNKEDSLKKIKRTPSATFQQATKIKKLRAGKLSPLKSKFKTGKLQIGRKGVQIVRRRGRPPSTERIKTPSGLLINSELEKPQKVRKDKEGTPPLTKEDKTVVRQSPRRIKPVRIIPSSKRTDATIAKQLLQRAKKGAQKKIEKEAAQLQGRKVKTQVKNIRQFIMPVVSAISSRIIKTPRRFIEDEDYDPPIKIARLESTPNSRFSAPSCGSSEKSSAASQHSSQMSSDSSRSSSPSVDTSTDSQASEEIQVLPEERSDTPEVHPPLPISQSPENESNDRRSRRYSVSERSFGSRTTKKLSTLQSAPQQQTSSSPPPPLLTPPPPLQPASSISDHTPWLMPPTIPLASPFLPASTAPMQGKRKSILREPTFRWTSLKHSRSEPQYFSSAKYAKEGLIRKPIFDNFRPPPLTPEDVGFASGFSASGTAASARLFSPLHSGTRFDMHKRSPLLRAPRFTPSEAHSRIFESVTLPSNRTSAGTSSSGVSNRKRKRKVFSPIRSEPRSPSHSMRTRSGRLSSSELSPLTPPSSVSSSLSISVSPLATSALNPTFTFPSHSLTQSGESAEKNQRPRKQTSAPAEPFSSSSPTPLFPWFTPGSQTERGRNKDKAPEELSKDRDADKSVEKDKSRERDREREKENKRESRKEKRKKGSEIQSSSALYPVGRVSKEKVVGEDVATSSSAKKATGRKKSSSHDSGTDITSVTLGDTTAVKTKILIKKGRGNLEKTNLDLGPTAPSLEKEKTLCLSTPSSSTVKHSTSSIGSMLAQADKLPMTDKRVASLLKKAKAQLCKIEKSKSLKQTDQPKAQGQESDSSETSVRGPRIKHVCRRAAVALGRKRAVFPDDMPTLSALPWEEREKILSSMGNDDKSSIAGSEDAEPLAPPIKPIKPVTRNKAPQEPPVKKGRRSRRCGQCPGCQVPEDCGVCTNCLDKPKFGGRNIKKQCCKMRKCQNLQWMPSKAYLQKQAKAVKKKEKKSKTSEKKDSKESSVVKNVVDSSQKPTPSAREDPAPKKSSSEPPPRKPVEEKSEEGNVSAPGPESKQATTPASRKSSKQVSQPALVIPPQPPTTGPPRKEVPKTTPSEPKKKQPPPPESGPEQSKQKKVAPRPSIPVKQKPKEKEKPPPVNKQENAGTLNILSTLSNGNSSKQKIPADGVHRIRVDFKFVYCQVCCEPFHKFCLEENERPLEDQLENWCCRRCKFCHVCGRQHQATKQLLECNKCRNSYHPECLGPNYPTKPTKKKKVWICTKCVRCKSCGSTTPGKGWDAQWSHDFSLCHDCAKLFAKGNFCPLCDKCYDDDDYESKMMQCGKCDRWVHSKCENLSDEMYEILSNLPESVAYTCVNCTERHPAEWRLALEKELQISLKQVLTALLNSRTTSHLLRYRQAAKPPDLNPETEESIPSRSSPEGPDPPVLTEVSKQDDQQPLDLEGVKRKMDQGNYTSVLEFSDDIVKIIQAAINSDGGQPEIKKANSMVKSFFIRQMERVFPWFSVKKSRFWEPNKVSSNSGMLPNAVLPPSLDHNYAQWQEREENSHTEQPPLMKKIIPAPKPKGPGEPDSPTPLHPPTPPILSTDRSREDSPELNPPPGIEDNRQCALCLTYGDDSANDAGRLLYIGQNEWTHVNCALWSAEVFEDDDGSLKNVHMAVIRGKQLRCEFCQKPGATVGCCLTSCTSNYHFMCSRAKNCVFLDDKKVYCQRHRDLIKGEVVPENGFEVFRRVFVDFEGISLRRKFLNGLEPENIHMMIGSMTIDCLGILNDLSDCEDKLFPIGYQCSRVYWSTTDARKRCVYTCKIVECRPPVVEPDINSTVEHDENRTIAHSPTSFTESSSKESQNTAEIISPPSPDRPPHSQTSGSCYYHVISKVPRIRTPSYSPTQRSPGCRPLPSAGSPTPTTHEIVTVGDPLLSSGLRSIGSRRHSTSSLSPQRSKLRIMSPMRTGNTYSRNNVSSVSTTGTATDLESSAKVVDHVLGPLNSSTSLGQNTSTSSNLQRTVVTVGNKNSHLDGSSSSEMKQSSASDLVSKSSSLKGEKTKVLSSKSSEGSAHNVAYPGIPKLAPQVHNTTSRELNVSKIGSFAEPSSVSFSSKEALSFPHLHLRGQRNDRDQHTDSTQSANSSPDEDTEVKTLKLSGMSNRSSIINEHMGSSSRDRRQKGKKSCKETFKEKHSSKSFLEPGQVTTGEEGNLKPEFMDEVLTPEYMGQRPCNNVSSDKIGDKGLSMPGVPKAPPMQVEGSAKELQAPRKRTVKVTLTPLKMENESQSKNALKESSPASPLQIESTSPTEPISASENPGDGPVAQPSPNNTSCQDSQSNNYQNLPVQDRNLMLPDGPKPQEDGSFKRRYPRRSARARSNMFFGLTPLYGVRSYGEEDIPFYSSSTGKKRGKRSAEGQVDGADDLSTSDEDDLYYYNFTRTVISSGGEERLASHNLFREEEQCDLPKISQLDGVDDGTESDTSVTATTRKSSQIPKRNGKENGTENLKIDRPEDAGEKEHVTKSSVGHKNEPKMDNCHSVSRVKTQGQDSLEAQLSSLESSRRVHTSTPSDKNLLDTYNTELLKSDSDNNNSDDCGNILPSDIMDFVLKNTPSMQALGESPESSSSELLNLGEGLGLDSNREKDMGLFEVFSQQLPTTEPVDSSVSSSISAEEQFELPLELPSDLSVLTTRSPTVPSQNPSRLAVISDSGEKRVTITEKSVASSESDPALLSPGVDPTPEGHMTPDHFIQGHMDADHISSPPCGSVEQGHGNNQDLTRNSSTPGLQVPVSPTVPIQNQKYVPNSTDSPGPSQISNAAVQTTPPHLKPATEKLIVVNQNMQPLYVLQTLPNGVTQKIQLTSSVSSTPSVMETNTSVLGPMGGGLTLTTGLNPSLPTSQSLFPSASKGLLPMSHHQHLHSFPAATQSSFPPNISNPPSGLLIGVQPPPDPQLLVSESSQRTDLSTTVATPSSGLKKRPISRLQTRKNKKLAPSSTPSNIAPSDVVSNMTLINFTPSQLPNHPSLLDLGSLNTSSHRTVPNIIKRSKSSIMYFEPAPLLPQSVGGTAATAAGTSTISQDTSHLTSGSVSGLASSSSVLNVVSMQTTTTPTSSASVPGHVTLTNPRLLGTPDIGSISNLLIKASQQSLGIQDQPVALPPSSGMFPQLGTSQTPSTAAITAASSICVLPSTQTTGITAASPSGEADEHYQLQHVNQLLASKTGIHSSQRDLDSASGPQVSNFTQTVDAPNSMGLEQNKALSSAVQASPTSPGGSPSSPSSGQRSASPSVPGPTKPKPKTKRFQLPLDKGNGKKHKVSHLRTSSSEAHIPDQETTSLTSGTGTPGAEAEQQDTASVEQSSQKECGQPAGQVAVLPEVQVTQNPANEQESAEPKTVEEEESNFSSPLMLWLQQEQKRKESITEKKPKKGLVFEISSDDGFQICAESIEDAWKSLTDKVQEARSNARLKQLSFAGVNGLRMLGILHDAVVFLIEQLSGAKHCRNYKFRFHKPEEANEPPLNPHGSARAEVHLRKSAFDMFNFLASKHRQPPEYNPNDEEEEEVQLKSARRATSMDLPMPMRFRHLKKTSKEAVGVYRSPIHGRGLFCKRNIDAGEMVIEYAGNVIRSIQTDKREKYYDSKGIGCYMFRIDDSEVVDATMHGNAARFINHSCEPNCYSRVINIDGQKHIVIFAMRKIYRGEELTYDYKFPIEDASNKLPCNCGAKKCRKFLN

SEQ ID NO: 160455 - protein, 2879 aa, Artificial Sequence
  derived and/or modified sequence
HAHPECLTMEREKILSSMGNDDKSSIAGSEDAEPLAPPIKPIKPVTRNKAPQEPPVKKGRRSRRCGQCPGCQVPEDCGVCTNCLDKPKFGGRNIKKQCCKMRKCQNLQWMPSKAYLQKQAKAVKKKEKKSKTSEKKDSKESSVVKNVVDSSQKPTPSAREDPAPKKSSSEPPPRKPVEEKSEEGNVSAPGPESKQATTPASRKSSKQVSQPALVIPPQPPTTGPPRKEVPKTTPSEPKKKQPPPPESGPEQSKQKKVAPRPSIPVKQKPKEKEKPPPVNKQENAGTLNILSTLSNGNSSKQKIPADGVHRIRVDFKEDCEAENVWEMGGLGILTSVPITPRVVCFLCASSGHVEFVYCQVCCEPFHKFCLEENERPLEDQLENWCCRRCKFCHVCGRQHQATKQLLECNKCRNSYHPECLGPNYPTKPTKKKKVWICTKCVRCKSCGSTTPGKGWDAQWSHDFSLCHDCAKLFAKGNFCPLCDKCYDDDDYESKMMQCGKCDRWVHSKCENLSDEMYEILSNLPESVAYTCVNCTERHPAEWRLALEKELQISLKQVLTALLNSRTTSHLLRYRQAAKPPDLNPETEESIPSRSSPEGPDPPVLTEVSKQDDQQPLDLEGVKRKMDQGNYTSVLEFSDDIVKIIQAAINSDGGQPEIKKANSMVKSFFIRQMERVFPWFSVKKSRFWEPNKVSSNSGMLPNAVLPPSLDHNYAQWQEREENSHTEQPPLMKKIIPAPKPKGPGEPDSPTPLHPPTPPILSTDRSREDSPELNPPPGIEDNRQCALCLTYGDDSANDAGRLLYIGQNEWTHVNCALWSAEVFEDDDGSLKNVHMAVIRGKQLRCEFCQKPGATVGCCLTSCTSNYHFMCSRAKNCVFLDDKKVYCQRHRDLIKGEVVPENGFEVFRRVFVDFEGISLRRKFLNGLEPENIHMMIGSMTIDCLGILNDLSDCEDKLFPIGYQCSRVYWSTTDARKRCVYTCKIVECRPPVVEPDINSTVEHDENRTIAHSPTSFTESSSKESQNTAEIISPPSPDRPPHSQTSGSCYYHVISKVPRIRTPSYSPTQRSPGCRPLPSAGSPTPTTHEIVTVGDPLLSSGLRSIGSRRHSTSSLSPQRSKLRIMSPMRTGNTYSRNNVSSVSTTGTATDLESSAKVVDHVLGPLNSSTSLGQNTSTSSNLQRTVVTVGNKNSHLDGSSSSEMKQSSASDLVSKSSSLKGEKTKVLSSKSSEGSAHNVAYPGIPKLAPQVHNTTSRELNVSKIGSFAEPSSVSFSSKEALSFPHLHLRGQRNDRDQHTDSTQSANSSPDEDTEVKTLKLSGMSNRSSIINEHMGSSSRDRRQKGKKSCKETFKEKHSSKSFLEPGQVTTGEEGNLKPEFMDEVLTPEYMGQRPCNNVSSDKIGDKGLSMPGVPKAPPMQVEGSAKELQAPRKRTVKVTLTPLKMENESQSKNALKESSPASPLQIESTSPTEPISASENPGDGPVAQPSPNNTSCQDSQSNNYQNLPVQDRNLMLPDGPKPQEDGSFKRRYPRRSARARSNMFFGLTPLYGVRSYGEEDIPFYSSSTGKKRGKRSAEGQVDGADDLSTSDEDDLYYYNFTRTVISSGGEERLASHNLFREEEQCDLPKISQLDGVDDGTESDTSVTATTRKSSQIPKRNGKENGTENLKIDRPEDAGEKEHVTKSSVGHKNEPKMDNCHSVSRVKTQGQDSLEAQLSSLESSRRVHTSTPSDKNLLDTYNTELLKSDSDNNNSDDCGNILPSDIMDFVLKNTPSMQALGESPESSSSELLNLGEGLGLDSNREKDMGLFEVFSQQLPTTEPVDSSVSSSISAEEQFELPLELPSDLSVLTTRSPTVPSQNPSRLAVISDSGEKRVTITEKSVASSESDPALLSPGVDPTPEGHMTPDHFIQGHMDADHISSPPCGSVEQGHGNNQDLTRNSSTPGLQVPVSPTVPIQNQKYVPNSTDSPGPSQISNAAVQTTPPHLKPATEKLIVVNQNMQPLYVLQTLPNGVTQKIQLTSSVSSTPSVMETNTSVLGPMGGGLTLTTGLNPSLPTSQSLFPSASKGLLPMSHHQHLHSFPAATQSSFPPNISNPPSGLLIGVQPPPDPQLLVSESSQRTDLSTTVATPSSGLKKRPISRLQTRKNKKLAPSSTPSNIAPSDVVSNMTLINFTPSQLPNHPSLLDLGSLNTSSHRTVPNIIKRSKSSIMYFEPAPLLPQSVGGTAATAAGTSTISQDTSHLTSGSVSGLASSSSVLNVVSMQTTTTPTSSASVPGHVTLTNPRLLGTPDIGSISNLLIKASQQSLGIQDQPVALPPSSGMFPQLGTSQTPSTAAITAASSICVLPSTQTTGITAASPSGEADEHYQLQHVNQLLASKTGIHSSQRDLDSASGPQVSNFTQTVDAPNSMGLEQNKALSSAVQASPTSPGGSPSSPSSGQRSASPSVPGPTKPKPKTKRFQLPLDKGNGKKHKVSHLRTSSSEAHIPDQETTSLTSGTGTPGAEAEQQDTASVEQSSQKECGQPAGQVAVLPEVQVTQNPANEQESAEPKTVEEEESNFSSPLMLWLQQEQKRKESITEKKPKKGLVFEISSDDGFQICAESIEDAWKSLTDKVQEARSNARLKQLSFAGVNGLRMLGILHDAVVFLIEQLSGAKHCRNYKFRFHKPEEANEPPLNPHGSARAEVHLRKSAFDMFNFLASKHRQPPEYNPNDEEEEEVQLKSARRATSMDLPMPMRFRHLKKTSKEAVGVYRSPIHGRGLFCKRNIDAGEMVIEYAGNVIRSIQTDKREKYYDSKGIGCYMFRIDDSEVVDATMHGNAARFINHSCEPNCYSRVINIDGQKHIVIFAMRKIYRGEELTYDYKFPIEDASNKLPCNCGAKKCRKFLN

SEQ ID NO: 160456 - protein, 3969 aa, Artificial Sequence
  derived and/or modified sequence
MAHSCRWRFPARPGTTGGGGGGGRRGLGGAPRQRVPALLLPPGPPVGGGGPGAPPSPPAVAAAAAAAGSSGAGVPGGAAAASAASSSSASSSSSSSSSASSGPALLRVGPGFDAALQVSAAIGTNLRRFRAVFGESGGGGGSGEDEQFLGFGSDEEVRVRSPTRSPSVKTSPRKPRGRPRSGSDRNSAILSDPSVFSPLNKSETKSGDKIKKKDSKSIEKKRGRPPTFPGVKIKITHGKDISELPKGNKEDSLKKIKRTPSATFQQATKIKKLRAGKLSPLKSKFKTGKLQIGRKGVQIVRRRGRPPSTERIKTPSGLLINSELEKPQKVRKDKEGTPPLTKEDKTVVRQSPRRIKPVRIIPSSKRTDATIAKQLLQRAKKGAQKKIEKEAAQLQGRKVKTQVKNIRQFIMPVVSAISSRIIKTPRRFIEDEDYDPPIKIARLESTPNSRFSAPSCGSSEKSSAASQHSSQMSSDSSRSSSPSVDTSTDSQASEEIQVLPEERSDTPEVHPPLPISQSPENESNDRRSRRYSVSERSFGSRTTKKLSTLQSAPQQQTSSSPPPPLLTPPPPLQPASSISDHTPWLMPPTIPLASPFLPASTAPMQGKRKSILREPTFRWTSLKHSRSEPQYFSSAKYAKEGLIRKPIFDNFRPPPLTPEDVGFASGFSASGTAASARLFSPLHSGTRFDMHKRSPLLRAPRFTPSEAHSRIFESVTLPSNRTSAGTSSSGVSNRKRKRKVFSPIRSEPRSPSHSMRTRSGRLSSSELSPLTPPSSVSSSLSISVSPLATSALNPTFTFPSHSLTQSGESAEKNQRPRKQTSAPAEPFSSSSPTPLFPWFTPGSQTERGRNKDKAPEELSKDRDADKSVEKDKSRERDREREKENKRESRKEKRKKGSEIQSSSALYPVGRVSKEKVVGEDVATSSSAKKATGRKKSSSHDSGTDITSVTLGDTTAVKTKILIKKGRGNLEKTNLDLGPTAPSLEKEKTLCLSTPSSSTVKHSTSSIGSMLAQADKLPMTDKRVASLLKKAKAQLCKIEKSKSLKQTDQPKAQGQESDSSETSVRGPRIKHVCRRAAVALGRKRAVFPDDMPTLSALPWEEREKILSSMGNDDKSSIAGSEDAEPLAPPIKPIKPVTRNKAPQEPPVKKGRRSRRCGQCPGCQVPEDCGVCTNCLDKPKFGGRNIKKQCCKMRKCQNLQWMPSKAYLQKQAKAVKKKEKKSKTSEKKDSKESSVVKNVVDSSQKPTPSAREDPAPKKSSSEPPPRKPVEEKSEEGNVSAPGPESKQATTPASRKSSKQVSQPALVIPPQPPTTGPPRKEVPKTTPSEPKKKQPPPPESGPEQSKQKKVAPRPSIPVKQKPKEKEKPPPVNKQENAGTLNILSTLSNGNSSKQKIPADGVHRIRVDFKEDCEAENVWEMGGLGILTSVPITPRVVCFLCASSGHVEFVYCQVCCEPFHKFCLEENERPLEDQLENWCCRRCKFCHVCGRQHQATKQLLECNKCRNSYHPECLGPNYPTKPTKKKKVWICTKCVRCKSCGSTTPGKGWDAQWSHDFSLCHDCAKLFAKGNFCPLCDKCYDDDDYESKMMQCGKCDRWVHSKCENLSDEMYEILSNLPESVAYTCVNCTERHPAEWRLALEKELQISLKQVLTALLNSRTTSHLLRYRQAAKPPDLNPETEESIPSRSSPEGPDPPVLTEVSKQDDQQPLDLEGVKRKMDQGNYTSVLEFSDDIVKIIQAAINSDGGQPEIKKANSMVKSFFIRQMERVFPWFSVKKSRFWEPNKVSSNSGMLPNAVLPPSLDHNYAQWQEREENSHTEQPPLMKKIIPAPKPKGPGEPDSPTPLHPPTPPILSTDRSREDSPELNPPPGIEDNRQCALCLTYGDDSANDAGRLLYIGQNEWTHVNCALWSAEVFEDDDGSLKNVHMAVIRGKQLRCEFCQKPGATVGCCLTSCTSNYHFMCSRAKNCVFLDDKKVYCQRHRDLIKGEVVPENGFEVFRRVFVDFEGISLRRKFLNGLEPENIHMMIGSMTIDCLGILNDLSDCEDKLFPIGYQCSRVYWSTTDARKRCVYTCKIVECRPPVVEPDINSTVEHDENRTIAHSPTSFTESSSKESQNTAEIISPPSPDRPPHSQTSGSCYYHVISKVPRIRTPSYSPTQRSPGCRPLPSAGSPTPTTHEIVTVGDPLLSSGLRSIGSRRHSTSSLSPQRSKLRIMSPMRTGNTYSRNNVSSVSTTGTATDLESSAKVVDHVLGPLNSSTSLGQNTSTSSNLQRTVVTVGNKNSHLDGSSSSEMKQSSASDLVSKSSSLKGEKTKVLSSKSSEGSAHNVAYPGIPKLAPQVHNTTSRELNVSKIGSFAEPSSVSFSSKEALSFPHLHLRGQRNDRDQHTDSTQSANSSPDEDTEVKTLKLSGMSNRSSIINEHMGSSSRDRRQKGKKSCKETFKEKHSSKSFLEPGQVTTGEEGNLKPEFMDEVLTPEYMGQRPCNNVSSDKIGDKGLSMPGVPKAPPMQVEGSAKELQAPRKRTVKVTLTPLKMENESQSKNALKESSPASPLQIESTSPTEPISASENPGDGPVAQPSPNNTSCQDSQSNNYQNLPVQDRNLMLPDGPKPQEDGSFKRRYPRRSARARSNMFFGLTPLYGVRSYGEEDIPFYSSSTGKKRGKRSAEGQVDGADDLSTSDEDDLYYYNFTRTVISSGGEERLASHNLFREEEQCDLPKISQLDGVDDGTESDTSVTATTRKSSQIPKRNGKENGTENLKIDRPEDAGEKEHVTKSSVGHKNEPKMDNCHSVSRVKTQGQDSLEAQLSSLESSRRVHTSTPSDKNLLDTYNTELLKSDSDNNNSDDCGNILPSDIMDFVLKNTPSMQALGESPESSSSELLNLGEGLGLDSNREKDMGLFEVFSQQLPTTEPVDSSVSSSISAEEQFELPLELPSDLSVLTTRSPTVPSQNPSRLAVISDSGEKRVTITEKSVASSESDPALLSPGVDPTPEGHMTPDHFIQGHMDADHISSPPCGSVEQGHGNNQDLTRNSSTPGLQVPVSPTVPIQNQKYVPNSTDSPGPSQISNAAVQTTPPHLKPATEKLIVVNQNMQPLYVLQTLPNGVTQKIQLTSSVSSTPSVMETNTSVLGPMGGGLTLTTGLNPSLPTSQSLFPSASKGLLPMSHHQHLHSFPAATQSSFPPNISNPPSGLLIGVQPPPDPQLLVSESSQRTDLSTTVATPSSGLKKRPISRLQTRKNKKLAPSSTPSNIAPSDVVSNMTLINFTPSQLPNHPSLLDLGSLNTSSHRTVPNIIKRSKSSIMYFEPAPLLPQSVGGTAATAAGTSTISQDTSHLTSGSVSGLASSSSVLNVVSMQTTTTPTSSASVPGHVTLTNPRLLGTPDIGSISNLLIKASQQSLGIQDQPVALPPSSGMFPQLGTSQTPSTAAITAASSICVLPSTQTTGITAASPSGEADEHYQLQHVNQLLASKTGIHSSQRDLDSASGPQVSNFTQTVDAPNSMGLEQNKALSSAVQASPTSPGGSPSSPSSGQRSASPSVPGPTKPKPKTKRFQLPLDKGNGKKHKVSHLRTSSSEAHIPDQETTSLTSGTGTPGAEAEQQDTASVEQSSQKECGQPAGQVAVLPEVQVTQNPANEQESAEPKTVEEEESNFSSPLMLWLQQEQKRKESITEKKPKKGLVFEISSDDGFQICAESIEDAWKSLTDKVQEARSNARLKQLSFAGVNGLRMLGILHDAVVFLIEQLSGAKHCRNYKFRFHKPEEANEPPLNPHGSARAEVHLRKSAFDMFNFLASKHRQPPEYNPNDEEEEEVQLKSARRATSMDLPMPMRFRHLKKTSKEAVGVYRSPIHGRGLFCKRNIDAGEMVIEYAGNVIRSIQTDKREKYYDSKGIGCYMFRIDDSEVVDATMHGNAARFINHSCEPNCYSRVINIDGQKHIVIFAMRKIYRGEELTYDYKFPIEDASNKLPCNCGAKKCRKFLN

SEQ ID NO: 160457 - DNA, 396 bp, Artificial Sequence
  derived and/or modified sequence
atgggccctgctgcccggcccaggagatttgtgcccggccccccaggagatgccaccaccctggagctgtacaccaaggtgtgcctgcccaggaagcgctggaggctgcccctgggccgcctggcccggagcccccggctgcaggccccccgggtgcgggccggcagcagccacagctgcaaggaggccgccaagtatgtgttccagaccttccacggcagcaagctgagcgccagcatcaagaggtctggagtgcggggcaagagcatcctgggcatctccatgcagatgaatggacctggcttccagctgcggagcggcttcccccccctgcgggcagagctggcccccagccacgcccggcctgaggccagcggccgctgccctgggggctag

SEQ ID NO: 160458 - DNA, 396 bp, Artificial Sequence
  derived and/or modified sequence
atgggccccgccgcccggccccggcggttcgtgcccggcccccccggggatgccaccaccttggagctttatactaaagtctgcttgccacggaagagatggcggctgccactcgggcgtctggcgaggagccccaggcttcaagcccctagagtgagagccggtagctcccactcgtgcaaggaagccgccaagtatgtgtttcagacattccatggcagtaagttgtcagcttccataaaacgttccggggtcagaggtaaatctatccttgggataagtatgcagatgaatggccctgggtttcagttgcgtagcggctttccacccctgagggctgagttggcaccaagccacgccagacccgaggcctccgggcggtgtccaggcggctag

SEQ ID NO: 160459 - DNA, 396 bp, Artificial Sequence
  derived and/or modified sequence
atgggacccgctgcccgtcctcgtagatttgtgcccggaccccctggtgatgccacgacgttggagttatataccaaagtctgtctacctaggaagcgctggaggctgccactcggacggctggcgcgatctcctcgcctgcaggcccctcgcgtgcgcgctggttctagccactcgtgcaaggaagctgcgaaatacgtattccaaacctttcatgggagtaagcttagcgctagcattaagagatccggtgtgcgaggcaaatctattctggggatttcaatgcagatgaatggaccaggattccagctcagatccgggttccctcctctgagggccgagcttgcgccaagccatgcccgacctgaagcgagcggtcggtgtcctggtggctag

SEQ ID NO: 160460 - DNA, 11796 bp, Artificial Sequence
  derived and/or modified sequence
atggcacactcctgtcgttggcgctttcccgcccgccccggtactacaggcggtggggggggcggtgggcgcagagggctaggaggggcccccagacagcgcgttccagctttacttctccctccaggaccgcctgttggtggcgggggtcctggagcgcctcccagcccccccgccgttgcggcagccgcagccgccgccggtagctcaggcgcaggtgtccccggaggggccgcggccgccagcgccgcatcttcaagcagcgcaagctcttcgtcgtcctcctcgtcctctgcttctagcggacccgccttgctgcgggtgggccctggattcgacgccgccctccaggtgtcggccgccattggcacaaacttgcggcggttcagagccgtgttcggggaatctggcggcggcggaggatccggggaagacgagcagttcctggggttcggcagcgatgaagaggtaagggtgagaagcccaacaaggtctcctagcgtgaaaacaagcccacggaagccacgaggtagacccagatctgggtcagaccgcaattcggccatccttagtgacccgagtgtgttttctcctctgaataagagcgagactaaatctggcgacaaaatcaaaaaaaaggacagtaagagtatcgagaaaaaaaggggcagaccgcctacctttcctggggtgaagattaaaatcacccatgggaaggacatatcagaattacctaaaggcaataaggaagactcgctcaagaagatcaagcgcaccccgtcagctacctttcagcaagccaccaagattaagaagctgcgcgctgggaaactgtcgccgctaaagtcaaagttcaagacaggaaagcttcagattgggagaaagggcgtgcagatcgtcaggcggcggggccgccccccgtctacggagaggatcaagacccccagcggactcctgatcaacagcgaactggagaagccacagaaagtgcggaaagacaaggagggtacacctcccctcacaaaggaagataaaaccgtagtgcggcagtctcctcgtcggatcaaacccgtccgtataatcccatcgagtaaacgcacagatgctactatagccaaacagttgctccaaagagcaaaaaaaggtgcgcagaagaagatcgagaaggaggcggcacagctgcagggcaggaaagttaagacacaggtgaaaaacataagacagtttatcatgcctgtagtttcagcaatttcttcacggattatcaaaacgcctaggcggtttattgaagacgaggattatgacccacctattaagattgcacgcttggaatcaactccaaatagtcgattttcggctcccagctgcggctcctcggaaaaatctagtgccgcatcacagcatagttcccagatgtcttccgattcaagcagatccagttcaccctcggtggacacatcaaccgattctcaggcaagcgaagagatccaggtgttgcccgaagagcggtcggacacacctgaggtgcatccccctctgccaatatcccagtcccctgaaaatgagtctaatgacaggaggtccaggaggtatagtgtgagtgaacgcagcttcggatcacggactacaaagaagttgtccacattgcagtcggccccacagcagcagacctcgtcttcccctccccctcccttactaacccctcctcccccacttcagccagcgagtagtataagtgaccacactccctggctgatgccgccaacaatcccactcgccagcccatttcttcccgcttccaccgcccccatgcagggtaaaaggaagtccattctacgtgagccaacgttcagatggacaagtctgaaacattctcggtccgagcctcagtacttttcttccgctaagtatgcaaaagagggactcatccgaaaacccatttttgacaatttcagaccaccacctctgaccccggaggacgtggggtttgcctctggcttcagcgctagtggcacggcagctagcgcacgcctcttctctcccctccatagcggtacaaggttcgacatgcacaagaggtctccgctccttcgggccccacggtttactcctagtgaagcccatagtagaatctttgagtcagtcaccttgcccagtaatagaacatctgcaggcacgtcgtcaagtggggtatccaacagaaagagaaagcgaaaagtctttagccctattcgctccgaaccgaggagcccttcacacagtatgcgaacccgctccggacgcctttctagtagcgaactgagccctctgacaccccccagctccgtcagttcgagcctttcaatatcggtttcccccctagctacctcagcattaaaccctacattcacctttccatcccactcactcactcagagtggggagtccgccgagaaaaaccaacgccctcggaagcaaacctctgctccggctgagcccttcagtagctcctctcccacaccgctattcccctggtttacgcctgggtcccagaccgaaaggggccgaaacaaggataaagcacctgaagagctcagcaaagatcgtgacgcagataagagcgtagaaaaagataaaagccgggagcgcgatagggagcgggagaaggagaacaagagagaaagtcgtaaggagaaacgcaaaaagggaagcgagattcagtcttcaagtgccttgtatcctgtgggccgcgtgtccaaagaaaaggtcgtgggcgaggacgtcgcgaccagttcctctgctaaaaaggcaacgggtcgcaaaaagagcagcagccatgactccgggactgatatcacttcagttacattgggagatacaacagccgtcaaaacaaaaattttaattaagaagggtcggggtaacctagagaagactaatctggatctgggtccaactgctccgagtctggaaaaggagaaaacactttgcctgtctacaccatcttcatccacagttaaacatagcacctcaagcattggctcaatgctcgcacaggcggataaacttcctatgaccgataaaagagtcgcctctctgctgaaaaaagccaaagcccagctttgtaaaattgagaagtcaaaatccctgaagcagaccgaccagcccaaggcacaagggcaggaatcagacagtagtgaaacgtcagtgcggggtccccggattaaacatgtttgcaggagagctgcggtggccctggggcgcaaacgtgccgtgttcccagatgacatgccaactctatccgcattaccctgggaagagcgagagaaaattctgtcaagcatggggaatgacgataagagctcgatcgcaggtagcgaagacgccgagccccttgcgcctccgatcaagcccatcaagccagttacaagaaacaaagccccgcaggagcctcccgttaagaaggggaggcgttcccggcgctgcggccaatgtcccgggtgtcaggttccggaggactgcggtgtctgcaccaactgtttagataaacctaaatttggtggtcggaatatcaaaaaacagtgctgcaagatgcggaaatgccagaacctgcagtggatgcctagcaaagcatacctacaaaagcaggcaaaggctgtcaagaagaaagaaaagaagagcaagactagcgaaaagaaggattcaaaagagtcaagcgtcgtaaagaacgtggtggacagctcacagaagcctacacccagcgctcgcgaggatccggcgcctaagaagtcaagctctgagccaccgccaaggaagcctgtagaagaaaaaagcgaggagggcaacgtaagcgccccaggccctgaatctaagcaggctaccacgcctgcatcccgcaagtcaagcaaacaggtaagccagccggccttagtgattccaccgcagccccccactacaggtccacccaggaaggaggttcccaaaactactccatctgagccaaaaaagaagcaaccaccccccccagagtccggcccggaacagtcgaagcagaagaaggtggctcctcggccatccattccggtgaagcagaaacctaaggagaaagaaaagccgcccccagtgaacaaacaggaaaatgccgggacactaaatatcctgtcaacactgtcgaacgggaactcctccaaacaaaaaattcctgccgacggggtgcacaggattagggtggacttcaaattcgtttactgccaggtgtgctgtgagccttttcacaagttctgcctggaggaaaatgaaagacccctggaggaccagctggaaaactggtgctgcaggagatgcaagttttgtcatgtatgtggaaggcagcatcaggccaccaagcagttgctggaatgtaataagtgcagaaattcttaccatccagagtgcctcggtcccaattatccgacaaaacccacaaagaaaaaaaaggtgtggatctgcacaaaatgtgtgcgctgcaaatcctgcggttcaaccacacccggaaagggttgggacgcgcaatggtcgcacgacttctcactgtgccatgattgcgcgaagctgttcgcaaaagggaacttctgcccgttatgtgacaaatgctatgatgatgatgattatgaatccaaaatgatgcaatgcggaaagtgtgaccggtgggtgcactctaagtgcgagaatctgagtgatgaaatgtacgagatcttgtcgaacctgccagaaagcgttgcgtacacctgcgtgaactgtacagagaggcatccagccgagtggcggcttgcgctcgagaaggagctccaaatctctctcaaacaggtgctgaccgccctactgaattcacgcaccacgtctcatctcttacgctaccgccaggccgccaagccgcctgatctgaacccagagaccgaggaaagcataccatcgcgctccagcccagaagggcccgaccctccggttttgacagaggtgtccaaacaggacgaccaacagccccttgaccttgagggagtgaaacggaaaatggaccagggcaactacacgagtgtgctggagttctcagatgatattgttaaaattattcaggccgcaattaatagcgatgggggacagccagaaattaagaaagccaacagtatggtaaagtctttttttatcaggcagatggagagagtgttcccttggttttccgttaagaaatccaggttctgggagccaaataaggtgagcagcaactcaggcatgctgccaaatgctgtcctcccccctagtctggaccataactatgcacagtggcaggaacgggaggaaaactcccacaccgagcagccccctctgatgaagaaaattatccctgcacccaaacctaaggggcccggcgaacccgacagccccacccccttgcaccccccaacaccgccgatcctgagcaccgaccgatctcgcgaggatagtccggaactgaacccaccacctgggattgaggataatcgccaatgcgccctctgcctgacctacggcgacgattcagccaatgacgccgggcggttactctatattggtcagaacgaatggactcatgtaaactgtgcgctgtggagcgccgaagtgtttgaagacgatgatgggtcactgaaaaatgtgcacatggcagttattcgcggcaagcagttgcgttgtgagttctgccagaaacctggggccaccgtgggatgctgtctgaccagctgtacctctaactaccacttcatgtgtagtcgcgcaaagaattgtgtgttccttgatgataagaaggtgtattgccagagacatcgggacctgatcaagggggaggtggtgcctgagaatgggtttgaggtgttccggcgtgtcttcgttgattttgagggcattagtctgaggcggaaattcctgaatggactggaaccggagaatatccacatgatgatcggatctatgaccattgactgcctggggattctcaatgacctgagcgactgcgaagataaactgttccctattggctatcagtgcagccgggtgtactggtctactactgacgcccgcaaacgttgcgtatacacttgtaagatagtggaatgtaggccccccgttgtggagccagacattaatagcacagttgaacatgacgaaaaccgcaccattgctcatagtcccacatcctttacagaatcttcctcgaaggagtctcaaaatactgcagagatcatctccccaccttctcctgatcgccctccacattcccagacatccgggtcctgttactatcatgtgatctccaaagtgcccagaatcaggacgccttcttatagccctacccagcgtagccctggctgcagacctctgccgtctgcaggatcgccaactcccacaacgcacgagatagtgacagtcggcgaccctcttctctccagcgggctgcgctctattggatctcgaaggcattctacctcatctctctcacctcagagatccaaactgaggataatgtccccaatgaggaccggtaatacctactcccgtaacaacgtgagcagcgtgtcgaccacaggcactgccaccgacctggaatcaagcgccaaagttgtagaccacgtcctcgggcctctgaacagtagtacatccctaggtcaaaatacttccacttcttccaacttgcagcgcacagtggttacagtgggtaataagaactcccacctggacggctcctcatctagtgagatgaaacagtcaagcgccagtgatttggtaagcaaaagctcaagtcttaaaggagagaaaactaaggtcctgagctcaaaatcctccgaagggtctgcccacaacgtggcgtatcccggtatacccaagcttgccccacaagtgcacaataccacgtcccgtgaactcaacgtttcaaagattggctcttttgccgaaccctcctccgtgtccttttcgtccaaggaagctttatctttcccacacctccatctgcggggccagaggaatgacagggaccagcacactgacagtacacagtccgccaatagctcaccagatgaagatacagaggtgaagactttaaaactgagtggaatgtctaaccggtcatctatcattaacgaacacatgggctcctcatcgagggacaggcgccagaaggggaagaaatcctgtaaagaaacatttaaagagaaacacagctccaagtccttcctggaacccgggcaggttaccacaggcgaagaaggcaacctcaagcctgagtttatggatgaagtcctcacgcccgagtatatgggtcagcgaccttgtaataatgtaagcagcgataagatcggagataagggcctctccatgcctggagttcccaaggccccgccaatgcaagtcgaaggatccgccaaagagttgcaggccccaagaaagcggaccgttaaagtgaccctcactcctctcaagatggaaaatgagtcccaatcgaaaaacgcattaaaggaaagctcgcccgccagccccctgcagattgagtcgacctcacccaccgagcctatcagcgcatctgagaaccccggtgacggcccagtggcccagccctcccccaacaatactagctgccaggatagccagtcgaataattaccagaaccttcccgtgcaggaccgcaatcttatgctccccgacgggcctaagccgcaggaggatggcagttttaaacggcggtacccaaggagaagtgcccgcgccaggagtaatatgttcttcggtcttacccctttgtatggagtgcgctcttacggcgaagaggacattcccttttactctagctcgacaggtaagaagcgcggcaagaggtctgctgaagggcaggtggacggtgccgatgatttgagcaccagcgacgaggatgatctttactattataattttaccaggacggtgattagctctgggggggaggaaaggctggcctcccacaatttgttccgggaggaggaacaatgcgatctgcccaagataagccaactggacggggtggatgatggcacggagagcgacacttctgtcacagcaaccacccgtaaaagcagtcaaatccctaagcgtaacggcaaagagaacgggaccgaaaacttgaagattgatagacctgaggacgcaggagagaaggagcacgtcaccaagtcttctgtcggtcacaaaaacgagcctaagatggataattgtcactccgtgtctagggtgaagacacagggccaggactctctcgaagcgcagttgtcctcacttgagtccagccggagagtgcacacatcgaccccctcggataagaacctgcttgacacttataacacagagctgcttaaatctgattcagacaacaataatagcgacgattgtggcaacatactccccagcgacattatggactttgtgctgaagaacactcctagtatgcaggcactgggcgagagccctgaatcatccagctcggagctcctgaacctgggcgaaggtctggggttggattctaaccgcgagaaggacatgggtcttttcgaggtgttcagccaacagctgccaactacagagcccgtggattcttccgtgagcagctctatctctgcagaggagcaatttgagctacctttggaactcccaagcgatctgtccgttcttaccactcggtctcctacagtgccgagccagaatccgagcaggctggccgtaattagtgattctggggaaaagagagtcaccataaccgagaaatcagtggcttcgtctgaaagcgaccccgcccttttgagccccggtgtcgatccaactcccgagggccatatgactccagatcactttatacagggacatatggacgccgatcatatctccagccctccctgtggcagcgtcgagcagggtcacgggaacaaccaagatctgaccaggaactcatccacgccaggcctgcaagttcccgtgagcccaaccgtacccatacaaaaccaaaagtacgtacctaatagtacagatagtccagggccctctcagatctcaaacgctgccgtgcagaccactccaccacaccttaagccagccacagaaaagctgattgtggtgaatcagaacatgcagcccctgtatgtgctccagactcttccaaacggagtgactcagaaaattcagctcacctcgtcggtctcctctacaccttccgtgatggagacaaatacatccgtgcttggacccatgggaggcgggttaactttgacaaccggcctcaacccaagcctgcccacttcacagagcctgtttccaagcgcatccaaaggactccttccaatgtcccatcaccaacacttgcatagctttcctgccgcgacgcaaagctcttttccacccaacattagtaaccccccttctggtttgctgattggagtgcagcccccacctgacccccaactgctagtcagcgagtcctcccagcggaccgaccttagcactaccgtggcaactccctcaagtgggttgaagaaaaggcctatttcacgtctgcagacgagaaagaacaagaaactcgccccttcatcaacgcccagcaacatcgcccctagcgacgtcgtatccaatatgacactaataaattttaccccaagccagttgccgaaccacccctctttgctcgacctaggaagcctcaatactagctctcaccgcaccgttcccaatattattaagcgatcgaaatcttctatcatgtattttgagccagcacccttgctcccacagtcagtagggggtaccgctgccacagctgcaggaacgagcaccatctctcaagatacgtcgcatcttacgagcggaagcgtctccgggctcgcatctagctcgtccgtgttgaacgtggtctcgatgcagaccaccactacacctacgtcaagcgcctcggtccctggccatgtcaccctgacgaaccctcgcctactcggaaccccagacattgggtccatctcaaacctactgatcaaagcgagccagcagagcctgggaattcaggatcagccagtggccctgccaccatcttctggtatgtttcctcagctcggaacctctcaaactccttcgacagccgccatcaccgctgcatccagcatatgcgtgctgccctctacccagactactggaattacagccgcctccccatctggcgaggctgacgagcattatcaactgcagcacgtcaatcagttgctggcgagcaaaacaggtatccacagcagtcagagagacctcgactccgccagcggtccacaggtgtcaaacttcactcagaccgtggacgcaccgaattcaatggggctggagcaaaacaaggccttgtctagtgccgtgcaggcgtccccaacctctcccggaggctccccaagcagcccctcatccggacaacgctctgcatcaccctcagtgcctgggccaaccaagccaaaaccaaagaccaaacgttttcaactgccacttgacaaaggtaacgggaaaaagcataaggtgtcccacttgagaactagttcctccgaagcgcacattccggaccaggaaacaactagcctaacaagtggaaccgggacccccggggcagaggccgagcagcaagacactgcttcagttgagcaaagctcccagaaggagtgcggtcagcctgccgggcaggttgccgtcctacccgaagtgcaggtgacccagaatccagcgaacgagcaggagtcagccgaaccaaagactgtggaagaggaggaatctaatttctcatccccacttatgctatggctccaacaggagcagaaaagaaaggagtccatcacagaaaaaaagccaaagaaagggctagtctttgagatctcaagtgatgacgggtttcagatctgcgccgagagcatagaggatgcctggaagagtctgaccgacaaagttcaggaagctcggagcaatgcaaggctcaaacaactgagctttgctggcgttaatgggctgcgaatgctggggatcctgcacgatgcagtcgtttttctcattgaacagctgtctggcgcaaagcactgccgcaactataagttccgattccacaagccagaagaggcaaatgaacctcctttgaatcctcacgggagcgcgcgcgccgaggtgcacttacgcaaatctgcgttcgacatgtttaattttttggcttcaaagcaccggcagccacccgagtataatcccaatgatgaagaagaagaggaagtccagctgaagagtgccaggagagctacttccatggatctgcctatgcccatgcggttccgccacctgaagaagaccagcaaggaagccgttggagtttaccgatcgccaatccatgggagaggcttgttttgcaaacgtaacatagacgccggagagatggttatagagtacgcaggcaatgtcatccgctccatccaaactgacaagcgcgagaagtactatgatagcaaggggataggttgctatatgttccgaattgacgattctgaggttgtcgacgctactatgcatgggaacgctgcaagattcatcaaccattcttgcgagcccaattgctatagtagggtcatcaacatcgatgggcagaagcatatagttattttcgctatgcgcaagatatacagaggggaggagttaacctacgactacaaatttccaatagaggatgcttctaacaagctgccatgcaattgtggcgctaagaagtgtcgtaaatttttgaattag

SEQ ID NO: 160461 - DNA, 8640 bp, Artificial Sequence
  derived and/or modified sequence
cacgcccatcccgagtgtttaacaatggaacgggagaagatactgtcctcaatggggaacgacgataagtctagcatcgctggatccgaagatgcggagcccttagcgccacccattaaacctatcaagcccgtgactcggaacaaagcccctcaagaaccacccgtcaagaaagggagaagatcacggaggtgcggccagtgccctgggtgccaggtccccgaagactgcggcgtgtgtacaaactgtctagacaaaccaaagtttggcggccgaaacattaagaaacaatgctgcaaaatgcgcaagtgtcagaacctacagtggatgccaagcaaggcttacctacaaaagcaagccaaggcggtgaaaaaaaaggaaaaaaaatctaagacttccgagaaaaaagacagcaaagagagctccgtggtcaagaacgtcgtggattcctctcagaaaccgacaccctcagcgagagaggatcccgcccccaagaagtcatcttcagaaccgccacccagaaagcctgtggaggaaaagagtgaggaaggaaatgtgagcgcgcctggaccagaatctaaacaggctactacccctgcgtcaagaaagagttccaagcaggttagtcagcccgcactggtgatacctcctcaaccacccacaacggggcccccaagaaaggaggtgcccaaaactacaccatccgaacccaaaaaaaagcagccacctcccccggagtcaggtccagagcaaagtaaacagaagaaggttgccccaagacctagcattcccgtgaagcaaaagccaaaagagaaggaaaaaccccctccagttaacaaacaagagaacgcagggaccctgaatatcctctccaccctgtctaacgggaattcatcaaagcagaaaatccccgctgacggagtacaccgcatccgagtggactttaaggaggactgcgaggcagagaacgtgtgggagatggggggactcgggattctgactagcgttcccattacacctcgtgtggtctgcttcctgtgtgcgagctccggacacgtcgaattcgtgtactgtcaagtttgttgtgaaccattccataagttttgtcttgaggagaacgagcgtcccctagaagatcagttggagaactggtgctgtagaagatgtaagttttgtcacgtttgtggccgccaacatcaggcaacaaagcagttgctcgagtgcaacaagtgccgtaatagttaccacccggagtgcctcgggccgaactaccccacaaagcccactaagaagaaaaaagtgtggatatgcacaaagtgcgtccgctgtaagagctgtggcagcacaactcccgggaagggctgggatgcccagtggagccacgacttctctctttgtcatgattgtgcaaaactgtttgcaaagggcaacttctgcccgctctgcgataagtgctatgacgatgacgattacgaaagtaagatgatgcagtgcggcaagtgcgaccggtgggtgcattctaagtgcgaaaacctatctgacgagatgtatgagatcctgtcaaacttgcctgagtccgtggcttatacatgtgtaaattgtaccgagaggcaccctgcggaatggcggctggcactggaaaaggaactccaaatctccctgaagcaagtcctgactgccctgctcaattctcggactacatcccatctgttgcgatataggcaagccgccaagccccctgatctcaatccagaaaccgaagagtccatcccgtctagaagctcccctgagggccccgatccacccgtgctgactgaagtctccaaacaggacgatcaacagcccctggatttagagggggtcaaacgcaagatggatcaggggaactacacctccgtgctcgaattcagcgatgacatcgtgaagattatacaggccgcaatcaacagcgatggaggccaacctgaaataaaaaaagccaattccatggtgaagtccttctttatacgtcagatggagcgcgttttcccttggtttagcgtgaagaagagcagattctgggagccaaataaggtaagtagcaactccggaatgcttccgaacgccgttctgcctccttccttagaccataattacgcccagtggcaggagcgggaggaaaactctcacacagagcagcccccactgatgaaaaaaattatacccgccccgaaacccaagggacctggggaacctgacagccctacccccctccacccaccaacccctcccattttgtcaactgatcggtcacgagaggattcacccgagctgaatcctccacccgggatagaagacaatcggcaatgtgctctttgcttgacatacggtgacgactctgccaacgatgctggtcggttgctttacatcggccaaaatgaatggacccatgtgaactgtgcgctgtggagcgcagaggtgttcgaggatgacgacggctctcttaagaatgtccacatggcagtgatcaggggcaagcaactgcgttgtgagttctgccagaaaccaggggccactgtcggctgttgtctgacttcatgcacatcaaattaccattttatgtgcagtcgggcaaagaattgtgtgttcttggatgataaaaaggtgtattgccagcggcaccgcgacctcatcaagggtgaggttgttccagagaacggtttcgaggtgttcaggcgagtatttgtggacttcgaagggattagcctgcgtcgcaaattcctgaacggtcttgagccagagaatatccatatgatgattggctccatgaccatcgattgtctgggaatacttaacgacctcagcgattgtgaagataaactgtttcccattggctaccaatgtagccgagtttattggtccacaacagatgctcggaagaggtgcgtgtatacttgcaagattgtcgagtgtaggccccctgtcgtcgagcccgacataaatagcacggttgagcacgatgagaatagaacaattgcccactctcctaccagctttaccgaatcctcttctaaagagagccagaataccgcagaaataattagccccccatcccccgatcggccgccacacagccaaacctcagggtcttgctactatcatgtgataagcaaagtcccgcgaattagaacaccctcctattcacccacccagagatcacctgggtgccgacccctgccttccgcagggagcccaaccccgacaactcatgaaatcgtgactgttggcgatccccttctgtcttctggtctgcgaagtatcggatcaagaagacattcaacgtctagtctgagtccacagagaagcaaactccgtatcatgtcaccaatgaggaccgggaatacctacagcaggaacaacgtgtcaagcgtttcaacaacaggcaccgccactgaccttgaatcttcggcgaaggtggttgaccatgtactcggacctctcaatagtagcactagtttgggacagaacaccagcaccagctccaatctgcagcgaactgtggtaaccgtcgggaataaaaattcccatctggacggatcttcctcaagtgaaatgaagcagtcgtccgccagcgacctcgtgagtaagtcaagctcactaaagggggaaaaaaccaaagtcctttcatctaaaagcagcgaagggtctgctcataacgttgcataccctgggatacctaagcttgctccccaagtccacaatactacatctcgcgagttaaatgtgtcgaagattggctctttcgcggaacccagttctgtttcatttagttcgaaggaggctctcagcttcccacatcttcatctcaggggtcagcggaatgatcgggatcagcacacggattccactcagagcgctaactcatctccggacgaagacacagaagtaaagacactgaaactttccggtatgagcaacaggtcatcaattattaacgagcatatgggcagttccagccgagatcgacgacagaaaggaaagaagtcctgcaaagagacttttaaggaaaaacacagctctaagtcgttcctggagcccggacaggtcaccacaggcgaagaggggaaccttaagcctgagtttatggacgaagtgctaactcctgagtacatgggccagaggccatgcaataatgtgtcctctgataagattggcgacaaaggactgagcatgcccggcgtcccaaaagctcctcctatgcaggtagaagggtcagctaaagagctgcaggctcccagaaagcgcacagtgaaggtcactctgactcccctgaaaatggaaaacgagtcacagagcaagaatgctctgaaggagtctagtcctgcctctccattgcaaattgagtcaaccagtcccacggaacctatctcggcttctgagaatccaggagatggccccgttgctcagccaagtcccaataatacctcatgccaggactcccaaagcaataactaccaaaacctgcccgtgcaggatcgaaaccttatgctgcccgatggcccaaaaccacaggaggatggttcctttaagcgcagatacccccggcgaagcgcccgggcgcgttctaatatgtttttcggcttgacccctctttacggagtccgatcatacggagaagaggatatcccgttttattcctccagtacggggaaaaagcggggcaaaagatcagctgagggtcaggtcgatggcgctgacgacttatcaacgtcagacgaagacgacctgtactattataacttcacacgcacggtgatcagctctggcggagaggaaagactggcctctcataatctgtttcgagaagaagagcagtgcgatttgcccaagatatctcagctcgatggggtcgacgacggcacagagtccgacacatccgtgactgccactacacggaagtcctcacagatccccaaacgaaacggtaaggagaacggcacagaaaatcttaagatcgacaggcccgaagatgcaggcgagaaggaacatgtcacaaagtctagtgtggggcacaagaacgaaccgaaaatggacaactgtcattctgtgagccgagttaaaactcagggacaggattctctggaggcccaactcagttcattggagagtagcaggcgggtacatactagcacccccagtgataaaaacttattggacacctataatacagagctgctcaagagtgactctgataacaacaacagcgatgattgtggaaacatcctgccttccgatatcatggattttgtgctcaagaacacccctagtatgcaagcactcggggagtcccctgaatctagcagttccgaactgctgaaccttggcgagggccttggtctggacagcaatagagaaaaagacatgggtctttttgaggtctttagtcagcagctccctaccaccgagcctgtggacagttccgtgtcaagcagcatttcagcggaggaacagtttgagctgcctctggagctgccttccgacctttcagtgctcactaccagatcacctaccgtcccatcacagaacccatcacgccttgccgtgatctcagattcaggcgagaaaagagtgactatcactgagaaatcagttgccagttctgaatctgaccccgccttgctcagtccaggcgttgaccccactccagaagggcacatgactcctgatcacttcatccagggacacatggacgccgatcatatctcatcgccaccttgcggaagcgtcgagcagggtcacggaaacaaccaagacctgactagaaacagttctaccccaggactgcaggtcccagtttctccaacagtgcctattcagaaccagaagtacgtccccaactctacagactcacccgggccaagccagatatccaatgcggcagttcagaccacccccccacacctaaaaccagccaccgagaagcttatcgtcgttaatcaaaacatgcagcccctatatgtcttgcagactctgccaaacggcgtcacacagaagatccagcttacttcatctgtgtccagcacgcccagcgtgatggagacgaatacatccgtgctcggtcccatggggggcggactgaccttgacaacggggctgaacccatccctgcctacatctcagtctctgtttccctctgcctccaagggactcttacctatgtcacaccaccaacatctgcactcattcccagcagcgactcagtcttctttccctcctaatatatctaacccaccatctgggctgcttatcggggtacagcctcctccagatccccaactgctggtgtctgagagttctcagaggacagatctttcaactacggtcgctactccttcttccggtctgaagaaacgacctatcagtcgcctccagaccaggaaaaacaagaagcttgcaccttcctcaacaccaagcaatattgccccatcggatgtcgtgtccaacatgacactgatcaactttaccccttcccagcttcctaaccacccctcactgctggatctgggctccctgaatactagttcccatcgtacagtgcccaacattattaaacgatctaaatcctctataatgtattttgaaccagctcctctgttacctcagagcgtaggaggaaccgctgccacggcagccggtacatctacaattagccaggacactagccatttgacctctggctccgttagcgggctggcatcatctagtagtgttttgaatgtggtgagcatgcaaaccacgaccacaccaacatcctctgcttccgtgcctggacatgtgacccttacgaacccccgactcctaggaacacccgacattggatccatttctaacttgctcatcaaagcatcccagcagtccctgggcattcaggaccaacctgttgctctgcccccatctagtgggatgtttccacagttagggacatctcaaactccttctactgcggctattacagcggcctcgtctatctgtgtcctgccaagcacccaaacaactggaattacagcagccagcccctccggggaagccgatgaacactaccagctccagcatgtcaatcagctgctcgcctcaaagacaggcattcacagctcacagagagacctcgacagtgctagtgggcctcaagtatccaattttactcagacagttgatgccccgaacagcatggggctcgaacagaacaaggcactaagctcggccgtgcaggcaagtcctacatcacccggggggtccccgtcgtctccctcttctggccagcggagcgccagtccgagtgtgcccgggccaaccaaacctaaaccaaaaaccaagaggtttcagttgcctctggacaagggtaatgggaaaaagcacaaggtgtcacaccttaggacctccagcagtgaagctcatattccagatcaggaaaccactagccttacctctgggacaggcactccaggggccgaagccgaacaacaggacactgctagtgtcgaacagagcagtcagaaggaatgtggacagcctgctggccaggtcgcggtactacccgaagtccaggtgacccagaatcctgccaatgaacaggagtccgccgagccaaagacagttgaggaagaggagagcaatttctcctcccctttaatgttgtggctccaacaagagcagaaacgtaaggaaagtatcaccgagaagaaacctaagaaagggctggttttcgagatcagctccgatgacggcttccagatttgtgctgagagcatcgaagatgcatggaagtccctgactgataaagttcaggaagcacgatctaacgctaggttgaagcagttgtctttcgcgggtgtgaacggattacggatgctcggcatcctacatgatgcagtagtgttcttgatcgaacagctgtccggagccaaacactgtcgcaattataagtttcggtttcacaaaccggaagaagccaatgaacctcctctgaatccacatggcagtgcaagggctgaggtccatctgcgtaagtcagccttcgatatgtttaactttctggcctctaaacatagacaaccgccagagtacaatcctaacgatgaggaagaggaggaagtgcaactgaagtctgcaaggagggccaccagtatggaccttcctatgcccatgcgcttcaggcacctgaagaaaacctctaaagaggcagtgggggtgtatagatcccccattcacggtcgtgggctgttctgtaaaagaaatattgatgcaggcgaaatggtcatagagtacgctggaaatgtcatccgcagcatacaaacggacaagcgagagaaatattatgattctaaggggatcggatgttacatgttccgcatcgacgattctgaagtcgtcgatgccaccatgcatgggaatgcggctaggttcataaatcatagctgtgagccaaactgttatagcagagtgatcaatattgatggccagaagcatatagtcattttcgcaatgcggaagatctatcgcggggaagaattaacctacgactataaattcccgatcgaggatgctagcaacaaacttccttgcaattgcggggcaaagaagtgtaggaagttcctaaattag

SEQ ID NO: 160462 - DNA, 11910 bp, Artificial Sequence
  derived and/or modified sequence
atggctcattcatgtaggtggcggtttcccgctcgccccggcaccactggcggcggaggcggcggagggcggcgagggctgggcggtgcacctcgacagagggtgccagccttactgctacctccaggaccccccgtgggaggtggcgggcctggagcccctccatcccctcccgccgtggccgctgccgcagccgctgctggatcctccggggcaggcgtgcccgggggcgcggctgcagcctccgcagcatcttcaagttctgcaagctcctcttcttcctcgtccagctctgccagctcaggccctgctttactcagggttggtccaggctttgacgcggctcttcaggtaagcgctgccattgggaccaacctgcggagatttcgtgcagtgttcggggaatctgggggcgggggcgggtctggtgaggatgagcagttccttgggttcggatcagatgaggaagttcgcgtcaggtccccaactagatccccaagcgtaaaaactagtccccgaaaacctcgcggccggccacggtccggttccgacaggaattctgcgatcctgagcgacccctcagtcttcagccccctgaataagagcgaaacaaaaagcggtgataagataaaaaagaaagatagcaagtccatagagaaaaaacgcgggagaccgcccacattccctggagtgaagattaaaatcacgcatggaaaagacatttccgaactacctaaagggaacaaggaagactccctcaaaaagattaagaggacgccaagcgccacctttcagcaggctacaaagatcaagaagctgcgcgccggcaaactgtctcctctgaagtctaaattcaagaccggcaagctacagatcggtagaaaaggggtgcaaatcgtccgcaggcgtggccgcccaccctcaacagaacgcatcaagacccccagcgggctgctgatcaattcagagctcgagaagccacaaaaggtgagaaaggataaggaagggactccccccctgactaaagaggacaaaaccgtcgtgcgtcagagccctaggcgtatcaagcccgtacgcataatcccctcttcaaaaagaacagatgcaactatagctaagcaattgttgcaacgagctaagaagggcgctcagaagaagatcgagaaagaagccgcccagttgcagggcagaaaggttaagacccaggtaaaaaacatacggcagttcatcatgccagtggtgtctgctataagcagcagaattataaagactccacgacgcttcatcgaggacgaagactatgacccaccaatcaagatcgcccgactggagtctaccccaaattctaggttctctgcaccttcatgtggaagttctgaaaaatcatctgctgcctcgcagcactccagccagatgagcagcgacagctctcgctcttccagcccatccgtagataccagcaccgacagccaggcctctgaggagatacaggtcctccctgaggaacgatctgacactcccgaagtgcacccccccttgcctatcagccagagtcccgaaaatgagtcaaatgatcgccgaagtagaaggtattcggtgagcgagcgctcatttgggagtcgaaccaccaagaagttatctaccttgcagtcggcaccacagcagcagacgagcagctcacctccccctcctctcctcacgcctcctcccccgctccaacctgcttctagcatttcggaccatacgccttggctaatgccgcccactattcctcttgctagtcccttcttgccagcctccactgctccgatgcaaggaaaaagaaagagcatcctgcgcgagcccactttcaggtggacaagtctgaagcatagtcggtctgaaccccagtacttttctagtgccaaatacgcaaaagagggcctcattagaaagcctatctttgataatttccgacccccacccctgacgcctgaggacgtgggatttgcatccggattctcagcgtctggcaccgccgcaagcgcgcgcttgttctcccctctgcactcagggacccgttttgatatgcataaaagatcccccctgctgagagctccccgctttaccccttccgaggctcacagcagaatcttcgagtctgtgaccctgccctctaataggacctcagcaggcacatcgtctagcggggtcagtaataggaaacggaaaagaaaagtcttttcccctatcaggtctgaacccaggagtcccagccattcaatgcggactaggtctgggaggctttcttccagcgagttgagccctctgacccctccatcttctgtgtcaagcagcctctccattagtgtcagccccttggccacttccgctctgaaccccacatttacctttccatcccactctctgacccagagtggagaatctgcagagaagaaccagcgccctcgaaagcagacttctgcccccgcagagcccttctccagtagtagtccaaccccgctgttcccttggttcacacccgggtcgcaaaccgagaggggccgcaataaagataaggccccagaggagctaagtaaggatagagacgcagataaatctgtagagaaggataaatcacgtgaaagagatcgtgaacgagagaaggagaataagcgcgaaagtaggaaggagaagcgcaagaaaggttctgagatccagtcgtcatctgccctttaccccgtgggcagggtgtccaaggaaaaggtcgtgggagaagatgtcgccaccagctcttccgcaaagaaagccacaggccgcaaaaagtcctcatcccacgactctgggactgatataacatcagtgacattgggagacacaaccgccgtgaagacgaagatcctgatcaaaaagggaagaggcaacctggaaaaaactaacctggatttaggccctaccgctcccagcttagagaaggaaaaaactctttgcttgtcaacacctagttcttcaacagtgaagcattctacttcatcaattggctcaatgcttgcacaggcggataaacttcccatgacagataaacgggtcgccagtctcctcaagaaagccaaggcccagctctgtaagatagagaaatccaaatccctgaaacagaccgaccagcctaaagctcagggacaggaaagtgactctagtgaaacctccgtgagaggtcctaggatcaagcatgtatgccgaagagccgccgtagccctgggccggaaacgggccgtattcccagacgacatgcctactctttcggccctgccatgggaggagcgtgagaaaattctttcatcaatgggtaacgacgacaaaagttcaatcgcggggtcggaagatgctgagccattagcccctcctattaagcccattaaacctgttacccggaataaggcgcctcaagagcctccagtgaaaaaggggcgcaggagcaggcgttgtgggcagtgccctgggtgccaggttcctgaggattgtggggtttgcaccaactgtctcgataaaccaaagtttggcggtaggaatattaagaaacaatgttgtaaaatgcgaaaatgtcagaatttgcagtggatgccctcaaaagcttatcttcagaagcaggcaaaggctgtgaagaagaaagagaagaaatctaagacatctgagaagaaggactctaaggaaagctcagtggtcaagaatgtggttgactcatctcaaaagcccaccccttccgctcgcgaagatcctgctccaaaaaagtctagtagcgagcctcctccccgaaaacccgtagaagagaagtccgaggaagggaacgtgagtgcacccggaccagagagcaagcaagcaacaactccggccagccgcaaatcctccaagcaagtatcccaacctgccttggtgattccaccccagccacctactacgggcccacctcgcaaagaggttcccaagaccacaccctcagagcccaagaagaagcaaccaccacccccagagtctggacccgagcagtccaaacagaagaaggtagccccgagaccatccatacccgtgaaacagaagcctaaggagaaagagaaaccccctccagtgaacaagcaagaaaacgctggcactctgaacattttgtcaacactgagcaatggtaatagtagcaagcaaaagatcccggccgatggcgtccaccggatccgtgtggactttaaggaggactgcgaggctgagaatgtgtgggaaatgggaggtctcggaatcttgacttcggtcccaatcacgcctcgggttgtttgcttcctgtgtgcctcatccggacacgtggagttcgtgtactgtcaagtgtgttgtgagccgttccacaagttttgtttagaggagaatgaacggcccctcgaggaccagttggaaaactggtgctgtcggagatgcaaattctgccacgtctgtggtcggcagcatcaggccaccaagcagctcctggagtgcaacaagtgcaggaactcgtaccaccctgaatgtttaggacccaattacccaaccaagcctacaaagaaaaagaaggtgtggatctgtaccaaatgcgtccggtgcaagagttgtggatccactactccaggaaaaggttgggatgcacagtggagccacgacttcagtttgtgtcatgattgcgctaagttatttgccaagggcaacttctgccccttatgtgacaagtgctacgacgatgatgattacgaaagcaagatgatgcagtgcggcaaatgcgacagatgggtgcattccaaatgtgaaaatctgagtgatgagatgtacgagatcctgtctaacctgccagagagcgtggcttatacctgtgtcaactgtaccgaaagacacccagccgaatggcgactcgcgctggaaaaggagttgcagatatcactgaaacaggtgctgactgccttacttaattctcgaactactagccatttgctgaggtacagacaagctgctaaacctcccgacctgaaccctgagaccgaggaaagcatcccttcccgctcctcccccgaaggccccgacccccccgtgttaacggaggtaagcaagcaggatgatcagcagccgcttgatttagaaggcgtgaagcgtaagatggatcagggcaattacacctctgttctggaattctcagatgatatcgtcaagatcattcaggcagctattaacagtgacggcgggcagcccgagatcaagaaggctaacagtatggttaaaagcttcttcatccggcagatggaaagagtgtttccctggttttcagttaagaagagccggttttgggagcccaacaaggtttctagcaattcaggaatgctccccaatgcagtcctccctcctagtctcgaccataattatgctcagtggcaggagcgggaagaaaacagtcataccgaacagccgcctttgatgaaaaaaattatcccggccccgaaacccaaaggccctggcgaacctgacagccccactcccctacaccctcctacaccaccaatcctgtctaccgataggagccgggaggattcaccagaattaaatcctccgcccggtatcgaagataatagacagtgcgcgttgtgcctcacttatggggacgattctgccaatgacgcgggccgactcctttacatcggacaaaatgaatggacacacgtgaattgcgccctttggtctgctgaggtgttcgaggatgacgacggaagcctgaaaaatgttcatatggccgtcatccggggcaaacaactgcgctgcgaattttgccaaaagccaggcgccaccgtcggttgctgcctaacaagctgcactagtaattaccactttatgtgctcccgagctaagaattgcgtttttctggatgacaagaaagtttattgccagaggcatagggatctcatcaagggagaagtggtgcccgagaacggattcgaggtgttccggagggttttcgtggattttgaaggcattagcttacgcagaaagtttctgaatggccttgagcctgagaatatacatatgatgataggctctatgacgattgactgtctaggtatcttgaacgacctaagtgattgtgaagacaaattgttcccgattggatatcagtgctcgcgggtgtactggtcaacaaccgacgccaggaaacgctgcgtatatacgtgcaaaatagtcgaatgcaggcctcccgtggtggagcctgacatcaacagcaccgtggagcacgacgagaacagaacaatcgcccatagccccacgagctttacggagagtagctcaaaggagtctcagaatacagccgaaattatcagccccccttcgccagacagacctcctcactctcagacctcggggtcgtgctactaccacgtgatcagcaaggtcccaagaatccgtactccatcctactccccaacacagaggtctccagggtgccggccccttccttccgccgggtcgcccactcccacaacccatgagattgtgaccgtcggggaccctttactgtcctccggtctccgttctatagggagccgcagacacagcacgagctccctgtcccctcagcgcagtaagctgagaataatgagtcctatgcggaccggaaacacttactctcggaataacgtgagctccgtatcaacaaccggcaccgcaacagatctcgagtcctccgccaaggtcgtggaccacgttctcggcccactgaatagttcaacaagtttgggacaaaacacgtctacttcttcgaatcttcagcggactgtcgtcacagtcgggaacaagaactcgcaccttgatggaagctcaagttctgagatgaagcagtcatccgcttctgacttggtgagcaagtcctctagtctgaagggagagaaaacaaaggtgctcagctccaaaagctctgaaggatcagctcacaacgtggcctacccagggattccaaaacttgctccacaagtccacaatacaacatcgcgggaactgaatgtgagcaagatcggtagttttgccgagcccagctcagtgtcattcagcagcaaagaggcactctcattcccacacctccacctgagaggccaacgaaacgaccgcgaccagcatactgattccacccagtctgccaactcctccccagacgaagacaccgaggtcaagactcttaagctaagtggcatgagtaatagaagtagcatcattaatgagcatatgggcagctcttccagggacaggcgccaaaagggaaagaaatcgtgtaaagagaccttcaaagagaagcactcatccaaatcattcttggagccaggtcaggtcacaactggggaagagggcaatcttaagcctgagtttatggatgaggttctgacgccagagtacatgggccaaagaccttgcaataacgtcagtagtgacaagatcggtgacaaagggctctctatgccgggcgtccccaaggcaccacccatgcaggtggaaggctctgcgaaggagctgcaggctcctcgcaaaaggaccgtgaaagtcacgcttacacctcttaaaatggaaaacgagtctcaatcaaagaacgctctgaaggagagcagccccgcttctcctttacagattgaaagtacctcaccaaccgaaccgatatccgcatctgaaaatcctggtgacggccctgttgcgcaacctagccccaacaacacttcgtgtcaggactctcaatcaaataactaccaaaatttaccggtgcaggatcgaaacctgatgctccctgacggccctaagcctcaggaggacggcagcttcaagcggcgctacccccgccggtcagcccgtgcaaggtcaaacatgttcttcggtctaacgccgctttatggggtgcggtcttacggcgaagaggacatccccttctactcgtcatcaaccggcaagaagagggggaagaggagcgccgaaggccaggtggatggggcagatgatctgagcacttccgacgaagacgacctttactattacaattttacgcgcacagtaatctcttccggaggggaggagcgcctcgcatctcacaacctgttccgagaagaggagcaatgtgatctccctaagatctctcagctggatggagtggacgatggtacagagtcagataccagtgttacagccaccacaaggaaaagctctcaaatacccaaacggaacggtaaggaaaacggaacagaaaatctgaagatcgatcgacctgaggatgccggcgagaaggaacacgtgacaaaatctagtgttggacacaagaatgaacccaaaatggacaactgtcattctgtcagtagggtcaaaacgcaaggacaggattcattggaggcgcagcttagctccctggagtctagcaggagggtacacacatccacaccttctgacaaaaatttactagatacatacaacactgagctgctaaaatccgacagtgataataacaattcagacgactgcggtaacattctgccgtcagatatcatggactttgttctgaagaacactccttctatgcaggccctcggggaatcgccggaatcatcttcctccgaactgctgaacctcggagaaggcctcggacttgactccaatcgcgaaaaggacatgggtctcttcgaagttttctcccaacaactccccaccactgagccagtggattcaagtgtgagctcaagtattagcgccgaggaacagttcgagctgcctttggagctgcccagtgatctgagcgtgctgactacgcgttctcctacagtgccttcccaaaaccccagccgcctggcggtcatatcagactctggcgagaaacgagtgaccatcactgagaagtcagtggcgagttccgagagtgatcctgcgttactgtctcccggggttgacccgacccctgaaggccacatgaccccagaccacttcattcaggggcacatggatgccgatcacatctcatcccccccttgtgggtccgtcgaacagggacatggcaataaccaggacctgactagaaactccagcacacccgggctgcaggtaccagtgtcccctacagtgcctatccagaaccaaaagtacgtaccgaatagtacagattcccccggcccatcccagatctccaacgccgctgtacagaccacgccaccccacttaaagccagccacagagaagctgatcgtcgttaatcagaacatgcagcctctttacgtacttcagacgctccccaatggcgttactcagaaaattcaactgacttctagtgtatctagtacaccttcagtgatggagaccaatacaagcgtgctcggccccatgggaggcggtctaacgctgaccacaggattgaatccttctctcccaactagccagagtctgttccccagcgcatcaaaagggttactacctatgagccaccaccagcacctacattctttccctgctgccactcagtcctcatttccccccaacatttctaacccaccaagcggcctgcttatcggcgtgcagccgcctcccgatccacagctactggtgtccgagagctctcagcggacggatctgagcactacagtagcaacacctagtagcgggctcaaaaagcggccgatttcaaggctccagacccggaaaaataagaaactggccccgagctccactccgtccaacatcgccccttcagacgtcgtttcaaacatgactttgataaatttcaccccatctcagctgcctaatcatccaagccttctggatctggggagtctgaacacctcttcccatcgtacggtgccgaatatcataaagaggtccaaatcctctattatgtactttgaacccgcacccctgctgccccagagtgtaggtgggaccgcagcgaccgctgccggcacatctactatcagccaggatactagtcatttaactagcggtagtgtgtctggtcttgcttcttcatcatcggtgctcaacgttgtctccatgcaaaccactaccacgcccacttcatctgcttcggtgcccggtcacgtgacactgaccaatccgaggttgctgggaacccctgacatcggtagcattagcaatctcctcataaaagctagtcaacaaagcctcggaatccaggaccagccagtggccctacctccaagtagcggcatgtttcctcagcttggtacgtcacaaacacccagcacagcggcaatcactgccgcttcttccatttgtgtgcttccttccacgcagactaccggcataaccgcggccagtccctcaggtgaagccgatgaacattaccagttacagcacgtcaaccagctgcttgcctctaagacaggaatccactccagccagagagaccttgacagtgcctctggcccacaggtcagtaattttacacagactgtcgacgcgcctaactctatgggcctggagcagaataaagccctgtcttctgccgtacaagcaagccctacaagcccagggggctcaccctcatctcccagttccggtcagaggtctgcaagtccttctgtgcccggaccaacaaagccaaaacctaaaacaaaaagatttcagcttcccttagataagggaaacggaaaaaagcataaggtctctcacctccggacatcgtcatccgaagcccatatccctgatcaggagaccaccagtctaacctccggaaccggtacacccggcgctgaagccgagcagcaagatacggccagcgtagaacagtcatcgcagaaggagtgtggccagccagcgggccaggttgctgtactgccagaagtgcaagtgacccagaaccctgccaacgaacaggaaagtgcagagcccaaaacggtggaagaagaagagtccaacttttcttcccccttgatgctctggctgcagcaggaacagaagcgcaaggaaagtattactgagaagaagcctaaaaaaggcctggtgttcgaaatttcctccgacgacggattccagatttgcgcggagtccatcgaagacgcctggaagtctctcactgacaaagtgcaggaagctcggagtaacgctcggctgaaacaactgtccttcgccggcgtgaacggccttaggatgctgggtatcctgcatgacgcagtggttttcctcattgagcagttatcgggcgctaaacactgtcgcaattacaagttccggttccataaacccgaagaggcgaacgagccacccctgaatcctcacgggtctgcccgagctgaagttcatctgagaaagagcgcctttgatatgttcaatttccttgcttcaaaacaccgccagcccccagaatacaatcccaacgacgaggaagaggaggaggtgcagttgaagagtgctcgcagggccacgagcatggatctgcccatgcctatgcgctttaggcacctgaagaagacctcaaaagaagccgtaggagtatatagatctcccatacacgggcgcggtctgttttgcaaaagaaatatcgacgctggggaaatggttatcgagtatgccggcaacgtcatccgttccatccagaccgataagagagaaaagtattatgattccaaaggaatcggatgctatatgtttaggatcgacgattccgaagttgtggacgccacgatgcacggcaatgcggcccggttcattaaccattcctgtgagcctaattgttattcccgtgttattaacattgatggtcagaaacatattgtgattttcgccatgcgaaagatctacaggggcgaggagctgacctacgattataagttccctattgaggatgcgtctaataaactaccttgcaattgtggcgccaagaaatgtcgcaagttcctcaattag

SEQ ID NO: 160463 - DNA, 11796 bp, Artificial Sequence
  derived and/or modified sequence
atggcccacagctgccgctggaggtttcctgcccggcccggcaccaccggcggcggcggcggcggcggccggcggggcctgggcggggccccccggcagagggtgcctgccctgctgctgcccccaggcccccctgtgggcggcggcggccctggggccccacccagccccccagctgtggccgctgctgctgctgctgctggcagcagcggggccggcgtgcctggaggagctgctgctgccagcgctgccagcagcagcagcgccagcagcagcagcagcagcagcagcagcgccagcagcggccctgccctgctgcgggtgggccctggctttgatgctgccctgcaggtgtctgctgccatcggcaccaacctgcggcgcttccgggctgtgtttggagagagcggcggcggcggcggcagcggggaggatgagcagttcctgggctttggaagtgatgaggaggtgcgggtgcgcagccccaccaggagccccagcgtgaagaccagccccaggaagccccggggccggcccaggagcggcagtgacagaaattctgccatcctgagtgaccccagcgtcttcagccccctgaacaagtctgagaccaagagcggggacaagatcaagaagaaggacagcaagagcattgagaagaagaggggccggccccccaccttccctggggtgaagatcaagatcacccacggcaaggacatcagcgagctgcccaagggcaacaaggaggacagcctgaagaagatcaagaggaccccatctgccaccttccagcaggccaccaagatcaagaagctgcgggccggcaagctgagccccctgaagagcaagttcaagacaggcaagctgcagatcggcaggaaaggagtgcagatcgtgagaagaagaggccggccccccagcacagagcgcatcaagacccccagcggcctgctgatcaacagcgagctggagaagccccagaaggtgaggaaggacaaggagggcaccccacccctgaccaaggaggacaagacagtggtgcggcagagcccccggcgcatcaagcctgtgcgcatcatccccagcagcaagaggacagatgccaccatcgccaagcagctgctgcagagggccaagaagggggcccagaagaagattgagaaggaggccgcccagctgcagggcaggaaggtgaagacccaggtgaagaacatccggcagttcatcatgcctgtggtgtctgccatcagcagccgcatcatcaagaccccccggcgcttcattgaagatgaggactatgacccccccatcaagatcgcccggctggagagcacccccaacagccgcttcagcgcccccagctgtggcagcagcgagaagagcagcgctgccagccagcacagcagccagatgagcagtgacagcagccgcagcagcagccccagcgtggacaccagcacagacagccaggccagcgaggagatccaggtgctgcctgaggagaggagtgacaccccagaggtgcacccccccctgcccatcagccagagcccagaaaatgaaagcaatgaccggcgcagccgccgctacagcgtgtctgagaggagctttggcagcaggaccaccaagaagctgagcaccctgcagagcgccccccagcagcagaccagcagcagccccccaccacccctgctgaccccacctccacccctgcagcctgccagcagcatcagtgaccacaccccctggctgatgccacccaccatccccctggccagccccttcctgcctgccagcacagcccccatgcagggcaagaggaagagcatcctgcgggagcccaccttccgctggaccagcctgaagcacagccgctctgagccccagtacttcagcagcgccaagtatgccaaggagggcctcatcaggaagcccatctttgacaacttccggcccccacccctgaccccagaagatgtgggctttgccagcggcttcagcgccagcggcacagctgccagcgcccggctcttcagccccctgcacagcggcaccaggtttgacatgcacaagaggagccccctgctgcgggccccccgcttcaccccatctgaggcccacagccgcatctttgagagcgtgaccctgcccagcaacagaacatctgctggcaccagcagcagtggagtgagcaacaggaagaggaagaggaaggtgttcagccccatccgctctgagcccaggagccccagccacagcatgaggaccaggagcggccgcctgagcagcagcgagctgagccccctgaccccacccagctctgtgagcagcagcctgagcatctctgtgagccccctggccaccagcgccctgaaccccaccttcaccttccccagccacagcctgacccagagcggggagagcgctgagaagaaccagaggcccaggaagcagaccagcgccccagctgagcccttcagcagcagcagccccacccccctcttcccctggttcaccccaggcagccagacagagcggggcaggaacaaggacaaggcccctgaggagctgagcaaggacagagatgctgacaagtctgtggagaaggacaagagccgggagcgggaccgggagcgggagaaggagaacaagcgggagagcaggaaggagaagaggaagaagggcagcgagatccagagcagcagcgccctgtaccctgtgggccgggtgtccaaggagaaggtggtgggagaagatgtggccaccagcagcagcgccaagaaggccactggaaggaagaagagcagcagccatgattctggaacagacatcacctctgtgaccctgggggacaccacagctgtgaagaccaagatcctgatcaagaagggccggggcaacctggagaagaccaacctggacctgggccccacagcccccagcctggagaaggagaagaccctgtgcctgagcacccccagcagcagcacagtgaagcacagcaccagcagcatcggctccatgctggcccaggccgacaagctgcccatgacagacaagagggtggccagcctgctgaagaaggccaaggcccagctgtgcaagattgagaagagcaagagcctgaagcagacagaccagcccaaggcccagggccaggagagtgacagcagcgagacctctgtgcggggcccccgcatcaagcacgtgtgcagaagagctgctgtggccctgggcaggaagagagctgtgtttcctgatgacatgcccaccctgagcgccctgccctgggaggagcgggagaagatcctgagctccatgggaaatgatgacaagagcagcattgctggctctgaagatgctgagcccctggccccacccatcaagcccatcaagcctgtgaccaggaacaaggccccccaggagccccctgtgaagaagggccgccgcagcagaagatgtggccagtgccccggctgccaggtgcctgaggactgtggggtgtgcaccaactgcctggacaagcccaagtttggaggcaggaacatcaagaagcagtgctgcaagatgaggaagtgccagaacctgcagtggatgcccagcaaggcctacctgcagaagcaggccaaggctgtgaagaagaaggagaagaagagcaagaccagcgagaagaaggacagcaaggagagctctgtggtgaagaatgtggtggacagcagccagaagcccaccccatctgcccgggaggaccctgcccccaagaagagcagcagcgagcccccacccaggaagcctgtggaggagaagtctgaggagggcaatgtgtctgcccctggccctgagagcaagcaggccaccaccccagccagcaggaagagcagcaagcaggtgtcccagcctgccctggtgatccccccccagccccccaccaccggcccccccaggaaggaggtgcccaagaccaccccatctgagcccaagaagaagcagcccccacctcctgagagcggccctgagcagagcaagcagaagaaggtggccccccggcccagcatccctgtgaagcagaagcccaaggagaaggagaagcccccacctgtgaacaagcaggagaatgccggcaccctgaacatcctgagcaccctgagcaatggaaacagcagcaagcagaagatcccagcagatggagtgcaccgcatccgggtggacttcaagtttgtgtactgccaggtgtgctgtgagcccttccacaagttctgcctggaggagaatgaaagacccctggaggaccagctggagaactggtgctgccgccgctgcaagttctgccacgtgtgtggccggcagcaccaggccaccaagcagctgctggagtgcaacaagtgcaggaacagctaccaccctgagtgcctgggccccaactaccccaccaagcccaccaagaagaagaaggtgtggatctgcaccaagtgtgtgcgctgcaagagctgtggcagcaccaccccaggcaagggctgggatgcccagtggagccatgacttcagcctgtgccacgactgtgccaagctgtttgccaagggcaacttctgccccctgtgtgacaagtgctatgatgatgatgattatgagagcaagatgatgcagtgtgggaaatgtgaccgctgggtgcacagcaaatgtgagaacctgagtgatgagatgtatgagatcctgagcaacctgcctgagagcgtggcctacacctgtgtgaactgcacagagcggcaccctgctgagtggaggctggccctggagaaggagctgcagatcagcctgaagcaggtgctgacagccctgctgaacagcaggaccaccagccacctgctgcgctaccggcaggccgccaagcccccagacctgaaccctgagacagaggagagcatccccagccgcagcagccctgagggccctgacccccctgtgctgacagaggtgtccaagcaggatgaccagcagcccctggacctggagggcgtgaagaggaagatggaccagggcaactacacctctgtgctggagttcagtgatgacatcgtgaagatcatccaggccgccatcaacagtgatggcggccagcctgagatcaagaaggccaacagcatggtgaagagcttcttcatccggcagatggagagggtcttcccctggttctctgtgaagaagagccgcttctgggagcccaacaaggtgagcagcaacagcggcatgctgcccaatgctgtgctgccccccagcctggaccacaactatgcccagtggcaggagcgggaggagaacagccacacagagcagccccccctgatgaagaagatcatcccagcccccaagcccaagggccctggagagccagacagccccacccccctgcacccccccaccccacccatcctgagcacagacaggagccgggaggacagccctgagctgaaccccccacctggcatcgaggacaaccggcagtgtgccctgtgcctgacctatggagatgattctgccaatgatgctggccgcctgctgtacatcggccagaatgagtggacccacgtgaactgtgccctgtggagcgctgaggtgtttgaagatgatgatggcagcctgaagaatgtgcacatggccgtcatccggggcaagcagctgcgctgtgagttctgccagaagccaggggccaccgtgggctgctgcctgaccagctgcaccagcaactaccacttcatgtgcagccgggccaagaactgtgtgttcctggatgacaagaaggtgtactgccagaggcaccgggacctgatcaagggggaggtggtgcctgaaaatggatttgaggtgttcagaagagtgtttgtggactttgagggcatcagcctgcggaggaagttcctgaatggcctggagcctgagaacatccacatgatgattggctccatgaccatcgactgcctgggcatcctgaatgacctgagtgactgtgaggacaagctgttccccatcggctaccagtgcagccgggtgtactggagcaccacagatgccaggaagagatgtgtgtacacctgcaagatcgtggagtgccggccccctgtggtggagccagacatcaacagcacagtggagcatgatgaaaatagaaccatcgcccacagccccaccagcttcacagagagcagcagcaaggagagccagaacacagctgagatcatcagcccccccagcccagacaggcctccccacagccagaccagcggcagctgctactaccacgtgatcagcaaggtgccccgcatccgcacccccagctacagccccacccagaggagccctggctgccggcccctgcccagcgctggcagccccacccccaccacccatgaaattgtgacagtgggggaccccctgctgagcagcggcctgcggagcatcggcagcagaagacacagcaccagcagcctgagcccccagaggagcaagctgcgcatcatgagccccatgaggactggaaacacctacagcagaaataatgtgtcctctgtgtccaccaccggcacagccacagacctggagagcagcgccaaggtggtggaccacgtgctgggccccctgaacagcagcaccagcctgggccagaacaccagcaccagcagcaacctgcagaggacagtggtgacagtgggcaacaagaacagccacctggatggcagcagcagcagcgagatgaagcagagcagcgccagtgacctggtgtccaagagcagcagcctgaagggggagaagaccaaggtgctgagcagcaagagcagcgagggcagcgcccacaacgtggcctacccaggcatccccaagctggccccccaggtgcacaacaccaccagccgggagctgaatgtgtccaagattggcagctttgctgagcccagctctgtgtccttcagcagcaaggaggccctgtccttcccccacctgcacctgcggggccagagaaatgaccgggaccagcacacagacagcacccagagcgccaacagcagcccagatgaggacacagaggtgaagaccctgaagctgagcggcatgagcaacagaagcagcatcatcaatgagcacatgggcagcagcagccgggaccggcggcagaagggcaagaagagctgcaaggagaccttcaaggagaagcacagcagcaagagcttcctggagcccggccaggtgaccaccggggaggagggcaacctgaagccagagttcatggatgaggtgctgaccccagagtacatgggccagaggccctgcaacaacgtgtccagtgacaagattggagacaagggcctgtccatgcctggggtgcccaaggccccacccatgcaggtggagggcagcgccaaggagctgcaggcccccaggaagaggacagtgaaggtgaccctgacccccctgaagatggagaatgaaagccagagcaagaatgccctgaaggagagcagccctgccagccccctgcagatcgagagcaccagccccacagagcccatcagcgcctctgaaaatcctggagatggccctgtggcccagcccagccccaacaacaccagctgccaggacagccagagcaacaactaccagaacctgcctgtgcaggacaggaacctgatgctgcctgatggccccaagccccaggaggatggcagcttcaagaggcgctacccccggcgcagcgcccgggcccggagcaacatgttcttcggcctgacccccctgtatggagtgcgctcctatggagaggaggacatccccttctacagcagcagcacaggcaagaagaggggcaagaggtctgctgagggccaggtggatggagcagatgacctgagcaccagtgatgaagatgacctgtactactacaacttcaccaggacagtcatcagcagtggaggagaggagcggctggccagccacaacctcttccgggaggaggagcagtgtgacctgcccaagatcagccagctggatggagtggatgatggaacagaaagtgacacctctgtgacagccaccaccaggaagagcagccagatccccaagagaaatggcaaggaaaatggaacagagaacctgaagattgacagaccagaagatgctggggagaaggagcacgtgaccaagagctctgtgggccacaagaatgagcccaagatggacaactgccacagcgtgtcccgggtgaagacccagggccaggacagcctggaggcccagctgagcagcctggagagcagccggcgggtgcacaccagcacccccagcgacaagaacctgctggacacctacaacacagagctgctgaagagtgacagcgacaacaacaacagtgatgactgtggcaacatcctgcccagcgacatcatggactttgtgctgaagaacacccccagcatgcaggccctgggggagagccctgagagcagcagcagcgagctgctgaacctgggggagggcctgggcctggacagcaaccgggagaaggacatgggcctgtttgaggtgttcagccagcagctgcccaccacagagcctgtggacagctctgtgagcagcagcatctctgctgaggagcagtttgagctgcccctggagctgcccagcgacctgtctgtgctgaccaccaggagccccaccgtgcccagccagaaccccagccggctggccgtcatcagtgacagcggggagaagagggtgaccatcacagagaagtctgtggccagcagcgagagtgaccctgccctgctgagccctggggtggaccccaccccagagggccacatgaccccagaccacttcatccagggccacatggatgctgaccacatcagcagccccccctgtggctctgtggagcagggccacggcaacaaccaggacctgaccaggaacagcagcaccccaggcctgcaggtgcctgtgagccccaccgtgcccatccagaaccagaagtatgtgcccaacagcacagacagccctggccccagccagatcagcaatgctgctgtgcagaccaccccaccccacctgaagccagccacagagaagctgattgtggtgaaccagaacatgcagcccctgtatgtgctgcagaccctgcccaacggggtgacccagaagatccagctgaccagctctgtgagcagcaccccatctgtgatggagaccaacacctctgtgctgggccccatgggcggcggcctgaccctgaccaccggcctgaaccccagcctgcccaccagccagagcctcttccccagcgccagcaagggcctgctgcccatgagccaccaccagcacctgcacagcttccctgctgccacccagagcagcttcccccccaacatcagcaacccccccagcggcctgctgattggagtgcagcccccaccagacccccagctgctggtgtctgagagcagccagaggacagacctgagcaccaccgtggccacccccagcagcggcctgaagaagaggcccatcagccggctgcagaccaggaagaacaagaagctggcccccagcagcacccccagcaacatcgcccccagtgatgtggtgagcaacatgaccctcatcaacttcacccccagccagctgcccaaccaccccagcctgctggacctgggcagcctgaacaccagcagccacaggacagtgcccaacatcatcaagaggagcaagagcagcatcatgtactttgagcccgcccccctgctgccccagagcgtgggcggcacagctgccacagctgctggcaccagcaccatcagccaggacaccagccacctgaccagcggctctgtgtctggcctggccagcagcagctctgtgctgaatgtggtgtccatgcagaccaccaccacccccaccagcagcgcctctgtgcccggccacgtgaccctgaccaacccccggctgctgggcaccccagacatcggcagcatcagcaacctgctgatcaaggccagccagcagagcctgggcatccaggaccagcctgtggccctgccccccagcagcggcatgttcccccagctgggcaccagccagacccccagcacagctgccatcacagctgccagcagcatctgtgtgctgcccagcacccagaccaccggcatcacagctgccagccccagcggggaggctgatgagcactaccagctgcagcacgtgaaccagctgctggccagcaagacaggcatccacagcagccagagggacctggacagcgccagcggcccccaggtgagcaacttcacccagacagtggatgcccccaacagcatgggcctggagcagaacaaggccctgagcagcgctgtgcaggccagccccaccagccctgggggcagccccagcagccccagcagcggccagaggtctgccagccccagcgtgcccggccccaccaagcccaagcccaagaccaagcgcttccagctgcccctggacaagggaaatggcaagaagcacaaggtgagccacctgcggaccagcagcagcgaggcccacatcccagaccaggagaccaccagcctgaccagcggcaccggcaccccaggagctgaggccgagcagcaggacacagcctctgtggagcagagcagccagaaggaatgtggccagcctgctggccaggtggccgtgctgcctgaggtgcaggtgacccagaacccagccaatgagcaggagagcgctgagcccaagacagtggaggaggaggagagcaacttcagcagccccctgatgctgtggctgcagcaggagcagaagaggaaggagagcatcacagagaagaagcccaagaagggcctggtgtttgagatcagcagtgatgatggcttccagatctgtgccgagagcattgaagatgcctggaagagcctgacagacaaggtgcaggaggcccggagcaatgcccggctgaagcagctgagctttgctggggtgaatggcctgaggatgctgggcatcctgcatgatgctgtggtgttcctgattgagcagctgagcggggccaagcactgcaggaactacaagttccgcttccacaagccagaggaggccaatgagccccccctgaacccccacggcagcgcccgggcagaggtgcacctgaggaagagcgcctttgacatgttcaacttcctggccagcaagcaccggcagcccccagagtacaaccccaatgatgaggaggaggaggaggtgcagctgaagagcgcccggcgggccacctccatggacctgcccatgcccatgaggttccgccacctgaagaagaccagcaaggaggccgtgggcgtgtaccgcagccccatccacggccggggcctcttctgcaagagaaatattgatgctggggagatggtgattgaatatgctggaaatgtcatccgcagcatccagacagacaagcgggagaagtactatgacagcaagggcatcggctgctacatgttcagaattgatgacagcgaggtggtggatgccaccatgcacggcaatgctgcccgcttcatcaaccacagctgtgagcccaactgctacagcagggtcatcaacattgatggccagaagcacatcgtcatctttgccatgaggaagatctacagaggagaggagctgacctatgactacaagttccccattgaagatgccagcaacaagctgccctgcaactgtggggccaagaagtgcaggaagttcctgaactag

SEQ ID NO: 160464 - DNA, 8640 bp, Artificial Sequence
  derived and/or modified sequence
catgcccacccagaatgtctgaccatggagcgggagaagatcctgagctccatgggaaatgatgacaagagcagcattgctggctctgaagatgctgagcccctggccccacccatcaagcccatcaagcctgtgaccaggaacaaggccccccaggagccccctgtgaagaagggccgccgcagcagaagatgtggccagtgccccggctgccaggtgcctgaggactgtggggtgtgcaccaactgcctggacaagcccaagtttggaggcaggaacatcaagaagcagtgctgcaagatgaggaagtgccagaacctgcagtggatgcccagcaaggcctacctgcagaagcaggccaaggctgtgaagaagaaggagaagaagagcaagaccagcgagaagaaggacagcaaggagagctctgtggtgaagaatgtggtggacagcagccagaagcccaccccatctgcccgggaggaccctgcccccaagaagagcagcagcgagcccccacccaggaagcctgtggaggagaagtctgaggagggcaatgtgtctgcccctggccctgagagcaagcaggccaccaccccagccagcaggaagagcagcaagcaggtgtcccagcctgccctggtgatccccccccagccccccaccaccggcccccccaggaaggaggtgcccaagaccaccccatctgagcccaagaagaagcagcccccacctcctgagagcggccctgagcagagcaagcagaagaaggtggccccccggcccagcatccctgtgaagcagaagcccaaggagaaggagaagcccccacctgtgaacaagcaggagaatgccggcaccctgaacatcctgagcaccctgagcaatggaaacagcagcaagcagaagatcccagcagatggagtgcaccgcatccgggtggacttcaaggaggactgtgaggccgagaatgtgtgggagatgggcggcctgggcatcctgacctctgtgcccatcaccccccgggtggtgtgcttcctgtgtgccagcagcggccacgtggagtttgtgtactgccaggtgtgctgtgagcccttccacaagttctgcctggaggagaatgaaagacccctggaggaccagctggagaactggtgctgccgccgctgcaagttctgccacgtgtgtggccggcagcaccaggccaccaagcagctgctggagtgcaacaagtgcaggaacagctaccaccctgagtgcctgggccccaactaccccaccaagcccaccaagaagaagaaggtgtggatctgcaccaagtgtgtgcgctgcaagagctgtggcagcaccaccccaggcaagggctgggatgcccagtggagccatgacttcagcctgtgccacgactgtgccaagctgtttgccaagggcaacttctgccccctgtgtgacaagtgctatgatgatgatgattatgagagcaagatgatgcagtgtgggaaatgtgaccgctgggtgcacagcaaatgtgagaacctgagtgatgagatgtatgagatcctgagcaacctgcctgagagcgtggcctacacctgtgtgaactgcacagagcggcaccctgctgagtggaggctggccctggagaaggagctgcagatcagcctgaagcaggtgctgacagccctgctgaacagcaggaccaccagccacctgctgcgctaccggcaggccgccaagcccccagacctgaaccctgagacagaggagagcatccccagccgcagcagccctgagggccctgacccccctgtgctgacagaggtgtccaagcaggatgaccagcagcccctggacctggagggcgtgaagaggaagatggaccagggcaactacacctctgtgctggagttcagtgatgacatcgtgaagatcatccaggccgccatcaacagtgatggcggccagcctgagatcaagaaggccaacagcatggtgaagagcttcttcatccggcagatggagagggtcttcccctggttctctgtgaagaagagccgcttctgggagcccaacaaggtgagcagcaacagcggcatgctgcccaatgctgtgctgccccccagcctggaccacaactatgcccagtggcaggagcgggaggagaacagccacacagagcagccccccctgatgaagaagatcatcccagcccccaagcccaagggccctggagagccagacagccccacccccctgcacccccccaccccacccatcctgagcacagacaggagccgggaggacagccctgagctgaaccccccacctggcatcgaggacaaccggcagtgtgccctgtgcctgacctatggagatgattctgccaatgatgctggccgcctgctgtacatcggccagaatgagtggacccacgtgaactgtgccctgtggagcgctgaggtgtttgaagatgatgatggcagcctgaagaatgtgcacatggccgtcatccggggcaagcagctgcgctgtgagttctgccagaagccaggggccaccgtgggctgctgcctgaccagctgcaccagcaactaccacttcatgtgcagccgggccaagaactgtgtgttcctggatgacaagaaggtgtactgccagaggcaccgggacctgatcaagggggaggtggtgcctgaaaatggatttgaggtgttcagaagagtgtttgtggactttgagggcatcagcctgcggaggaagttcctgaatggcctggagcctgagaacatccacatgatgattggctccatgaccatcgactgcctgggcatcctgaatgacctgagtgactgtgaggacaagctgttccccatcggctaccagtgcagccgggtgtactggagcaccacagatgccaggaagagatgtgtgtacacctgcaagatcgtggagtgccggccccctgtggtggagccagacatcaacagcacagtggagcatgatgaaaatagaaccatcgcccacagccccaccagcttcacagagagcagcagcaaggagagccagaacacagctgagatcatcagcccccccagcccagacaggcctccccacagccagaccagcggcagctgctactaccacgtgatcagcaaggtgccccgcatccgcacccccagctacagccccacccagaggagccctggctgccggcccctgcccagcgctggcagccccacccccaccacccatgaaattgtgacagtgggggaccccctgctgagcagcggcctgcggagcatcggcagcagaagacacagcaccagcagcctgagcccccagaggagcaagctgcgcatcatgagccccatgaggactggaaacacctacagcagaaataatgtgtcctctgtgtccaccaccggcacagccacagacctggagagcagcgccaaggtggtggaccacgtgctgggccccctgaacagcagcaccagcctgggccagaacaccagcaccagcagcaacctgcagaggacagtggtgacagtgggcaacaagaacagccacctggatggcagcagcagcagcgagatgaagcagagcagcgccagtgacctggtgtccaagagcagcagcctgaagggggagaagaccaaggtgctgagcagcaagagcagcgagggcagcgcccacaacgtggcctacccaggcatccccaagctggccccccaggtgcacaacaccaccagccgggagctgaatgtgtccaagattggcagctttgctgagcccagctctgtgtccttcagcagcaaggaggccctgtccttcccccacctgcacctgcggggccagagaaatgaccgggaccagcacacagacagcacccagagcgccaacagcagcccagatgaggacacagaggtgaagaccctgaagctgagcggcatgagcaacagaagcagcatcatcaatgagcacatgggcagcagcagccgggaccggcggcagaagggcaagaagagctgcaaggagaccttcaaggagaagcacagcagcaagagcttcctggagcccggccaggtgaccaccggggaggagggcaacctgaagccagagttcatggatgaggtgctgaccccagagtacatgggccagaggccctgcaacaacgtgtccagtgacaagattggagacaagggcctgtccatgcctggggtgcccaaggccccacccatgcaggtggagggcagcgccaaggagctgcaggcccccaggaagaggacagtgaaggtgaccctgacccccctgaagatggagaatgaaagccagagcaagaatgccctgaaggagagcagccctgccagccccctgcagatcgagagcaccagccccacagagcccatcagcgcctctgaaaatcctggagatggccctgtggcccagcccagccccaacaacaccagctgccaggacagccagagcaacaactaccagaacctgcctgtgcaggacaggaacctgatgctgcctgatggccccaagccccaggaggatggcagcttcaagaggcgctacccccggcgcagcgcccgggcccggagcaacatgttcttcggcctgacccccctgtatggagtgcgctcctatggagaggaggacatccccttctacagcagcagcacaggcaagaagaggggcaagaggtctgctgagggccaggtggatggagcagatgacctgagcaccagtgatgaagatgacctgtactactacaacttcaccaggacagtcatcagcagtggaggagaggagcggctggccagccacaacctcttccgggaggaggagcagtgtgacctgcccaagatcagccagctggatggagtggatgatggaacagaaagtgacacctctgtgacagccaccaccaggaagagcagccagatccccaagagaaatggcaaggaaaatggaacagagaacctgaagattgacagaccagaagatgctggggagaaggagcacgtgaccaagagctctgtgggccacaagaatgagcccaagatggacaactgccacagcgtgtcccgggtgaagacccagggccaggacagcctggaggcccagctgagcagcctggagagcagccggcgggtgcacaccagcacccccagcgacaagaacctgctggacacctacaacacagagctgctgaagagtgacagcgacaacaacaacagtgatgactgtggcaacatcctgcccagcgacatcatggactttgtgctgaagaacacccccagcatgcaggccctgggggagagccctgagagcagcagcagcgagctgctgaacctgggggagggcctgggcctggacagcaaccgggagaaggacatgggcctgtttgaggtgttcagccagcagctgcccaccacagagcctgtggacagctctgtgagcagcagcatctctgctgaggagcagtttgagctgcccctggagctgcccagcgacctgtctgtgctgaccaccaggagccccaccgtgcccagccagaaccccagccggctggccgtcatcagtgacagcggggagaagagggtgaccatcacagagaagtctgtggccagcagcgagagtgaccctgccctgctgagccctggggtggaccccaccccagagggccacatgaccccagaccacttcatccagggccacatggatgctgaccacatcagcagccccccctgtggctctgtggagcagggccacggcaacaaccaggacctgaccaggaacagcagcaccccaggcctgcaggtgcctgtgagccccaccgtgcccatccagaaccagaagtatgtgcccaacagcacagacagccctggccccagccagatcagcaatgctgctgtgcagaccaccccaccccacctgaagccagccacagagaagctgattgtggtgaaccagaacatgcagcccctgtatgtgctgcagaccctgcccaacggggtgacccagaagatccagctgaccagctctgtgagcagcaccccatctgtgatggagaccaacacctctgtgctgggccccatgggcggcggcctgaccctgaccaccggcctgaaccccagcctgcccaccagccagagcctcttccccagcgccagcaagggcctgctgcccatgagccaccaccagcacctgcacagcttccctgctgccacccagagcagcttcccccccaacatcagcaacccccccagcggcctgctgattggagtgcagcccccaccagacccccagctgctggtgtctgagagcagccagaggacagacctgagcaccaccgtggccacccccagcagcggcctgaagaagaggcccatcagccggctgcagaccaggaagaacaagaagctggcccccagcagcacccccagcaacatcgcccccagtgatgtggtgagcaacatgaccctcatcaacttcacccccagccagctgcccaaccaccccagcctgctggacctgggcagcctgaacaccagcagccacaggacagtgcccaacatcatcaagaggagcaagagcagcatcatgtactttgagcccgcccccctgctgccccagagcgtgggcggcacagctgccacagctgctggcaccagcaccatcagccaggacaccagccacctgaccagcggctctgtgtctggcctggccagcagcagctctgtgctgaatgtggtgtccatgcagaccaccaccacccccaccagcagcgcctctgtgcccggccacgtgaccctgaccaacccccggctgctgggcaccccagacatcggcagcatcagcaacctgctgatcaaggccagccagcagagcctgggcatccaggaccagcctgtggccctgccccccagcagcggcatgttcccccagctgggcaccagccagacccccagcacagctgccatcacagctgccagcagcatctgtgtgctgcccagcacccagaccaccggcatcacagctgccagccccagcggggaggctgatgagcactaccagctgcagcacgtgaaccagctgctggccagcaagacaggcatccacagcagccagagggacctggacagcgccagcggcccccaggtgagcaacttcacccagacagtggatgcccccaacagcatgggcctggagcagaacaaggccctgagcagcgctgtgcaggccagccccaccagccctgggggcagccccagcagccccagcagcggccagaggtctgccagccccagcgtgcccggccccaccaagcccaagcccaagaccaagcgcttccagctgcccctggacaagggaaatggcaagaagcacaaggtgagccacctgcggaccagcagcagcgaggcccacatcccagaccaggagaccaccagcctgaccagcggcaccggcaccccaggagctgaggccgagcagcaggacacagcctctgtggagcagagcagccagaaggaatgtggccagcctgctggccaggtggccgtgctgcctgaggtgcaggtgacccagaacccagccaatgagcaggagagcgctgagcccaagacagtggaggaggaggagagcaacttcagcagccccctgatgctgtggctgcagcaggagcagaagaggaaggagagcatcacagagaagaagcccaagaagggcctggtgtttgagatcagcagtgatgatggcttccagatctgtgccgagagcattgaagatgcctggaagagcctgacagacaaggtgcaggaggcccggagcaatgcccggctgaagcagctgagctttgctggggtgaatggcctgaggatgctgggcatcctgcatgatgctgtggtgttcctgattgagcagctgagcggggccaagcactgcaggaactacaagttccgcttccacaagccagaggaggccaatgagccccccctgaacccccacggcagcgcccgggcagaggtgcacctgaggaagagcgcctttgacatgttcaacttcctggccagcaagcaccggcagcccccagagtacaaccccaatgatgaggaggaggaggaggtgcagctgaagagcgcccggcgggccacctccatggacctgcccatgcccatgaggttccgccacctgaagaagaccagcaaggaggccgtgggcgtgtaccgcagccccatccacggccggggcctcttctgcaagagaaatattgatgctggggagatggtgattgaatatgctggaaatgtcatccgcagcatccagacagacaagcgggagaagtactatgacagcaagggcatcggctgctacatgttcagaattgatgacagcgaggtggtggatgccaccatgcacggcaatgctgcccgcttcatcaaccacagctgtgagcccaactgctacagcagggtcatcaacattgatggccagaagcacatcgtcatctttgccatgaggaagatctacagaggagaggagctgacctatgactacaagttccccattgaagatgccagcaacaagctgccctgcaactgtggggccaagaagtgcaggaagttcctgaactag

SEQ ID NO: 160465 - DNA, 11910 bp, Artificial Sequence
  derived and/or modified sequence
atggcccacagctgccgctggaggtttcctgcccggcccggcaccaccggcggcggcggcggcggcggccggcggggcctgggcggggccccccggcagagggtgcctgccctgctgctgcccccaggcccccctgtgggcggcggcggccctggggccccacccagccccccagctgtggccgctgctgctgctgctgctggcagcagcggggccggcgtgcctggaggagctgctgctgccagcgctgccagcagcagcagcgccagcagcagcagcagcagcagcagcagcgccagcagcggccctgccctgctgcgggtgggccctggctttgatgctgccctgcaggtgtctgctgccatcggcaccaacctgcggcgcttccgggctgtgtttggagagagcggcggcggcggcggcagcggggaggatgagcagttcctgggctttggaagtgatgaggaggtgcgggtgcgcagccccaccaggagccccagcgtgaagaccagccccaggaagccccggggccggcccaggagcggcagtgacagaaattctgccatcctgagtgaccccagcgtcttcagccccctgaacaagtctgagaccaagagcggggacaagatcaagaagaaggacagcaagagcattgagaagaagaggggccggccccccaccttccctggggtgaagatcaagatcacccacggcaaggacatcagcgagctgcccaagggcaacaaggaggacagcctgaagaagatcaagaggaccccatctgccaccttccagcaggccaccaagatcaagaagctgcgggccggcaagctgagccccctgaagagcaagttcaagacaggcaagctgcagatcggcaggaaaggagtgcagatcgtgagaagaagaggccggccccccagcacagagcgcatcaagacccccagcggcctgctgatcaacagcgagctggagaagccccagaaggtgaggaaggacaaggagggcaccccacccctgaccaaggaggacaagacagtggtgcggcagagcccccggcgcatcaagcctgtgcgcatcatccccagcagcaagaggacagatgccaccatcgccaagcagctgctgcagagggccaagaagggggcccagaagaagattgagaaggaggccgcccagctgcagggcaggaaggtgaagacccaggtgaagaacatccggcagttcatcatgcctgtggtgtctgccatcagcagccgcatcatcaagaccccccggcgcttcattgaagatgaggactatgacccccccatcaagatcgcccggctggagagcacccccaacagccgcttcagcgcccccagctgtggcagcagcgagaagagcagcgctgccagccagcacagcagccagatgagcagtgacagcagccgcagcagcagccccagcgtggacaccagcacagacagccaggccagcgaggagatccaggtgctgcctgaggagaggagtgacaccccagaggtgcacccccccctgcccatcagccagagcccagaaaatgaaagcaatgaccggcgcagccgccgctacagcgtgtctgagaggagctttggcagcaggaccaccaagaagctgagcaccctgcagagcgccccccagcagcagaccagcagcagccccccaccacccctgctgaccccacctccacccctgcagcctgccagcagcatcagtgaccacaccccctggctgatgccacccaccatccccctggccagccccttcctgcctgccagcacagcccccatgcagggcaagaggaagagcatcctgcgggagcccaccttccgctggaccagcctgaagcacagccgctctgagccccagtacttcagcagcgccaagtatgccaaggagggcctcatcaggaagcccatctttgacaacttccggcccccacccctgaccccagaagatgtgggctttgccagcggcttcagcgccagcggcacagctgccagcgcccggctcttcagccccctgcacagcggcaccaggtttgacatgcacaagaggagccccctgctgcgggccccccgcttcaccccatctgaggcccacagccgcatctttgagagcgtgaccctgcccagcaacagaacatctgctggcaccagcagcagtggagtgagcaacaggaagaggaagaggaaggtgttcagccccatccgctctgagcccaggagccccagccacagcatgaggaccaggagcggccgcctgagcagcagcgagctgagccccctgaccccacccagctctgtgagcagcagcctgagcatctctgtgagccccctggccaccagcgccctgaaccccaccttcaccttccccagccacagcctgacccagagcggggagagcgctgagaagaaccagaggcccaggaagcagaccagcgccccagctgagcccttcagcagcagcagccccacccccctcttcccctggttcaccccaggcagccagacagagcggggcaggaacaaggacaaggcccctgaggagctgagcaaggacagagatgctgacaagtctgtggagaaggacaagagccgggagcgggaccgggagcgggagaaggagaacaagcgggagagcaggaaggagaagaggaagaagggcagcgagatccagagcagcagcgccctgtaccctgtgggccgggtgtccaaggagaaggtggtgggagaagatgtggccaccagcagcagcgccaagaaggccactggaaggaagaagagcagcagccatgattctggaacagacatcacctctgtgaccctgggggacaccacagctgtgaagaccaagatcctgatcaagaagggccggggcaacctggagaagaccaacctggacctgggccccacagcccccagcctggagaaggagaagaccctgtgcctgagcacccccagcagcagcacagtgaagcacagcaccagcagcatcggctccatgctggcccaggccgacaagctgcccatgacagacaagagggtggccagcctgctgaagaaggccaaggcccagctgtgcaagattgagaagagcaagagcctgaagcagacagaccagcccaaggcccagggccaggagagtgacagcagcgagacctctgtgcggggcccccgcatcaagcacgtgtgcagaagagctgctgtggccctgggcaggaagagagctgtgtttcctgatgacatgcccaccctgagcgccctgccctgggaggagcgggagaagatcctgagctccatgggaaatgatgacaagagcagcattgctggctctgaagatgctgagcccctggccccacccatcaagcccatcaagcctgtgaccaggaacaaggccccccaggagccccctgtgaagaagggccgccgcagcagaagatgtggccagtgccccggctgccaggtgcctgaggactgtggggtgtgcaccaactgcctggacaagcccaagtttggaggcaggaacatcaagaagcagtgctgcaagatgaggaagtgccagaacctgcagtggatgcccagcaaggcctacctgcagaagcaggccaaggctgtgaagaagaaggagaagaagagcaagaccagcgagaagaaggacagcaaggagagctctgtggtgaagaatgtggtggacagcagccagaagcccaccccatctgcccgggaggaccctgcccccaagaagagcagcagcgagcccccacccaggaagcctgtggaggagaagtctgaggagggcaatgtgtctgcccctggccctgagagcaagcaggccaccaccccagccagcaggaagagcagcaagcaggtgtcccagcctgccctggtgatccccccccagccccccaccaccggcccccccaggaaggaggtgcccaagaccaccccatctgagcccaagaagaagcagcccccacctcctgagagcggccctgagcagagcaagcagaagaaggtggccccccggcccagcatccctgtgaagcagaagcccaaggagaaggagaagcccccacctgtgaacaagcaggagaatgccggcaccctgaacatcctgagcaccctgagcaatggaaacagcagcaagcagaagatcccagcagatggagtgcaccgcatccgggtggacttcaaggaggactgtgaggccgagaatgtgtgggagatgggcggcctgggcatcctgacctctgtgcccatcaccccccgggtggtgtgcttcctgtgtgccagcagcggccacgtggagtttgtgtactgccaggtgtgctgtgagcccttccacaagttctgcctggaggagaatgaaagacccctggaggaccagctggagaactggtgctgccgccgctgcaagttctgccacgtgtgtggccggcagcaccaggccaccaagcagctgctggagtgcaacaagtgcaggaacagctaccaccctgagtgcctgggccccaactaccccaccaagcccaccaagaagaagaaggtgtggatctgcaccaagtgtgtgcgctgcaagagctgtggcagcaccaccccaggcaagggctgggatgcccagtggagccatgacttcagcctgtgccacgactgtgccaagctgtttgccaagggcaacttctgccccctgtgtgacaagtgctatgatgatgatgattatgagagcaagatgatgcagtgtgggaaatgtgaccgctgggtgcacagcaaatgtgagaacctgagtgatgagatgtatgagatcctgagcaacctgcctgagagcgtggcctacacctgtgtgaactgcacagagcggcaccctgctgagtggaggctggccctggagaaggagctgcagatcagcctgaagcaggtgctgacagccctgctgaacagcaggaccaccagccacctgctgcgctaccggcaggccgccaagcccccagacctgaaccctgagacagaggagagcatccccagccgcagcagccctgagggccctgacccccctgtgctgacagaggtgtccaagcaggatgaccagcagcccctggacctggagggcgtgaagaggaagatggaccagggcaactacacctctgtgctggagttcagtgatgacatcgtgaagatcatccaggccgccatcaacagtgatggcggccagcctgagatcaagaaggccaacagcatggtgaagagcttcttcatccggcagatggagagggtcttcccctggttctctgtgaagaagagccgcttctgggagcccaacaaggtgagcagcaacagcggcatgctgcccaatgctgtgctgccccccagcctggaccacaactatgcccagtggcaggagcgggaggagaacagccacacagagcagccccccctgatgaagaagatcatcccagcccccaagcccaagggccctggagagccagacagccccacccccctgcacccccccaccccacccatcctgagcacagacaggagccgggaggacagccctgagctgaaccccccacctggcatcgaggacaaccggcagtgtgccctgtgcctgacctatggagatgattctgccaatgatgctggccgcctgctgtacatcggccagaatgagtggacccacgtgaactgtgccctgtggagcgctgaggtgtttgaagatgatgatggcagcctgaagaatgtgcacatggccgtcatccggggcaagcagctgcgctgtgagttctgccagaagccaggggccaccgtgggctgctgcctgaccagctgcaccagcaactaccacttcatgtgcagccgggccaagaactgtgtgttcctggatgacaagaaggtgtactgccagaggcaccgggacctgatcaagggggaggtggtgcctgaaaatggatttgaggtgttcagaagagtgtttgtggactttgagggcatcagcctgcggaggaagttcctgaatggcctggagcctgagaacatccacatgatgattggctccatgaccatcgactgcctgggcatcctgaatgacctgagtgactgtgaggacaagctgttccccatcggctaccagtgcagccgggtgtactggagcaccacagatgccaggaagagatgtgtgtacacctgcaagatcgtggagtgccggccccctgtggtggagccagacatcaacagcacagtggagcatgatgaaaatagaaccatcgcccacagccccaccagcttcacagagagcagcagcaaggagagccagaacacagctgagatcatcagcccccccagcccagacaggcctccccacagccagaccagcggcagctgctactaccacgtgatcagcaaggtgccccgcatccgcacccccagctacagccccacccagaggagccctggctgccggcccctgcccagcgctggcagccccacccccaccacccatgaaattgtgacagtgggggaccccctgctgagcagcggcctgcggagcatcggcagcagaagacacagcaccagcagcctgagcccccagaggagcaagctgcgcatcatgagccccatgaggactggaaacacctacagcagaaataatgtgtcctctgtgtccaccaccggcacagccacagacctggagagcagcgccaaggtggtggaccacgtgctgggccccctgaacagcagcaccagcctgggccagaacaccagcaccagcagcaacctgcagaggacagtggtgacagtgggcaacaagaacagccacctggatggcagcagcagcagcgagatgaagcagagcagcgccagtgacctggtgtccaagagcagcagcctgaagggggagaagaccaaggtgctgagcagcaagagcagcgagggcagcgcccacaacgtggcctacccaggcatccccaagctggccccccaggtgcacaacaccaccagccgggagctgaatgtgtccaagattggcagctttgctgagcccagctctgtgtccttcagcagcaaggaggccctgtccttcccccacctgcacctgcggggccagagaaatgaccgggaccagcacacagacagcacccagagcgccaacagcagcccagatgaggacacagaggtgaagaccctgaagctgagcggcatgagcaacagaagcagcatcatcaatgagcacatgggcagcagcagccgggaccggcggcagaagggcaagaagagctgcaaggagaccttcaaggagaagcacagcagcaagagcttcctggagcccggccaggtgaccaccggggaggagggcaacctgaagccagagttcatggatgaggtgctgaccccagagtacatgggccagaggccctgcaacaacgtgtccagtgacaagattggagacaagggcctgtccatgcctggggtgcccaaggccccacccatgcaggtggagggcagcgccaaggagctgcaggcccccaggaagaggacagtgaaggtgaccctgacccccctgaagatggagaatgaaagccagagcaagaatgccctgaaggagagcagccctgccagccccctgcagatcgagagcaccagccccacagagcccatcagcgcctctgaaaatcctggagatggccctgtggcccagcccagccccaacaacaccagctgccaggacagccagagcaacaactaccagaacctgcctgtgcaggacaggaacctgatgctgcctgatggccccaagccccaggaggatggcagcttcaagaggcgctacccccggcgcagcgcccgggcccggagcaacatgttcttcggcctgacccccctgtatggagtgcgctcctatggagaggaggacatccccttctacagcagcagcacaggcaagaagaggggcaagaggtctgctgagggccaggtggatggagcagatgacctgagcaccagtgatgaagatgacctgtactactacaacttcaccaggacagtcatcagcagtggaggagaggagcggctggccagccacaacctcttccgggaggaggagcagtgtgacctgcccaagatcagccagctggatggagtggatgatggaacagaaagtgacacctctgtgacagccaccaccaggaagagcagccagatccccaagagaaatggcaaggaaaatggaacagagaacctgaagattgacagaccagaagatgctggggagaaggagcacgtgaccaagagctctgtgggccacaagaatgagcccaagatggacaactgccacagcgtgtcccgggtgaagacccagggccaggacagcctggaggcccagctgagcagcctggagagcagccggcgggtgcacaccagcacccccagcgacaagaacctgctggacacctacaacacagagctgctgaagagtgacagcgacaacaacaacagtgatgactgtggcaacatcctgcccagcgacatcatggactttgtgctgaagaacacccccagcatgcaggccctgggggagagccctgagagcagcagcagcgagctgctgaacctgggggagggcctgggcctggacagcaaccgggagaaggacatgggcctgtttgaggtgttcagccagcagctgcccaccacagagcctgtggacagctctgtgagcagcagcatctctgctgaggagcagtttgagctgcccctggagctgcccagcgacctgtctgtgctgaccaccaggagccccaccgtgcccagccagaaccccagccggctggccgtcatcagtgacagcggggagaagagggtgaccatcacagagaagtctgtggccagcagcgagagtgaccctgccctgctgagccctggggtggaccccaccccagagggccacatgaccccagaccacttcatccagggccacatggatgctgaccacatcagcagccccccctgtggctctgtggagcagggccacggcaacaaccaggacctgaccaggaacagcagcaccccaggcctgcaggtgcctgtgagccccaccgtgcccatccagaaccagaagtatgtgcccaacagcacagacagccctggccccagccagatcagcaatgctgctgtgcagaccaccccaccccacctgaagccagccacagagaagctgattgtggtgaaccagaacatgcagcccctgtatgtgctgcagaccctgcccaacggggtgacccagaagatccagctgaccagctctgtgagcagcaccccatctgtgatggagaccaacacctctgtgctgggccccatgggcggcggcctgaccctgaccaccggcctgaaccccagcctgcccaccagccagagcctcttccccagcgccagcaagggcctgctgcccatgagccaccaccagcacctgcacagcttccctgctgccacccagagcagcttcccccccaacatcagcaacccccccagcggcctgctgattggagtgcagcccccaccagacccccagctgctggtgtctgagagcagccagaggacagacctgagcaccaccgtggccacccccagcagcggcctgaagaagaggcccatcagccggctgcagaccaggaagaacaagaagctggcccccagcagcacccccagcaacatcgcccccagtgatgtggtgagcaacatgaccctcatcaacttcacccccagccagctgcccaaccaccccagcctgctggacctgggcagcctgaacaccagcagccacaggacagtgcccaacatcatcaagaggagcaagagcagcatcatgtactttgagcccgcccccctgctgccccagagcgtgggcggcacagctgccacagctgctggcaccagcaccatcagccaggacaccagccacctgaccagcggctctgtgtctggcctggccagcagcagctctgtgctgaatgtggtgtccatgcagaccaccaccacccccaccagcagcgcctctgtgcccggccacgtgaccctgaccaacccccggctgctgggcaccccagacatcggcagcatcagcaacctgctgatcaaggccagccagcagagcctgggcatccaggaccagcctgtggccctgccccccagcagcggcatgttcccccagctgggcaccagccagacccccagcacagctgccatcacagctgccagcagcatctgtgtgctgcccagcacccagaccaccggcatcacagctgccagccccagcggggaggctgatgagcactaccagctgcagcacgtgaaccagctgctggccagcaagacaggcatccacagcagccagagggacctggacagcgccagcggcccccaggtgagcaacttcacccagacagtggatgcccccaacagcatgggcctggagcagaacaaggccctgagcagcgctgtgcaggccagccccaccagccctgggggcagccccagcagccccagcagcggccagaggtctgccagccccagcgtgcccggccccaccaagcccaagcccaagaccaagcgcttccagctgcccctggacaagggaaatggcaagaagcacaaggtgagccacctgcggaccagcagcagcgaggcccacatcccagaccaggagaccaccagcctgaccagcggcaccggcaccccaggagctgaggccgagcagcaggacacagcctctgtggagcagagcagccagaaggaatgtggccagcctgctggccaggtggccgtgctgcctgaggtgcaggtgacccagaacccagccaatgagcaggagagcgctgagcccaagacagtggaggaggaggagagcaacttcagcagccccctgatgctgtggctgcagcaggagcagaagaggaaggagagcatcacagagaagaagcccaagaagggcctggtgtttgagatcagcagtgatgatggcttccagatctgtgccgagagcattgaagatgcctggaagagcctgacagacaaggtgcaggaggcccggagcaatgcccggctgaagcagctgagctttgctggggtgaatggcctgaggatgctgggcatcctgcatgatgctgtggtgttcctgattgagcagctgagcggggccaagcactgcaggaactacaagttccgcttccacaagccagaggaggccaatgagccccccctgaacccccacggcagcgcccgggcagaggtgcacctgaggaagagcgcctttgacatgttcaacttcctggccagcaagcaccggcagcccccagagtacaaccccaatgatgaggaggaggaggaggtgcagctgaagagcgcccggcgggccacctccatggacctgcccatgcccatgaggttccgccacctgaagaagaccagcaaggaggccgtgggcgtgtaccgcagccccatccacggccggggcctcttctgcaagagaaatattgatgctggggagatggtgattgaatatgctggaaatgtcatccgcagcatccagacagacaagcgggagaagtactatgacagcaagggcatcggctgctacatgttcagaattgatgacagcgaggtggtggatgccaccatgcacggcaatgctgcccgcttcatcaaccacagctgtgagcccaactgctacagcagggtcatcaacattgatggccagaagcacatcgtcatctttgccatgaggaagatctacagaggagaggagctgacctatgactacaagttccccattgaagatgccagcaacaagctgccctgcaactgtggggccaagaagtgcaggaagttcctgaactag

SEQ ID NO: 160466 - DNA, 14320 bp, Artificial Sequence
  derived and/or modified sequence
atggcgcacagctgtcggtggcgcttccccgcccgacccgggaccaccgggggcggcggcggcggggggcgccggggcctagggggcgccccgcggcaacgcgtcccggccctgctgcttccccccgggcccccggtcggcggtggcggccccggggcgcccccctcccccccggctgtggcggccgcggcggcggcggcgggaagcagcggggctggggttccagggggagcggccgccgcctcagcagcctcctcgtcgtccgcctcgtcttcgtcttcgtcatcgtcctcagcctcttcagggccggccctgctccgggtgggcccgggcttcgacgcggcgctgcaggtctcggccgccatcggcaccaacctgcgccggttccgggccgtgtttggggagagcggcgggggaggcggcagcggagaggatgagcaattcttaggttttggctcagatgaagaagtcagagtgcgaagtcccacaaggtctccttcagttaaaactagtcctcgaaaacctcgtgggagacctagaagtggctctgaccgaaattcagctatcctctcagatccatctgtgttttcccctctaaataaatcagagaccaaatctggagataagatcaagaagaaagattctaaaagtatagaaaagaagagaggaagacctcccaccttccctggagtaaaaatcaaaataacacatggaaaggacatttcagagttaccaaagggaaacaaagaagatagcctgaaaaaaattaaaaggacaccttctgctacgtttcagcaagccacaaagattaaaaaattaagagcaggtaaactctctcctctcaagtctaagtttaagacagggaagcttcaaataggaaggaagggggtacaaattgtacgacggagaggaaggcctccatcaacagaaaggataaagaccccttcgggtctcctcattaattctgaactggaaaagccccagaaagtccggaaagacaaggaaggaacacctccacttacaaaagaagataagacagttgtcagacaaagccctcgaaggattaagccagttaggattattccttcttcaaaaaggacagatgcaaccattgctaagcaactcttacagagggcaaaaaagggggctcaaaagaaaattgaaaaagaagcagctcagctgcagggaagaaaggtgaagacacaggtcaaaaatattcgacagttcatcatgcctgttgtcagtgctatctcctcgcggatcattaagacccctcggcggtttatagaggatgaggattatgaccctccaattaaaattgcccgattagagtctacaccgaatagtagattcagtgccccgtcctgtggatcttctgaaaaatcaagtgcagcttctcagcactcctctcaaatgtcttcagactcctctcgatctagtagccccagtgttgatacctccacagactctcaggcttctgaggagattcaggtacttcctgaggagcggagcgatacccctgaagttcatcctccactgcccatttcccagtccccagaaaatgagagtaatgataggagaagcagaaggtattcagtgtcggagagaagttttggatctagaacgacgaaaaaattatcaactctacaaagtgccccccagcagcagacctcctcgtctccacctccacctctgctgactccaccgccaccactgcagccagcctccagtatctctgaccacacaccttggcttatgcctccaacaatccccttagcatcaccatttttgcctgcttccactgctcctatgcaagggaagcgaaaatctattttgcgagaaccgacatttaggtggacttctttaaagcattctaggtcagagccacaatacttttcctcagcaaagtatgccaaagaaggtcttattcgcaaaccaatatttgataatttccgaccccctccactaactcccgaggacgttggctttgcatctggtttttctgcatctggtaccgctgcttcagcccgattgttttcgccactccattctggaacaaggtttgatatgcacaaaaggagccctcttctgagagctccaagatttactccaagtgaggctcactctagaatatttgagtctgtaaccttgcctagtaatcgaacttctgctggaacatcttcttcaggagtatccaatagaaaaaggaaaagaaaagtgtttagtcctattcgatctgaaccaagatctccttctcactccatgaggacaagaagtggaaggcttagtagttctgagctctcacctctcacccccccgtcttctgtctcttcctcgttaagcatttctgttagtcctcttgccactagtgccttaaacccaacttttacttttccttctcattccctgactcagtctggggaatctgcagagaaaaatcagagaccaaggaagcagactagtgctccggcagagccattttcatcaagtagtcctactcctctcttcccttggtttaccccaggctctcagactgaaagagggagaaataaagacaaggcccccgaggagctgtccaaagatcgagatgctgacaagagcgtggagaaggacaagagtagagagagagaccgggagagagaaaaggagaataagcgggagtcaaggaaagagaaaaggaaaaagggatcagaaattcagagtagttctgctttgtatcctgtgggtagggtttccaaagagaaggttgttggtgaagatgttgccacttcatcttctgccaaaaaagcaacagggcggaagaagtcttcatcacatgattctgggactgatattacttctgtgactcttggggatacaacagctgtcaaaaccaaaatacttataaagaaagggagaggaaatctggaaaaaaccaacttggacctcggcccaactgccccatccctggagaaggagaaaaccctctgcctttccactccttcatctagcactgttaaacattccacttcctccataggctccatgttggctcaggcagacaagcttccaatgactgacaagagggttgccagcctcctaaaaaaggccaaagctcagctctgcaagattgagaagagtaagagtcttaaacaaaccgaccagcccaaagcacagggtcaagaaagtgactcatcagagacctctgtgcgaggaccccggattaaacatgtctgcagaagagcagctgttgcccttggccgaaaacgagctgtgtttcctgatgacatgcccaccctgagtgccttaccatgggaagaacgagaaaagattttgtcttccatggggaatgatgacaagtcatcaattgctggctcagaagatgctgaacctcttgctccacccatcaaaccaattaaacctgtcactagaaacaaggcaccccaggaacctccagtaaagaaaggacgtcgatcgaggcggtgtgggcagtgtcccggctgccaggtgcctgaggactgtggtgtttgtactaattgcttagataagcccaagtttggtggtcgcaatataaagaagcagtgctgcaagatgagaaaatgtcagaatctacaatggatgccttccaaagcctacctgcagaagcaagctaaagctgtgaaaaagaaagagaaaaagtctaagaccagtgaaaagaaagacagcaaagagagcagtgttgtgaagaacgtggtggactctagtcagaaacctaccccatcagcaagagaggatcctgccccaaagaaaagcagtagtgagcctcctccacgaaagcccgtcgaggaaaagagtgaagaagggaatgtctcggcccctgggcctgaatccaaacaggccaccactccagcttccaggaagtcaagcaagcaggtctcccagccagcactggtcatcccgcctcagccacctactacaggaccgccaagaaaagaagttcccaaaaccactcctagtgagcccaagaaaaagcagcctccaccaccagaatcaggtccagagcagagcaaacagaaaaaagtggctccccgcccaagtatccctgtaaaacaaaaaccaaaagaaaaggaaaaaccacctccggtcaataagcaggagaatgcaggcactttgaacatcctcagcactctctccaatggcaatagttctaagcaaaaaattccagcagatggagtccacaggatcagagtggactttaagtttgtgtattgccaagtctgttgtgagcccttccacaagttttgtttagaggagaacgagcgccctctggaggaccagctggaaaattggtgttgtcgtcgttgcaaattctgtcacgtttgtggaaggcaacatcaggctacaaagcagctgctggagtgtaataagtgccgaaacagctatcaccctgagtgcctgggaccaaactaccccaccaaacccacaaagaagaagaaagtctggatctgtaccaagtgtgttcgctgtaagagctgtggatccacaactccaggcaaagggtgggatgcacagtggtctcatgatttctcactgtgtcatgattgcgccaagctctttgctaaaggaaacttctgccctctctgtgacaaatgttatgatgatgatgactatgagagtaagatgatgcaatgtggaaagtgtgatcgctgggtccattccaaatgtgagaatctttcagatgagatgtatgagattctatctaatctgccagaaagtgtggcctacacttgtgtgaactgtactgagcggcaccctgcagagtggcgactggcccttgaaaaagagctgcagatttctctgaagcaagttctgacagctttgttgaattctcggactaccagccatttgctacgctaccggcaggctgccaagcctccagacttaaatcccgagacagaggagagtataccttcccgcagctcccccgaaggacctgatccaccagttcttactgaggtcagcaaacaggatgatcagcagcctttagatctagaaggagtcaagaggaagatggaccaagggaattacacatctgtgttggagttcagtgatgatattgtgaagatcattcaagcagccattaattcagatggaggacagccagaaattaaaaaagccaacagcatggtcaagtccttcttcattcggcaaatggaacgtgtttttccatggttcagtgtcaaaaagtccaggttttgggagccaaataaagtatcaagcaacagtgggatgttaccaaacgcagtgcttccaccttcacttgaccataattatgctcagtggcaggagcgagaggaaaacagccacactgagcagcctcctttaatgaagaaaatcattccagctcccaaacccaaaggtcctggagaaccagactcaccaactcctctgcatcctcctacaccaccaattttgagtactgataggagtcgagaagacagtccagagctgaacccacccccaggcatagaagacaatagacagtgtgcgttatgtttgacttatggtgatgacagtgctaatgatgctggtcgtttactatatattggccaaaatgagtggacacatgtaaattgtgctttgtggtcagcggaagtgtttgaagatgatgacggatcactaaagaatgtgcatatggctgtgatcaggggcaagcagctgagatgtgaattctgccaaaagccaggagccaccgtgggttgctgtctcacatcctgcaccagcaactatcacttcatgtgttcccgagccaagaactgtgtctttctggatgataaaaaagtatattgccaacgacatcgggatttgatcaaaggcgaagtggttcctgagaatggatttgaagttttcagaagagtgtttgtggactttgaaggaatcagcttgagaaggaagtttctcaatggcttggaaccagaaaatatccacatgatgattgggtctatgacaatcgactgcttaggaattctaaatgatctctccgactgtgaagataagctctttcctattggatatcagtgttccagggtatactggagcaccacagatgctcgcaagcgctgtgtatatacatgcaagatagtggagtgccgtcctccagtcgtagagccggatatcaacagcactgttgaacatgatgaaaacaggaccattgcccatagtccaacatcttttacagaaagttcatcaaaagagagtcaaaacacagctgaaattataagtcctccatcaccagaccgacctcctcattcacaaacctctggctcctgttattatcatgtcatctcaaaggtccccaggattcgaacacccagttattctccaacacagagatcccctggctgtcgaccgttgccttctgcaggaagtcctaccccaaccactcatgaaatagtcacagtaggtgatcctttactctcctctggacttcgaagcattggctccaggcgtcacagtacctcttccttatcaccccagcggtccaaactccggataatgtctccaatgagaactgggaatacttactctaggaataatgtttcctcagtctccaccaccgggaccgctactgatcttgaatcaagtgccaaagtagttgatcatgtcttagggccactgaattcaagtactagtttagggcaaaacacttccacctcttcaaatttgcaaaggacagtggttactgtaggcaataaaaacagtcacttggatggatcttcatcttcagaaatgaagcagtccagtgcttcagacttggtgtccaagagctcctctttaaagggagagaagaccaaagtgctgagttccaagagctcagagggatctgcacataatgtggcttaccctggaattcctaaactggccccacaggttcataacacaacatctagagaactgaatgttagtaaaatcggctcctttgctgaaccctcttcagtgtcgttttcttctaaagaggccctctccttcccacacctccatttgagagggcaaaggaatgatcgagaccaacacacagattctacccaatcagcaaactcctctccagatgaagatactgaagtcaaaaccttgaagctatctggaatgagcaacagatcatccattatcaacgaacatatgggatctagttccagagataggagacagaaagggaaaaaatcctgtaaagaaactttcaaagaaaagcattccagtaaatcttttttggaacctggtcaggtgacaactggtgaggaaggaaacttgaagccagagtttatggatgaggttttgactcctgagtatatgggccaacgaccatgtaacaatgtttcttctgataagattggtgataaaggcctttctatgccaggagtccccaaagctccacccatgcaagtagaaggatctgccaaggaattacaggcaccacggaaacgcacagtcaaagtgacactgacacctctaaaaatggaaaatgagagtcaatccaaaaatgccctgaaagaaagtagtcctgcttcccctttgcaaatagagtcaacatctcccacagaaccaatttcagcctctgaaaatccaggagatggtccagtggcccaaccaagccccaataatacctcatgccaggattctcaaagtaacaactatcagaatcttccagtacaggacagaaacctaatgcttccagatggccccaaacctcaggaggatggctcttttaaaaggaggtatccccgtcgcagtgcccgtgcacgttctaacatgttttttgggcttaccccactctatggagtaagatcctatggtgaagaagacattccattctacagcagctcaactgggaagaagcgaggcaagagatcagctgaaggacaggtggatggggccgatgacttaagcacttcagatgaagacgacttatactattacaacttcactagaacagtgatttcttcaggtggagaggaacgactggcatcccataatttatttcgggaggaggaacagtgtgatcttccaaaaatctcacagttggatggtgttgatgatgggacagagagtgatactagtgtcacagccacaacaaggaaaagcagccagattccaaaaagaaatggtaaagaaaatggaacagagaacttaaagattgatagacctgaagatgctggggagaaagaacatgtcactaagagttctgttggccacaaaaatgagccaaagatggataactgccattctgtaagcagagttaaaacacagggacaagattccttggaagctcagctcagctcattggagtcaagccgcagagtccacacaagtaccccctccgacaaaaatttactggacacctataatactgagctcctgaaatcagattcagacaataacaacagtgatgactgtgggaatatcctgccttcagacattatggactttgtactaaagaatactccatccatgcaggctttgggtgagagcccagagtcatcttcatcagaactcctgaatcttggtgaaggattgggtcttgacagtaatcgtgaaaaagacatgggtctttttgaagtattttctcagcagctgcctacaacagaacctgtggatagtagtgtctcttcctctatctcagcagaggaacagtttgagttgcctctagagctaccatctgatctgtctgtcttgaccacccggagtcccactgtccccagccagaatcccagtagactagctgttatctcagactcaggggagaagagagtaaccatcacagaaaaatctgtagcctcctctgaaagtgacccagcactgctgagcccaggagtagatccaactcctgaaggccacatgactcctgatcattttatccaaggacacatggatgcagaccacatctctagccctccttgtggttcagtagagcaaggtcatggcaacaatcaggatttaactaggaacagtagcacccctggccttcaggtacctgtttccccaactgttcccatccagaaccagaagtatgtgcccaattctactgatagtcctggcccgtctcagatttccaatgcagctgtccagaccactccaccccacctgaagccagccactgagaaactcatagttgttaaccagaacatgcagccactttatgttctccaaactcttccaaatggagtgacccaaaaaatccaattgacctcttctgttagttctacacccagtgtgatggagacaaatacttcagtattgggacccatgggaggtggtctcacccttaccacaggactaaatccaagcttgccaacttctcaatctttgttcccttctgctagcaaaggattgctacccatgtctcatcaccagcacttacattccttccctgcagctactcaaagtagtttcccaccaaacatcagcaatcctccttcaggcctgcttattggggttcagcctcctccggatccccaacttttggtttcagaatccagccagaggacagacctcagtaccacagtagccactccatcctctggactcaagaaaagacccatatctcgtctacagacccgaaagaataaaaaacttgctccctctagtaccccttcaaacattgccccttctgatgtggtttctaatatgacattgattaacttcacaccctcccagcttcctaatcatccaagtctgttagatttggggtcacttaatacttcatctcaccgaactgtccccaacatcataaaaagatctaaatctagcatcatgtattttgaaccggcacccctgttaccacagagtgtgggaggaactgctgccacagcggcaggcacatcaacaataagccaggatactagccacctcacatcagggtctgtgtctggcttggcatccagttcctctgtcttgaatgttgtatccatgcaaactaccacaacccctacaagtagtgcgtcagttccaggacacgtcaccttaaccaacccaaggttgcttggtaccccagatattggctcaataagcaatcttttaatcaaagctagccagcagagcctggggattcaggaccagcctgtggctttaccgccaagttcaggaatgtttccacaactggggacatcacagaccccctctactgctgcaataacagcggcatctagcatctgtgtgctcccctccactcagactacgggcataacagccgcttcaccttctggggaagcagacgaacactatcagcttcagcatgtgaaccagctccttgccagcaaaactgggattcattcttcccagcgtgatcttgattctgcttcagggccccaggtatccaactttacccagacggtagacgctcctaatagcatgggactggagcagaacaaggctttatcctcagctgtgcaagccagccccacctctcctgggggttctccatcctctccatcttctggacagcggtcagcaagcccttcagtgccgggtcccactaaacccaaaccaaaaaccaaacggtttcagctgcctctagacaaagggaatggcaagaagcacaaagtttcccatttgcggaccagttcttctgaagcacacattccagaccaagaaacgacatccctgacctcaggcacagggactccaggagcagaggctgagcagcaggatacagctagcgtggagcagtcctcccagaaggagtgtgggcaacctgcagggcaagtcgctgttcttccggaagttcaggtgacccaaaatccagcaaatgaacaagaaagtgcagaacctaaaacagtggaagaagaggaaagtaatttcagctccccactgatgctttggcttcagcaagaacaaaagcggaaggaaagcattactgagaaaaaacccaagaaaggacttgtttttgaaatttccagtgatgatggctttcagatctgtgcagaaagtattgaagatgcctggaagtcattgacagataaagtccaggaagctcgatcaaatgcccgcctaaagcagctctcatttgcaggtgttaacggtttgaggatgctggggattctccatgatgcagttgtgttcctcattgagcagctgtctggtgccaagcactgtcgaaattacaaattccgtttccacaagccagaggaggccaatgaaccccccttgaaccctcacggctcagccagggctgaagtccacctcaggaagtcagcatttgacatgtttaacttcctggcttctaaacatcgtcagcctcctgaatacaaccccaatgatgaagaagaggaggaggtacagctgaagtcagctcggagggcaactagcatggatctgccaatgcccatgcgcttccggcacttaaaaaagacttctaaggaggcagttggtgtctacaggtctcccatccatggccggggtcttttctgtaagagaaacattgatgcaggtgagatggtgattgagtatgccggcaacgtcatccgctccatccagactgacaagcgggaaaagtattacgacagcaagggcattggttgctatatgttccgaattgatgactcagaggtagtggatgccaccatgcatggaaatgctgcacgcttcatcaatcactcgtgtgagcctaactgctattctcgggtcatcaatattgatgggcagaagcacattgtcatctttgccatgcgtaagatctaccgaggagaggaactcacttacgactataagttccccattgaggatgccagcaacaagctgccctgcaactgtggcgccaagaaatgccggaagttcctaaactaaagctgctcttctcccccagtgttggagtgcaaggaggcggggccatccaaagcaacgctgaaggccttttccagcagctgggagctcccggattgcgtggcacagctgaggggcctctgtgatggctgagctctcttatgtcctatactcacatcagacatgtgatcatagtcccagagacagagttgaggtctcgaagaaaagatccatgatcggctttctcctggggcccctccaattgtttactgttagaaagtgggaatggggtccctagcagacttgcctggaaggagcctattatagagggttggttatgttgggagattgggcctgaatttctccacagaaataagttgccatcctcaggttggccctttcccaagcactgtaagtgagtgggtcaggcaaagccccaaatggagggttggttagattcctgacagtttgccagccaggccccacctacagcgtctgtcgaacaaacagaggtctggtggttttccctactatcctcccactcgagagttcacttctggttgggagacaggattcctagcacctccggtgtcaaaaggctgtcatggggttgtgccaattaattaccaaacattgagcctgcaggctttgagtgggagtgttgcccccaggagccttatctcagccaattacctttcttgacagtaggagcggcttccctctcccattccctcttcactcccttttcttcctttcccctgtcttcatgccactgctttcccatgcttctttcgggttgtaggggagactgactgcctgctcaaggacactccctgctgggcataggatgtgcctgcaaaaagttccctgagcctgtaagcactccaggtggggaagtggacaggagccattggtcataaccagacagaatttggaaacattttcataaagctccatggagagttttaaagaaacatatgtagcatgattttgtaggagaggaaaaagattatttaaataggatttaaatcatgcaacaacgagagtatcacagccaggatgacccttgggtcccattcctaagacatggttactttattttccccttgttaagacataggaagacttaatttttaaacggtcagtgtccagttgaaggcagaacactaatcagatttcaaggcccacaacttggggactagaccaccttatgttgagggaactctgccacctgcgtgcaacccacagctaaagtaaattcaatgacactactgccctgattactccttaggatgtggtcaaaacagcatcaaatgtttcttctcttcctttccccaagacagagtcctgaacctgttaaattaagtcattggattttactctgttctgtttacagtttactatttaaggttttataaatgtaaatatattttgtatatttttctatgagaagcacttcatagggagaagcacttatgacaaggctattttttaaaccgcggtattatcctaatttaaaagaagatcggtttttaataattttttattttcataggatgaagttagagaaaatattcagctgtacacacaaagtctggtttttcctgcccaacttccccctggaaggtgtactttttgttgtttaatgtgtagcttgtttgtgccctgttgacataaatgtttcctgggtttgctctttgacaataaatggagaaggaaggtcacccaactccattgggccactcccctccttcccctattgaagctcctcaaaaggctacagtaatatcttgatacaacagattctcttctttcccgcctctctcctttccggcgcaacttccagagtggtgggagacggcaatctttacatttccctcatctttcttacttcagagttagcaaacaacaagttgaatggcaacttgacatttttgcatcaccatctgcctcataggccactctttcctttccctctgcccaccaagtcctcatatctgcagagaacccattgatcaccttgtgccctcttttggggcagcctgttgaaactgaagcacagtctgaccactcacgataaagcagatttttctctgcctctgccacaaggtttcagagtagtgtagtccaagtagagggtggggcacccttttctcgccgcaagaagcccattcctatggaagtctagcaaagcaatacgactcagcccagcactctctgccccaggactcatggctctgctgtgccttccatcctgggctcccttctctcctgtgaccttaagaactttgtctggtggctttgctggaacattgtcactgttttcactgtcatgcagggagcccagcactgtggccaggatggcagagacttccttgtcatcatggagaagtgccagcaggggactgggaaaagcactctacccagacctcacctcccttcctccttttgcccatgaacaagatgcagtggccctaggggttccactagtgtctgctttcctttattattgcactgtgtgaggtttttttgtaaatccttgtattcc

SEQ ID NO: 160467 - DNA, 14244 bp, Artificial Sequence
  derived and/or modified sequence
gcggcggcggcggcgggaagcagcggggctggggttccagggggagcggccgccgcctcagcagcctcctcgtcgtccgcctcgtcttcgtcttcgtcatcgtcctcagcctcttcagggccggccctgctccgggtgggcccgggcttcgacgcggcgctgcaggtctcggccgccatcggcaccaacctgcgccggttccgggccgtgtttggggagagcggcgggggaggcggcagcggagaggatgagcaattcttaggttttggctcagatgaagaagtcagagtgcgaagtcccacaaggtctccttcagttaaaactagtcctcgaaaacctcgtgggagacctagaagtggctctgaccgaaattcagctatcctctcagatccatctgtgttttcccctctaaataaatcagagaccaaatctggagataagatcaagaagaaagattctaaaagtatagaaaagaagagaggaagacctcccaccttccctggagtaaaaatcaaaataacacatggaaaggacatttcagagttaccaaagggaaacaaagaagatagcctgaaaaaaattaaaaggacaccttctgctacgtttcagcaagccacaaagattaaaaaattaagagcaggtaaactctctcctctcaagtctaagtttaagacagggaagcttcaaataggaaggaagggggtacaaattgtacgacggagaggaaggcctccatcaacagaaaggataaagaccccttcgggtctcctcattaattctgaactggaaaagccccagaaagtccggaaagacaaggaaggaacacctccacttacaaaagaagataagacagttgtcagacaaagccctcgaaggattaagccagttaggattattccttcttcaaaaaggacagatgcaaccattgctaagcaactcttacagagggcaaaaaagggggctcaaaagaaaattgaaaaagaagcagctcagctgcagggaagaaaggtgaagacacaggtcaaaaatattcgacagttcatcatgcctgttgtcagtgctatctcctcgcggatcattaagacccctcggcggtttatagaggatgaggattatgaccctccaattaaaattgcccgattagagtctacaccgaatagtagattcagtgccccgtcctgtggatcttctgaaaaatcaagtgcagcttctcagcactcctctcaaatgtcttcagactcctctcgatctagtagccccagtgttgatacctccacagactctcaggcttctgaggagattcaggtacttcctgaggagcggagcgatacccctgaagttcatcctccactgcccatttcccagtccccagaaaatgagagtaatgataggagaagcagaaggtattcagtgtcggagagaagttttggatctagaacgacgaaaaaattatcaactctacaaagtgccccccagcagcagacctcctcgtctccacctccacctctgctgactccaccgccaccactgcagccagcctccagtatctctgaccacacaccttggcttatgcctccaacaatccccttagcatcaccatttttgcctgcttccactgctcctatgcaagggaagcgaaaatctattttgcgagaaccgacatttaggtggacttctttaaagcattctaggtcagagccacaatacttttcctcagcaaagtatgccaaagaaggtcttattcgcaaaccaatatttgataatttccgaccccctccactaactcccgaggacgttggctttgcatctggtttttctgcatctggtaccgctgcttcagcccgattgttttcgccactccattctggaacaaggtttgatatgcacaaaaggagccctcttctgagagctccaagatttactccaagtgaggctcactctagaatatttgagtctgtaaccttgcctagtaatcgaacttctgctggaacatcttcttcaggagtatccaatagaaaaaggaaaagaaaagtgtttagtcctattcgatctgaaccaagatctccttctcactccatgaggacaagaagtggaaggcttagtagttctgagctctcacctctcacccccccgtcttctgtctcttcctcgttaagcatttctgttagtcctcttgccactagtgccttaaacccaacttttacttttccttctcattccctgactcagtctggggaatctgcagagaaaaatcagagaccaaggaagcagactagtgctccggcagagccattttcatcaagtagtcctactcctctcttcccttggtttaccccaggctctcagactgaaagagggagaaataaagacaaggcccccgaggagctgtccaaagatcgagatgctgacaagagcgtggagaaggacaagagtagagagagagaccgggagagagaaaaggagaataagcgggagtcaaggaaagagaaaaggaaaaagggatcagaaattcagagtagttctgctttgtatcctgtgggtagggtttccaaagagaaggttgttggtgaagatgttgccacttcatcttctgccaaaaaagcaacagggcggaagaagtcttcatcacatgattctgggactgatattacttctgtgactcttggggatacaacagctgtcaaaaccaaaatacttataaagaaagggagaggaaatctggaaaaaaccaacttggacctcggcccaactgccccatccctggagaaggagaaaaccctctgcctttccactccttcatctagcactgttaaacattccacttcctccataggctccatgttggctcaggcagacaagcttccaatgactgacaagagggttgccagcctcctaaaaaaggccaaagctcagctctgcaagattgagaagagtaagagtcttaaacaaaccgaccagcccaaagcacagggtcaagaaagtgactcatcagagacctctgtgcgaggaccccggattaaacatgtctgcagaagagcagctgttgcccttggccgaaaacgagctgtgtttcctgatgacatgcccaccctgagtgccttaccatggaacgagaaaagattttgtcttccatggggaatgatgacaagtcatcaattgctggctcagaagatgctgaacctcttgctccacccatcaaaccaattaaacctgtcactagaaacaaggcaccccaggaacctccagtaaagaaaggacgtcgatcgaggcggtgtgggcagtgtcccggctgccaggtgcctgaggactgtggtgtttgtactaattgcttagataagcccaagtttggtggtcgcaatataaagaagcagtgctgcaagatgagaaaatgtcagaatctacaatggatgccttccaaagcctacctgcagaagcaagctaaagctgtgaaaaagaaagagaaaaagtctaagaccagtgaaaagaaagacagcaaagagagcagtgttgtgaagaacgtggtggactctagtcagaaacctaccccatcagcaagagaggatcctgccccaaagaaaagcagtagtgagcctcctccacgaaagcccgtcgaggaaaagagtgaagaagggaatgtctcggcccctgggcctgaatccaaacaggccaccactccagcttccaggaagtcaagcaagcaggtctcccagccagcactggtcatcccgcctcagccacctactacaggaccgccaagaaaagaagttcccaaaaccactcctagtgagcccaagaaaaagcagcctccaccaccagaatcaggtccagagcagagcaaacagaaaaaagtggctccccgcccaagtatccctgtaaaacaaaaaccaaaagaaaaggaaaaaccacctccggtcaataagcaggagaatgcaggcactttgaacatcctcagcactctctccaatggcaatagttctaagcaaaaaattccagcagatggagtccacaggatcagagtggactttaaggaggattgtgaagcagaaaatgtgtgggagatgggaggcttaggaatcttgacttctgttcctataacacccagggtggtttgctttctctgtgccagtagtgggcatgtagagtttgtgtattgccaagtctgttgtgagcccttccacaagttttgtttagaggagaacgagcgccctctggaggaccagctggaaaattggtgttgtcgtcgttgcaaattctgtcacgtttgtggaaggcaacatcaggctacaaagcagctgctggagtgtaataagtgccgaaacagctatcaccctgagtgcctgggaccaaactaccccaccaaacccacaaagaagaagaaagtctggatctgtaccaagtgtgttcgctgtaagagctgtggatccacaactccaggcaaagggtgggatgcacagtggtctcatgatttctcactgtgtcatgattgcgccaagctctttgctaaaggaaacttctgccctctctgtgacaaatgttatgatgatgatgactatgagagtaagatgatgcaatgtggaaagtgtgatcgctgggtccattccaaatgtgagaatctttcagatgagatgtatgagattctatctaatctgccagaaagtgtggcctacacttgtgtgaactgtactgagcggcaccctgcagagtggcgactggcccttgaaaaagagctgcagatttctctgaagcaagttctgacagctttgttgaattctcggactaccagccatttgctacgctaccggcaggctgccaagcctccagacttaaatcccgagacagaggagagtataccttcccgcagctcccccgaaggacctgatccaccagttcttactgaggtcagcaaacaggatgatcagcagcctttagatctagaaggagtcaagaggaagatggaccaagggaattacacatctgtgttggagttcagtgatgatattgtgaagatcattcaagcagccattaattcagatggaggacagccagaaattaaaaaagccaacagcatggtcaagtccttcttcattcggcaaatggaacgtgtttttccatggttcagtgtcaaaaagtccaggttttgggagccaaataaagtatcaagcaacagtgggatgttaccaaacgcagtgcttccaccttcacttgaccataattatgctcagtggcaggagcgagaggaaaacagccacactgagcagcctcctttaatgaagaaaatcattccagctcccaaacccaaaggtcctggagaaccagactcaccaactcctctgcatcctcctacaccaccaattttgagtactgataggagtcgagaagacagtccagagctgaacccacccccaggcatagaagacaatagacagtgtgcgttatgtttgacttatggtgatgacagtgctaatgatgctggtcgtttactatatattggccaaaatgagtggacacatgtaaattgtgctttgtggtcagcggaagtgtttgaagatgatgacggatcactaaagaatgtgcatatggctgtgatcaggggcaagcagctgagatgtgaattctgccaaaagccaggagccaccgtgggttgctgtctcacatcctgcaccagcaactatcacttcatgtgttcccgagccaagaactgtgtctttctggatgataaaaaagtatattgccaacgacatcgggatttgatcaaaggcgaagtggttcctgagaatggatttgaagttttcagaagagtgtttgtggactttgaaggaatcagcttgagaaggaagtttctcaatggcttggaaccagaaaatatccacatgatgattgggtctatgacaatcgactgcttaggaattctaaatgatctctccgactgtgaagataagctctttcctattggatatcagtgttccagggtatactggagcaccacagatgctcgcaagcgctgtgtatatacatgcaagatagtggagtgccgtcctccagtcgtagagccggatatcaacagcactgttgaacatgatgaaaacaggaccattgcccatagtccaacatcttttacagaaagttcatcaaaagagagtcaaaacacagctgaaattataagtcctccatcaccagaccgacctcctcattcacaaacctctggctcctgttattatcatgtcatctcaaaggtccccaggattcgaacacccagttattctccaacacagagatcccctggctgtcgaccgttgccttctgcaggaagtcctaccccaaccactcatgaaatagtcacagtaggtgatcctttactctcctctggacttcgaagcattggctccaggcgtcacagtacctcttccttatcaccccagcggtccaaactccggataatgtctccaatgagaactgggaatacttactctaggaataatgtttcctcagtctccaccaccgggaccgctactgatcttgaatcaagtgccaaagtagttgatcatgtcttagggccactgaattcaagtactagtttagggcaaaacacttccacctcttcaaatttgcaaaggacagtggttactgtaggcaataaaaacagtcacttggatggatcttcatcttcagaaatgaagcagtccagtgcttcagacttggtgtccaagagctcctctttaaagggagagaagaccaaagtgctgagttccaagagctcagagggatctgcacataatgtggcttaccctggaattcctaaactggccccacaggttcataacacaacatctagagaactgaatgttagtaaaatcggctcctttgctgaaccctcttcagtgtcgttttcttctaaagaggccctctccttcccacacctccatttgagagggcaaaggaatgatcgagaccaacacacagattctacccaatcagcaaactcctctccagatgaagatactgaagtcaaaaccttgaagctatctggaatgagcaacagatcatccattatcaacgaacatatgggatctagttccagagataggagacagaaagggaaaaaatcctgtaaagaaactttcaaagaaaagcattccagtaaatcttttttggaacctggtcaggtgacaactggtgaggaaggaaacttgaagccagagtttatggatgaggttttgactcctgagtatatgggccaacgaccatgtaacaatgtttcttctgataagattggtgataaaggcctttctatgccaggagtccccaaagctccacccatgcaagtagaaggatctgccaaggaattacaggcaccacggaaacgcacagtcaaagtgacactgacacctctaaaaatggaaaatgagagtcaatccaaaaatgccctgaaagaaagtagtcctgcttcccctttgcaaatagagtcaacatctcccacagaaccaatttcagcctctgaaaatccaggagatggtccagtggcccaaccaagccccaataatacctcatgccaggattctcaaagtaacaactatcagaatcttccagtacaggacagaaacctaatgcttccagatggccccaaacctcaggaggatggctcttttaaaaggaggtatccccgtcgcagtgcccgtgcacgttctaacatgttttttgggcttaccccactctatggagtaagatcctatggtgaagaagacattccattctacagcagctcaactgggaagaagcgaggcaagagatcagctgaaggacaggtggatggggccgatgacttaagcacttcagatgaagacgacttatactattacaacttcactagaacagtgatttcttcaggtggagaggaacgactggcatcccataatttatttcgggaggaggaacagtgtgatcttccaaaaatctcacagttggatggtgttgatgatgggacagagagtgatactagtgtcacagccacaacaaggaaaagcagccagattccaaaaagaaatggtaaagaaaatggaacagagaacttaaagattgatagacctgaagatgctggggagaaagaacatgtcactaagagttctgttggccacaaaaatgagccaaagatggataactgccattctgtaagcagagttaaaacacagggacaagattccttggaagctcagctcagctcattggagtcaagccgcagagtccacacaagtaccccctccgacaaaaatttactggacacctataatactgagctcctgaaatcagattcagacaataacaacagtgatgactgtgggaatatcctgccttcagacattatggactttgtactaaagaatactccatccatgcaggctttgggtgagagcccagagtcatcttcatcagaactcctgaatcttggtgaaggattgggtcttgacagtaatcgtgaaaaagacatgggtctttttgaagtattttctcagcagctgcctacaacagaacctgtggatagtagtgtctcttcctctatctcagcagaggaacagtttgagttgcctctagagctaccatctgatctgtctgtcttgaccacccggagtcccactgtccccagccagaatcccagtagactagctgttatctcagactcaggggagaagagagtaaccatcacagaaaaatctgtagcctcctctgaaagtgacccagcactgctgagcccaggagtagatccaactcctgaaggccacatgactcctgatcattttatccaaggacacatggatgcagaccacatctctagccctccttgtggttcagtagagcaaggtcatggcaacaatcaggatttaactaggaacagtagcacccctggccttcaggtacctgtttccccaactgttcccatccagaaccagaagtatgtgcccaattctactgatagtcctggcccgtctcagatttccaatgcagctgtccagaccactccaccccacctgaagccagccactgagaaactcatagttgttaaccagaacatgcagccactttatgttctccaaactcttccaaatggagtgacccaaaaaatccaattgacctcttctgttagttctacacccagtgtgatggagacaaatacttcagtattgggacccatgggaggtggtctcacccttaccacaggactaaatccaagcttgccaacttctcaatctttgttcccttctgctagcaaaggattgctacccatgtctcatcaccagcacttacattccttccctgcagctactcaaagtagtttcccaccaaacatcagcaatcctccttcaggcctgcttattggggttcagcctcctccggatccccaacttttggtttcagaatccagccagaggacagacctcagtaccacagtagccactccatcctctggactcaagaaaagacccatatctcgtctacagacccgaaagaataaaaaacttgctccctctagtaccccttcaaacattgccccttctgatgtggtttctaatatgacattgattaacttcacaccctcccagcttcctaatcatccaagtctgttagatttggggtcacttaatacttcatctcaccgaactgtccccaacatcataaaaagatctaaatctagcatcatgtattttgaaccggcacccctgttaccacagagtgtgggaggaactgctgccacagcggcaggcacatcaacaataagccaggatactagccacctcacatcagggtctgtgtctggcttggcatccagttcctctgtcttgaatgttgtatccatgcaaactaccacaacccctacaagtagtgcgtcagttccaggacacgtcaccttaaccaacccaaggttgcttggtaccccagatattggctcaataagcaatcttttaatcaaagctagccagcagagcctggggattcaggaccagcctgtggctttaccgccaagttcaggaatgtttccacaactggggacatcacagaccccctctactgctgcaataacagcggcatctagcatctgtgtgctcccctccactcagactacgggcataacagccgcttcaccttctggggaagcagacgaacactatcagcttcagcatgtgaaccagctccttgccagcaaaactgggattcattcttcccagcgtgatcttgattctgcttcagggccccaggtatccaactttacccagacggtagacgctcctaatagcatgggactggagcagaacaaggctttatcctcagctgtgcaagccagccccacctctcctgggggttctccatcctctccatcttctggacagcggtcagcaagcccttcagtgccgggtcccactaaacccaaaccaaaaaccaaacggtttcagctgcctctagacaaagggaatggcaagaagcacaaagtttcccatttgcggaccagttcttctgaagcacacattccagaccaagaaacgacatccctgacctcaggcacagggactccaggagcagaggctgagcagcaggatacagctagcgtggagcagtcctcccagaaggagtgtgggcaacctgcagggcaagtcgctgttcttccggaagttcaggtgacccaaaatccagcaaatgaacaagaaagtgcagaacctaaaacagtggaagaagaggaaagtaatttcagctccccactgatgctttggcttcagcaagaacaaaagcggaaggaaagcattactgagaaaaaacccaagaaaggacttgtttttgaaatttccagtgatgatggctttcagatctgtgcagaaagtattgaagatgcctggaagtcattgacagataaagtccaggaagctcgatcaaatgcccgcctaaagcagctctcatttgcaggtgttaacggtttgaggatgctggggattctccatgatgcagttgtgttcctcattgagcagctgtctggtgccaagcactgtcgaaattacaaattccgtttccacaagccagaggaggccaatgaaccccccttgaaccctcacggctcagccagggctgaagtccacctcaggaagtcagcatttgacatgtttaacttcctggcttctaaacatcgtcagcctcctgaatacaaccccaatgatgaagaagaggaggaggtacagctgaagtcagctcggagggcaactagcatggatctgccaatgcccatgcgcttccggcacttaaaaaagacttctaaggaggcagttggtgtctacaggtctcccatccatggccggggtcttttctgtaagagaaacattgatgcaggtgagatggtgattgagtatgccggcaacgtcatccgctccatccagactgacaagcgggaaaagtattacgacagcaagggcattggttgctatatgttccgaattgatgactcagaggtagtggatgccaccatgcatggaaatgctgcacgcttcatcaatcactcgtgtgagcctaactgctattctcgggtcatcaatattgatgggcagaagcacattgtcatctttgccatgcgtaagatctaccgaggagaggaactcacttacgactataagttccccattgaggatgccagcaacaagctgccctgcaactgtggcgccaagaaatgccggaagttcctaaactaaagctgctcttctcccccagtgttggagtgcaaggaggcggggccatccaaagcaacgctgaaggccttttccagcagctgggagctcccggattgcgtggcacagctgaggggcctctgtgatggctgagctctcttatgtcctatactcacatcagacatgtgatcatagtcccagagacagagttgaggtctcgaagaaaagatccatgatcggctttctcctggggcccctccaattgtttactgttagaaagtgggaatggggtccctagcagacttgcctggaaggagcctattatagagggttggttatgttgggagattgggcctgaatttctccacagaaataagttgccatcctcaggttggccctttcccaagcactgtaagtgagtgggtcaggcaaagccccaaatggagggttggttagattcctgacagtttgccagccaggccccacctacagcgtctgtcgaacaaacagaggtctggtggttttccctactatcctcccactcgagagttcacttctggttgggagacaggattcctagcacctccggtgtcaaaaggctgtcatggggttgtgccaattaattaccaaacattgagcctgcaggctttgagtgggagtgttgcccccaggagccttatctcagccaattacctttcttgacagtaggagcggcttccctctcccattccctcttcactcccttttcttcctttcccctgtcttcatgccactgctttcccatgcttctttcgggttgtaggggagactgactgcctgctcaaggacactccctgctgggcataggatgtgcctgcaaaaagttccctgagcctgtaagcactccaggtggggaagtggacaggagccattggtcataaccagacagaatttggaaacattttcataaagctccatggagagttttaaagaaacatatgtagcatgattttgtaggagaggaaaaagattatttaaataggatttaaatcatgcaacaacgagagtatcacagccaggatgacccttgggtcccattcctaagacatggttactttattttccccttgttaagacataggaagacttaatttttaaacggtcagtgtccagttgaaggcagaacactaatcagatttcaaggcccacaacttggggactagaccaccttatgttgagggaactctgccacctgcgtgcaacccacagctaaagtaaattcaatgacactactgccctgattactccttaggatgtggtcaaaacagcatcaaatgtttcttctcttcctttccccaagacagagtcctgaacctgttaaattaagtcattggattttactctgttctgtttacagtttactatttaaggttttataaatgtaaatatattttgtatatttttctatgagaagcacttcatagggagaagcacttatgacaaggctattttttaaaccgcggtattatcctaatttaaaagaagatcggtttttaataattttttattttcataggatgaagttagagaaaatattcagctgtacacacaaagtctggtttttcctgcccaacttccccctggaaggtgtactttttgttgtttaatgtgtagcttgtttgtgccctgttgacataaatgtttcctgggtttgctctttgacaataaatggagaaggaaggtcacccaactccattgggccactcccctccttcccctattgaagctcctcaaaaggctacagtaatatcttgatacaacagattctcttctttcccgcctctctcctttccggcgcaacttccagagtggtgggagacggcaatctttacatttccctcatctttcttacttcagagttagcaaacaacaagttgaatggcaacttgacatttttgcatcaccatctgcctcataggccactctttcctttccctctgcccaccaagtcctcatatctgcagagaacccattgatcaccttgtgccctcttttggggcagcctgttgaaactgaagcacagtctgaccactcacgataaagcagatttttctctgcctctgccacaaggtttcagagtagtgtagtccaagtagagggtggggcacccttttctcgccgcaagaagcccattcctatggaagtctagcaaagcaatacgactcagcccagcactctctgccccaggactcatggctctgctgtgccttccatcctgggctcccttctctcctgtgaccttaagaactttgtctggtggctttgctggaacattgtcactgttttcactgtcatgcagggagcccagcactgtggccaggatggcagagacttccttgtcatcatggagaagtgccagcaggggactgggaaaagcactctacccagacctcacctcccttcctccttttgcccatgaacaagatgcagtggccctaggggttccactagtgtctgctttcctttattattgcactgtgtgaggtttttttgtaaatccttgtattcc

SEQ ID NO: 160468 - DNA, 13655 bp, Artificial Sequence
  derived and/or modified sequence
atggcgcacagctgtcggtggcgcttccccgcccgacccgggaccaccgggggcggcggcggcggggggcgccggggcctagggggcgccccgcggcaacgcgtcccggccctgctgcttccccccgggcccccggtcggcggtggcggccccggggcgcccccctcccccccggctgtggcggccgcggcggcggcggcgggaagcagcggggctggggttccagggggagcggccgccgcctcagcagcctcctcgtcgtccgcctcgtcttcgtcttcgtcatcgtcctcagcctcttcagggccggccctgctccgggtgggcccgggcttcgacgcggcgctgcaggtctcggccgccatcggcaccaacctgcgccggttccgggccgtgtttggggagagcggcgggggaggcggcagcggagaggatgagcaattcttaggttttggctcagatgaagaagtcagagtgcgaagtcccacaaggtctccttcagttaaaactagtcctcgaaaacctcgtgggagacctagaagtggctctgaccgaaattcagctatcctctcagatccatctgtgttttcccctctaaataaatcagagaccaaatctggagataagatcaagaagaaagattctaaaagtatagaaaagaagagaggaagacctcccaccttccctggagtaaaaatcaaaataacacatggaaaggacatttcagagttaccaaagggaaacaaagaagatagcctgaaaaaaattaaaaggacaccttctgctacgtttcagcaagccacaaagattaaaaaattaagagcaggtaaactctctcctctcaagtctaagtttaagacagggaagcttcaaataggaaggaagggggtacaaattgtacgacggagaggaaggcctccatcaacagaaaggataaagaccccttcgggtctcctcattaattctgaactggaaaagccccagaaagtccggaaagacaaggaaggaacacctccacttacaaaagaagataagacagttgtcagacaaagccctcgaaggattaagccagttaggattattccttcttcaaaaaggacagatgcaaccattgctaagcaactcttacagagggcaaaaaagggggctcaaaagaaaattgaaaaagaagcagctcagctgcagggaagaaaggtgaagacacaggtcaaaaatattcgacagttcatcatgcctgttgtcagtgctatctcctcgcggatcattaagacccctcggcggtttatagaggatgaggattatgaccctccaattaaaattgcccgattagagtctacaccgaatagtagattcagtgccccgtcctgtggatcttctgaaaaatcaagtgcagcttctcagcactcctctcaaatgtcttcagactcctctcgatctagtagccccagtgttgatacctccacagactctcaggcttctgaggagattcaggtacttcctgaggagcggagcgatacccctgaagttcatcctccactgcccatttcccagtccccagaaaatgagagtaatgataggagaagcagaaggtattcagtgtcggagagaagttttggatctagaacgacgaaaaaattatcaactctacaaagtgccccccagcagcagacctcctcgtctccacctccacctctgctgactccaccgccaccactgcagccagcctccagtatctctgaccacacaccttggcttatgcctccaacaatccccttagcatcaccatttttgcctgcttccactgctcctatgcaagggaagcgaaaatctattttgcgagaaccgacatttaggtggacttctttaaagcattctaggtcagagccacaatacttttcctcagcaaagtatgccaaagaaggtcttattcgcaaaccaatatttgataatttccgaccccctccactaactcccgaggacgttggctttgcatctggtttttctgcatctggtaccgctgcttcagcccgattgttttcgccactccattctggaacaaggtttgatatgcacaaaaggagccctcttctgagagctccaagatttactccaagtgaggctcactctagaatatttgagtctgtaaccttgcctagtaatcgaacttctgctggaacatcttcttcaggagtatccaatagaaaaaggaaaagaaaagtgtttagtcctattcgatctgaaccaagatctccttctcactccatgaggacaagaagtggaaggcttagtagttctgagctctcacctctcacccccccgtcttctgtctcttcctcgttaagcatttctgttagtcctcttgccactagtgccttaaacccaacttttacttttccttctcattccctgactcagtctggggaatctgcagagaaaaatcagagaccaaggaagcagactagtgctccggcagagccattttcatcaagtagtcctactcctctcttcccttggtttaccccaggctctcagactgaaagagggagaaataaagacaaggcccccgaggagctgtccaaagatcgagatgctgacaagagcgtggagaaggacaagagtagagagagagaccgggagagagaaaaggagaataagcgggagtcaaggaaagagaaaaggaaaaagggatcagaaattcagagtagttctgctttgtatcctgtgggtagggtttccaaagagaaggttgttggtgaagatgttgccacttcatcttctgccaaaaaagcaacagggcggaagaagtcttcatcacatgattctgggactgatattacttctgtgactcttggggatacaacagctgtcaaaaccaaaatacttataaagaaagggagaggaaatctggaaaaaaccaacttggacctcggcccaactgccccatccctggagaaggagaaaaccctctgcctttccactccttcatctagcactgttaaacattccacttcctccataggctccatgttggctcaggcagacaagcttccaatgactgacaagagggttgccagcctcctaaaaaaggccaaagctcagctctgcaagattgagaagagtaagagtcttaaacaaaccgaccagcccaaagcacagggtcaagaaagtgactcatcagagacctctgtgcgaggaccccggattaaacatgtctgcagaagagcagctgttgcccttggccgaaaacgagctgtgtttcctgatgacatgcccaccctgagtgccttaccatgggaagaacgagaaaagattttgtcttccatggggaatgatgacaagtcatcaattgctggctcagaagatgctgaacctcttgctccacccatcaaaccaattaaacctgtcactagaaacaaggcaccccaggaacctccagtaaagaaaggacgtcgatcgaggcggtgtgggcagtgtcccggctgccaggtgcctgaggactgtggtgtttgtactaattgcttagataagcccaagtttggtggtcgcaatataaagaagcagtgctgcaagatgagaaaatgtcagaatctacaatggatgccttccaaagcctacctgcagaagcaagctaaagctgtgaaaaagaaagagaaaaagtctaagaccagtgaaaagaaagacagcaaagagagcagtgttgtgaagaacgtggtggactctagtcagaaacctaccccatcagcaagagaggatcctgccccaaagaaaagcagtagtgagcctcctccacgaaagcccgtcgaggaaaagagtgaagaagggaatgtctcggcccctgggcctgaatccaaacaggccaccactccagcttccaggaagtcaagcaagcaggtctcccagccagcactggtcatcccgcctcagccacctactacaggaccgccaagaaaagaagttcccaaaaccactcctagtgagcccaagaaaaagcagcctccaccaccagaatcaggtccagagcagagcaaacagaaaaaagtggctccccgcccaagtatccctgtaaaacaaaaaccaaaagaaaaggaaaaaccacctccggtcaataagcaggagaatgcaggcactttgaacatcctcagcactctctccaatggcaatagttctaagcaaaaaattccagcagatggagtccacaggatcagagtggactttaaggaggattgtgaagcagaaaatgtgtgggagatgggaggcttaggaatcttgacttctgttcctataacacccagggtggtttgctttctctgtgccagtagtgggcatgtagagtttgtgtattgccaagtctgttgtgagcccttccacaagttttgtttagaggagaacgagcgccctctggaggaccagctggaaaattggtgttgtcgtcgttgcaaattctgtcacgtttgtggaaggcaacatcaggctacaaagcagctgctggagtgtaataagtgccgaaacagctatcaccctgagtgcctgggaccaaactaccccaccaaacccacaaagaagaagaaagtctggatctgtaccaagtgtgttcgctgtaagagctgtggatccacaactccaggcaaagggtgggatgcacagtggtctcatgatttctcactgtgtcatgattgcgccaagctctttgctaaaggaaacttctgccctctctgtgacaaatgttatgatgatgatgactatgagagtaagatgatgcaatgtggaaagtgtgatcgctgggtccattccaaatgtgagaatctttcagatgagatgtatgagattctatctaatctgccagaaagtgtggcctacacttgtgtgaactgtactgagcggcaccctgcagagtggcgactggcccttgaaaaagagctgcagatttctctgaagcaagttctgacagctttgttgaattctcggactaccagccatttgctacgctaccggcaggctgccaagcctccagacttaaatcccgagacagaggagagtataccttcccgcagctcccccgaaggacctgatccaccagttcttactgaggtcagcaaacaggatgatcagcagcctttagatctagaaggagtcaagaggaagatggaccaagggaattacacatctgtgttggagttcagtgatgatattgtgaagatcattcaagcagccattaattcagatggaggacagccagaaattaaaaaagccaacagcatggtcaagtccttcttcattcggcaaatggaacgtgtttttccatggttcagtgtcaaaaagtccaggttttgggagccaaataaagtatcaagcaacagtgggatgttaccaaacgcagtgcttccaccttcacttgaccataattatgctcagtggcaggagcgagaggaaaacagccacactgagcagcctcctttaatgaagaaaatcattccagctcccaaacccaaaggtcctggagaaccagactcaccaactcctctgcatcctcctacaccaccaattttgagtactgataggagtcgagaagacagtccagagctgaacccacccccaggcatagaagacaatagacagtgtgcgttatgtttgacttatggtgatgacagtgctaatgatgctggtcgtttactatatattggccaaaatgagtggacacatgtaaattgtgctttgtggtcagcggaagtgtttgaagatgatgacggatcactaaagaatgtgcatatggctgtgatcaggggcaagcagctgagatgtgaattctgccaaaagccaggagccaccgtgggttgctgtctcacatcctgcaccagcaactatcacttcatgtgttcccgagccaagaactgtgtctttctggatgataaaaaagtatattgccaacgacatcgggatttgatcaaaggcgaagtggttcctgagaatggatttgaagttttcagaagagtgtttgtggactttgaaggaatcagcttgagaaggaagtttctcaatggcttggaaccagaaaatatccacatgatgattgggtctatgacaatcgactgcttaggaattctaaatgatctctccgactgtgaagataagctctttcctattggatatcagtgttccagggtatactggagcaccacagatgctcgcaagcgctgtgtatatacatgcaagatagtggagtgccgtcctccagtcgtagagccggatatcaacagcactgttgaacatgatgaaaacaggaccattgcccatagtccaacatcttttacagaaagttcatcaaaagagagtcaaaacacagctgaaattataagtcctccatcaccagaccgacctcctcattcacaaacctctggctcctgttattatcatgtcatctcaaaggtccccaggattcgaacacccagttattctccaacacagagatcccctggctgtcgaccgttgccttctgcaggaagtcctaccccaaccactcatgaaatagtcacagtaggtgatcctttactctcctctggacttcgaagcattggctccaggcgtcacagtacctcttccttatcaccccagcggtccaaactccggataatgtctccaatgagaactgggaatacttactctaggaataatgtttcctcagtctccaccaccgggaccgctactgatcttgaatcaagtgccaaagtagttgatcatgtcttagggccactgaattcaagtactagtttagggcaaaacacttccacctcttcaaatttgcaaaggacagtggttactgtaggcaataaaaacagtcacttggatggatcttcatcttcagaaatgaagcagtccagtgcttcagacttggtgtccaagagctcctctttaaagggagagaagaccaaagtgctgagttccaagagctcagagggatctgcacataatgtggcttaccctggaattcctaaactggccccacaggttcataacacaacatctagagaactgaatgttagtaaaatcggctcctttgctgaaccctcttcagtgtcgttttcttctaaagaggccctctccttcccacacctccatttgagagggcaaaggaatgatcgagaccaacacacagattctacccaatcagcaaactcctctccagatgaagatactgaagtcaaaaccttgaagctatctggaatgagcaacagatcatccattatcaacgaacatatgggatctagttccagagataggagacagaaagggaaaaaatcctgtaaagaaactttcaaagaaaagcattccagtaaatcttttttggaacctggtcaggtgacaactggtgaggaaggaaacttgaagccagagtttatggatgaggttttgactcctgagtatatgggccaacgaccatgtaacaatgtttcttctgataagattggtgataaaggcctttctatgccaggagtccccaaagctccacccatgcaagtagaaggatctgccaaggaattacaggcaccacggaaacgcacagtcaaagtgacactgacacctctaaaaatggaaaatgagagtcaatccaaaaatgccctgaaagaaagtagtcctgcttcccctttgcaaatagagtcaacatctcccacagaaccaatttcagcctctgaaaatccaggagatggtccagtggcccaaccaagccccaataatacctcatgccaggattctcaaagtaacaactatcagaatcttccagtacaggacagaaacctaatgcttccagatggccccaaacctcaggaggatggctcttttaaaaggaggtatccccgtcgcagtgcccgtgcacgttctaacatgttttttgggcttaccccactctatggagtaagatcctatggtgaagaagacattccattctacagcagctcaactgggaagaagcgaggcaagagatcagctgaaggacaggtggatggggccgatgacttaagcacttcagatgaagacgacttatactattacaacttcactagaacagtgatttcttcaggtggagaggaacgactggcatcccataatttatttcgggaggaggaacagtgtgatcttccaaaaatctcacagttggatggtgttgatgatgggacagagagtgatactagtgtcacagccacaacaaggaaaagcagccagattccaaaaagaaatggtaaagaaaatggaacagagaacttaaagattgatagacctgaagatgctggggagaaagaacatgtcactaagagttctgttggccacaaaaatgagccaaagatggataactgccattctgtaagcagagttaaaacacagggacaagattccttggaagctcagctcagctcattggagtcaagccgcagagtccacacaagtaccccctccgacaaaaatttactggacacctataatactgagctcctgaaatcagattcagacaataacaacagtgatgactgtgggaatatcctgccttcagacattatggactttgtactaaagaatactccatccatgcaggctttgggtgagagcccagagtcatcttcatcagaactcctgaatcttggtgaaggattgggtcttgacagtaatcgtgaaaaagacatgggtctttttgaagtattttctcagcagctgcctacaacagaacctgtggatagtagtgtctcttcctctatctcagcagaggaacagtttgagttgcctctagagctaccatctgatctgtctgtcttgaccacccggagtcccactgtccccagccagaatcccagtagactagctgttatctcagactcaggggagaagagagtaaccatcacagaaaaatctgtagcctcctctgaaagtgacccagcactgctgagcccaggagtagatccaactcctgaaggccacatgactcctgatcattttatccaaggacacatggatgcagaccacatctctagccctccttgtggttcagtagagcaaggtcatggcaacaatcaggatttaactaggaacagtagcacccctggccttcaggtacctgtttccccaactgttcccatccagaaccagaagtatgtgcccaattctactgatagtcctggcccgtctcagatttccaatgcagctgtccagaccactccaccccacctgaagccagccactgagaaactcatagttgttaaccagaacatgcagccactttatgttctccaaactcttccaaatggagtgacccaaaaaatccaattgacctcttctgttagttctacacccagtgtgatggagacaaatacttcagtattgggacccatgggaggtggtctcacccttaccacaggactaaatccaagcttgccaacttctcaatctttgttcccttctgctagcaaaggattgctacccatgtctcatcaccagcacttacattccttccctgcagctactcaaagtagtttcccaccaaacatcagcaatcctccttcaggcctgcttattggggttcagcctcctccggatccccaacttttggtttcagaatccagccagaggacagacctcagtaccacagtagccactccatcctctggactcaagaaaagacccatatctcgtctacagacccgaaagaataaaaaacttgctccctctagtaccccttcaaacattgccccttctgatgtggtttctaatatgacattgattaacttcacaccctcccagcttcctaatcatccaagtctgttagatttggggtcacttaatacttcatctcaccgaactgtccccaacatcataaaaagatctaaatctagcatcatgtattttgaaccggcacccctgttaccacagagtgtgggaggaactgctgccacagcggcaggcacatcaacaataagccaggatactagccacctcacatcagggtctgtgtctggcttggcatccagttcctctgtcttgaatgttgtatccatgcaaactaccacaacccctacaagtagtgcgtcagttccaggacacgtcaccttaaccaacccaaggttgcttggtaccccagatattggctcaataagcaatcttttaatcaaagctagccagcagagcctggggattcaggaccagcctgtggctttaccgccaagttcaggaatgtttccacaactggggacatcacagaccccctctactgctgcaataacagcggcatctagcatctgtgtgctcccctccactcagactacgggcataacagccgcttcaccttctggggaagcagacgaacactatcagcttcagcatgtgaaccagctccttgccagcaaaactgggattcattcttcccagcgtgatcttgattctgcttcagggccccaggtatccaactttacccagacggtagacgctcctaatagcatgggactggagcagaacaaggctttatcctcagctgtgcaagccagccccacctctcctgggggttctccatcctctccatcttctggacagcggtcagcaagcccttcagtgccgggtcccactaaacccaaaccaaaaaccaaacggtttcagctgcctctagacaaagggaatggcaagaagcacaaagtttcccatttgcggaccagttcttctgaagcacacattccagaccaagaaacgacatccctgacctcaggcacagggactccaggagcagaggctgagcagcaggatacagctagcgtggagcagtcctcccagaaggagtgtgggcaacctgcagggcaagtcgctgttcttccggaagttcaggtgacccaaaatccagcaaatgaacaagaaagtgcagaacctaaaacagtggaagaagaggaaagtaatttcagctccccactgatgctttggcttcagcaagaacaaaagcggaaggaaagcattactgagaaaaaacccaagaaaggacttgtttttgaaatttccagtgatgatggctttcagatctgtgcagaaagtattgaagatgcctggaagtcattgacagataaagtccaggaagctcgatcaaatgcccgcctaaagcagctctcatttgcaggtgttaacggtttgaggatgctggggattctccatgatgcagttgtgttcctcattgagcagctgtctggtgccaagcactgtcgaaattacaaattccgtttccacaagccagaggaggccaatgaaccccccttgaaccctcacggctcagccagggctgaagtccacctcaggaagtcagcatttgacatgtttaacttcctggcttctaaacatcgtcagcctcctgaatacaaccccaatgatgaagaagaggaggaggtacagctgaagtcagctcggagggcaactagcatggatctgccaatgcccatgcgcttccggcacttaaaaaagacttctaaggaggcagttggtgtctacaggtctcccatccatggccggggtcttttctgtaagagaaacattgatgcaggtgagatggtgattgagtatgccggcaacgtcatccgctccatccagactgacaagcgggaaaagtattacgacagcaagggcattggttgctatatgttccgaattgatgactcagaggtagtggatgccaccatgcatggaaatgctgcacgcttcatcaatcactcgtgtgagcctaactgctattctcgggtcatcaatattgatgggcagaagcacattgtcatctttgccatgcgtaagatctaccgaggagaggaactcacttacgactataagttccccattgaggatgccagcaacaagctgccctgcaactgtggcgccaagaaatgccggaagttcctaaactaaagctgctcttctcccccagtgttggagtgcaaggaggcggggccatccaaagcaacgctgaaggccttttccagcagctgggagctcccggattgcgtggcacagctgaggggcctctgtgatggctgagctctcttatgtcctatactcacatcagacatgtgatcatagtcccagagacagagttgaggtctcgaagaaaagatccatgatcggctttctcctggggcccctccaattgtttactgttagaaagtgggaatggggtccctagcagacttgcctggaaggagcctattatagagggttggttatgttgggagattgggcctgaatttctccacagaaataagttgccatcctcaggttggccctttcccaagcactgtaagtgagtgggtcaggcaaagccccaaatggagggttggttagattcctgacagtttgccagccaggccccacctacagcgtctgtcgaacaaacagaggtctggtggttttccctactatcctcccactcgagagttcacttctggttgggagacaggattcctagcacctccggtgtcaaaaggctgtcatggggttgtgccaattaattaccaaacattgagcctgcaggctttgagtgggagtgttgcccccaggagccttatctcagccaattacctttcttgacagtaggagcggcttccctctcccattccctcttcactcccttttcttcctttcccctgtcttcatgccactgctttcccatgcttctttcgggttgtaggggagactgactgcctgctcaaggacactccctgctgggcataggatgtgcctgcaaaaagttccctgagcctgtaagcactccaggtggggaagtggacaggagccattggtcataaccagacagaatttggaaacattttcataaagctccatggagagttttaaagaaacatatgtagcatgattttgtaggagaggaaaaagattatttaaataggatttaaatcatgcaacaacgagagtatcacagccaggatgacccttgggtcccattcctaagacatggttactttattttccccttgttaagacataggaagacttaatttttaaacggtcagtgtccagttgaaggcagaacactaatcagatttcaaggcccacaacttggggactagaccaccttatgttgagggaactctgccacctgcgtgcaacccacagctaaagtaaattcaatgacactactgccctgattactccttaggatgtggtcaaaacagcatcaaatgtttcttctcttcctttccccaagacagagtcctgaacctgttaaattaagtcattggattttactctgttctgtttacagtttactatttaaggttttataaatgtaaatatattttgtatatttttctatgagaagcacttcatagggagaagcacttatgacaaggctattttttaaaccgcggtattatcctaatttaaaagaagatcggtttttaataattttttattttcataggatgaagttagagaaaatattcagctgtacacacaaagtctggtttttcctgcccaacttccccctggaaggtgtactttttgttgtttaatgtgtagcttgtttgtgccctgttgacataaatgtttcctgggtttgctctttgacaataaatggagaaggaaggtcacccaactccattgggccactcccctccttcccctattgaagctcc

SEQ ID NO: 160469 - DNA, 11796 bp, Artificial Sequence
  derived and/or modified sequence
atggcccacagctgccggtggcggttccccgcccggcccggcaccacaggcggtggcgggggtggcggtcgcagaggcctaggcggcgcaccaagacagcgcgttcccgcgctgctgctgcctcctggcccacctgtgggcgggggtgggcccggagcgccaccctcaccgcccgctgtcgccgctgccgccgccgctgcagggagctccggagctggcgttccaggcggtgctgcagccgcctccgctgcctcttcaagctccgcatcttcctcttcatcatcgtcttcttccgctagctcaggacctgccctcctccgcgtaggccccggtttcgatgccgccctccaagtgtctgctgctataggtactaatctgaggcggtttagggcagtcttcggggagagtggcggagggggggggagtggtgaagacgagcaattcctgggatttggaagtgacgaggaagtgcgtgtgcggtcacccacccggagtccaagcgttaagacttctccacgtaaacctagagggcgtcctcgctctggctccgacagaaactccgccatcctgagcgatccctctgtgttcagtcccttaaacaaatccgaaaccaagtctggcgacaaaattaagaaaaaagattcaaaaagcattgagaagaagaggggccggcctcctacattccccggcgtcaagataaaaataacccatggcaaagatattagcgaacttcccaagggaaacaaggaggactctctcaagaaaatcaagcggactccctcggccacgttccagcaggctacaaagattaaaaagttgcgggcaggcaagctgtccccactgaaatcaaagttcaagaccggcaaactgcagatcgggaggaagggagtccagattgtgagaaggcgcgggaggccccccagtactgaacgtatcaagaccccaagtggccttctcattaactcagaactggagaagccccaaaaggtccgcaaggacaaagaggggacccctccactgactaaagaagacaagacagtggtccgccagtctccccggcgcattaagccggtgcggataatcccatcaagcaagaggaccgacgctaccattgccaaacagctgctgcagagggcgaagaagggagcccagaagaagattgagaaggaagcagcccagctgcaaggtcgcaaggttaaaacgcaggttaaaaatattcgtcaatttatcatgccagtcgtgtcagctatcagtagtaggattatcaagaccccaagacgcttcattgaggatgaggactatgaccctcccatcaagatagctcgtcttgagtctactcccaatagtcggttctccgctccatcttgcggatcgtctgagaagtcatctgccgccagccaacacagctctcagatgagttcggattcatctaggagcagttcccctagcgtggacacaagtactgacagccaagcttccgaagagatccaggtgcttcccgaagagcgatccgatacgccagaggtgcaccccccactccccatctcacagtcccctgagaatgagagcaacgacagacggtcccggcgctacagtgtcagtgagcgaagctttgggtcaaggaccacgaagaaattgagcacccttcagtctgcaccgcagcaacagacgtcgtcctcaccaccgccccctcttctgacgccacccccccctctacagccggcttcctctatcagtgatcacaccccgtggctcatgccacctacgatccctctcgcctcccctttcctgccagctagcaccgcccctatgcaaggcaaacgcaagtctattctaagagagcccactttccgttggacgagcctgaagcactccaggtcggaaccccaatacttctcctctgcgaagtacgccaaagaaggcctcatcaggaagccgatctttgataacttccggccacctccattgacaccggaggacgtgggattcgctagtggattcagtgcttcaggcacagcagcatccgccaggctgtttagccccctgcattcaggcactcgctttgatatgcacaaaagatctcccctcctgcgagccccacgtttcactccctccgaagcgcactccagaatttttgagtctgtcacgcttccaagcaaccgtacgagtgctggcacatcctcatccggagtgtccaatcgtaagcggaagcgcaaagtgttctccccgattcgctccgagcccaggtccccgagtcacagtatgcggactagatcaggtcggctttcctcttccgaactcagccctttgacccctcctagttccgttagttcttccttaagtatatccgttagtccactggctacctctgcccttaaccctacttttacattcccttctcattccctgacccagtcaggggagagcgcggaaaagaatcagagacctagaaaacaaacctctgccccagcagaaccattctcaagtagttctccgacaccactgttcccatggtttacccccggctcccagacggagcgcgggaggaataaagacaaggcacccgaagaactttcaaaagatcgggacgctgataagtctgtggagaaggataagtccagagagagggatcgtgagcgcgaaaaggagaacaagcgggagtccagaaaagagaagcgtaaaaagggctccgagatccaaagctccagcgccctctaccccgttggtagggtctcaaaagagaaggtggtgggtgaagatgtggcaacatcttcctccgccaagaaggctacaggacggaagaagagcagctcccatgatagcggaaccgatataacatctgtaacccttggcgacaccacagctgtgaagacaaaaatcctgatcaaaaaagggagggggaacctggagaagacaaatctggacctgggacccaccgcccctagccttgagaaggagaaaacactgtgtctctcaacaccctcaagtagcactgtgaaacattctacttcctcgatcgggtccatgctggcgcaagctgacaagctaccaatgacagacaaacgcgtggcatctctgcttaaaaaagcaaaagcacaactgtgtaaaatcgagaagagcaagagcctcaaacaaaccgaccagcccaaagcgcagggtcaggaatctgatagctccgagacctcagtgagaggacctcgcatcaaacacgtgtgtcgacgtgccgccgtggcactgggaagaaaacgcgccgtgtttcctgacgatatgccaaccctttcggccctaccctgggaagagagggagaaaatcctcagttctatgggtaacgacgataaatcatccatcgcggggtccgaggacgctgaacctctcgcacctccaatcaagccgattaaacctgtgaccagaaataaggcccctcaggagccaccggtcaaaaaaggccggaggtcacgaaggtgtggccagtgccctgggtgccaagttcctgaggactgcggcgtgtgcacaaattgtctggacaaaccaaaatttgggggacggaacataaaaaaacaatgctgcaaaatgcggaaatgtcaaaaccttcagtggatgccatccaaggcctatctgcaaaaacaggcgaaggctgtgaagaaaaaggaaaagaaaagtaaaactagcgaaaagaaggactcaaaagagtcgtcagtagttaaaaacgtggtcgattcttcccagaaaccgactccgtccgcccgcgaggaccccgcccccaagaagagctcctcagaacccccaccgagaaaacccgtagaagaaaaaagcgaggaaggcaatgtgtcagcccctggcccagagtcaaaacaggctaccacccctgcctcccggaaatcctccaaacaggttagtcaacccgcactcgtcatccccccacaaccccccacaaccggacctcccagaaaagaagtgcctaaaaccacacctagcgaaccaaagaaaaagcagcctcctccgcccgaatccggcccagaacagagcaagcaaaagaaagtagccccacgcccttccatacccgttaaacaaaagcctaaggaaaaggagaaacctcccccagttaataagcaagaaaatgcaggaaccctgaacatcctgtccactctgtccaatggcaattcctctaagcagaagatccccgcggatggcgtgcaccgtattagagtcgattttaagttcgtatactgccaggtgtgttgtgagcctttccacaagttctgcctggaggaaaacgagcggcccctggaggatcagctggaaaactggtgttgccgaaggtgcaaattttgtcatgtgtgtggccgtcagcatcaggcgaccaagcaactgctggagtgtaataaatgccgcaactcgtaccatcctgagtgtcttggacctaactaccctaccaaaccaactaaaaagaaaaaggtgtggatctgtacaaaatgtgttaggtgcaaaagctgcggctcaacaactccagggaaaggctgggacgcccagtggagtcacgatttttctctttgccatgattgtgccaagctgtttgccaaggggaatttttgtcctctgtgcgacaaatgctatgatgatgacgactatgaaagtaaaatgatgcaatgcggcaaatgcgacagatgggtgcacagtaagtgtgagaatctttcagatgaaatgtatgaaattctgagtaatctcccagaaagcgttgcctacacctgtgtgaactgtacagagagacatcctgcagaatggagactcgctctggagaaggagttgcaaatcagcctaaagcaagtgcttactgccctgttaaatagtcgaacgactagccatctgctgaggtaccgccaggccgcaaagccccctgatctaaatccggagacagaggaatctattccctctcggtcctcacccgaaggtcctgatccacccgtcctgactgaagtcagcaaacaggacgaccagcagcctctagacttagaaggtgtgaagcgtaagatggatcagggcaactatacatccgtgttggagttttcagacgacattgtcaaaataatacaggctgctatcaatagcgacggtggccaaccagaaataaagaaggccaatagcatggtgaagtcttttttcatcagacagatggagcgcgtgtttccctggttttccgtgaaaaagtcccgattctgggagccaaataaagtcagcagcaatagcggcatgctgccaaacgccgtactccctcctagcctcgatcacaattacgcccagtggcaggaacgcgaagagaattcccacactgaacaaccacccctcatgaagaagataataccagccccaaagccgaaaggaccaggagaacccgacagtcccaccccactgcacccacccacccctccaatactctctactgaccgctcacgcgaggatagcccagagctgaatccaccccccggcattgaggacaaccgccaatgcgccttatgccttacttacggcgacgattcagcgaacgatgctggccgcctcctatacattggccagaatgagtggacccatgtcaattgcgcactttggtctgctgaggtgtttgaagacgacgacgggagcctgaaaaacgtgcacatggccgtgatcaggggcaaacagctgagatgtgaattttgtcagaagcctggagccactgttggatgttgtttaacctcgtgtacgtcaaactaccattttatgtgcagccgcgccaaaaactgcgttttcctcgacgacaaaaaggtctactgtcagaggcacagggacctaattaaaggcgaggtcgttcccgaaaacggattcgaggtgtttcgacgggtgttcgtggacttcgaagggatctccctgcggaggaagtttctgaatggattggagcccgagaatatccatatgatgatcggctccatgacaattgactgtttggggattctcaatgatcttagcgactgtgaagacaaactattccccattgggtaccagtgtagtcgagtttactggtcgactaccgatgcaagaaagcggtgtgtctatacatgcaaaattgtagagtgtagaccaccggtggtggaacccgacatcaacagcactgtggaacacgatgagaacaggacgattgctcactctccaactagcttcacagagtcctcttccaaggaaagtcagaacaccgcagagatcatttcgcccccctccccagaccgtccacctcactctcagacctcaggtagctgttactatcatgtgatttctaaagttccccgtatccgaactccgagctacagccctacacagcgatcacctgggtgcaggccactcccctcagctggaagtcctacacccaccacacatgaaattgtcaccgttggcgatccccttctgagctcggggctccggtctatcggaagccggcggcactccacctcatctctttccccacaacgctccaaactaagaattatgtcccctatgcggactggcaatacttactcaaggaataacgtgagcagcgtttccacaaccggaactgctaccgacctggagagttccgcaaaagtggtggatcacgtcctaggcccacttaatagcagcacaagtctgggacaaaatactagcacctcttctaacctgcagcgcactgttgtcacggtcggcaacaaaaacagtcatcttgacgggagttcgtcctctgaaatgaagcagtcctccgcctccgacctggtgagcaaaagctcttctctcaaaggcgagaagactaaggtactgtcatcgaaatcatctgaagggagcgcccataacgtggcatacccaggcattcctaaactcgctcctcaggtacacaacaccacctctagagaacttaatgtaagcaagatcggtagctttgctgaaccaagctccgtgtcgttttcttcaaaagaggctctgtctttccctcacctgcacctccgcggccagcgaaatgatagggatcaacataccgactccacacaaagcgccaacagcagtccagatgaggacacagaggtgaagactctgaaactgtccggaatgtcaaataggtctagcattatcaatgagcatatggggtcaagcagccgcgatcgcagacagaagggtaaaaagagctgtaaggagacgttcaaggagaaacactctagcaagtcttttctggaacccgggcaagtcactaccggggaggaaggtaacctcaagcccgaattcatggacgaggtgctgacacctgaatacatgggacagcgaccatgtaataacgtgagcagtgataagatcggggacaaggggctgagtatgccaggagtgcccaaagcaccccctatgcaggtggaagggagcgctaaagaactgcaggctcctagaaagcgcactgtcaaagttaccctcacgcctctcaaaatggagaacgaatcccaatcaaagaacgcgttaaaagaatccagtcccgcttctccgctccaaattgagtcaacttccccaaccgagccgatatctgcctcagagaaccctggcgacgggcctgttgcacaaccaagtcccaataacacttcttgtcaagactcccagtcaaataactatcagaatttacctgtacaggatcgtaatctgatgcttccagacggccctaaacctcaggaggacggcagctttaagcgcagataccctaggcggtccgcgcgggctaggtctaacatgttcttcggtttgaccccactatacggagtcaggtcctacggtgaagaggacatccccttttattcgtcctccacagggaagaagcgcgggaagaggagcgcggaggggcaggtggacggagccgatgacctgagtacatctgatgaagatgatctctactactacaattttactagaaccgtcattagctccgggggagaggagcgcctggctagccacaacctctttcgggaagaagaacagtgtgacttgcccaaaataagccagctggatggggtggatgacgggacggagagcgacacctctgttaccgcgactaccagaaagagttcccagattccaaagagaaatggtaaggagaatggcacagagaacctgaaaatagataggcctgaagatgcgggggagaaagagcatgttaccaaatctagtgtaggtcataaaaatgaacccaagatggacaactgccacagtgtgtcgcgcgtaaagactcagggtcaggacagcctcgaggcacagctatcatccttggagagcagtcgacgcgtccacactagcaccccatctgacaagaatctgttagatacatataatactgagcttctcaaatctgacagcgataataacaattccgatgattgcgggaatatcctgccatccgacatcatggacttcgtactgaaaaacacgccttccatgcaggctcttggggagagccctgaaagtagctcttccgagctgctcaatctgggagaaggtctggggctggatagcaaccgggaaaaggatatgggactctttgaagtgttcagccaacagctccctaccaccgagccagtggacagttccgtcagctctagtatttccgcagaggagcagtttgaactgccgctggagctgccttcagacctgagtgtcctaaccacccgctctcctaccgtccccagtcagaacccaagccgactcgcggttattagtgattccggtgaaaagagagttaccatcaccgagaagagtgtggcctcttcagaaagcgaccctgctctgctctctcccggagtggacccaacccctgagggtcacatgaccccagatcacttcattcagggccatatggatgccgatcacatttccagtccgccatgtggcagcgttgaacaagggcatggaaataatcaagacctgacaagaaattcgtccacacccggcctgcaggtgccagtaagcccaacggtgccaattcaaaatcagaaatacgttcctaacagcaccgacagtcctgggcccagccagatcagcaacgctgctgtccagaccacaccaccacacctgaagcccgctactgaaaagctcatagtggtgaatcaaaatatgcagccgctctacgtgctgcaaactctcccgaacggagtgactcagaaaattcaactgacatcttcagtcagctcaacaccctccgtgatggaaactaacaccagtgtcttgggcccgatgggtggagggcttactctgaccacagggctcaatcccagtctcccgacatctcaatcccttttccccagcgcatcgaagggcttgctgccaatgtctcatcaccagcaccttcatagctttcccgccgcgacccagtcctcatttcctcctaacatttccaaccccccaagcggactgctaataggggtgcagccaccacccgacccacagttgctagtgagtgaatcctcacagagaacagacctcagcactacagttgcaacaccttcctctggcttgaaaaaacgccctattagccgcctacagacgagaaaaaacaagaagctcgcgcctagtagcactccctcaaatatcgcaccctctgacgtggtgtctaatatgacactcataaattttactccctctcagctccccaaccaccccagtttgctcgacctgggcagcctgaacacatctagccataggactgtacccaatattatcaagcgaagtaaatcttctattatgtattttgaaccagcccctctactaccccaatccgtgggcggcacggccgccacagctgcgggcacttccacaatttcccaggatacatcccaccttacaagcggctcggtgagcgggttagcctcctcaagttctgtgctcaatgtagtttctatgcagaccacaacgacaccaacctcaagcgcttcggtccccggacatgtgactctcacaaaccctcgcctgctgggaaccccagatattgggagcattagtaacctgcttatcaaggctagccagcagagcctgggtattcaggaccaaccggtggccctaccacccagcagcggcatgttcccccagcttggcacaagccaaaccccgagcaccgcagcaattacggcggccagctccatatgtgtacttccctccacacaaaccactggcataactgcagcatctccttcaggggaggcagacgagcattaccagctgcagcacgtgaatcagctcttggcttccaagaccggcatccacagttcgcagcgagatctcgattcagcttccggaccccaggtgtctaacttcacacagaccgtggatgctccaaactctatggggctggaacagaacaaagctctctctagcgccgtccaagccagtccaactagcccaggcggatccccgtcatcacctagtagcgggcagaggtctgcctccccatcggttccaggaccaaccaagccaaaacccaagactaagaggtttcaactgccactggataaggggaatgggaagaagcataaggtctctcacctccgtactagttctagtgaggcacacattcccgatcaagagaccacatccctgacttccggtactggcacccccggagcggaggccgaacagcaagatactgcttctgtggaacagtcatcacaaaaagagtgcggccaacccgctggacaagtggccgtgctgcctgaagtccaggtgacccagaatcccgccaatgaacaggagtccgccgaaccaaaaaccgtcgaggaagaggagagtaacttttcctctccgctgatgctctggttgcagcaagagcagaagagaaaggaatctatcacagaaaaaaagcctaagaagggtctggtttttgagattagtagtgatgatggctttcagatttgcgctgagagcatcgaggatgcctggaaaagcctgaccgacaaagttcaggaagcgcggagcaacgctcggttgaaacagcttagtttcgccggggttaatggtttgagaatgctgggcattctgcacgacgctgttgtgttcctaatcgagcaactgtccggggcaaagcattgtaggaattacaagtttcgattccataaacctgaagaggctaacgaaccacccctcaatccccatggttctgctcgtgctgaggttcaccttcgtaagtccgcatttgatatgttcaatttcctcgcatctaagcaccgccagccacccgaatacaatcctaacgacgaagaagaggaggaggtgcagttgaagagtgcacgcagggcgacaagtatggacctgcccatgcctatgaggtttagacacttgaagaaaacatctaaagaggccgtgggggtgtaccgatcccctatccacggtcggggcctcttctgtaaacggaacatcgacgctggcgagatggtgattgagtatgcggggaatgtaattagatcaatccagacagataaacgggagaaatattacgatagcaaagggattggatgctatatgtttcggatcgacgattccgaggtggtggacgccacaatgcacggaaatgcagcgcggttcataaaccactcatgcgagcccaactgttactctcgcgtcattaacattgacggacagaaacatatcgtgatatttgctatgcgcaagatttacagaggggaggagctgacttacgactataaatttcccattgaagacgcttccaacaagcttccttgtaactgcggcgcaaaaaaatgcaggaaatttcttaactag

SEQ ID NO: 160470 - DNA, 8640 bp, Artificial Sequence
  derived and/or modified sequence
cacgcccaccccgagtgcctgaccatggagcgggagaagatcctgagtagcatgggaaacgatgacaagtccagtatcgctgggtccgaggacgccgaaccacttgccccacccataaagccaatcaaacctgtcaccaggaacaaagccccccaggagccccctgttaaaaaaggccgccgaagtaggcgttgtggccagtgtcctgggtgtcaggtgccagaagactgcggcgtctgtaccaactgtctggacaaaccgaaatttggtggccggaacatcaaaaaacaatgctgcaagatgcggaaatgtcagaacctccagtggatgccttctaaagcctacctgcagaagcaagccaaggccgttaagaaaaaggagaaaaagtccaagactagtgaaaaaaaggactcaaaggagtcgtcggtcgtgaagaatgtggtggactcatcacaaaaacctactcctagcgctagggaggaccctgcccccaaaaagtcaagttcggagcctcccccccgtaaaccagtggaggagaaatcagaagaaggaaatgtatctgcaccagggccagagagcaaacaggccacgaccccagcctcacggaagtcgagcaagcaggtctcccagcctgccctcgtgatcccaccccagccaccaacaaccgggccaccaagaaaggaggttcccaagaccacacccagcgagcctaagaaaaagcaaccacctcctcccgagtcgggccccgaacaaagtaaacagaagaaggtggcccctcgcccttcaattcctgtcaaacaaaagcccaaggagaaggagaagccaccgcctgttaacaagcaagagaacgccggtacccttaatatcctcagcaccctgtctaacggtaatagctccaagcaaaaaattccggctgatggcgtgcaccgcatacgagtggatttcaaagaggactgtgaggccgagaatgtctgggagatgggcgggctgggaattttgacttctgtccccataacaccccgggtcgtatgtttcctgtgtgcgtcgagcggacacgttgaattcgtatactgccaagtctgctgcgagcccttccataagttttgtctagaggagaacgaaagacccctcgaggaccagttagaaaattggtgctgtcggcggtgcaagttttgccacgtatgcggtagacagcaccaggcgaccaaacagttgttggagtgcaacaagtgccgcaattcctatcacccagagtgtttgggacctaattatcccaccaagcctactaaaaaaaagaaggtgtggatctgtacaaagtgcgtcagatgtaaaagttgcggcagtaccaccccaggcaaggggtgggatgcccagtggtcccacgatttcagtctgtgccacgattgcgcgaagcttttcgccaagggcaatttttgcccgctctgtgataagtgctacgatgacgacgattatgagtccaaaatgatgcaatgcggcaaatgcgatcgctgggttcattctaaatgcgaaaatctctcagacgaaatgtatgaaatcctgagcaatctgcccgagtccgtggcatacacatgcgtgaactgcaccgagcgccacccagcagagtggcggctcgccctggagaaggagctgcaaatctcactcaagcaggtattgacagctcttctcaacagtcggacgacgtcgcacctgctgaggtacaggcaggctgcaaaacccccggacctaaaccccgaaaccgaagagtcaattccatctcgaagctcccccgagggaccagatccaccagtgctaaccgaagtgagcaaacaggacgatcagcagcctttagatttggaaggagtgaagagaaagatggaccaaggaaactatactagcgtgctggaattcagcgacgacatcgtgaaaattatccaggccgccattaactctgatggcgggcaaccagagattaaaaaagctaacagcatggtaaaatcatttttcattaggcagatggagagagtgttcccgtggtttagtgtgaaaaagagtaggttctgggaacccaacaaggtctcctccaactctggaatgcttcctaacgccgttttgccccctagcctggaccacaactatgcccagtggcaagagagagaggaaaatagtcacaccgaacagcccccccttatgaagaagataataccagctcctaagccaaagggccctggggaaccagactctccaacacccctgcacccgcctacaccaccaattctgagtacagacagatcacgcgaagattctccagaacttaatcccccgcctggtatagaagataatcggcagtgtgcgctctgcctaacgtatggtgatgatagcgccaatgatgctggacggctgctttatattggacagaacgagtggacacatgttaactgtgccctctggtccgccgaagtcttcgaagacgatgatggtagcctgaaaaatgttcatatggccgttatacgcggaaagcagcttcggtgcgagttctgtcagaaacccggagccacagtcgggtgctgtcttacctcatgcacatctaactaccattttatgtgctcccgcgccaagaattgtgtgtttctggacgacaagaaagtgtattgccagcgacacagggatctcattaagggagaagtagtgcccgagaatggttttgaggtctttaggagggttttcgtcgacttcgaggggatctctctgcggcgcaaattcctgaatggtctggaacccgaaaacattcatatgatgattggctccatgacaattgattgtcttggaatcctgaacgatctgtctgattgcgaggacaagctgtttcccatcggatatcagtgctcccgggtctactggagtaccacagacgcaaggaaaagatgcgtttatacttgcaagatcgtggagtgtcgtcctccagtggtggaacccgatattaattccacagttgaacacgacgaaaaccggaccatcgctcactccccaacgtcgtttaccgagtccagcagtaaagagtcacagaatactgccgaaattataagtcccccttctcctgatcgcccaccccatagtcaaacatctggatcctgttattatcacgtgatttccaaggttcccagaattcgcacaccctcctatagccctactcagaggagcccaggttgccgcccactgcccagcgctgggtcccctactcctacgacacatgagatcgtgacggtgggtgatcccctcctgtcctcaggtctgcgctcaattggctcaaggcgacactctacttccagcctcagtccccaacgcagtaagcttcgcataatgtcccctatgcgtacggggaacacgtactctaggaataacgtctcgtctgtctcaactactggcacagctaccgatctcgaaagcagcgcaaaggtggtcgatcacgtgctgggccctctgaattcttcaacttcacttggccagaacacaagtacctctagcaacctgcagcgcacggtagtgactgtgggcaacaagaatagccatctcgacgggagttcaagctccgagatgaaacagtccagtgccagtgacctggtgtctaagtcttcctctctgaagggagagaaaaccaaggtgttatctagcaaaagctctgaggggtccgctcacaatgtcgcttaccccggcatacccaagttggcccctcaggttcacaataccacatcccgggagttgaacgtgtctaaaatcggatcattcgcggagccgtcatctgtgagtttttcttcaaaggaagcactatcatttcctcacctacaccttagagggcaacgaaatgatagagatcagcacactgatagtacccagtccgcgaattcatcaccagacgaggatacagaagtaaaaacgcttaaactgtctggaatgagtaatagatcctcgatcatcaacgaacacatgggctcatccagcagggaccgcaggcaaaaggggaaaaagagctgtaaagagactttcaaggagaagcattccagcaaatctttcttggagcccggtcaggtcacgaccggggaggaaggtaatttaaaacccgagtttatggacgaggtgttaacaccagagtatatgggccagaggccttgcaacaatgtcagctcagacaagattggagataaggggctgagcatgcccggtgttccgaaggcaccccctatgcaagtagaaggtagcgcaaaggaattgcaagcaccgcggaagaggacagtcaaagtgactcttacaccacttaaaatggagaacgaatctcagtccaaaaacgccctcaaggagtcttcgcccgctagccccctgcaaattgagtcaaccagccccacagaaccgatctcagctagtgaaaatccaggcgacgggccagtcgcccagcctagtcctaataacactagctgccaggattcacaatcaaataattatcagaaccttccggtccaggacagaaacctgatgctgcccgacggacctaagccccaagaggatggaagttttaaacggcgttaccctagacggtcggccagggctcgtagcaatatgttctttggcttaacaccactctatggcgtgcgcagttatggggaagaggacataccattctacagcagttcaactggaaaaaagcgagggaaacgctcagccgaaggccaggtcgatggcgctgacgacttgtccactagcgacgaggatgacttgtactactataactttacaagaacagtgatctcaagcggcggcgaggagagactggctagccacaatctcttcagagaggaagagcagtgtgatttgcccaaaatcagtcaactggacggcgttgatgacgggacagaatcggatacctcagttaccgctacaacacgcaaatcttcccaaatccctaagaggaatggcaaggagaacggtacagagaacctaaaaatcgaccggcccgaggatgccggagagaaggagcacgttacaaaaagtagtgtgggccacaaaaatgagcccaagatggataattgtcatagcgtctcccgcgtgaagacacaaggccaggactctttggaggctcagctctcctccctcgagtcctcccggcgtgttcacactagtactccctcagacaagaatctgcttgatacgtataacaccgaactattaaaatccgactctgacaataacaactctgacgattgcggaaacatcctgccaagtgacatcatggattttgtgctcaagaatacaccttccatgcaggccctcggtgagtcccctgaaagtagctcctccgaattactgaatctgggggagggactgggtctggacagtaaccgagagaaggacatgggcctatttgaagtattcagtcaacaactgcccaccaccgaacccgttgactccagcgtctcgagcagtatctcagcagaagagcagttcgagttgcccttggaactgcccagcgacctgagtgtgttgaccactagatctccaaccgtaccttcccaaaaccctagtcggctggccgttatatccgatagcggcgagaagcgagtgactatcactgaaaagtcggtggcatcctcagaatccgaccctgcactcctctcccctggagtggatccaacaccagagggacacatgactccagaccacttcattcagggacacatggatgcagatcatatttctagtccgccatgtggatctgtggagcaagggcacggcaacaaccaggatctgacgagaaattctagtacgcccgggctgcaagtccctgtttcacctactgtcccaattcagaaccagaaatatgtgcccaacagcacagatagcccaggacccagccagatttccaatgctgctgtgcagactacgcctcctcatctgaaacccgctacagaaaagcttatcgtcgtgaaccagaacatgcagccactttacgtgctgcagacacttcctaatggcgtcacccagaagatccagctcacaagcagtgtttcttccaccccttctgtgatggagaccaacacatccgtgctgggcccgatgggaggcgggctgaccttaactacgggactgaatcctagcctcccaacgagtcagtctctctttccgtcggcttccaagggcctgctgccaatgagccatcaccagcacctacactcatttcccgccgctactcagtcgtcgttccccccaaatataagcaatcctccgtccggactgctgatcggggtgcagccaccccccgacccgcagctgctggttagcgagagtagtcagagaactgatttgagtaccactgtggcgacacctagttccgggttgaagaagagaccgatctcaagactgcagacacgcaagaataaaaaactcgcgcccagtagcaccccatccaacatcgccccctcagacgttgtgagcaacatgacactcatcaatttcactccgtcacagctccccaaccacccaagtctgctggatctggggagtctcaacacatcttcccacagaactgtgcccaatattattaaacggtcaaagtcctccattatgtacttcgagcccgcccccctactgccacagtctgtgggcggcacagctgcaaccgctgcaggcacctcgactatctcccaagacacctcccatcttacctctgggagcgtcagtgggttagctagtagcagctccgttctcaatgttgtgtcaatgcaaaccaccacgacgccaacctcctccgcttcggtacctgggcacgtcactctcaccaaccctcggcttttagggaccccagatatagggtctataagcaacctgctgatcaaagctagccagcagtccttggggattcaggaccagcccgtggctctgccgccctccagtggcatgttcccacaactgggcacaagccagacaccatcaaccgccgctataaccgccgcttctagtatctgcgtgttacccagtacccaaactactggcatcacagcagcgtctcctagtggtgaggccgatgaacactatcagctacagcatgtgaaccagctgttggcctccaaaacaggcattcactcctcacagcgcgacctggacagcgcctccggaccacaggtctccaactttacccagaccgtggatgcacctaatagcatgggcctggagcagaataaggccctaagctccgccgtgcaagcctctcccacgtcaccaggtggatctccgtcgtccccaagctctggacagaggtccgcctctccttctgtccccggcccaactaagccgaagcctaagaccaagaggtttcagttgcccttggacaagggaaatggaaaaaaacataaggtttcccatctgaggacctcaagtagcgaggctcatattccagaccaggagaccacaagtctcacatctggaaccggaacgccaggagccgaagccgagcaacaagacacagccagtgtggaacagagctcccaaaaagaatgtggccaacctgccggccaggtggccgtgttgcccgaagttcaggttacccaaaaccccgctaatgagcaggagtctgccgagcctaagacggtggaggaggaggagtctaatttcagttctcccctgatgttgtggctacaacaagagcagaagaggaaagagtccattacagagaaaaagcctaagaagggtctggtgtttgaaatcagttctgatgatggtttccaaatatgtgccgaatccatcgaggatgcctggaagtccttgactgacaaggtgcaggaagcgcgctccaatgcccgcctgaagcagctgtctttcgccggagtgaacggccttcgtatgttaggcatcctccatgacgccgtagtcttccttattgaacagttgtcaggagctaagcactgcaggaattataaatttaggttccataagccagaagaagcgaatgaaccaccgctcaatccccatgggtccgcccgggcagaagtgcacctccggaagagtgcattcgatatgttcaatttcctggctagcaagcacagacagccacctgaatataaccctaatgacgaggaagaggaagaggttcagctcaaatcagctcgacgggccacttctatggaccttcccatgccgatgaggttccggcacttgaaaaaaacaagcaaagaggctgtgggggtctaccgctcccccatccacggtcgtgggctcttttgtaaacgcaacattgacgccggcgagatggtcatagagtacgctgggaacgtcatcagatctatccagacagacaagagggagaaatactatgattctaagggtattggctgttacatgttccgcatagatgactccgaagtcgtggatgctactatgcacggtaacgctgcaaggttcataaaccattcatgcgagccgaattgctattctagggtcatcaacatcgacgggcagaaacacatcgtgattttcgccatgcgcaagatataccgaggagaggaactgacctatgactacaagttccctatagaagacgcctccaataaactgccctgtaactgcggggctaaaaaatgccgaaaattcttgaattag

SEQ ID NO: 160471 - DNA, 11910 bp, Artificial Sequence
  derived and/or modified sequence
atggcccacagctgccggtggcggttccccgcccggcccggcaccaccggcggcggcggaggaggggggcgccggggcctgggcggggcccctaggcagcgtgtgccagccttactgttacctcccgggcctcccgtcggcggcgggggcccgggtgcacccccttcacctcccgctgtggccgccgcggcagcagccgctggctcctctggcgctggagtaccaggcggcgccgccgctgcgtcggcagcaagcagttcttctgcctcatcctctagttcctcgagcagctctgcttccagcgggcccgcactgctgcgggtgggacccgggttcgacgccgctctgcaggtttcagcagccatcggaacgaacctgagacgcttccgggctgtatttggcgagagcggcgggggcggtggttcaggcgaagatgagcagttcttagggtttggaagtgatgaggaagttagggtcaggagtccgaccagaagccctagcgtgaaaactagtcctaggaagccccgggggaggcccaggagtggttccgatcgcaactcagcgatcctttctgacccaagcgtgttttcccctttaaacaagtcggaaacgaaatccggagacaaaatcaaaaaaaaagatagcaagtctattgagaagaaacgaggcagacctcctacctttccaggtgtcaagattaaaataacacatggaaaggacatcagtgaactgcctaaaggcaacaaagaggattctctgaagaaaatcaagcggactcccagtgccacgttccagcaggctacgaagatcaaaaaactgcgcgcagggaaactgagccctcttaaaagcaagttcaagaccggtaagctgcagattgggaggaagggggtccagatcgtgcgccggcggggcagacctccatccacggagaggataaagaccccttctggcctcctcattaatagcgagctcgaaaagccacagaaagtgcgcaaggataaggaaggaacacccccactgacgaaggaggacaagaccgtggtcagacagagccctcgcaggatcaagcctgtgaggatcattccgagcagtaagaggaccgacgcgacaattgcaaagcagctgttgcagcgtgcaaaaaagggggcacaaaaaaaaattgaaaaggaagccgcccagctgcaaggccggaaagtcaaaacccaagtgaagaacatcagacagtttattatgcccgtcgtgagcgccatatcctccaggatcattaagactcctcgccgcttcatagaagatgaggactatgacccccctatcaagatcgcccggctggagtcgacaccaaattcgcgattctcagctcccagctgcggaagttctgagaaaagcagcgctgcctcacaacatagctcccagatgtcctcagacagcagtcgatcctcaagccctagtgtggataccagcacagattcccaggcgtcagaggaaatccaggtattgcctgaagagcggtcagacactccggaagtccacccgccactcccaatttcacaatctcccgaaaatgaatcaaatgatcgaaggtcacgccgctattctgtgtcggaacggtcctttggaagcaggacaacaaaaaaactgtctactctgcagagcgccccgcagcagcagacgtctagctctccacctccccccctgctcacacctcctccacccctgcagccggcttcatccatctctgaccacacaccatggctaatgccacctactatacctcttgcctcgcccttccttcctgcatccacagctccaatgcagggcaaacgaaaaagtatcctcagggagccaacctttcgctggacatcactaaagcattctcggagcgagcctcagtatttttccagcgctaagtacgccaaagaaggactcatcaggaagccaatttttgacaatttccggccacctcccctcacgcctgaagacgtcgggtttgcttcgggtttcagcgcctccggaactgcggcatccgccagattgttctctccccttcacagcgggacccgcttcgacatgcacaagaggtcaccactgctgcgcgcaccgcggttcactccatcagaagcccattccaggatattcgagagtgtaactctgccctcaaatcgaacgagtgctggcaccagttcctctggtgtgtcgaaccgcaaacgcaagcgcaaggtcttttctcctatccgctcagagcccagaagtcctagccatagcatgcgtacccgttcaggtcgcctcagttcatccgaattgtcacctcttacccccccgtcatcggttagctctagcctcagtatttctgtgtcccccttggcaacctccgcacttaaccccacatttacttttccttctcattcgctaacccagagtggtgaatccgccgagaaaaaccagcggcctcgcaagcaaaccagcgccccagcagagcctttttcctccagcagcccaacacccctcttcccttggttcactcctgggagccagacagagagaggccggaacaaagacaaagcccccgaggagctgtcgaaagacagagacgcggacaagagcgtagagaaggacaagagccgcgagcgcgatagggaacgcgagaaagagaacaaaagagagagcagaaaggaaaaacgcaagaaggggagtgaaatccaatcctcatccgccctgtatcccgttggtagagtgtcgaaggagaaggtggtgggggaagacgtggctaccagctcttctgcaaaaaaagcaacaggccggaagaaatcctcctcccatgacagcgggaccgatataacaagcgtaacactgggagacaccactgctgtcaaaaccaaaatcctcattaaaaagggccgcggcaatctggagaagaccaacctcgacttgggtccaacagccccctccctcgaaaaggagaagaccctgtgcctcagtaccccttcctcatctacagtaaagcactctacatcttcaatcggctctatgctcgctcaggcagacaaattgcctatgacagataagcgcgtagcctcacttctgaaaaaggccaaagcccaactgtgtaaaattgaaaaatcgaagagccttaagcagacagatcagccaaaggcgcaaggccaggagtccgatagctccgagacttcagtgagaggacctcgaatcaaacatgtttgtcgcagagctgccgtcgctctcgggcgaaaacgggccgtctttccagacgatatgccgactctctcggcgctcccctgggaagaacgcgagaaaattctttcatcaatggggaatgacgacaaatcatctatcgccggaagcgaggatgctgagccactcgcgccaccaattaagccaattaagcctgtgacgcggaacaaagccccccaggaaccaccagtcaaaaaaggtcgccgtagccgccggtgtggacagtgtcccggatgccaggtgccagaggactgtggagtatgcacaaattgcctggacaagccaaagtttggcggccgaaacataaagaagcagtgctgcaaaatgagaaagtgtcaaaacctgcaatggatgccttctaaggcgtatctgcagaaacaggccaaagcagtgaaaaagaaggaaaagaagtcgaagacatcagaaaagaaggattcgaaggagagcagcgtagtaaagaacgtcgtggatagctcccagaagccaaccccctctgccagggaggaccctgcaccaaaaaagagcagcagcgagcctccccctcgcaagccggtggaagagaagtcggaagagggtaacgtgagcgccccaggacccgagtccaagcaagcgactacacccgccagccgcaagagcagtaagcaggttagccagcctgctctggtcatacccccccaaccgccgacaactggacctcctaggaaggaggtgccaaagaccactccttcagagcctaaaaagaagcagcctcccccacctgaatcagggcccgagcagagtaagcaaaaaaaggtagctccccggccaagcatacctgtgaaacaaaagccgaaggagaaagagaaaccccctcctgtgaataagcaggaaaatgccgggaccctcaacatcctctcgactcttagtaatggcaactccagtaagcagaaaatcccagccgatggagtgcatagaatccgggtggactttaaggaagattgtgaggccgagaacgtctgggaaatgggtggcctggggatcctgacaagcgtgccgattaccccccgggtggtttgctttctgtgcgccagcagcgggcatgtggaattcgtgtattgtcaggtctgctgcgaaccttttcataagttctgcctggaggagaacgagagacctttagaggatcagcttgagaattggtgctgtaggagatgcaagttttgccacgtatgcggtcggcaacaccaggcgaccaaacaactgctggaatgcaataagtgcaggaactcttaccacccagaatgcctgggacccaattaccctaccaagcccaccaagaagaaaaaggtttggatatgtacaaaatgtgtacgctgcaagagctgcggaagcaccacccccgggaaagggtgggatgctcagtggtcccacgatttttctctgtgccatgactgtgctaagctctttgcaaagggtaacttttgtcctctgtgtgacaagtgttacgacgatgacgactatgagtctaagatgatgcagtgcggaaaatgcgatcggtgggtacactctaaatgtgagaatctctctgatgaaatgtatgaaattctttccaatttacctgagagcgtggcatatacatgcgtcaactgcaccgaacgacatcccgccgagtggcggctggctctggagaaagaattgcagatttctctcaagcaggtgctgactgcgttactcaactctaggaccaccagtcacctgctacggtatcgccaggctgcaaaacccccagacctgaaccctgagacggaggagtccataccatccaggagctcccccgagggaccagacccaccagtactgaccgaagtctctaagcaggatgatcagcagccacttgacctggaaggcgtgaagagaaaaatggaccagggaaattacacaagcgtcctcgaattctccgatgatattgtgaaaataattcaggcagccatcaacagcgacgggggtcaacccgaaataaaaaaggccaactccatggtcaagtctttctttattaggcaaatggagagggtctttccatggttctcagttaagaagtccagattctgggagccaaacaaagtgtcatccaattctggcatgcttcccaatgcagtcctgccaccctctttagaccacaactacgcccagtggcaggagcgggaggagaatagtcatacagagcagccgcccctgatgaagaaaattatccctgcacctaaaccgaagggtcctggagagccagactcgcccacccccctccaccccccaacaccaccaatcctctccactgatcgttcaagggaagactcacctgaactgaaccccccgcccggcatagaggacaacaggcaatgtgccctgtgtttgacctacggcgatgacagcgctaacgatgccggacggttactctacattggccagaacgagtggacacatgtcaactgcgccctctggagcgctgaagtttttgaggatgacgacggctccctcaagaacgtccatatggccgtcattcgcgggaagcagctgaggtgtgagttttgccagaaacctggggccacagtgggctgctgcttgacgtcatgtacatctaactatcactttatgtgtagtcgggccaaaaattgcgtattcctggacgacaaaaaagtatattgccagagacatagagacctcatcaagggggaagttgtgcctgagaacggcttcgaggtgttcaggcgggtctttgtagacttcgaagggataagtctgcggcgcaagttcctcaatggtctcgaacctgaaaacatccatatgatgatcgggtccatgactattgattgcctcgggatactgaatgatctgtctgactgcgaggataaattgttccccattgggtaccagtgcagcagagtgtactggagtaccaccgacgctcgcaagcggtgcgtgtatacttgtaagattgtggagtgtaggcccccagtcgtagagccagacatcaattccacagtggaacatgatgagaatcgcacgatcgcacactctcctacaagctttaccgagagctcatctaaggagagccagaacacggccgagattatcagccccccctcccctgataggccaccccattctcagacatcagggtcatgttattatcacgtgataagcaaagtgcccaggatccggacaccaagctattcccctacgcagagaagcccaggctgtagacccctaccctccgcaggctcaccaacgccgaccacacacgagatcgtgaccgtgggcgatccactcctgtccagcgggcttagatcgatcgggagccgacgccacagcacatcaagcctgtcaccacagcgaagtaaactacgcatcatgtcccccatgcgaaccggtaacacttattctcggaacaatgtaagtagtgtgtctacaaccggcaccgccacagatctagaatccagtgctaaagtcgtcgatcacgtgcttggacccctaaactcctccactagcctgggtcaaaatactagtacgtcctcaaatctgcaaaggacggttgtgactgtaggcaacaagaactctcatcttgatgggagctcttcatcggagatgaagcagtcctccgcttccgatcttgtctctaagagttcatccctaaagggggagaaaactaaggtcttgtctagcaagagtagcgaagggtctgcgcacaacgtagcctaccctggaattcccaagctggccccgcaggtacacaatactactagccgcgaattaaatgtatccaagataggcagcttcgccgagcccagtagcgtttccttcagctcaaaagaagccctgagtttccctcaccttcatctgcgcggtcagagaaacgaccgggatcaacataccgattccacacagtctgccaactcttcaccggacgaggataccgaggtgaagacacttaagctctctggaatgtctaacaggagctccattatcaatgaacacatggggagcagtagtcgggaccggagacagaaaggcaagaaatcgtgtaaggaaactttcaaggagaaacacagtagcaaatcctttctcgagcccggtcaggtgacaaccggtgaagagggcaatctgaagcctgaattcatggacgaagttctaacccccgagtatatgggacagagaccttgcaacaatgtgtcctcagataagatcggagataagggtctgtccatgcccggcgtaccaaaagctcctcccatgcaagtcgaagggtccgctaaggagttacaggctccccgcaagaggactgtcaaggtgacactgacacctctaaaaatggagaacgaaagtcagagtaaaaatgcgctaaaggagagctcacccgcatcccccttgcagattgaatccactagccccaccgaaccgataagtgctagtgagaacccaggagatggccccgtcgctcagccgagtccgaataataccagttgtcaggatagccagtccaataactatcagaacctgccagtgcaggacaggaacttgatgctgccggatgggccaaaacctcaggaagatggcagctttaaacgccgctatccacgccgcagcgctcgcgctaggagcaatatgttcttcggcttgacgcctctttatggcgtcagaagctatggtgaagaggacattcctttctacagttccagtaccggaaaaaaacgcggcaaacggagcgccgagggccaagtggacggcgccgacgatctgagcacctccgatgaagacgacctctactattacaatttcaccagaacagtgatctctagcggcggtgaagagcgacttgctagtcataaccttttcagagaggaggaacagtgcgacctcccaaaaatcagccaattggacggcgtcgacgatggaacagagtccgacacgagcgtgaccgctaccactcgcaaatcctcccagatcccaaagcgaaatggtaaggaaaatggaactgagaatctgaagattgatagacctgaggatgcgggagagaaggaacacgtgaccaagagtagcgtagggcacaaaaacgagccaaagatggacaattgtcattccgtgtctcgagtgaagacccaaggacaggattctctggaggcgcagctgtcttcactggagtcctcaagacgagtgcacaccagtacacccagcgacaagaaccttttggatacttataatacggaactgttgaagtctgacagcgataataataatagcgatgattgcgggaacatcctgccttctgacatcatggacttcgtccttaaaaataccccctccatgcaggccttgggagagtctccagaaagttcatcatcagagctcctgaacctgggggaaggccttggtcttgactccaatagggaaaaagacatgggcctgttcgaagttttctcacagcagctgccgacgacagagccagtagactcatcggtgagctctagcatctcggcagaggagcagtttgagctgccactagaactaccaagtgacctaagtgtactcactacccgctcaccgacggtaccaagccaaaatccttcccgactggccgttatctcagactccggagaaaaaagagtcacaattaccgaaaaatctgtggcatcttccgagagcgaccctgctcttctttctcctggtgtggatccgactccggaaggacacatgacgccagatcactttatccaaggccacatggacgccgatcacatcagcagtcccccatgcggctccgtcgaacaggggcacgggaataatcaggatctgaccaggaattcctccacccccggactccaggttcctgtgtcccccactgtgcccatccaaaaccagaaatacgttccgaacagcactgattccccgggaccatcgcagatctctaacgctgctgtacagaccacaccgcctcaccttaagcctgctaccgaaaagcttattgtggtgaatcagaacatgcaacccttgtatgtcctgcaaacactgccaaacggagttactcagaaaatccaattaacttcatccgtgtcctctactccaagcgttatggagacgaacacctcagtgctgggtcctatggggggtggccttacccttacaacaggtctgaatcctagtctgcccacttctcagtcactatttccaagcgcctccaagggactactgccgatgtcccaccaccagcatctgcattccttccccgccgccacgcagtctagtttccccccaaacatctctaacccacccagtggactcctaatcggcgttcagccacctcctgatccacaattgctcgtgagcgagagttctcagcgaacagatcttagcacaacagtggccacccccagctctgggctgaagaaacgacccattagccgcctacagacacgcaagaacaaaaagcttgccccatcgtcaactccctcaaacattgccccaagtgacgtggtatcaaacatgaccctcattaacttcacaccttcacagctgcctaatcatccatccctcttggatttggggtctctcaacacctcctctcatcgtactgtgccaaacattattaaacggtcaaagtcctctattatgtacttcgagcctgcaccgctgttaccccagagcgtggggggtactgccgccactgcagcaggaacatcaacaatttctcaggatacgagtcacctaacatctgggagcgtgtcaggcctggcctcaagctcatcagtgcttaacgtagtgtctatgcaaacaaccaccacacccacaagctccgctagcgtgcccggccacgtaactctgacaaatcccagactgctcggaactcccgacatcgggagcatctccaacttactgatcaaggcttcccagcagtcgctgggcatccaagaccagccagtcgccctgccaccctcatccggtatgtttccgcagttaggaacgagtcagaccccctccactgccgctatcacagcagcatccagtatctgtgtactcccatctacccagacgacaggaatcacagcggcctctccatcaggagaagccgatgaacattaccaactgcagcacgtcaatcagctgctggcatcaaaaacaggcatccatagcagccagcgcgaccttgacagcgcttctggtcctcaggtgtcaaactttacacagaccgttgacgctccaaacagcatgggcctggagcaaaataaggcgctgtcaagcgccgtccaggcttcccccacgtctccaggtggctcaccctcctctccttccagcggccaaaggtccgccagtcccagtgtacccggccctaccaaacccaaacccaaaaccaaacgtttccaactgcctctcgataaaggcaacggcaaaaaacacaaagttagccatttgagaacttcctcatctgaagcccatatcccggaccaagagaccacaagcctaacaagcggaaccgggaccccgggggccgaggcggagcagcaggatacagcgagtgttgagcagtcttcgcaaaaggagtgcggccagccagcaggccaggtggccgtgttacctgaagtgcaggtaacacagaatcccgcaaatgagcaagagtcagcggaaccgaaaacagtggaggaggaggaatccaacttcagcagtcccctcatgctgtggctgcagcaagaacagaaaagaaaagaaagcattaccgagaagaaacctaaaaaggggctcgttttcgaaatctcttccgacgacgggttccagatctgcgccgagtcaatcgaggatgcttggaagtccctcaccgataaggtgcaagaagcccggagtaacgcaagattaaagcagctctcgttcgcaggagtcaatggcctgcgcatgctgggaattcttcatgatgcagtggtctttctcatcgagcagctttccggcgcaaaacactgccgaaactataaatttaggtttcacaaacccgaggaagctaacgaaccgccccttaacccacatggctccgccagggccgaagtgcacctgagaaagtctgctttcgatatgttcaattttctggcctctaagcatagacagcccccagagtacaatccaaatgacgaagaggaggaagaggtccagttaaagagcgcaaggcgggcgacgtcaatggatctaccaatgcctatgaggtttaggcacctcaaaaagacaagcaaggaggcagtaggggtgtatcgatcacctatccatgggaggggcttgttttgtaaacgcaatatcgacgctggggagatggttattgagtacgccgggaatgtcatccgcagcatccagaccgacaaaagagagaaatattacgatagcaaggggataggatgttacatgtttaggattgatgactctgaagtagtcgatgccacaatgcatggtaatgccgcaaggttcattaaccactcttgcgaacccaattgctatagccgtgtgattaatatcgatgggcagaagcacattgtgatttttgccatgaggaagatttaccggggcgaggaactgacttacgactacaagttccctattgaggacgcatccaacaaactcccatgtaattgtggagccaaaaagtgtcgcaagtttttgaattag

SEQ ID NO: 160472 - DNA, 11796 bp, Artificial Sequence
  derived and/or modified sequence
atggcccatagctgccggtggcgatttcctgcacgtcccggtaccacaggaggtggaggcggagggggacgccgtgggctggggggtgcacccaggcagcgtgttccagcactcctgcttcctcctggaccaccagtcgggggtgggggacccggtgcaccgcctagtccacccgctgtcgccgctgccgcagcagctgccggatctagcggtgccggagtccctggaggcgcagccgcagctagcgctgcaagcagcagtagcgctagctcctctagctcaagtagctcgagcgccagcagcggtcccgcactcttgcgcgttggacccggattcgatgccgcactgcaggtctctgctgccatcggaaccaatctccgtagatttcgtgccgtgttcggagaatccggtgggggtggcggatccggcgaagatgagcaattcctaggtttcggatccgacgaggaggttcgggttaggagccccacgaggtccccttcagttaagacaagcccgaggaagccacggggtcgtccacgctcgggcagcgataggaactccgcgatattgagtgatcctagcgtgttcagtcccctcaataaatccgaaaccaaaagcggcgataaaattaaaaagaaagacagtaaatctatcgaaaaaaaacgcggtcggcctcccacatttcctggcgttaagataaagatcacacacggcaaggatatttcagagcttcctaagggtaataaagaagacagtctcaagaagatcaaacgtacccctagtgcaacattccagcaggctaccaagatcaagaagctccgtgccggtaagctgtcgcctctcaaatccaaattcaagacaggtaagctgcaaatagggaggaaaggtgttcagattgtgaggaggcggggacgccctccatctactgagcgcatcaaaacacccagcggcctgctgattaatagcgagttggaaaaaccgcagaaggtaagaaaggataaggagggcactccaccacttactaaggaggacaaaaccgtcgtgagacagagccctcgccgaattaagcccgtccgcattatcccctcatccaagcgtaccgatgccacaatagctaagcagctgctccaacgagccaaaaagggcgctcagaaaaaaatcgaaaaggaggccgctcagctgcaggggagaaaggttaagacgcaggtgaagaatatacgccagttcatcatgccagttgttagcgcaatctcatctaggatcatcaagacgcccagaaggtttattgaggacgaggactatgaccctcctatcaagattgctcgcctcgagtctactcccaactcccggttttccgctccatcttgtgggagcagtgagaagagctccgccgcttctcaacacagttctcagatgagctcagactcaagcagatcgagttctcctagtgtcgacacatcaacagactcacaggctagcgaagagatccaagtactgccagaggaacgctctgatacgcccgaggtgcatcccccactaccaatctctcaatcaccagaaaatgagtccaacgacagaagatctagacgatattccgtcagcgagagaagcttcggttcaagaacaacaaagaagctttcaacacttcaatccgcaccacagcagcaaacctctagcagccccccacccccactgcttacacctcctccaccgctccagcctgcttcaagtatcagcgaccataccccttggctgatgccacccaccatccctctggctagcccatttctgcctgccagtactgcccctatgcagggcaaaagaaaatcgatccttagggaaccgactttcagatggactagcctaaagcatagcaggagcgagccccagtacttttcaagcgccaagtatgcgaaggaaggattgattcgtaaaccaatatttgacaatttccgcccaccaccgctgacccccgaagatgtgggatttgcgtccggcttctccgcctctgggactgccgcatccgctagactcttttcaccccttcatagcgggacacggtttgacatgcacaaaaggtccccccttttacgggcaccgcgatttacaccctccgaggctcattctaggattttcgaaagcgtgacgcttccatcgaaccggacatccgccggaacctcttctagcggcgtgtccaatcggaaacgtaagcgaaaggtcttctcccccatcagatccgaacccagatctcccagccatagtatgagaacaaggagcggccgactctcctcaagtgaactttctccgctgacgcctcccagttctgtgagctctagcctatctatttcagttagtcccctggccactagcgcactcaatccaacttttacattcccctcccattccctaacacagtcaggagaaagcgccgaaaagaatcaaagacctcggaagcagacatcagcaccggcagagcctttcagctcatcttccccaacgcctctattcccttggtttactcccggttcacagaccgagagaggtcgcaacaaagataaggccccagaggagctatccaaagatcgtgatgccgataaaagcgtggagaaagacaagtctagggagagggatcgggaacgcgaaaaggaaaacaaacgtgaatctagaaaggagaagcggaaaaagggtagtgagatccagagttccagcgcgctgtatcctgtgggcagagtttctaaggagaaagttgtgggcgaagatgtcgccacttccagctctgcaaagaaagccactggccgtaagaagagtagctctcacgatagtggcactgacatcacttccgtcactctcggagacaccaccgccgttaagaccaagatcttgattaaaaagggtcggggaaacctcgagaagacaaatctagacctcggcccaacagccccatctctggagaaggagaaaacactctgtcttagcacacctagtagctctaccgtgaaacactctaccagtagtatcggatccatgctcgctcaggctgacaagttacccatgaccgataagcgtgttgcgagccttcttaaaaaagcgaaggcgcagttgtgtaagatcgaaaagtccaaatcactcaaacagactgaccagcctaaagcccagggacaggaatccgattcttcggagacatccgtgcgaggtccgagaatcaaacatgtttgcaggcgtgccgctgtggcactggggagaaaacgggcagtcttccctgatgacatgccaacgctaagcgctctcccttgggaggagagagaaaaaattctcagtagcatgggaaatgacgacaaaagttccattgcgggaagcgaggacgccgagcctctagcccctccgatcaagcccatcaagccggtgacaaggaataaagcaccacaagagccccctgtcaagaaaggcagaagaagcaggagatgcggacaatgtcccggttgccaggtgcctgaggactgtggggtttgcactaattgtctcgacaagccaaaatttggcggacgaaacattaaaaagcaatgctgcaagatgcggaaatgccagaatctccagtggatgcccagcaaggcctacttgcagaaacaagcgaaggcagtgaaaaagaaggagaagaagagcaagacgtcggagaagaaggatagcaaggagtcctctgtggtgaagaacgtagtagactcctctcagaaaccaactccctctgcgagagaggaccccgcaccaaaaaaatcttccagcgagcctccaccacggaagcctgtggaagagaagtctgaggaaggaaacgtgagcgctcccggacccgaatccaagcaagctacaacccctgcctctcgaaaatcgtctaaacaggtgagtcaaccggctttagttatccccccacagccaccaaccacaggaccccctcggaaggaggtgccaaagacaacgccttcggagccaaagaagaaacagccaccgccacctgaatccggccctgagcagagtaaacagaaaaaagtggcacccaggcccagcattccagtcaagcagaagccaaaggaaaaagagaaacccccaccagtgaataagcaggaaaatgccggtactcttaacatattgtccactctctccaacggtaattcctccaaacagaaaattcccgctgacggcgttcatcggattagggttgatttcaaattcgtttactgtcaagtgtgttgtgaaccgttccataagttttgtctggaggagaatgagcgcccactggaagatcaactggagaattggtgctgcaggcgctgtaaattttgccacgtctgtggccgacaacaccaggccacgaaacagcttttggaatgcaataagtgcaggaacagttaccatcctgagtgtttgggccctaactatcccacgaagcccacaaaaaaaaaaaaggtgtggatatgcacaaagtgcgtcagatgtaagagttgcggctccactactcctggcaaggggtgggacgcacaatggtcacacgatttctctttgtgccacgattgcgccaagctgttcgctaaaggcaacttctgtcccctgtgtgataagtgttacgatgacgacgactacgaatccaaaatgatgcagtgtggtaagtgcgaccgctgggtgcactccaaatgtgagaatctttcagacgaaatgtacgaaatcttatccaatttaccggaatcagttgcatacacatgcgttaactgcactgagagacatcctgccgaatggcgactcgccctggaaaaggagctgcagatctcactgaaacaggtgttgacggccctgcttaactcacgaacaactagccacctgctgagataccgccaggccgctaaacctccagatctcaatcctgagacggaggagtccattccatcccgtagcagccctgaaggacctgaccctcctgtgttgaccgaagtgtcaaaacaggacgatcagcaaccattggatttggaaggggtcaagagaaagatggaccaaggaaattatacaagcgtgctagagttttcagatgatattgtgaagattatacaagccgctattaattctgatgggggtcagcccgagatcaagaaggcgaactctatggtaaagtccttcttcatccgccagatggagcgtgtctttccatggttcagtgtaaagaagagccgtttctgggagccaaataaggtcagcagtaattccggaatgttgcccaacgccgttctacccccttcgctagatcacaattatgcgcagtggcaagagcgcgaagaaaactctcacacagagcagcccccactgatgaagaaaatcatccctgcacccaaacctaagggtccgggtgagcctgatagtcccactcctttgcatccgccaacgccccctatactgagcaccgaccgctctagagaggacagccctgagcttaatcctccaccaggcattgaagacaatcggcagtgcgccctatgtctgacctacggagacgattctgcaaatgatgccggaaggctgctgtacataggccagaacgaatggacgcacgtgaattgcgccctgtggtccgccgaggttttcgaagacgatgatggatcgttgaagaatgtccatatggcagtgatacgtgggaagcagctgaggtgcgaattttgccaaaagcccggtgccaccgtcgggtgctgcttgacaagttgcacctctaactaccactttatgtgttctcgggctaaaaactgtgtcttccttgatgacaagaaggtgtattgtcagcggcaccgcgacctcattaaaggcgaggtggttcctgaaaacggtttcgaagtcttcagaagagtgttcgtggatttcgaaggcatttctttgcggcgtaaatttcttaacggtcttgaaccagagaatatacacatgatgatcggaagtatgactattgactgcctggggatccttaacgatctgtctgactgcgaagataagctattccccatcggctatcagtgcagccgggtctactggtctacgactgacgctcggaaacgttgtgtgtacacatgtaagattgtcgaatgtcggccaccagttgtcgagcctgacattaacagcacagtggagcatgatgagaatagaacaatcgcacacagccctacctcttttacagaatcaagctccaaagagtcccaaaatacagctgaaatcatctcccccccttccccagacagacctccacatagccaaacatccggcagttgctactaccatgtcattagcaaagtgcctcggattcggaccccgtcctactcccctactcagcgatcccccggatgcagacccctccctagtgctggaagtccaacacccaccacacacgagattgtgacagttggcgatccactgctcagctctggactcagatcgattgggagtcgaaggcattccacctcctctctctcaccacagagaagcaagctcagaattatgagccccatgcgtaccggcaacacctactctaggaacaacgtttcttctgttagcaccactggaacggcaacagacctggagagtagcgcaaaggtagtcgaccacgtcctgggacctctaaattcctcaacttccctgggccaaaacactagcacatcttctaacttgcagcgaacggtggtgacagtggggaacaaaaactcacacctggatggcagctcctcctctgaaatgaaacaatccagcgcaagcgatcttgtgtcaaaatccagtagtctcaagggcgagaagaccaaggtcctgagtagcaagagtagcgaggggagtgcacacaatgtcgcctaccccggtatcccaaaactcgcgccacaggtgcataacactacatcccgcgaacttaacgtttctaagatcggatctttcgcagagccttcaagtgtcagcttctcctctaaggaagcattatcgttccctcatctacacctgagaggccagcggaatgaccgcgatcagcatactgattctacccagagcgcgaacagcagcccagatgaagataccgaggttaagacattgaaactgtctggaatgagcaacaggtcctccatcataaatgagcatatggggtcaagcagccgggacaggagacagaagggcaagaaatcttgtaaagaaacatttaaggagaagcacagctctaagagcttcctcgagccaggacaagtgacaactggcgaggagggcaacctaaaacctgaattcatggacgaggttcttactcccgagtacatgggccagcgcccttgcaacaacgtaagttccgataaaataggggacaagggtctgtctatgccaggggtgcctaaggccccaccaatgcaggtggaaggctccgccaaggagttgcaggcgccacggaaaaggacagtcaaggttaccctgactcccttgaagatggagaacgaaagccaatccaagaacgctctgaaggagtcttcccctgccagtcctttacagattgaatctaccagccccacagagccaattagcgcctcagaaaatccgggtgacgggccagtggcccagccctcgccaaacaacaccagctgccaggatagtcagagcaataattaccagaacttacccgtccaggatcgtaacctcatgctgccagacgggcctaaaccacaagaagatggcagctttaagaggcgatacccaaggcgctctgccagagcacgcagcaatatgttttttggcctgacccccctctatggtgttcgatcctacggagaggaggatatccctttttattcgtcgtctacgggaaagaaacggggaaagcgctctgctgagggacaagtggatggagcagatgatctgtctactagtgatgaggacgacctttactactacaacttcaccagaacagtgattagttcaggtggagaagagcgcctggcttctcacaatttgtttcgggaggaggaacagtgtgacctccccaagatttcccaactcgatggagtcgacgacgggacagagtctgacactagcgtgaccgcgaccactcgtaagagcagccagataccaaagaggaatggaaaggagaacggcaccgagaaccttaagatcgataggcccgaggatgccggagaaaaggagcacgtcactaagtcctcagtgggtcataagaacgaaccgaaaatggataattgccattctgtaagccgggtaaaaacacaaggacaggatagccttgaggcgcagctgtcttctctggaaagttctcggagggtgcacacttccacccctagcgataagaacttacttgacacgtacaatacagaactcttaaagagcgatagtgacaataataattccgacgattgtgggaatattctcccatctgatatcatggatttcgtcctgaagaatacaccctctatgcaggcgcttggcgaatctccagaatcatctagctcggaactgctgaacttgggcgaaggcctgggtctggatagtaatcgcgagaaagacatgggcctgtttgaagtgttctctcagcagctgcctaccacggagcctgtggacagttccgttagcagctcaatctccgcagaggaacaatttgaattacccttagaattgcccagcgatcttagcgtgttaacaaccaggtcacccacagtccctagccagaatccatcaaggctggcagtgatctcggacagcggcgaaaagcgagtgaccatcacagaaaaatctgtggcttccagtgagagcgacccagctctcctgtcaccaggggtcgaccccacacctgaagggcatatgacccctgaccatttcatccaggggcacatggatgcagatcatattagctctcccccatgcggttccgttgagcagggtcacggtaataaccaggatcttactaggaacagctctactcctgggctacaggttccagtgtctcctacggttcctattcagaatcagaagtacgtccccaacagcaccgacagccctggcccttcccagatttcaaacgccgctgttcaaacaaccccaccgcatttgaagcccgctactgagaagctgatagttgtaaatcaaaatatgcagccactctatgtcctgcagacactgcctaacggtgtgactcaaaagattcagcttacaagcagcgtttcgtcaacgccttccgtgatggagactaacaccagcgtcttaggtcctatgggcggtggtctgacactcacaacaggactgaacccttcattaccaacctcccagtccttattcccgtccgcaagcaaggggttattgcccatgtctcaccaccagcacctccactctttccctgccgcaacgcagtccagcttccccccaaatattagtaatccgccttccggcttgcttattggggtccagcctcctccggatccgcagcttcttgtcagtgagtcctcccagagaaccgatctgtctactacagttgcaacgccaagctcaggtctgaagaagagacctatctcacgattacagaccaggaagaacaaaaagctagctccctccagtactccaagtaacattgccccaagcgacgtcgttagcaacatgaccctaatcaatttcacaccaagtcagctccccaatcatcctagcttgctggatctgggatccctaaatacttcttcccatcgcactgtgcctaatatcattaaaaggtcaaaatctagtatcatgtactttgaacctgcacctctgctgccgcagtctgtgggaggaactgcagccactgctgctggaacatctaccatcagtcaagacacatcccacctcaccagtggtagtgtgtctggccttgcgtcgtcaagctcggttcttaacgttgtgtccatgcaaaccaccacaacccccaccagttccgccagcgtccccggacacgtcaccttaaccaatcctcgccttctgggtacacctgacatcgggagcattagtaacttacttatcaaggccagtcagcagtctctgggcatacaggaccaaccagtggcgttgccaccatcttcgggcatgtttccgcaactggggacttcgcaaaccccctctacagctgccatcaccgcagccagcagcatctgcgtccttccctccacgcagaccacgggtatcacagccgctagtcctagcggggaagccgatgagcactatcagttacagcatgtcaatcagcttctggcttctaagaccgggatccattcctcacagcgggatttagacagcgcaagtggccctcaagtctccaatttcacacagactgtcgatgctccaaatagcatgggcttggagcagaataaagctctcagcagcgccgtccaggcaagcccaaccagtcctggtgggtctccctcttcaccatcatcaggccaacggagcgcaagtccaagtgttccaggtcctactaagcccaagccaaagacaaagagatttcagctaccactggataaggggaacggaaagaagcataaggtgtctcacctccggacgtctagcagcgaagcacatattccagaccaggagacgacaagtctcacgtcaggcacagggacgccaggcgcagaggccgaacaacaggacacagcctcagtggaacagtcctcccagaaggagtgtggccagccagcaggccaagtggcagtgttacctgaagtgcaagtaacccaaaatcccgcaaacgaacaagagtccgccgagcctaaaacagtggaagaggaggaatccaatttttcgtccccattgatgctatggttgcagcaagaacagaaacgcaaggagtctatcaccgaaaagaaacctaagaaaggcctcgtttttgagatcagcagcgatgatggctttcaaatctgcgcagagtctatcgaggacgcttggaaatctctgaccgacaaagtgcaggaggccaggtctaacgcaagactaaaacaacttagctttgctggcgtgaacggactgcggatgctgggcatcctccatgacgccgtggtgttcttaatagagcagttgagcggggctaaacactgtcgaaattacaaatttagatttcacaagccggaggaggctaatgaaccaccgctgaacccccacggctctgcaagagcagaggtgcacctcagaaagtctgcctttgacatgtttaacttcctggcttccaagcacaggcaaccgccagaatataaccccaatgatgaagaggaagaggaggttcagctcaagtccgccaggagggccacgtcaatggacttgccaatgccgatgcgctttcgccacctgaaaaagacttcaaaggaggctgtaggagtgtacagaagtcccatccacggcagaggactgttttgcaagcgcaacattgatgccggtgagatggtaatcgagtacgccggaaacgtgattcggtccattcagaccgataagcgggagaaatactacgattccaagggaattggctgctatatgttccggatcgacgattccgaagtcgtggacgctactatgcacgggaacgctgccagattcatcaatcattcttgtgaacccaactgctattccagagtgattaacatcgacggtcaaaagcatatcgttatattcgctatgagaaagatatatcggggtgaagaactgacctacgactacaagtttcccatcgaggatgcgagtaataagctaccctgtaactgtggggctaagaagtgcagaaagttcctcaattac

SEQ ID NO: 160473 - DNA, 8639 bp, Artificial Sequence
  derived and/or modified sequence
catgcgcatcctgaatgcctgaccatggaacgcgagaaaatcctttcctcaatgggtaacgacgacaaatccagcatcgccggatccgaggacgcggaacctctggcaccacccatcaaacccattaagccggtcactaggaataaagctccacaggaacctccggtgaagaagggcaggcgtagtcgacgttgtggtcagtgccccggttgccaggtacccgaagactgcggcgtgtgtacgaactgcctggacaaacctaagttcggaggaagaaacatcaagaaacagtgttgtaagatgaggaaatgccaaaatctgcagtggatgccatcgaaggcttaccttcaaaaacaagctaaagcagttaagaagaaggagaagaagagcaagacctccgagaaaaaggactcaaaagaatccagcgtagtcaagaatgttgtggatagtagccaaaaacctactccgtctgctagagaggatcctgctccaaagaaaagctcgagcgagccaccgcctagaaaacccgtggaggagaagtctgaggaaggcaatgtgagtgctcccggaccagagtctaagcaggccaccacaccagcgtctcgtaagtcgagcaaacaagtgagccaacccgctttagttattccgcctcaacctcctactactggaccaccccgaaaagaggtgcccaaaacgacgccaagcgaacctaagaaaaaacagcctcccccacctgagtcaggcccagagcagtcaaaacagaaaaaagtggctcctcggccttccatccctgttaagcaaaagccaaaagagaaggaaaagccccctccggttaacaagcaggagaatgcgggaactctaaacatcctgtctacactgagtaatggtaactccagtaagcagaaaatcccagcggacggcgtacacaggatcagggtggacttcaaggaagattgtgaggcagaaaatgtgtgggagatggggggactcggcatactgacctccgtgcctatcacccccagagtggtgtgctttctctgcgcaagctctggccacgtagagttcgtgtactgccaagtttgttgtgaaccattccataagttttgcctcgaagagaatgagcgccctctggaagaccaactcgagaactggtgctgccgaaggtgtaagttttgccatgtatgtggtcgccaacatcaggccacgaagcagctcctcgaatgcaataagtgccgcaatagttaccaccccgaatgtttgggcccaaattaccctactaagccaacaaagaagaagaaggtttggatatgcacgaaatgtgtaagatgtaagtcatgcgggtcaaccacacctggaaagggatgggatgctcaatggagtcacgacttctcactctgtcacgattgcgcaaagctgttcgccaaaggcaacttttgtcctctttgcgacaaatgttacgacgacgacgactacgagtcaaagatgatgcagtgcggtaagtgtgacaggtgggtgcattctaaatgcgaaaacctcagcgacgaaatgtatgagatcctttccaatctgccagaaagcgtcgcctatacatgtgtgaattgcaccgagcgtcaccccgcagaatggcggctggccttggagaaggaactgcagatatccttgaaacaggtactcacagcccttctcaacagccgtacgacctcgcacctgctgcgctacaggcaggccgcaaagccaccggacttgaatcctgaaaccgaagaatccatcccctctcggtcttctccagagggccctgacccccctgtgcttactgaagtttcaaaacaggacgatcagcaaccattagacctcgagggcgtcaagagaaaaatggatcaaggaaactacacttcagtgctcgagttctccgacgatatcgtgaagatcatacaggcagccataaactctgatggaggtcagccagaaataaagaaggcaaattctatggtaaaatctttcttcatcaggcagatggagcgtgtgtttccttggttttccgtcaagaaaagccggttctgggaacccaacaaggtgtcctcaaatagcgggatgctgcccaacgccgtgttgccaccgtccttggatcacaactatgcacagtggcaggagcgcgaggagaactctcacaccgaacagcccccactaatgaagaaaatcatcccggcaccaaagccaaagggcccaggcgaacccgatagcccaacccctcttcatcctccaaccccgcctattctgtccacagataggtctcgcgaggactcaccggaactcaacccccctcctggcattgaggacaacagacaatgcgcattgtgtctcacatacggggatgactcagctaacgatgcgggacgtcttctgtatattgggcagaacgaatggacccacgtcaattgcgctctctggtcagcggaggtgttcgaggatgacgatggatccttgaagaacgtccacatggccgtgatcaggggcaaacaactccgatgcgagttttgccagaaaccgggagccacggtgggatgctgtctgacaagttgtacatctaattaccatttcatgtgttcccgcgctaagaactgcgtcttcttagacgataaaaaagtctattgccagaggcatcgtgacctaatcaagggtgaggtcgtccctgagaacggattcgaggtttttagaagggtattcgtggactttgagggaatttccctcaggcgaaagtttttgaatggcctagagcccgagaacattcatatgatgattgggtcaatgacgatagactgtctaggcatcttaaacgacctcagcgattgcgaggacaagctgtttcctatcggctatcagtgtagtcgggtctactggagcacaactgacgcgcgaaaacggtgtgtatacacttgtaaaattgtggagtgtcgaccacctgtcgtggagcccgatataaatagcacagtggaacacgacgagaacaggaccattgcacactcaccaactagtttcactgaaagttcaagcaaagagagtcagaatacagccgagattataagtcctccctcaccggaccgaccaccccactcacaaaccagtggttcctgctattaccatgtgatttccaaggtacccagaatcagaactcctagctattcccccacccaaagatctccgggatgtagaccattaccttcagccggatcccctaccccgacgacccatgagatcgtcactgttggtgaccctctccttagctccgggctgcgctccatcggcagtaggaggcacagtacctctagcttaagcccgcagcgcagtaaattgcgaatcatgtcccccatgagaacaggcaacacatattcccggaataacgtgtccagtgtctcgacaaccggcaccgcaaccgatttggaaagctcggctaaggtagttgaccacgtcctgggacccctgaactcctccaccagcctgggccagaacacgagcacaagcagtaatttgcagcggactgttgtgacagtaggtaacaagaactcccatctggatggtagctcttccagcgagatgaaacagtcatccgccagcgatctggtgtcgaagagtagtagccttaagggtgaaaagacgaaggtcctgagttccaaaagcagtgagggatctgctcacaacgttgcttaccccggaatcccaaagctggctcctcaggtgcataacactacatcaagagagttaaatgtctccaagattggctcctttgcagaaccttctagcgtaagctttagcagtaaggaggccctgtcatttccccaccttcatcttcgtggacagaggaacgatcgagatcaacacacagactctacgcagagcgcgaattccagcccagatgaggatacagaagtgaagaccctgaagttatctgggatgagtaaccgcagctcaattataaacgaacatatgggttcctccagcagggacaggcgccagaaagggaaaaagtcctgtaaggagacatttaaagagaagcactcttctaagtccttcctggagccaggacaagtgacaacgggcgaggagggaaatctcaagcctgagtttatggacgaagtcctaacccccgaatatatgggacagcgaccatgcaataacgtcagctccgataagatcggggataaaggactatcaatgcctggtgttcccaaggctccacctatgcaggtggagggatctgctaaggaattgcaggccccaagaaagcgcacagtgaaagtgacactgaccccactgaaaatggagaacgaatctcagtctaagaacgcactgaaagaatcttctccagctagccccttgcagatagaatccacaagccctacagaacccatctcagcctctgaaaatcccggagacgggccagtagctcaaccatccccaaacaatacgagctgccaggactcccagtcaaataactatcagaatctgcccgtacaggatcggaatctgatgctcccggatggaccaaagccccaggaagacggcagttttaagaggcgatatcctagaagatctgcaagagcaaggtccaacatgttcttcggcctgacacccctgtatggagtgaggtcctatggggaggaggacatccctttttacagttcttctaccggcaaaaagagggggaaaagatcagcagaggggcaggtggatggtgccgacgacctctccacgagcgatgaagacgacctgtattactataatttcactcgcaccgtgatcagctcgggaggagaggagcgcctggcctcccacaacctgtttagagaagaagagcagtgtgatttgcccaagatttctcaactcgacggagtcgatgatggaaccgaatcagatacttcagtcaccgccactactcgcaagtcaagccagatcccaaagaggaacgggaaggagaatggtacagaaaatcttaagatcgaccgacctgaagacgccggagaaaaagaacatgtcacgaagtcttccgtgggccataagaatgagcccaaaatggacaactgtcactctgtgagtcgagtaaagacacaggggcaagactctctggaagcccagctcagttccctcgaaagctctcgacgagttcacacttctactccgagtgacaaaaatttgcttgacacttacaacaccgagctattgaaatccgatagcgacaataacaattctgatgactgcggcaacatcttgccttctgacataatggattttgttctgaagaacaccccttctatgcaagccctgggtgaaagccccgaatcgtccagtagtgaactccttaatctgggcgaaggactgggactggatagtaatagagagaaagatatgggtctctttgaagtgttcagccagcagctgcccaccactgaacctgttgatagtagcgtgtcctcttccatttcagctgaggagcagtttgagcttccactagaacttccatccgatctgagcgtcctgaccacccgctccccgacagttcccagccaaaatccttcgagactggctgttattagtgattcaggagaaaagagggtaactattaccgaaaaatccgtggctagttccgagagcgatcctgccctgttgagccctggggtcgatccaaccccagagggtcatatgactcctgaccacttcattcagggccacatggatgcagatcatatttcctccccaccgtgtggtagtgtggaacaaggccacggcaacaatcaagatttgacaaggaactcctcaacaccaggcttgcaggttcctgtctctccaactgtacccatccaaaaccagaaatacgtccctaactccacagatagcccgggacccagccaaatcagcaacgctgcagtccagaccactcccccacatttgaaacccgctaccgagaagttaattgttgtaaaccagaacatgcaaccactgtacgttctgcagactcttcctaatggagtgacgcagaagattcagctcactagcagcgttagctcaaccccatccgtaatggaaaccaatacctcagtgctcggccctatgggaggaggtcttaccctaactactggacttaatcccagtctgcctactagccagtcccttttcccatccgcttctaagggactcttacccatgtctcatcaccaacacctgcactcctttcctgcagcaacccagagctcttttcccccaaatatctccaatcctccttccggattgcttattggcgtccaacctcctcccgaccctcagttactagtgagtgagagttcccagcggacagatctgtctacaactgtagctactcctagcagcgggctgaaaaaaaggccaatctcccggctacagaccaggaagaataagaaactagccccaagtagcactccctctaatatcgcaccatctgacgtggtgagtaatatgacccttattaattttactccctcccagcttccgaaccaccccagtttactagacctgggatcgctgaatacaagctcccaccggacggtgccaaatattataaaacggtctaaaagtagtattatgtacttcgagcccgctcccttgctgccgcagagcgttggaggaaccgctgctacagccgctggaaccagcaccattagccaggacaccagccatctgacttccgggagcgttagcggcctggcctcatcgtcgagcgtactgaacgtagtgtccatgcagacaaccactaccccaactagcagtgctagtgtgcctgggcacgtaacattaacaaatcctcgtcttctgggcacccctgacatcggaagtattagtaacttattgatcaaagctagccagcagtcacttggcatacaggatcagccagttgctctgcccccatcttccggcatgttcccccagctagggacttcccagacaccgtcaaccgctgctattactgcagcttccagtatatgcgtcctgccaagtacccaaaccactggcataaccgccgctagcccctccggggaagctgacgaacactaccagctgcagcacgtgaaccagctcctggcaagcaagacagggatacattcttcacagcgcgatctcgattcggcgtctggccctcaagtctctaatttcacccaaaccgttgatgccccaaatagcatggggttggagcagaacaaagctctttcttccgctgtccaggccagccctactagtccaggaggatctccatcttcgcccagttccgggcaacgtagtgcctctccttccgtgcctggtccaaccaagcccaaaccaaaaaccaagcgatttcagcttccgctggataaagggaatgggaaaaagcacaaagtgagccatttacgcacctcttcctctgaggcccatatcccagaccaggagaccacctccttgactagtggcacagggacgccaggcgctgaggccgagcagcaagacactgccagcgtcgaacagagctctcaaaaggaatgtggacaaccagccggtcaagtggcagtactgcctgaggtgcaagttactcagaatcctgccaatgagcaagaatccgctgagccgaaaacagtagaggaggaagaaagcaatttcagcagtcctttgatgctttggctgcaacaagaacagaagcgcaaggagtcaatcacagaaaaaaagccaaagaaaggccttgtgtttgagatatcctctgacgatgggttccagatttgtgcggagtcaatcgaagatgcctggaaatctcttactgacaaggtgcaagaggccagaagtaacgctcggctgaagcagctgagcttcgcaggtgttaacgggctacgtatgttaggaatcttacacgacgctgtagtgtttttaatcgaacagctgagcggtgccaaacattgtcgaaattataaattcaggttccataaaccagaggaggccaatgaaccgcctctaaatccgcacgggagcgcacgggcagaggttcatctgagaaagagcgccttcgatatgtttaactttctagcatccaagcacagacagcctcctgagtataatcccaacgacgaagaagaggaggaggtgcagctcaagagtgcacgccgtgcaacgtctatggatctgccgatgccgatgcggttccgccacctgaaaaaaaccagtaaagaggcggttggcgtttacagaagtccaatccacggcagaggattgttttgtaagagaaacatcgacgctggagaaatggttatagagtatgccggaaacgtgatccgctctattcagaccgataagcgcgaaaagtattatgattccaaaggcatcggttgttacatgttcaggatcgatgacagcgaggtggtagacgctaccatgcatgggaatgccgcacggtttataaaccactcatgtgagcctaattgctattctcgggtaatcaatattgatggccagaaacacattgtgatttttgcaatgagaaagatctatcggggagaggagcttacctatgactataaatttcctattgaggatgcctccaataaactgccttgcaattgtggtgcaaagaagtgtcggaagtttctgaatta

SEQ ID NO: 160474 - DNA, 11910 bp, Artificial Sequence
  derived and/or modified sequence
atggcgcattcatgtaggtggagattccccgctaggcctggtaccaccggcggtggcggaggcggtggaaggaggggacttggcggagcccctcggcagagggtgcctgctctcttgctgccaccagggccacctgtgggcggtggaggacctggagctccgccatcccctcctgccgtggctgccgctgcagccgctgccggatcctccggcgcaggggttcctggaggcgcagctgcagcttcagctgcaagtagctccagtgcaagctcgagcagctctagctcctccagtgccagcagtgggccagcccttctgagggtcggacctgggtttgatgctgcactgcaagtctctgctgctatcggcacaaacctgcgcaggttccgcgctgttttcggcgagagtggcggtgggggaggatccggagaggacgagcagtttctcggctttggcagcgacgaagaggtgagggtccgttcacccacacgaagcccctctgttaagacttcacccagaaagccacggggtcgacctaggtctggttcagaccggaattctgccattctctctgatccctcagtattcagccccctgaataaatctgagaccaaatccggagacaagattaagaagaaggactcaaaatcgattgagaaaaaaaggggccgtccacccacatttcccggagtcaaaatcaaaattactcatggtaaagacatctccgaactgcccaagggcaacaaggaggactctctgaaaaagatcaagcgtacaccctctgctaccttccagcaggccacaaagatcaagaagctaagggcaggcaagctcagccctctcaagagtaagtttaagacaggcaaactgcagataggcagaaaaggcgtgcagatcgtgcgcagaagggggaggcccccttctactgaacgtattaagacgccatctggtctcctgataaatagcgagctggagaaacctcaaaaagtccggaaagataaggaagggacgccacccctgaccaaagaagataagacggtggtaaggcagtctccgaggaggattaagcctgtgaggatcatccccagcagcaaaaggactgatgccaccattgccaagcaactcctgcagagagcgaaaaaaggcgctcagaaaaagatcgagaaggaagccgctcaactccagggaagaaaagtgaaaactcaggtcaagaacattaggcagttcatcatgcctgttgtctctgcaatttctagcagaattatcaagactccaagaagattcatcgaggatgaagattacgatccacctattaagatcgctcgccttgaatcaactccgaatagcaggtttagcgccccatcatgtgggtcaagcgaaaagtcgagtgccgcttcacaacattcctcccagatgtcaagcgatagctctaggtctagctcccctagtgtcgataccagtactgattctcaggcaagcgaagagatccaagtgctgccagaggagcgcagtgacacccctgaggtacatcccccactgccaataagccagagcccggaaaatgaaagcaacgaccgcaggagcagaaggtatagcgtgtccgagcggtcctttgggtcaaggactacaaaaaagctttcaacactccagtctgcgcctcagcagcagacgagctcctccccccctccgccactactgacaccccctccacccctgcagccagcgtcttctatctcagaccatacgccttggctgatgccacctaccattcctctggcatctccgtttctcccagcgtccacagcccctatgcaaggcaagcgtaaatctattcttcgtgagccgacatttcgttggacctctttgaagcactctaggagcgagcctcagtattttagttctgcaaagtacgccaaggaaggtcttatccggaaacctatcttcgacaactttcggccacctcctctcacccccgaggacgtggggttcgcctcagggttctccgcttccggcacagctgcctccgcacggctgttcagcccactacacagtggaactcggtttgatatgcataagcgaagcccattgctgagagccccaagatttactcctagcgaagcacactcacggatttttgagtctgtgaccctgccttcaaaccgtacctctgccggaacatcttccagcggagttagtaaccgaaagagaaagcggaaggtcttctccccaatccggagcgaacccaggagtccctcacattccatgaggacacgatcaggaagactcagttccagcgagttgagccctctcactcctccttcatccgtaagctcctcattgtctatttccgttagtccactggccacaagcgcactgaatccgacatttacattcccctcacattcactcactcagtccggagagagcgccgagaaaaaccagcgaccgagaaagcagactagtgcccctgccgaaccattttcttcatcttccccaacgcctctgttcccctggttcacccccggatcacagaccgagcggggtagaaacaaggataaggctccagaggaactgtcaaaagatcgcgatgctgataaaagcgtagaaaaggacaagtctcgagagagagaccgagaacgcgaaaaggaaaacaagagggagagtcgtaaagagaaaaggaagaagggctccgagatccagtctagctccgcactgtatcctgtcggacgcgtgtccaaggagaaggtggtgggtgaagacgttgccacctctagcagcgcaaagaaggctacagggaggaagaagtcatcttctcacgatagcgggactgatatcaccagtgtgacattaggcgatactacagcagttaaaactaagatcctgatcaagaagggtcgtgggaatctggaaaagacaaacctggatctgggcccaacggccccttccctggagaaagaaaaaactctctgtctaagcaccccctcatcaagtactgttaagcacagcacctctagtatcggttctatgctcgcccaggcagataagctgcccatgaccgacaaacgcgtggccagcctgctgaagaaggctaaggcacagttgtgcaaaatcgagaaatctaagtctctgaagcaaaccgatcagccaaaggcccaaggacaagagtccgactccagcgaaacaagtgtccgtggccctcggatcaaacacgtgtgccgacgcgctgcagttgcactgggaaggaagagagccgtgttccccgatgacatgccaacactgtccgccctgccttgggaggagcgggagaaaattctatccagcatgggaaatgacgacaaatcaagtatagctgggtccgaggacgcagagccattggccccacccatcaagcctatcaagcccgttaccagaaacaaagcccctcaggaacctccagtgaagaaggggaggaggtcgcgaaggtgcggccaatgccctggatgtcaggtgccagaggattgcggtgtctgcacaaattgtctggacaaaccaaagtttgggggtcgcaatatcaagaagcagtgttgcaaaatgcgcaagtgccagaatctccagtggatgccatccaaggcatacctccagaaacaggcgaaggccgtgaagaaaaaggaaaagaaaagcaaaacctccgagaagaaggatagtaaagaaagttccgtcgtgaagaatgtggtagattcctctcagaaaccaacaccctctgctcgcgaagaccctgcaccaaagaagagtagctcagagcctccgccaagaaagccagtagaagagaagtccgaggaaggaaatgtttctgcccctggcccagaatctaaacaggctaccacacccgcaagccgtaaaagtagtaagcaagtgagtcagcccgctctcgtcattcctccacagccccctacaaccggaccacctcgtaaggaggtcccaaaaacaacgcccagcgaaccgaagaaaaagcagccgccacccccagaatcaggtcccgaacaatcaaagcagaaaaaagtggccccaagaccaagtattcctgtgaagcagaagcctaaagagaaggaaaaaccacccccagtgaataaacaggagaacgccggaacgctgaatatcttgagcacactatccaacggcaatagctccaagcaaaaaatcccagccgatggagtgcataggattagggttgactttaaggaagactgcgaggctgagaacgtctgggagatgggaggcctgggcattctaacttccgtgcctatcactccccgagtggtgtgcttcctgtgtgcctcttctggccacgttgaattcgtgtactgccaagtgtgttgcgagccatttcataagttctgcctggaagagaatgagcggccattggaagaccagctagaaaattggtgttgccgaaggtgcaaattttgccatgtatgcggacgccaacatcaggcaaccaagcaacttctggaatgcaataagtgccgaaacagctaccatcctgaatgtctcggaccaaactatcccactaagcctacaaagaaaaagaaggtttggatatgtactaaatgcgtgcgttgtaagtcctgcggctccacaacccccggtaaaggctgggatgcacagtggagccacgactttagtctgtgtcatgactgcgcaaagctgttcgcgaaaggtaatttctgccccctgtgcgataagtgttatgatgatgacgactacgagtctaaaatgatgcagtgtggcaaatgtgaccgctgggtccactccaagtgcgagaacctgagcgatgaaatgtatgagattctaagcaatcttcctgaaagcgtggcctacacttgtgttaattgcactgaaagacatccagctgaatggagactggctttggaaaaggagctccagatatccctgaagcaagtcctgactgcattgcttaattctcgcacaacaagtcatctgctcagatatcgacaagccgctaagccccctgatttaaatcccgaaaccgaggaatccatcccatcaaggtcaagtcccgaaggccctgacccaccagtcctcactgaggtgagcaagcaggacgaccagcagcctttggatttagagggcgtgaagcgaaagatggatcagggtaactatacatcagtgttagaattttcggacgacattgtaaagatcattcaagcggctatcaattccgacggagggcaaccggaaattaaaaaagccaattccatggtcaagagctttttcatcaggcagatggagcgcgtgttcccttggttttcagttaaaaagtctaggttctgggagcccaacaaggtgtctagtaactctggaatgctccctaacgccgtgctgcccccaagtctggaccacaactacgctcagtggcaggagcgcgaagaaaactcgcatactgagcagcctcctttaatgaagaagatcattcctgcacctaagcccaaggggccaggcgaacccgacagtccaacacctttgcatccgccaactcccccaattcttagcactgataggagcagagaagactccccagaactcaatcctccgcctggcattgaagacaaccgccaatgtgccctgtgcctgacttatggcgatgactccgccaacgacgccggacggcttctatatattggccagaacgagtggacgcatgtgaattgcgcgttatggtcggccgaagtcttcgaggacgatgatggcagtctcaaaaacgttcacatggcagtaattcgcggtaagcagcttagatgtgaattctgccagaagcctggcgcaaccgtcggttgttgtctgactagctgcacctcaaactaccattttatgtgttcaagagcaaaaaactgtgtattcctggatgacaaaaaagtgtactgccaacgccaccgggatctgatcaaaggagaggtcgtgccagagaacggcttcgaggtgttcagaagagtgtttgtggatttcgagggcatttctttgcgccgaaagtttctaaacggcctggagcctgaaaatattcacatgatgataggatccatgacaatcgactgtttagggattctgaatgaccttagcgattgtgaggataagctgtttccaattggataccaatgtagcagggtatactggagcacaactgatgcgaggaagaggtgcgtttacacatgcaaaatcgtcgagtgcaggccgcctgtggtcgaacccgacattaacagtactgtcgagcacgacgagaataggacaattgcacacagccccaccagctttacagagtcgtctagcaaagagtctcagaacacagctgagataattagccccccaagtccagatcgtccgccacactctcagacgtcaggatcctgctattatcacgttatctccaaagtccctaggattcgcacaccttcctactctcctacacaacgcagcccaggctgccggccattacctagcgcagggtcccccacccccacaacccacgagattgtcaccgtgggcgatcctttactatctagcggactacgctctataggctctaggagacattcaacaagctctcttagcccccaaagaagcaaactgagaattatgagccccatgagaacaggaaatacatacagtaggaacaacgtctctagtgtctctactacgggtactgccactgatctggagagctcagccaaagtggttgaccacgtgctgggacccctcaacagctccacgtctctcggtcaaaacacaagcacatccagtaatcttcagagaacggtggttactgtcggcaataagaatagtcatctggatgggagttccagttccgaaatgaaacaaagctctgccagtgacctggtgagcaaaagctctagtctgaagggggaaaagacaaaggtgctcagctcaaagtcaagtgaaggcagcgcccacaacgtggcctatcccggaatacccaagttggctccacaggtccataatacgacgagtcgtgaattgaatgtatctaaaattggctcatttgccgagccctccagcgtgagctttagctctaaagaagccctgagttttccgcacctgcacctcagagggcaaaggaatgatagggaccaacataccgattctacccagtcagccaattcgtcacccgatgaagacaccgaggtcaagaccctcaagctctctgggatgtctaaccggagtagcatcatcaatgagcatatggggagctcctctcgggatagaagacagaaaggcaagaagtcgtgtaaagaaaccttcaaagaaaaacacagcagtaaatcatttctagagcccggacaggtgaccactggagaggaggggaatctcaaacccgagttcatggacgaagtgctaacgcctgaatatatggggcagcgcccatgcaataatgtgtccagcgataagataggtgacaagggattaagcatgcccggagtccccaaagcccctccaatgcaggtggaaggttccgccaaggagctacaggctccacggaagagaaccgtgaaagttacactaacaccgttaaaaatggagaacgaatctcagtccaagaacgctttaaaagagagttcccctgcgagcccactgcagatcgaaagtacgtcacctacggagccaatctcagcatcagagaatccgggagacggacctgttgcccagccttccccaaacaataccagttgtcaagatagccaaagcaataattaccagaacctgcccgtgcaagaccgcaatctcatgcttcccgacggaccgaaaccacaagaagatggtagcttcaagcggagatacccaaggagatcagctagggcacgaagtaacatgttcttcggactcactcccctctacggcgtgaggtcgtatggagaagaggatatccctttttatagttcgagcacaggtaagaagaggggcaagagatccgcagaaggccaggtcgacggcgctgacgatctcagcaccagcgacgaagatgatctatattactacaacttcaccaggacagtgatatctagtggcggagaggaaagactcgcatcacataacctgtttcgggaagaagaacaatgtgatcttcccaagatctcacaactggatggagtcgacgacggaactgagagcgatacaagcgtgactgccactacacgcaagtcaagccaaattccgaagagaaacggcaaggagaatgggacagaaaacctaaagattgatcgacctgaagatgccggtgaaaaagaacacgtgacaaagagcagcgtaggacacaaaaacgagcccaaaatggacaattgtcacagcgttagtcgcgtaaaaactcaggggcaggacagcctggaagcacagctgagcagcctggagtcttcccgacgggtgcacacatcaacgccctccgacaaaaatctgctggacacttacaacaccgagttactaaaaagcgattcagataacaataattctgatgattgcggaaacattttgccaagcgatatcatggacttcgtcttgaagaatacgcccagcatgcaagcactcggtgaaagtccagagagttcgagttccgaactgttgaacctcggagagggcttagggctcgattctaaccgggagaaggacatggggctgtttgaggtctttagtcagcagctgcccacaacggagcctgtggatagctccgtgagcagctctatttccgctgaagagcagttcgagctgcccctggaattacctagcgacttatcggtgctcaccaccaggtccccaactgtcccttcacagaacccctcacgcctggctgttatcagtgattccggggagaagcgggtcacaatcactgagaaatctgttgccagctccgaaagcgatcccgcactgctgagcccgggtgtggacccaacacccgagggacacatgacaccagaccacttcatccagggccacatggacgccgaccacattagttcccctccttgcggtagcgtggaacagggtcacggaaataatcaggacctgacgcgcaattcatctacgccgggtctacaggtgccagtgtcacctaccgtgccaatacagaatcagaaatacgtccccaacagtactgactctcccggtcctagtcagatctcgaacgcagctgtgcagactactccgcctcatctcaagcctgcaacagaaaaacttatcgtcgtcaatcagaatatgcaacccctctacgtattacagactctgccaaacggcgtcacccagaagatacagcttacgtcctcggtttcgagcactcccagcgttatggaaacgaatacctctgttctgggaccaatgggagggggacttacattaaccacagggttgaacccatctctgccgaccagccaatccctcttccctagtgcctctaagggattgctgcctatgagccatcaccagcatctgcactctttccctgccgcaactcagagtagcttccccccaaatatttcaaaccctccttctgggctgttgatcggcgttcaacccccacctgatcctcagcttctggtgtcagagagcagccagcgcacagacctttctacaacagtagctacgccctcgtccgggctgaaaaagcggcctatctcgagactccaaacaagaaagaataagaagctcgccccaagctctacacctagcaacattgcaccaagcgatgttgtgagcaacatgacactgataaattttacgccctcacagcttcctaatcatccatcactacttgacttagggtccctgaatacaagtagtcatcggactgtacctaatattatcaagcgctctaagtctagcataatgtattttgaacccgctccactcctcccccaatctgtcggaggcactgctgctacagccgcaggcacctccaccatctctcaagacactagccatttgacttccgggagcgtgtccggcctggcctctagttcttcagtgctgaatgtcgtgtcaatgcagaccaccaccacacctacgtcttccgccagcgtgccaggacatgtcacactcaccaacccccgactcctgggtaccccagatatagggtcgatctccaacctccttattaaggcttcgcaacagagcttgggcatccaggatcaaccagtggctctgcccccaagctcaggtatgttcccccaactggggacgagccaaaccccgagtactgcagccattacagcagctagctctatctgtgtgctgccaagcactcagactaccggtatcacagccgcttctcccagcggggaggcagacgaacactaccagctccagcacgtaaatcagctgctggcttcaaaaacaggcattcattcctcacagcgagacttggactctgcaagcggcccacaggtcagcaacttcactcagacagttgacgctcctaattccatgggactcgagcagaacaaggccttatcttccgcagttcaggcaagtcctacgagccccggaggatcccccagctcacccagcagtggacagcggtcggcaagtcccagtgttcctggacccacgaagcctaaacccaaaaccaaacggttccaactgccgctcgataagggaaatggtaagaagcacaaagtcagccatttgaggacttcctcgagtgaagcacacatcccagaccaagagacaacctccctgacatctggcacgggaacccctggggcagaggcagagcagcaggatactgcctcagtcgaacagtcctcacaaaaagaatgtggtcagcctgcgggacaggtagccgtcctgcccgaagtacaggtgacacagaatcccgcaaacgaacaggaaagcgccgagccaaagaccgtggaggaggaggagagtaacttttcatcccccctgatgctatggctccaacaggagcagaagagaaaggaaagcatcaccgagaaaaagccaaagaagggattggtgtttgaaatatctagcgacgacggattccagatttgtgccgagagcattgaagacgcgtggaaaagcctgaccgacaaagtgcaggaagcacgttccaatgccaggctgaagcagctgagttttgctggcgtgaatggactgaggatgctcggaatcctccatgacgcagtagtctttctgatcgagcaactgagtggggctaagcattgtcgaaactataagttccgatttcataaaccagaagaagcgaatgagccgcctctgaacccacatggaagcgctagggccgaagtgcatctgcggaaatcggctttcgacatgtttaacttcctagcctccaagcaccgccagccacctgaatataacccaaacgacgaggaggaagaggaagtacagctgaagagcgccagacgagcaactagtatggatcttccaatgcccatgcgttttagacacctgaaaaagacatcgaaggaagctgtgggggtataccggtcacctatccacggcagaggccttttttgcaaacgcaatattgatgccggagagatggtaatcgagtacgcaggtaacgttattcggtcaatccagacagataagcgtgagaaatattatgactcgaaaggcattggatgctatatgtttaggattgacgattccgaggtggtcgatgcaaccatgcacggaaatgctgcaaggttcattaatcacagctgcgaacccaactgctattccagggtcatcaatattgacgggcagaagcacatcgtgatttttgctatgaggaagatctacaggggagaggagctgacctatgattataaatttcccatcgaggatgctagtaataagctgccatgcaactgcggagcaaagaagtgccggaagtttctcaattag

SEQ ID NO: 160475 - DNA, 11796 bp, Artificial Sequence
  derived and/or modified sequence
atggcccacagctgcagatggagattccccgccagacccggcaccaccggcggcggcggcggcggcggcagaagaggcctgggcggcgcccccagacagagagtgcccgccctgctgctgccccccggcccccccgtgggcggcggcggccccggcgccccccccagcccccccgccgtggccgccgccgccgccgccgccggcagcagcggcgccggcgtgcccggcggcgccgccgccgccagcgccgccagcagcagcagcgccagcagcagcagcagcagcagcagcagcgccagcagcggccccgccctgctgagagtgggccccggcttcgacgccgccctgcaggtgagcgccgccatcggcaccaacctgagaagattcagagccgtgttcggcgagagcggcggcggcggcggcagcggcgaggacgagcagttcctgggcttcggcagcgacgaggaggtgagagtgagaagccccaccagaagccccagcgtgaagaccagccccagaaagcccagaggcagacccagaagcggcagcgacagaaacagcgccatcctgagcgaccccagcgtgttcagccccctgaacaagagcgagaccaagagcggcgacaagatcaagaagaaggacagcaagagcatcgagaagaagagaggcagaccccccaccttccccggcgtgaagatcaagatcacccacggcaaggacatcagcgagctgcccaagggcaacaaggaggacagcctgaagaagatcaagagaacccccagcgccaccttccagcaggccaccaagatcaagaagctgagagccggcaagctgagccccctgaagagcaagttcaagaccggcaagctgcagatcggcagaaagggcgtgcagatcgtgagaagaagaggcagaccccccagcaccgagagaatcaagacccccagcggcctgctgatcaacagcgagctggagaagccccagaaggtgagaaaggacaaggagggcaccccccccctgaccaaggaggacaagaccgtggtgagacagagccccagaagaatcaagcccgtgagaatcatccccagcagcaagagaaccgacgccaccatcgccaagcagctgctgcagagagccaagaagggcgcccagaagaagatcgagaaggaggccgcccagctgcagggcagaaaggtgaagacccaggtgaagaacatcagacagttcatcatgcccgtggtgagcgccatcagcagcagaatcatcaagacccccagaagattcatcgaggacgaggactacgacccccccatcaagatcgccagactggagagcacccccaacagcagattcagcgcccccagctgcggcagcagcgagaagagcagcgccgccagccagcacagcagccagatgagcagcgacagcagcagaagcagcagccccagcgtggacaccagcaccgacagccaggccagcgaggagatccaggtgctgcccgaggagagaagcgacacccccgaggtgcacccccccctgcccatcagccagagccccgagaacgagagcaacgacagaagaagcagaagatacagcgtgagcgagagaagcttcggcagcagaaccaccaagaagctgagcaccctgcagagcgccccccagcagcagaccagcagcagcccccccccccccctgctgaccccccccccccccctgcagcccgccagcagcatcagcgaccacaccccctggctgatgccccccaccatccccctggccagccccttcctgcccgccagcaccgcccccatgcagggcaagagaaagagcatcctgagagagcccaccttcagatggaccagcctgaagcacagcagaagcgagccccagtacttcagcagcgccaagtacgccaaggagggcctgatcagaaagcccatcttcgacaacttcagacccccccccctgacccccgaggacgtgggcttcgccagcggcttcagcgccagcggcaccgccgccagcgccagactgttcagccccctgcacagcggcaccagattcgacatgcacaagagaagccccctgctgagagcccccagattcacccccagcgaggcccacagcagaatcttcgagagcgtgaccctgcccagcaacagaaccagcgccggcaccagcagcagcggcgtgagcaacagaaagagaaagagaaaggtgttcagccccatcagaagcgagcccagaagccccagccacagcatgagaaccagaagcggcagactgagcagcagcgagctgagccccctgaccccccccagcagcgtgagcagcagcctgagcatcagcgtgagccccctggccaccagcgccctgaaccccaccttcaccttccccagccacagcctgacccagagcggcgagagcgccgagaagaaccagagacccagaaagcagaccagcgcccccgccgagcccttcagcagcagcagccccacccccctgttcccctggttcacccccggcagccagaccgagagaggcagaaacaaggacaaggcccccgaggagctgagcaaggacagagacgccgacaagagcgtggagaaggacaagagcagagagagagacagagagagagagaaggagaacaagagagagagcagaaaggagaagagaaagaagggcagcgagatccagagcagcagcgccctgtaccccgtgggcagagtgagcaaggagaaggtggtgggcgaggacgtggccaccagcagcagcgccaagaaggccaccggcagaaagaagagcagcagccacgacagcggcaccgacatcaccagcgtgaccctgggcgacaccaccgccgtgaagaccaagatcctgatcaagaagggcagaggcaacctggagaagaccaacctggacctgggccccaccgcccccagcctggagaaggagaagaccctgtgcctgagcacccccagcagcagcaccgtgaagcacagcaccagcagcatcggcagcatgctggcccaggccgacaagctgcccatgaccgacaagagagtggccagcctgctgaagaaggccaaggcccagctgtgcaagatcgagaagagcaagagcctgaagcagaccgaccagcccaaggcccagggccaggagagcgacagcagcgagaccagcgtgagaggccccagaatcaagcacgtgtgcagaagagccgccgtggccctgggcagaaagagagccgtgttccccgacgacatgcccaccctgagcgccctgccctgggaggagagagagaagatcctgagcagcatgggcaacgacgacaagagcagcatcgccggcagcgaggacgccgagcccctggccccccccatcaagcccatcaagcccgtgaccagaaacaaggccccccaggagccccccgtgaagaagggcagaagaagcagaagatgcggccagtgccccggctgccaggtgcccgaggactgcggcgtgtgcaccaactgcctggacaagcccaagttcggcggcagaaacatcaagaagcagtgctgcaagatgagaaagtgccagaacctgcagtggatgcccagcaaggcctacctgcagaagcaggccaaggccgtgaagaagaaggagaagaagagcaagaccagcgagaagaaggacagcaaggagagcagcgtggtgaagaacgtggtggacagcagccagaagcccacccccagcgccagagaggaccccgcccccaagaagagcagcagcgagcccccccccagaaagcccgtggaggagaagagcgaggagggcaacgtgagcgcccccggccccgagagcaagcaggccaccacccccgccagcagaaagagcagcaagcaggtgagccagcccgccctggtgatccccccccagccccccaccaccggcccccccagaaaggaggtgcccaagaccacccccagcgagcccaagaagaagcagccccccccccccgagagcggccccgagcagagcaagcagaagaaggtggcccccagacccagcatccccgtgaagcagaagcccaaggagaaggagaagcccccccccgtgaacaagcaggagaacgccggcaccctgaacatcctgagcaccctgagcaacggcaacagcagcaagcagaagatccccgccgacggcgtgcacagaatcagagtggacttcaagttcgtgtactgccaggtgtgctgcgagcccttccacaagttctgcctggaggagaacgagagacccctggaggaccagctggagaactggtgctgcagaagatgcaagttctgccacgtgtgcggcagacagcaccaggccaccaagcagctgctggagtgcaacaagtgcagaaacagctaccaccccgagtgcctgggccccaactaccccaccaagcccaccaagaagaagaaggtgtggatctgcaccaagtgcgtgagatgcaagagctgcggcagcaccacccccggcaagggctgggacgcccagtggagccacgacttcagcctgtgccacgactgcgccaagctgttcgccaagggcaacttctgccccctgtgcgacaagtgctacgacgacgacgactacgagagcaagatgatgcagtgcggcaagtgcgacagatgggtgcacagcaagtgcgagaacctgagcgacgagatgtacgagatcctgagcaacctgcccgagagcgtggcctacacctgcgtgaactgcaccgagagacaccccgccgagtggagactggccctggagaaggagctgcagatcagcctgaagcaggtgctgaccgccctgctgaacagcagaaccaccagccacctgctgagatacagacaggccgccaagccccccgacctgaaccccgagaccgaggagagcatccccagcagaagcagccccgagggccccgacccccccgtgctgaccgaggtgagcaagcaggacgaccagcagcccctggacctggagggcgtgaagagaaagatggaccagggcaactacaccagcgtgctggagttcagcgacgacatcgtgaagatcatccaggccgccatcaacagcgacggcggccagcccgagatcaagaaggccaacagcatggtgaagagcttcttcatcagacagatggagagagtgttcccctggttcagcgtgaagaagagcagattctgggagcccaacaaggtgagcagcaacagcggcatgctgcccaacgccgtgctgccccccagcctggaccacaactacgcccagtggcaggagagagaggagaacagccacaccgagcagccccccctgatgaagaagatcatccccgcccccaagcccaagggccccggcgagcccgacagccccacccccctgcacccccccaccccccccatcctgagcaccgacagaagcagagaggacagccccgagctgaaccccccccccggcatcgaggacaacagacagtgcgccctgtgcctgacctacggcgacgacagcgccaacgacgccggcagactgctgtacatcggccagaacgagtggacccacgtgaactgcgccctgtggagcgccgaggtgttcgaggacgacgacggcagcctgaagaacgtgcacatggccgtgatcagaggcaagcagctgagatgcgagttctgccagaagcccggcgccaccgtgggctgctgcctgaccagctgcaccagcaactaccacttcatgtgcagcagagccaagaactgcgtgttcctggacgacaagaaggtgtactgccagagacacagagacctgatcaagggcgaggtggtgcccgagaacggcttcgaggtgttcagaagagtgttcgtggacttcgagggcatcagcctgagaagaaagttcctgaacggcctggagcccgagaacatccacatgatgatcggcagcatgaccatcgactgcctgggcatcctgaacgacctgagcgactgcgaggacaagctgttccccatcggctaccagtgcagcagagtgtactggagcaccaccgacgccagaaagagatgcgtgtacacctgcaagatcgtggagtgcagaccccccgtggtggagcccgacatcaacagcaccgtggagcacgacgagaacagaaccatcgcccacagccccaccagcttcaccgagagcagcagcaaggagagccagaacaccgccgagatcatcagcccccccagccccgacagacccccccacagccagaccagcggcagctgctactaccacgtgatcagcaaggtgcccagaatcagaacccccagctacagccccacccagagaagccccggctgcagacccctgcccagcgccggcagccccacccccaccacccacgagatcgtgaccgtgggcgaccccctgctgagcagcggcctgagaagcatcggcagcagaagacacagcaccagcagcctgagcccccagagaagcaagctgagaatcatgagccccatgagaaccggcaacacctacagcagaaacaacgtgagcagcgtgagcaccaccggcaccgccaccgacctggagagcagcgccaaggtggtggaccacgtgctgggccccctgaacagcagcaccagcctgggccagaacaccagcaccagcagcaacctgcagagaaccgtggtgaccgtgggcaacaagaacagccacctggacggcagcagcagcagcgagatgaagcagagcagcgccagcgacctggtgagcaagagcagcagcctgaagggcgagaagaccaaggtgctgagcagcaagagcagcgagggcagcgcccacaacgtggcctaccccggcatccccaagctggccccccaggtgcacaacaccaccagcagagagctgaacgtgagcaagatcggcagcttcgccgagcccagcagcgtgagcttcagcagcaaggaggccctgagcttcccccacctgcacctgagaggccagagaaacgacagagaccagcacaccgacagcacccagagcgccaacagcagccccgacgaggacaccgaggtgaagaccctgaagctgagcggcatgagcaacagaagcagcatcatcaacgagcacatgggcagcagcagcagagacagaagacagaagggcaagaagagctgcaaggagaccttcaaggagaagcacagcagcaagagcttcctggagcccggccaggtgaccaccggcgaggagggcaacctgaagcccgagttcatggacgaggtgctgacccccgagtacatgggccagagaccctgcaacaacgtgagcagcgacaagatcggcgacaagggcctgagcatgcccggcgtgcccaaggccccccccatgcaggtggagggcagcgccaaggagctgcaggcccccagaaagagaaccgtgaaggtgaccctgacccccctgaagatggagaacgagagccagagcaagaacgccctgaaggagagcagccccgccagccccctgcagatcgagagcaccagccccaccgagcccatcagcgccagcgagaaccccggcgacggccccgtggcccagcccagccccaacaacaccagctgccaggacagccagagcaacaactaccagaacctgcccgtgcaggacagaaacctgatgctgcccgacggccccaagccccaggaggacggcagcttcaagagaagataccccagaagaagcgccagagccagaagcaacatgttcttcggcctgacccccctgtacggcgtgagaagctacggcgaggaggacatccccttctacagcagcagcaccggcaagaagagaggcaagagaagcgccgagggccaggtggacggcgccgacgacctgagcaccagcgacgaggacgacctgtactactacaacttcaccagaaccgtgatcagcagcggcggcgaggagagactggccagccacaacctgttcagagaggaggagcagtgcgacctgcccaagatcagccagctggacggcgtggacgacggcaccgagagcgacaccagcgtgaccgccaccaccagaaagagcagccagatccccaagagaaacggcaaggagaacggcaccgagaacctgaagatcgacagacccgaggacgccggcgagaaggagcacgtgaccaagagcagcgtgggccacaagaacgagcccaagatggacaactgccacagcgtgagcagagtgaagacccagggccaggacagcctggaggcccagctgagcagcctggagagcagcagaagagtgcacaccagcacccccagcgacaagaacctgctggacacctacaacaccgagctgctgaagagcgacagcgacaacaacaacagcgacgactgcggcaacatcctgcccagcgacatcatggacttcgtgctgaagaacacccccagcatgcaggccctgggcgagagccccgagagcagcagcagcgagctgctgaacctgggcgagggcctgggcctggacagcaacagagagaaggacatgggcctgttcgaggtgttcagccagcagctgcccaccaccgagcccgtggacagcagcgtgagcagcagcatcagcgccgaggagcagttcgagctgcccctggagctgcccagcgacctgagcgtgctgaccaccagaagccccaccgtgcccagccagaaccccagcagactggccgtgatcagcgacagcggcgagaagagagtgaccatcaccgagaagagcgtggccagcagcgagagcgaccccgccctgctgagccccggcgtggaccccacccccgagggccacatgacccccgaccacttcatccagggccacatggacgccgaccacatcagcagccccccctgcggcagcgtggagcagggccacggcaacaaccaggacctgaccagaaacagcagcacccccggcctgcaggtgcccgtgagccccaccgtgcccatccagaaccagaagtacgtgcccaacagcaccgacagccccggccccagccagatcagcaacgccgccgtgcagaccacccccccccacctgaagcccgccaccgagaagctgatcgtggtgaaccagaacatgcagcccctgtacgtgctgcagaccctgcccaacggcgtgacccagaagatccagctgaccagcagcgtgagcagcacccccagcgtgatggagaccaacaccagcgtgctgggccccatgggcggcggcctgaccctgaccaccggcctgaaccccagcctgcccaccagccagagcctgttccccagcgccagcaagggcctgctgcccatgagccaccaccagcacctgcacagcttccccgccgccacccagagcagcttcccccccaacatcagcaacccccccagcggcctgctgatcggcgtgcagcccccccccgacccccagctgctggtgagcgagagcagccagagaaccgacctgagcaccaccgtggccacccccagcagcggcctgaagaagagacccatcagcagactgcagaccagaaagaacaagaagctggcccccagcagcacccccagcaacatcgcccccagcgacgtggtgagcaacatgaccctgatcaacttcacccccagccagctgcccaaccaccccagcctgctggacctgggcagcctgaacaccagcagccacagaaccgtgcccaacatcatcaagagaagcaagagcagcatcatgtacttcgagcccgcccccctgctgccccagagcgtgggcggcaccgccgccaccgccgccggcaccagcaccatcagccaggacaccagccacctgaccagcggcagcgtgagcggcctggccagcagcagcagcgtgctgaacgtggtgagcatgcagaccaccaccacccccaccagcagcgccagcgtgcccggccacgtgaccctgaccaaccccagactgctgggcacccccgacatcggcagcatcagcaacctgctgatcaaggccagccagcagagcctgggcatccaggaccagcccgtggccctgccccccagcagcggcatgttcccccagctgggcaccagccagacccccagcaccgccgccatcaccgccgccagcagcatctgcgtgctgcccagcacccagaccaccggcatcaccgccgccagccccagcggcgaggccgacgagcactaccagctgcagcacgtgaaccagctgctggccagcaagaccggcatccacagcagccagagagacctggacagcgccagcggcccccaggtgagcaacttcacccagaccgtggacgcccccaacagcatgggcctggagcagaacaaggccctgagcagcgccgtgcaggccagccccaccagccccggcggcagccccagcagccccagcagcggccagagaagcgccagccccagcgtgcccggccccaccaagcccaagcccaagaccaagagattccagctgcccctggacaagggcaacggcaagaagcacaaggtgagccacctgagaaccagcagcagcgaggcccacatccccgaccaggagaccaccagcctgaccagcggcaccggcacccccggcgccgaggccgagcagcaggacaccgccagcgtggagcagagcagccagaaggagtgcggccagcccgccggccaggtggccgtgctgcccgaggtgcaggtgacccagaaccccgccaacgagcaggagagcgccgagcccaagaccgtggaggaggaggagagcaacttcagcagccccctgatgctgtggctgcagcaggagcagaagagaaaggagagcatcaccgagaagaagcccaagaagggcctggtgttcgagatcagcagcgacgacggcttccagatctgcgccgagagcatcgaggacgcctggaagagcctgaccgacaaggtgcaggaggccagaagcaacgccagactgaagcagctgagcttcgccggcgtgaacggcctgagaatgctgggcatcctgcacgacgccgtggtgttcctgatcgagcagctgagcggcgccaagcactgcagaaactacaagttcagattccacaagcccgaggaggccaacgagccccccctgaacccccacggcagcgccagagccgaggtgcacctgagaaagagcgccttcgacatgttcaacttcctggccagcaagcacagacagccccccgagtacaaccccaacgacgaggaggaggaggaggtgcagctgaagagcgccagaagagccaccagcatggacctgcccatgcccatgagattcagacacctgaagaagaccagcaaggaggccgtgggcgtgtacagaagccccatccacggcagaggcctgttctgcaagagaaacatcgacgccggcgagatggtgatcgagtacgccggcaacgtgatcagaagcatccagaccgacaagagagagaagtactacgacagcaagggcatcggctgctacatgttcagaatcgacgacagcgaggtggtggacgccaccatgcacggcaacgccgccagattcatcaaccacagctgcgagcccaactgctacagcagagtgatcaacatcgacggccagaagcacatcgtgatcttcgccatgagaaagatctacagaggcgaggagctgacctacgactacaagttccccatcgaggacgccagcaacaagctgccctgcaactgcggcgccaagaagtgcagaaagttcctgaactag

SEQ ID NO: 160476 - DNA, 8640 bp, Artificial Sequence
  derived and/or modified sequence
cacgcccaccccgagtgcctgaccatggagagagagaagatcctgagcagcatgggcaacgacgacaagagcagcatcgccggcagcgaggacgccgagcccctggccccccccatcaagcccatcaagcccgtgaccagaaacaaggccccccaggagccccccgtgaagaagggcagaagaagcagaagatgcggccagtgccccggctgccaggtgcccgaggactgcggcgtgtgcaccaactgcctggacaagcccaagttcggcggcagaaacatcaagaagcagtgctgcaagatgagaaagtgccagaacctgcagtggatgcccagcaaggcctacctgcagaagcaggccaaggccgtgaagaagaaggagaagaagagcaagaccagcgagaagaaggacagcaaggagagcagcgtggtgaagaacgtggtggacagcagccagaagcccacccccagcgccagagaggaccccgcccccaagaagagcagcagcgagcccccccccagaaagcccgtggaggagaagagcgaggagggcaacgtgagcgcccccggccccgagagcaagcaggccaccacccccgccagcagaaagagcagcaagcaggtgagccagcccgccctggtgatccccccccagccccccaccaccggcccccccagaaaggaggtgcccaagaccacccccagcgagcccaagaagaagcagccccccccccccgagagcggccccgagcagagcaagcagaagaaggtggcccccagacccagcatccccgtgaagcagaagcccaaggagaaggagaagcccccccccgtgaacaagcaggagaacgccggcaccctgaacatcctgagcaccctgagcaacggcaacagcagcaagcagaagatccccgccgacggcgtgcacagaatcagagtggacttcaaggaggactgcgaggccgagaacgtgtgggagatgggcggcctgggcatcctgaccagcgtgcccatcacccccagagtggtgtgcttcctgtgcgccagcagcggccacgtggagttcgtgtactgccaggtgtgctgcgagcccttccacaagttctgcctggaggagaacgagagacccctggaggaccagctggagaactggtgctgcagaagatgcaagttctgccacgtgtgcggcagacagcaccaggccaccaagcagctgctggagtgcaacaagtgcagaaacagctaccaccccgagtgcctgggccccaactaccccaccaagcccaccaagaagaagaaggtgtggatctgcaccaagtgcgtgagatgcaagagctgcggcagcaccacccccggcaagggctgggacgcccagtggagccacgacttcagcctgtgccacgactgcgccaagctgttcgccaagggcaacttctgccccctgtgcgacaagtgctacgacgacgacgactacgagagcaagatgatgcagtgcggcaagtgcgacagatgggtgcacagcaagtgcgagaacctgagcgacgagatgtacgagatcctgagcaacctgcccgagagcgtggcctacacctgcgtgaactgcaccgagagacaccccgccgagtggagactggccctggagaaggagctgcagatcagcctgaagcaggtgctgaccgccctgctgaacagcagaaccaccagccacctgctgagatacagacaggccgccaagccccccgacctgaaccccgagaccgaggagagcatccccagcagaagcagccccgagggccccgacccccccgtgctgaccgaggtgagcaagcaggacgaccagcagcccctggacctggagggcgtgaagagaaagatggaccagggcaactacaccagcgtgctggagttcagcgacgacatcgtgaagatcatccaggccgccatcaacagcgacggcggccagcccgagatcaagaaggccaacagcatggtgaagagcttcttcatcagacagatggagagagtgttcccctggttcagcgtgaagaagagcagattctgggagcccaacaaggtgagcagcaacagcggcatgctgcccaacgccgtgctgccccccagcctggaccacaactacgcccagtggcaggagagagaggagaacagccacaccgagcagccccccctgatgaagaagatcatccccgcccccaagcccaagggccccggcgagcccgacagccccacccccctgcacccccccaccccccccatcctgagcaccgacagaagcagagaggacagccccgagctgaaccccccccccggcatcgaggacaacagacagtgcgccctgtgcctgacctacggcgacgacagcgccaacgacgccggcagactgctgtacatcggccagaacgagtggacccacgtgaactgcgccctgtggagcgccgaggtgttcgaggacgacgacggcagcctgaagaacgtgcacatggccgtgatcagaggcaagcagctgagatgcgagttctgccagaagcccggcgccaccgtgggctgctgcctgaccagctgcaccagcaactaccacttcatgtgcagcagagccaagaactgcgtgttcctggacgacaagaaggtgtactgccagagacacagagacctgatcaagggcgaggtggtgcccgagaacggcttcgaggtgttcagaagagtgttcgtggacttcgagggcatcagcctgagaagaaagttcctgaacggcctggagcccgagaacatccacatgatgatcggcagcatgaccatcgactgcctgggcatcctgaacgacctgagcgactgcgaggacaagctgttccccatcggctaccagtgcagcagagtgtactggagcaccaccgacgccagaaagagatgcgtgtacacctgcaagatcgtggagtgcagaccccccgtggtggagcccgacatcaacagcaccgtggagcacgacgagaacagaaccatcgcccacagccccaccagcttcaccgagagcagcagcaaggagagccagaacaccgccgagatcatcagcccccccagccccgacagacccccccacagccagaccagcggcagctgctactaccacgtgatcagcaaggtgcccagaatcagaacccccagctacagccccacccagagaagccccggctgcagacccctgcccagcgccggcagccccacccccaccacccacgagatcgtgaccgtgggcgaccccctgctgagcagcggcctgagaagcatcggcagcagaagacacagcaccagcagcctgagcccccagagaagcaagctgagaatcatgagccccatgagaaccggcaacacctacagcagaaacaacgtgagcagcgtgagcaccaccggcaccgccaccgacctggagagcagcgccaaggtggtggaccacgtgctgggccccctgaacagcagcaccagcctgggccagaacaccagcaccagcagcaacctgcagagaaccgtggtgaccgtgggcaacaagaacagccacctggacggcagcagcagcagcgagatgaagcagagcagcgccagcgacctggtgagcaagagcagcagcctgaagggcgagaagaccaaggtgctgagcagcaagagcagcgagggcagcgcccacaacgtggcctaccccggcatccccaagctggccccccaggtgcacaacaccaccagcagagagctgaacgtgagcaagatcggcagcttcgccgagcccagcagcgtgagcttcagcagcaaggaggccctgagcttcccccacctgcacctgagaggccagagaaacgacagagaccagcacaccgacagcacccagagcgccaacagcagccccgacgaggacaccgaggtgaagaccctgaagctgagcggcatgagcaacagaagcagcatcatcaacgagcacatgggcagcagcagcagagacagaagacagaagggcaagaagagctgcaaggagaccttcaaggagaagcacagcagcaagagcttcctggagcccggccaggtgaccaccggcgaggagggcaacctgaagcccgagttcatggacgaggtgctgacccccgagtacatgggccagagaccctgcaacaacgtgagcagcgacaagatcggcgacaagggcctgagcatgcccggcgtgcccaaggccccccccatgcaggtggagggcagcgccaaggagctgcaggcccccagaaagagaaccgtgaaggtgaccctgacccccctgaagatggagaacgagagccagagcaagaacgccctgaaggagagcagccccgccagccccctgcagatcgagagcaccagccccaccgagcccatcagcgccagcgagaaccccggcgacggccccgtggcccagcccagccccaacaacaccagctgccaggacagccagagcaacaactaccagaacctgcccgtgcaggacagaaacctgatgctgcccgacggccccaagccccaggaggacggcagcttcaagagaagataccccagaagaagcgccagagccagaagcaacatgttcttcggcctgacccccctgtacggcgtgagaagctacggcgaggaggacatccccttctacagcagcagcaccggcaagaagagaggcaagagaagcgccgagggccaggtggacggcgccgacgacctgagcaccagcgacgaggacgacctgtactactacaacttcaccagaaccgtgatcagcagcggcggcgaggagagactggccagccacaacctgttcagagaggaggagcagtgcgacctgcccaagatcagccagctggacggcgtggacgacggcaccgagagcgacaccagcgtgaccgccaccaccagaaagagcagccagatccccaagagaaacggcaaggagaacggcaccgagaacctgaagatcgacagacccgaggacgccggcgagaaggagcacgtgaccaagagcagcgtgggccacaagaacgagcccaagatggacaactgccacagcgtgagcagagtgaagacccagggccaggacagcctggaggcccagctgagcagcctggagagcagcagaagagtgcacaccagcacccccagcgacaagaacctgctggacacctacaacaccgagctgctgaagagcgacagcgacaacaacaacagcgacgactgcggcaacatcctgcccagcgacatcatggacttcgtgctgaagaacacccccagcatgcaggccctgggcgagagccccgagagcagcagcagcgagctgctgaacctgggcgagggcctgggcctggacagcaacagagagaaggacatgggcctgttcgaggtgttcagccagcagctgcccaccaccgagcccgtggacagcagcgtgagcagcagcatcagcgccgaggagcagttcgagctgcccctggagctgcccagcgacctgagcgtgctgaccaccagaagccccaccgtgcccagccagaaccccagcagactggccgtgatcagcgacagcggcgagaagagagtgaccatcaccgagaagagcgtggccagcagcgagagcgaccccgccctgctgagccccggcgtggaccccacccccgagggccacatgacccccgaccacttcatccagggccacatggacgccgaccacatcagcagccccccctgcggcagcgtggagcagggccacggcaacaaccaggacctgaccagaaacagcagcacccccggcctgcaggtgcccgtgagccccaccgtgcccatccagaaccagaagtacgtgcccaacagcaccgacagccccggccccagccagatcagcaacgccgccgtgcagaccacccccccccacctgaagcccgccaccgagaagctgatcgtggtgaaccagaacatgcagcccctgtacgtgctgcagaccctgcccaacggcgtgacccagaagatccagctgaccagcagcgtgagcagcacccccagcgtgatggagaccaacaccagcgtgctgggccccatgggcggcggcctgaccctgaccaccggcctgaaccccagcctgcccaccagccagagcctgttccccagcgccagcaagggcctgctgcccatgagccaccaccagcacctgcacagcttccccgccgccacccagagcagcttcccccccaacatcagcaacccccccagcggcctgctgatcggcgtgcagcccccccccgacccccagctgctggtgagcgagagcagccagagaaccgacctgagcaccaccgtggccacccccagcagcggcctgaagaagagacccatcagcagactgcagaccagaaagaacaagaagctggcccccagcagcacccccagcaacatcgcccccagcgacgtggtgagcaacatgaccctgatcaacttcacccccagccagctgcccaaccaccccagcctgctggacctgggcagcctgaacaccagcagccacagaaccgtgcccaacatcatcaagagaagcaagagcagcatcatgtacttcgagcccgcccccctgctgccccagagcgtgggcggcaccgccgccaccgccgccggcaccagcaccatcagccaggacaccagccacctgaccagcggcagcgtgagcggcctggccagcagcagcagcgtgctgaacgtggtgagcatgcagaccaccaccacccccaccagcagcgccagcgtgcccggccacgtgaccctgaccaaccccagactgctgggcacccccgacatcggcagcatcagcaacctgctgatcaaggccagccagcagagcctgggcatccaggaccagcccgtggccctgccccccagcagcggcatgttcccccagctgggcaccagccagacccccagcaccgccgccatcaccgccgccagcagcatctgcgtgctgcccagcacccagaccaccggcatcaccgccgccagccccagcggcgaggccgacgagcactaccagctgcagcacgtgaaccagctgctggccagcaagaccggcatccacagcagccagagagacctggacagcgccagcggcccccaggtgagcaacttcacccagaccgtggacgcccccaacagcatgggcctggagcagaacaaggccctgagcagcgccgtgcaggccagccccaccagccccggcggcagccccagcagccccagcagcggccagagaagcgccagccccagcgtgcccggccccaccaagcccaagcccaagaccaagagattccagctgcccctggacaagggcaacggcaagaagcacaaggtgagccacctgagaaccagcagcagcgaggcccacatccccgaccaggagaccaccagcctgaccagcggcaccggcacccccggcgccgaggccgagcagcaggacaccgccagcgtggagcagagcagccagaaggagtgcggccagcccgccggccaggtggccgtgctgcccgaggtgcaggtgacccagaaccccgccaacgagcaggagagcgccgagcccaagaccgtggaggaggaggagagcaacttcagcagccccctgatgctgtggctgcagcaggagcagaagagaaaggagagcatcaccgagaagaagcccaagaagggcctggtgttcgagatcagcagcgacgacggcttccagatctgcgccgagagcatcgaggacgcctggaagagcctgaccgacaaggtgcaggaggccagaagcaacgccagactgaagcagctgagcttcgccggcgtgaacggcctgagaatgctgggcatcctgcacgacgccgtggtgttcctgatcgagcagctgagcggcgccaagcactgcagaaactacaagttcagattccacaagcccgaggaggccaacgagccccccctgaacccccacggcagcgccagagccgaggtgcacctgagaaagagcgccttcgacatgttcaacttcctggccagcaagcacagacagccccccgagtacaaccccaacgacgaggaggaggaggaggtgcagctgaagagcgccagaagagccaccagcatggacctgcccatgcccatgagattcagacacctgaagaagaccagcaaggaggccgtgggcgtgtacagaagccccatccacggcagaggcctgttctgcaagagaaacatcgacgccggcgagatggtgatcgagtacgccggcaacgtgatcagaagcatccagaccgacaagagagagaagtactacgacagcaagggcatcggctgctacatgttcagaatcgacgacagcgaggtggtggacgccaccatgcacggcaacgccgccagattcatcaaccacagctgcgagcccaactgctacagcagagtgatcaacatcgacggccagaagcacatcgtgatcttcgccatgagaaagatctacagaggcgaggagctgacctacgactacaagttccccatcgaggacgccagcaacaagctgccctgcaactgcggcgccaagaagtgcagaaagttcctgaactag

SEQ ID NO: 160477 - DNA, 11910 bp, Artificial Sequence
  derived and/or modified sequence
atggcccacagctgcagatggagattccccgccagacccggcaccaccggcggcggcggcggcggcggcagaagaggcctgggcggcgcccccagacagagagtgcccgccctgctgctgccccccggcccccccgtgggcggcggcggccccggcgccccccccagcccccccgccgtggccgccgccgccgccgccgccggcagcagcggcgccggcgtgcccggcggcgccgccgccgccagcgccgccagcagcagcagcgccagcagcagcagcagcagcagcagcagcgccagcagcggccccgccctgctgagagtgggccccggcttcgacgccgccctgcaggtgagcgccgccatcggcaccaacctgagaagattcagagccgtgttcggcgagagcggcggcggcggcggcagcggcgaggacgagcagttcctgggcttcggcagcgacgaggaggtgagagtgagaagccccaccagaagccccagcgtgaagaccagccccagaaagcccagaggcagacccagaagcggcagcgacagaaacagcgccatcctgagcgaccccagcgtgttcagccccctgaacaagagcgagaccaagagcggcgacaagatcaagaagaaggacagcaagagcatcgagaagaagagaggcagaccccccaccttccccggcgtgaagatcaagatcacccacggcaaggacatcagcgagctgcccaagggcaacaaggaggacagcctgaagaagatcaagagaacccccagcgccaccttccagcaggccaccaagatcaagaagctgagagccggcaagctgagccccctgaagagcaagttcaagaccggcaagctgcagatcggcagaaagggcgtgcagatcgtgagaagaagaggcagaccccccagcaccgagagaatcaagacccccagcggcctgctgatcaacagcgagctggagaagccccagaaggtgagaaaggacaaggagggcaccccccccctgaccaaggaggacaagaccgtggtgagacagagccccagaagaatcaagcccgtgagaatcatccccagcagcaagagaaccgacgccaccatcgccaagcagctgctgcagagagccaagaagggcgcccagaagaagatcgagaaggaggccgcccagctgcagggcagaaaggtgaagacccaggtgaagaacatcagacagttcatcatgcccgtggtgagcgccatcagcagcagaatcatcaagacccccagaagattcatcgaggacgaggactacgacccccccatcaagatcgccagactggagagcacccccaacagcagattcagcgcccccagctgcggcagcagcgagaagagcagcgccgccagccagcacagcagccagatgagcagcgacagcagcagaagcagcagccccagcgtggacaccagcaccgacagccaggccagcgaggagatccaggtgctgcccgaggagagaagcgacacccccgaggtgcacccccccctgcccatcagccagagccccgagaacgagagcaacgacagaagaagcagaagatacagcgtgagcgagagaagcttcggcagcagaaccaccaagaagctgagcaccctgcagagcgccccccagcagcagaccagcagcagcccccccccccccctgctgaccccccccccccccctgcagcccgccagcagcatcagcgaccacaccccctggctgatgccccccaccatccccctggccagccccttcctgcccgccagcaccgcccccatgcagggcaagagaaagagcatcctgagagagcccaccttcagatggaccagcctgaagcacagcagaagcgagccccagtacttcagcagcgccaagtacgccaaggagggcctgatcagaaagcccatcttcgacaacttcagacccccccccctgacccccgaggacgtgggcttcgccagcggcttcagcgccagcggcaccgccgccagcgccagactgttcagccccctgcacagcggcaccagattcgacatgcacaagagaagccccctgctgagagcccccagattcacccccagcgaggcccacagcagaatcttcgagagcgtgaccctgcccagcaacagaaccagcgccggcaccagcagcagcggcgtgagcaacagaaagagaaagagaaaggtgttcagccccatcagaagcgagcccagaagccccagccacagcatgagaaccagaagcggcagactgagcagcagcgagctgagccccctgaccccccccagcagcgtgagcagcagcctgagcatcagcgtgagccccctggccaccagcgccctgaaccccaccttcaccttccccagccacagcctgacccagagcggcgagagcgccgagaagaaccagagacccagaaagcagaccagcgcccccgccgagcccttcagcagcagcagccccacccccctgttcccctggttcacccccggcagccagaccgagagaggcagaaacaaggacaaggcccccgaggagctgagcaaggacagagacgccgacaagagcgtggagaaggacaagagcagagagagagacagagagagagagaaggagaacaagagagagagcagaaaggagaagagaaagaagggcagcgagatccagagcagcagcgccctgtaccccgtgggcagagtgagcaaggagaaggtggtgggcgaggacgtggccaccagcagcagcgccaagaaggccaccggcagaaagaagagcagcagccacgacagcggcaccgacatcaccagcgtgaccctgggcgacaccaccgccgtgaagaccaagatcctgatcaagaagggcagaggcaacctggagaagaccaacctggacctgggccccaccgcccccagcctggagaaggagaagaccctgtgcctgagcacccccagcagcagcaccgtgaagcacagcaccagcagcatcggcagcatgctggcccaggccgacaagctgcccatgaccgacaagagagtggccagcctgctgaagaaggccaaggcccagctgtgcaagatcgagaagagcaagagcctgaagcagaccgaccagcccaaggcccagggccaggagagcgacagcagcgagaccagcgtgagaggccccagaatcaagcacgtgtgcagaagagccgccgtggccctgggcagaaagagagccgtgttccccgacgacatgcccaccctgagcgccctgccctgggaggagagagagaagatcctgagcagcatgggcaacgacgacaagagcagcatcgccggcagcgaggacgccgagcccctggccccccccatcaagcccatcaagcccgtgaccagaaacaaggccccccaggagccccccgtgaagaagggcagaagaagcagaagatgcggccagtgccccggctgccaggtgcccgaggactgcggcgtgtgcaccaactgcctggacaagcccaagttcggcggcagaaacatcaagaagcagtgctgcaagatgagaaagtgccagaacctgcagtggatgcccagcaaggcctacctgcagaagcaggccaaggccgtgaagaagaaggagaagaagagcaagaccagcgagaagaaggacagcaaggagagcagcgtggtgaagaacgtggtggacagcagccagaagcccacccccagcgccagagaggaccccgcccccaagaagagcagcagcgagcccccccccagaaagcccgtggaggagaagagcgaggagggcaacgtgagcgcccccggccccgagagcaagcaggccaccacccccgccagcagaaagagcagcaagcaggtgagccagcccgccctggtgatccccccccagccccccaccaccggcccccccagaaaggaggtgcccaagaccacccccagcgagcccaagaagaagcagccccccccccccgagagcggccccgagcagagcaagcagaagaaggtggcccccagacccagcatccccgtgaagcagaagcccaaggagaaggagaagcccccccccgtgaacaagcaggagaacgccggcaccctgaacatcctgagcaccctgagcaacggcaacagcagcaagcagaagatccccgccgacggcgtgcacagaatcagagtggacttcaaggaggactgcgaggccgagaacgtgtgggagatgggcggcctgggcatcctgaccagcgtgcccatcacccccagagtggtgtgcttcctgtgcgccagcagcggccacgtggagttcgtgtactgccaggtgtgctgcgagcccttccacaagttctgcctggaggagaacgagagacccctggaggaccagctggagaactggtgctgcagaagatgcaagttctgccacgtgtgcggcagacagcaccaggccaccaagcagctgctggagtgcaacaagtgcagaaacagctaccaccccgagtgcctgggccccaactaccccaccaagcccaccaagaagaagaaggtgtggatctgcaccaagtgcgtgagatgcaagagctgcggcagcaccacccccggcaagggctgggacgcccagtggagccacgacttcagcctgtgccacgactgcgccaagctgttcgccaagggcaacttctgccccctgtgcgacaagtgctacgacgacgacgactacgagagcaagatgatgcagtgcggcaagtgcgacagatgggtgcacagcaagtgcgagaacctgagcgacgagatgtacgagatcctgagcaacctgcccgagagcgtggcctacacctgcgtgaactgcaccgagagacaccccgccgagtggagactggccctggagaaggagctgcagatcagcctgaagcaggtgctgaccgccctgctgaacagcagaaccaccagccacctgctgagatacagacaggccgccaagccccccgacctgaaccccgagaccgaggagagcatccccagcagaagcagccccgagggccccgacccccccgtgctgaccgaggtgagcaagcaggacgaccagcagcccctggacctggagggcgtgaagagaaagatggaccagggcaactacaccagcgtgctggagttcagcgacgacatcgtgaagatcatccaggccgccatcaacagcgacggcggccagcccgagatcaagaaggccaacagcatggtgaagagcttcttcatcagacagatggagagagtgttcccctggttcagcgtgaagaagagcagattctgggagcccaacaaggtgagcagcaacagcggcatgctgcccaacgccgtgctgccccccagcctggaccacaactacgcccagtggcaggagagagaggagaacagccacaccgagcagccccccctgatgaagaagatcatccccgcccccaagcccaagggccccggcgagcccgacagccccacccccctgcacccccccaccccccccatcctgagcaccgacagaagcagagaggacagccccgagctgaaccccccccccggcatcgaggacaacagacagtgcgccctgtgcctgacctacggcgacgacagcgccaacgacgccggcagactgctgtacatcggccagaacgagtggacccacgtgaactgcgccctgtggagcgccgaggtgttcgaggacgacgacggcagcctgaagaacgtgcacatggccgtgatcagaggcaagcagctgagatgcgagttctgccagaagcccggcgccaccgtgggctgctgcctgaccagctgcaccagcaactaccacttcatgtgcagcagagccaagaactgcgtgttcctggacgacaagaaggtgtactgccagagacacagagacctgatcaagggcgaggtggtgcccgagaacggcttcgaggtgttcagaagagtgttcgtggacttcgagggcatcagcctgagaagaaagttcctgaacggcctggagcccgagaacatccacatgatgatcggcagcatgaccatcgactgcctgggcatcctgaacgacctgagcgactgcgaggacaagctgttccccatcggctaccagtgcagcagagtgtactggagcaccaccgacgccagaaagagatgcgtgtacacctgcaagatcgtggagtgcagaccccccgtggtggagcccgacatcaacagcaccgtggagcacgacgagaacagaaccatcgcccacagccccaccagcttcaccgagagcagcagcaaggagagccagaacaccgccgagatcatcagcccccccagccccgacagacccccccacagccagaccagcggcagctgctactaccacgtgatcagcaaggtgcccagaatcagaacccccagctacagccccacccagagaagccccggctgcagacccctgcccagcgccggcagccccacccccaccacccacgagatcgtgaccgtgggcgaccccctgctgagcagcggcctgagaagcatcggcagcagaagacacagcaccagcagcctgagcccccagagaagcaagctgagaatcatgagccccatgagaaccggcaacacctacagcagaaacaacgtgagcagcgtgagcaccaccggcaccgccaccgacctggagagcagcgccaaggtggtggaccacgtgctgggccccctgaacagcagcaccagcctgggccagaacaccagcaccagcagcaacctgcagagaaccgtggtgaccgtgggcaacaagaacagccacctggacggcagcagcagcagcgagatgaagcagagcagcgccagcgacctggtgagcaagagcagcagcctgaagggcgagaagaccaaggtgctgagcagcaagagcagcgagggcagcgcccacaacgtggcctaccccggcatccccaagctggccccccaggtgcacaacaccaccagcagagagctgaacgtgagcaagatcggcagcttcgccgagcccagcagcgtgagcttcagcagcaaggaggccctgagcttcccccacctgcacctgagaggccagagaaacgacagagaccagcacaccgacagcacccagagcgccaacagcagccccgacgaggacaccgaggtgaagaccctgaagctgagcggcatgagcaacagaagcagcatcatcaacgagcacatgggcagcagcagcagagacagaagacagaagggcaagaagagctgcaaggagaccttcaaggagaagcacagcagcaagagcttcctggagcccggccaggtgaccaccggcgaggagggcaacctgaagcccgagttcatggacgaggtgctgacccccgagtacatgggccagagaccctgcaacaacgtgagcagcgacaagatcggcgacaagggcctgagcatgcccggcgtgcccaaggccccccccatgcaggtggagggcagcgccaaggagctgcaggcccccagaaagagaaccgtgaaggtgaccctgacccccctgaagatggagaacgagagccagagcaagaacgccctgaaggagagcagccccgccagccccctgcagatcgagagcaccagccccaccgagcccatcagcgccagcgagaaccccggcgacggccccgtggcccagcccagccccaacaacaccagctgccaggacagccagagcaacaactaccagaacctgcccgtgcaggacagaaacctgatgctgcccgacggccccaagccccaggaggacggcagcttcaagagaagataccccagaagaagcgccagagccagaagcaacatgttcttcggcctgacccccctgtacggcgtgagaagctacggcgaggaggacatccccttctacagcagcagcaccggcaagaagagaggcaagagaagcgccgagggccaggtggacggcgccgacgacctgagcaccagcgacgaggacgacctgtactactacaacttcaccagaaccgtgatcagcagcggcggcgaggagagactggccagccacaacctgttcagagaggaggagcagtgcgacctgcccaagatcagccagctggacggcgtggacgacggcaccgagagcgacaccagcgtgaccgccaccaccagaaagagcagccagatccccaagagaaacggcaaggagaacggcaccgagaacctgaagatcgacagacccgaggacgccggcgagaaggagcacgtgaccaagagcagcgtgggccacaagaacgagcccaagatggacaactgccacagcgtgagcagagtgaagacccagggccaggacagcctggaggcccagctgagcagcctggagagcagcagaagagtgcacaccagcacccccagcgacaagaacctgctggacacctacaacaccgagctgctgaagagcgacagcgacaacaacaacagcgacgactgcggcaacatcctgcccagcgacatcatggacttcgtgctgaagaacacccccagcatgcaggccctgggcgagagccccgagagcagcagcagcgagctgctgaacctgggcgagggcctgggcctggacagcaacagagagaaggacatgggcctgttcgaggtgttcagccagcagctgcccaccaccgagcccgtggacagcagcgtgagcagcagcatcagcgccgaggagcagttcgagctgcccctggagctgcccagcgacctgagcgtgctgaccaccagaagccccaccgtgcccagccagaaccccagcagactggccgtgatcagcgacagcggcgagaagagagtgaccatcaccgagaagagcgtggccagcagcgagagcgaccccgccctgctgagccccggcgtggaccccacccccgagggccacatgacccccgaccacttcatccagggccacatggacgccgaccacatcagcagccccccctgcggcagcgtggagcagggccacggcaacaaccaggacctgaccagaaacagcagcacccccggcctgcaggtgcccgtgagccccaccgtgcccatccagaaccagaagtacgtgcccaacagcaccgacagccccggccccagccagatcagcaacgccgccgtgcagaccacccccccccacctgaagcccgccaccgagaagctgatcgtggtgaaccagaacatgcagcccctgtacgtgctgcagaccctgcccaacggcgtgacccagaagatccagctgaccagcagcgtgagcagcacccccagcgtgatggagaccaacaccagcgtgctgggccccatgggcggcggcctgaccctgaccaccggcctgaaccccagcctgcccaccagccagagcctgttccccagcgccagcaagggcctgctgcccatgagccaccaccagcacctgcacagcttccccgccgccacccagagcagcttcccccccaacatcagcaacccccccagcggcctgctgatcggcgtgcagcccccccccgacccccagctgctggtgagcgagagcagccagagaaccgacctgagcaccaccgtggccacccccagcagcggcctgaagaagagacccatcagcagactgcagaccagaaagaacaagaagctggcccccagcagcacccccagcaacatcgcccccagcgacgtggtgagcaacatgaccctgatcaacttcacccccagccagctgcccaaccaccccagcctgctggacctgggcagcctgaacaccagcagccacagaaccgtgcccaacatcatcaagagaagcaagagcagcatcatgtacttcgagcccgcccccctgctgccccagagcgtgggcggcaccgccgccaccgccgccggcaccagcaccatcagccaggacaccagccacctgaccagcggcagcgtgagcggcctggccagcagcagcagcgtgctgaacgtggtgagcatgcagaccaccaccacccccaccagcagcgccagcgtgcccggccacgtgaccctgaccaaccccagactgctgggcacccccgacatcggcagcatcagcaacctgctgatcaaggccagccagcagagcctgggcatccaggaccagcccgtggccctgccccccagcagcggcatgttcccccagctgggcaccagccagacccccagcaccgccgccatcaccgccgccagcagcatctgcgtgctgcccagcacccagaccaccggcatcaccgccgccagccccagcggcgaggccgacgagcactaccagctgcagcacgtgaaccagctgctggccagcaagaccggcatccacagcagccagagagacctggacagcgccagcggcccccaggtgagcaacttcacccagaccgtggacgcccccaacagcatgggcctggagcagaacaaggccctgagcagcgccgtgcaggccagccccaccagccccggcggcagccccagcagccccagcagcggccagagaagcgccagccccagcgtgcccggccccaccaagcccaagcccaagaccaagagattccagctgcccctggacaagggcaacggcaagaagcacaaggtgagccacctgagaaccagcagcagcgaggcccacatccccgaccaggagaccaccagcctgaccagcggcaccggcacccccggcgccgaggccgagcagcaggacaccgccagcgtggagcagagcagccagaaggagtgcggccagcccgccggccaggtggccgtgctgcccgaggtgcaggtgacccagaaccccgccaacgagcaggagagcgccgagcccaagaccgtggaggaggaggagagcaacttcagcagccccctgatgctgtggctgcagcaggagcagaagagaaaggagagcatcaccgagaagaagcccaagaagggcctggtgttcgagatcagcagcgacgacggcttccagatctgcgccgagagcatcgaggacgcctggaagagcctgaccgacaaggtgcaggaggccagaagcaacgccagactgaagcagctgagcttcgccggcgtgaacggcctgagaatgctgggcatcctgcacgacgccgtggtgttcctgatcgagcagctgagcggcgccaagcactgcagaaactacaagttcagattccacaagcccgaggaggccaacgagccccccctgaacccccacggcagcgccagagccgaggtgcacctgagaaagagcgccttcgacatgttcaacttcctggccagcaagcacagacagccccccgagtacaaccccaacgacgaggaggaggaggaggtgcagctgaagagcgccagaagagccaccagcatggacctgcccatgcccatgagattcagacacctgaagaagaccagcaaggaggccgtgggcgtgtacagaagccccatccacggcagaggcctgttctgcaagagaaacatcgacgccggcgagatggtgatcgagtacgccggcaacgtgatcagaagcatccagaccgacaagagagagaagtactacgacagcaagggcatcggctgctacatgttcagaatcgacgacagcgaggtggtggacgccaccatgcacggcaacgccgccagattcatcaaccacagctgcgagcccaactgctacagcagagtgatcaacatcgacggccagaagcacatcgtgatcttcgccatgagaaagatctacagaggcgaggagctgacctacgactacaagttccccatcgaggacgccagcaacaagctgccctgcaactgcggcgccaagaagtgcagaaagttcctgaactag

SEQ ID NO: 160478 - protein, 559 aa, Artificial Sequence
  derived and/or modified sequence
MDNQCTVQVRLELGHRAQLRKKPTTEGFTHDWMVFVRGPEQCDIQHFVEKVVFWLHDSFPKPRRVCKEPPYKVEESGYAGFIMPIEVHFKNKEEPRKVCFTYDLFLNLEGNPPVNHLRCEKLTFNNPTTEFRYKLLRAGGVMVMPEGADTVSRPSPDYPMLPTIPLSAFSDPKKTKPSHGSKDANKESSKTSKPHKVTKEHRERPRKDSESKSSSKELEREQAKSSKDTSRKLGEGRLPKEEKAPPPKAAFKEPKMALKETKLESTSPKGGPPPPPPPPPRASSKRPATADSPKPSAKKQKKSSSKGSRSAPGTSPRTSSSSSFSDKKPAKDKSSTRGEKVKAESEPREAKKALEVEESNSEDEASFKSESAQSSPSNSSSSSDSSSDSDFEPSQNHSQGPLRSMVEDLQSEESDEDDSSSGEEAAGKTNPGRDSRLSFSDSESDNSADSSLPSREPPPPQKPPPPNSKVSGRRSPESCSKPEKILKKGTYDKAYTDELVELHRRLMALRERNVLQQIVNLIEETGHFNVTNTTFDFDLFSLDETTVRKLQSCLEAVAT

SEQ ID NO: 160479 - DNA, 4530 bp, Artificial Sequence
  derived and/or modified sequence
ggttccgcggggctggcgggcgagcgggcggccgggatcggcggcggcggcggcggcggcggcgcttgacagacaatgagggcggcggggcggcgttgagcggcggcggcggcggcggcggcggcgagcgacgcggggcccgggggcggggcggggcgccagccatggacaatcagtgcaccgtccaggtgaggttagagctggggcatcgcgcccaactgcgcaagaagcccaccacggaggggttcactcacgactggatggtgtttgtccgcggccccgagcaatgtgacatccagcacttcgtggagaaggtggtcttctggctgcacgacagcttccccaagcccagacgcgtgtgcaaggagcccccctacaaagtagaggagtcggggtacgctggcttcatcatgcccatcgaggtgcacttcaaaaacaaggaggagccgaggaaggtctgcttcacctacgacctgttcctgaacctggaaggcaacccgcccgtgaaccacctgcgctgcgagaagctcaccttcaacaaccccaccacggagttccggtacaagctcctgcgggccggcggggtgatggtaatgcccgaaggagcagacacggtgtccaggcccagtcccgactaccccatgttacccacaattccactctctgccttctctgaccccaagaagaccaaaccatcccacggctccaaggacgccaacaaggagagcagcaagacctccaagccacacaaggtgaccaaggagcaccgggagcggccccgcaaagactccgagagcaagagctcctccaaggagctggagcgtgagcaggccaaaagctccaaggacacctcgcggaagctgggcgagggccggctgcccaaggaggagaaggcgccaccgcccaaggctgccttcaaggaacccaagatggccctgaaagagaccaagctggaaagcacgtcccccaagggtgggcccccacccccacccccacccccaccccgggcttccagcaagcggccggccaccgccgactcgccaaagcccagcgccaagaagcagaagaagagcagctcgaaggggtcccggagtgctccaggcacctcgccccgcacctcctcctcctcctccttctcggacaagaagccggccaaggacaagagcagcaccagaggggagaaggtgaaggccgagagtgagccccgggaggccaaaaaggccctggaggtggaggagtccaactcagaggacgaggcctccttcaagtccgagtctgcccagtcaagcccgtccaactccagctccagctcagactccagctcagactcagacttcgagccatcccagaaccacagccaaggacccctgcgctccatggtggaggacctgcagtccgaggagtccgacgaggacgactcttcgtcaggcgaggaggctgccggcaagaccaacccggggagggactccaggttgagcttcagcgacagcgagagtgacaacagcgccgactcctccctgcccagccgtgagcccccacccccccagaagccacccccgcccaacagcaaggtgtcaggccggaggagccccgagtcctgcagcaagcctgagaagatcctcaagaagggcacctacgacaaggcctacacggatgagctggtggagctacaccggaggctgatggcgctgcgggagcgcaacgtgctgcagcagattgtgaatctgatcgaggagactggccacttcaatgtcaccaacaccaccttcgacttcgacctcttctccctggacgagaccaccgtgcgcaaactgcagagctgcctggaggccgtggccacatgaccctgggccgcgtgccgggcccccaccgccggggtcctgggaggctgcagccaggcctcgcctgccctcctctcccgtctcgcctgcccgcagcactgccttagcgacagccctgtcctcgcccgcacagcccgctgcactttcctcggcggctccctgcccactctccccgctccatcgccaggagccctggggccgggctgggccacacgggagccgccccccgggctctctgggctcccctcagagagcggctggtgttgaaggcagctctgggcagagacagggccgggggcccctcgcccagccttgggaccagcccccactgctcggcgggctgtgcggcgtcgctgccccagcctttctgagcagcggatcgacggctggggggcatctccagcctcccgaatggttcagaacacaccctccgcccaccctggacctcagaaggccctgcctgtgtgtctgcgtcgtcctccgtgtagacctagcgccggctcctccccggctcgcgctgcgctggggtctgtgctgtatagttctctctattatatatgtgtgtgcactgtctggtcaagagcagtgtccatgtgcgtttctgtggcagcagtgcacgtggggtgggtggggggtgcgtacggtggggcttgtaggttaagatgtctctgcggtggtgtggggctggaggccgagccaggcacggcagctggccctctccaggcgcatggaggaattctccctttgccgttccaaggatgccgccgcctcctaccggggctcccgggggggtcagccaacactacaaagggcagcgagtcctcagggcgcccgggagccaccagtctgctctcgggctctactcagactagcgccaacagtctccgcggacagactcgcatcagccgccctggggctcggcctcctcccataggctcctcttcctctctttcattcaagtcttcaaactttgaaaaaaatatgagcttttgccaaataagacgggatagtttatggagttttctgaggcgcattgaactctggtcagcccctcgagcgtgggctcggccatcagcaggcccggtgggttggccgggctggccctcccaggctgcctttctctctggtcgcggcctggcccgccccggcctccaccgccgcaattcatgctggtgccgcgcccgcagccccactcctggtatgcctgagattctccaggggccaagccggtcctccttcccggcccactcttccagggccaggacgctcccgcggagccagcccatcgtggctgggggtcccaggggctggaggcctgcctggttagcctctgtttcccagacattgactcgaggcgcctccagtcctctcaaccccctgactttcaagtcctttcaagtccttgtgccctgaccaagttatgaggaaaagagggctgagggcctggaggtgggctcgcaccccctcgaacccacctagatgtctcctcctccccagcctatgagttcagacttggggggctccatctgtccctccctgaggtccctcatcttgtccctgctctgattctgtcagcagatcctgaacactccttggtggggacccatgcctccaaggctgcccccaatgccagctgtcctggggaaactccccagaactctcggggaaaggcccgagaaccttcggaggaagcctccgggactcctcgccacctgctctgtttctctcccggccccactgccttcaggtatcaggaagagggcaggcccctgtgccccctctccccttcccagggcggccaacaatactccaccatggggcgcttcctttcttctctggaaactaagacattggactgaaggaactggcctgaggggggctgaccgggggcccgtgctgctgggagctctacgcacaagaggccgccggggtcacggacaggaacctcagcccagggtgctggcctttctccttcgcaggagtcccccaaaatccacacagcgactcgagcagccttccactcagccagaggagggtcgggctcccccgcctgctctcggtggtggcgtctggcccttcctgccgtttccaaggcctccggaagcaccaacccagttctcagttacctcctctggccggaaggcctcacgttgtcctccagagctgctctgggcccagggctggctccgtgaccacctgatggacgtgctgggcagcatgggctcccaaggcagcatccccagctgctctcccaccccaccccagctgcccggcggctgggcccacgagggctctggggacacttccataggaaaggggcctggcactttgtgattgccacgtgtttcctgttaagccgcctgcccccagtgcaaatctctgtgttttgctctctcctgaacaaaaatgtaaaccgacgccggaaagcaaatggtatcgaatacctttcttgcccataagggtttttacaaagaacgtgtctcactaggaactaggacactcatcggcccgagaccaactcctggataaaaggaataaggagaatcgtgtttgtaacgagttacaggattgtttctttcctggattttaaacttttgttaaattgtgaaattatggaggagttttatagaaaaaaaaagtgaaataaagtcagatgggaaagcaaaaaaaaaaaaaaaaaaaaaaaaaa

SEQ ID NO: 160480 - DNA, 1680 bp, Artificial Sequence
  derived and/or modified sequence
atggacaaccagtgcactgttcaagtgagacttgagctgggtcaccgcgctcagctgcggaaaaaacctacgaccgagggatttactcacgactggatggtctttgtgcgtggccccgagcagtgcgacatacaacatttcgtggagaaggtcgtgttttggctgcatgattccttccccaagccgaggagggtctgtaaggaacccccatacaaggtggaagagtccgggtacgccggttttataatgcctatcgaggtgcattttaaaaataaagaagagccacggaaagtgtgttttacctatgacttgttcctcaatctcgagggcaacccccccgttaaccatctccgctgcgagaagcttactttcaataatccaactacagagttccgctataagctgctgcgcgcaggaggcgtcatggtgatgccagaaggcgccgatacagtgtctcgtccatcccccgactaccccatgttgccaaccatccccctaagcgctttcagtgatcctaagaaaactaagcccagtcacggcagcaaagatgccaataaagaaagctcaaaaacatccaaaccacacaaggtaacgaaggaacaccgcgagcgcccacgcaaagacagtgaaagcaagtcatctagtaaggagctggaacgcgagcaggcgaaatcgagcaaggacacttccagaaagttgggagagggaagactcccgaaggaggaaaaggccccccctccaaaggctgctttcaaggaaccaaagatggctctgaaggagacgaaacttgaatctacctctcctaaaggtggcccccctccccctcctccacccccccctcgggcctcatcaaagcggcctgccactgcagacagccccaaaccgagtgctaagaagcagaagaagagcagcagcaaggggtctcgctccgcaccaggaacttccccacggacgtcgagctcatcctcattcagcgataaaaagcccgccaaggataaaagcagcacccgaggcgagaaagtgaaggccgagagtgagcctagggaagcaaaaaaggccctcgaagtggaggagagtaactccgaggacgaggcatctttcaagagcgagtccgcgcagagttctccatcaaactcctcatcttcttcagatagcagttctgatagtgatttcgagcccagccaaaaccacagccagggccctctgagatcaatggtggaggacctgcagagtgaagagtcagatgaggacgactcctccagcggggaggaagcagcaggcaaaaccaatcccggacgggacagccgattaagtttctctgatagcgagagcgataattctgccgatagcagcctcccgagcagagagcctcctcccccccagaagccgcctccgcccaactccaaagtttccgggcgtaggtcccctgagagctgcagtaagccagaaaaaatcctgaagaagggcacctatgataaggcctacactgacgaacttgtggagctgcacaggagattgatggctctgagggagcgcaatgtgctgcagcagatcgtgaacttgatcgaagagactgggcactttaacgtgactaacacaacttttgattttgacttattttcactggatgaaactaccgtacgaaaactccagtcttgtttggaggctgtcgccacttag

SEQ ID NO: 160481 - DNA, 1680 bp, Artificial Sequence
  derived and/or modified sequence
atggacaaccagtgcaccgtgcaggtgcggctggagctgggccaccgggcccagctgaggaagaagcccaccacagagggcttcacccatgactggatggtgtttgtgcggggccctgagcagtgtgacatccagcactttgtggagaaggtggtgttctggctgcatgacagcttccccaagcccaggagagtgtgcaaggagcccccctacaaggtggaggagagcggctacgccggcttcatcatgcccatcgaggtgcacttcaagaacaaggaggagcccaggaaggtgtgcttcacctatgacctcttcctgaacctggagggcaacccccctgtgaaccacctgcgctgtgagaagctgaccttcaacaaccccaccacagagttccgctacaagctgctgcgggccggcggcgtgatggtgatgcctgagggcgctgacacagtgtcccggcccagcccagactaccccatgctgcccaccatccccctgagcgccttcagtgaccccaagaagaccaagcccagccacggcagcaaggatgccaacaaggagagcagcaagaccagcaagccccacaaggtgaccaaggagcaccgggagcggcccaggaaggacagcgagagcaagagcagcagcaaggagctggagcgggagcaggccaagagcagcaaggacaccagcaggaagctgggggagggccgcctgcccaaggaggagaaggcccccccacccaaggccgccttcaaggagcccaagatggccctgaaggagaccaagctggagagcaccagccccaagggcggccccccacctcctcctcctcctccaccccgggccagcagcaagaggcctgccacagctgacagccccaagcccagcgccaagaagcagaagaagagcagcagcaagggcagccgcagcgcccctggcaccagccccaggaccagcagcagcagcagcttcagtgacaagaagccagccaaggacaagagcagcaccagaggagagaaggtgaaggccgagagcgagccccgggaggccaagaaggccctggaggtggaggagagcaacagtgaagatgaggccagcttcaagtctgagagcgcccagagcagccccagcaacagcagcagcagcagtgacagcagcagtgacagcgactttgagcccagccagaaccacagccagggccccctgcgctccatggtggaggacctgcagagcgaggagagtgatgaagatgacagcagcagtggagaggaggccgccggcaagaccaaccctggccgggacagccggctgtccttcagtgacagcgagagtgacaacagcgctgacagcagcctgcccagccgggagcccccaccaccccagaagcccccaccacccaacagcaaggtgtctggaagaagaagccctgagagctgcagcaagccagagaagatcctgaagaagggcacctatgacaaggcctacacagatgagctggtggagctgcaccggcggctgatggccctgcgggagagaaatgtgctgcagcagatcgtgaacctgattgaggagaccggccacttcaacgtgaccaacaccacctttgattttgacctcttcagcctggatgagaccaccgtgaggaagctgcagagctgcctggaggccgtggccacctag

SEQ ID NO: 160482 - DNA, 4504 bp, Artificial Sequence
  derived and/or modified sequence
ggttccgcggggctggcgggcgagcgggcggccgggatcggcggcggcggcggcggcggcggcgcttgacagacaatgagggcggcggggcggcgttgagcggcggcggcggcggcggcggcggcgagcgacgcggggcccgggggcggggcggggcgccagccatggacaatcagtgcaccgtccaggtgaggttagagctggggcatcgcgcccaactgcgcaagaagcccaccacggaggggttcactcacgactggatggtgtttgtccgcggccccgagcaatgtgacatccagcacttcgtggagaaggtggtcttctggctgcacgacagcttccccaagcccagacgcgtgtgcaaggagcccccctacaaagtagaggagtcggggtacgctggcttcatcatgcccatcgaggtgcacttcaaaaacaaggaggagccgaggaaggtctgcttcacctacgacctgttcctgaacctggaaggcaacccgcccgtgaaccacctgcgctgcgagaagctcaccttcaacaaccccaccacggagttccggtacaagctcctgcgggccggcggggtgatggtaatgcccgaaggagcagacacggtgtccaggcccagtcccgactaccccatgttacccacaattccactctctgccttctctgaccccaagaagaccaaaccatcccacggctccaaggacgccaacaaggagagcagcaagacctccaagccacacaaggtgaccaaggagcaccgggagcggccccgcaaagactccgagagcaagagctcctccaaggagctggagcgtgagcaggccaaaagctccaaggacacctcgcggaagctgggcgagggccggctgcccaaggaggagaaggcgccaccgcccaaggctgccttcaaggaacccaagatggccctgaaagagaccaagctggaaagcacgtcccccaagggtgggcccccacccccacccccacccccaccccgggcttccagcaagcggccggccaccgccgactcgccaaagcccagcgccaagaagcagaagaagagcagctcgaaggggtcccggagtgctccaggcacctcgccccgcacctcctcctcctcctccttctcggacaagaagccggccaaggacaagagcagcaccagaggggagaaggtgaaggccgagagtgagccccgggaggccaaaaaggccctggaggtggaggagtccaactcagaggacgaggcctccttcaagtccgagtctgcccagtcaagcccgtccaactccagctccagctcagactccagctcagactcagacttcgagccatcccagaaccacagccaaggacccctgcgctccatggtggaggacctgcagtccgaggagtccgacgaggacgactcttcgtcaggcgaggaggctgccggcaagaccaacccggggagggactccaggttgagcttcagcgacagcgagagtgacaacagcgccgactcctccctgcccagccgtgagcccccacccccccagaagccacccccgcccaacagcaaggtgtcaggccggaggagccccgagtcctgcagcaagcctgagaagatcctcaagaagggcacctacgacaaggcctacacggatgagctggtggagctacaccggaggctgatggcgctgcgggagcgcaacgtgctgcagcagattgtgaatctgatcgaggagactggccacttcaatgtcaccaacaccaccttcgacttcgacctcttctccctggacgagaccaccgtgcgcaaactgcagagctgcctggaggccgtggccacatgaccctgggccgcgtgccgggcccccaccgccggggtcctgggaggctgcagccaggcctcgcctgccctcctctcccgtctcgcctgcccgcagcactgccttagcgacagccctgtcctcgcccgcacagcccgctgcactttcctcggcggctccctgcccactctccccgctccatcgccaggagccctggggccgggctgggccacacgggagccgccccccgggctctctgggctcccctcagagagcggctggtgttgaaggcagctctgggcagagacagggccgggggcccctcgcccagccttgggaccagcccccactgctcggcgggctgtgcggcgtcgctgccccagcctttctgagcagcggatcgacggctggggggcatctccagcctcccgaatggttcagaacacaccctccgcccaccctggacctcagaaggccctgcctgtgtgtctgcgtcgtcctccgtgtagacctagcgccggctcctccccggctcgcgctgcgctggggtctgtgctgtatagttctctctattatatatgtgtgtgcactgtctggtcaagagcagtgtccatgtgcgtttctgtggcagcagtgcacgtggggtgggtggggggtgcgtacggtggggcttgtaggttaagatgtctctgcggtggtgtggggctggaggccgagccaggcacggcagctggccctctccaggcgcatggaggaattctccctttgccgttccaaggatgccgccgcctcctaccggggctcccgggggggtcagccaacactacaaagggcagcgagtcctcagggcgcccgggagccaccagtctgctctcgggctctactcagactagcgccaacagtctccgcggacagactcgcatcagccgccctggggctcggcctcctcccataggctcctcttcctctctttcattcaagtcttcaaactttgaaaaaaatatgagcttttgccaaataagacgggatagtttatggagttttctgaggcgcattgaactctggtcagcccctcgagcgtgggctcggccatcagcaggcccggtgggttggccgggctggccctcccaggctgcctttctctctggtcgcggcctggcccgccccggcctccaccgccgcaattcatgctggtgccgcgcccgcagccccactcctggtatgcctgagattctccaggggccaagccggtcctccttcccggcccactcttccagggccaggacgctcccgcggagccagcccatcgtggctgggggtcccaggggctggaggcctgcctggttagcctctgtttcccagacattgactcgaggcgcctccagtcctctcaaccccctgactttcaagtcctttcaagtccttgtgccctgaccaagttatgaggaaaagagggctgagggcctggaggtgggctcgcaccccctcgaacccacctagatgtctcctcctccccagcctatgagttcagacttggggggctccatctgtccctccctgaggtccctcatcttgtccctgctctgattctgtcagcagatcctgaacactccttggtggggacccatgcctccaaggctgcccccaatgccagctgtcctggggaaactccccagaactctcggggaaaggcccgagaaccttcggaggaagcctccgggactcctcgccacctgctctgtttctctcccggccccactgccttcaggtatcaggaagagggcaggcccctgtgccccctctccccttcccagggcggccaacaatactccaccatggggcgcttcctttcttctctggaaactaagacattggactgaaggaactggcctgaggggggctgaccgggggcccgtgctgctgggagctctacgcacaagaggccgccggggtcacggacaggaacctcagcccagggtgctggcctttctccttcgcaggagtcccccaaaatccacacagcgactcgagcagccttccactcagccagaggagggtcgggctcccccgcctgctctcggtggtggcgtctggcccttcctgccgtttccaaggcctccggaagcaccaacccagttctcagttacctcctctggccggaaggcctcacgttgtcctccagagctgctctgggcccagggctggctccgtgaccacctgatggacgtgctgggcagcatgggctcccaaggcagcatccccagctgctctcccaccccaccccagctgcccggcggctgggcccacgagggctctggggacacttccataggaaaggggcctggcactttgtgattgccacgtgtttcctgttaagccgcctgcccccagtgcaaatctctgtgttttgctctctcctgaacaaaaatgtaaaccgacgccggaaagcaaatggtatcgaatacctttcttgcccataagggtttttacaaagaacgtgtctcactaggaactaggacactcatcggcccgagaccaactcctggataaaaggaataaggagaatcgtgtttgtaacgagttacaggattgtttctttcctggattttaaacttttgttaaattgtgaaattatggaggagttttatagaaaaaaaaagtgaaataaagtcagatgggaaagc

SEQ ID NO: 160483 - DNA, 1680 bp, Artificial Sequence
  derived and/or modified sequence
atggacaaccagtgcaccgtgcaggtgcggctggagctgggccacagagcccaattgaggaaaaaaccaaccacagaaggcttcacacatgattggatggtattcgtgcgggggccggaacagtgtgacattcaacatttcgtagaaaaggttgtcttctggttgcatgatagttttcctaaaccgaggcgggtctgcaaagagcccccctacaaagtcgaggagagcggatacgccggatttataatgccgattgaggtgcattttaagaataaggaggagcccagaaaggtttgtttcacatacgacctgttccttaacttggaggggaatcctcccgtgaatcatttaagatgcgaaaagttgacttttaataatcctaccactgagtttagatacaagctgcttagggccgggggcgtaatggttatgcccgagggggccgatacagtgtccaggccaagtcccgattaccccatgctcccaactatccccctctcggccttttctgacccaaaaaagaccaagcccagccacgggagtaaggacgccaacaaggagtcctctaaaacctcaaaacctcacaaggtgacaaaagagcatcgagagcgcccccgtaaagacagcgagtctaaatcatcatcaaaggaattagagcgcgaacaggctaaaagtagcaaagacacctctaggaagctcggagaggggcgcttgccaaaggaagagaaagctccacctcccaaagccgccttcaaggagcctaagatggctctaaaagagactaagctcgaaagtacttcgcccaagggcggccctccccctcctcctccacccccgcctcgtgcaagtagtaagcgccccgctaccgctgatagccctaagccctccgccaaaaaacaaaaaaaatcttctagcaaggggtcaaggagcgcaccaggtactagcccccgtacgtctagctctagcagcttcagtgataaaaagcctgccaaagacaaatcctcaacaaggggtgagaaggtcaaagcagaaagcgagccaagagaagcaaagaaggccctggaagttgaggaatcaaattcagaagacgaagccagcttcaagtccgagtcggcccagtcctcccccagcaacagctcctcctcatcagattccagctccgactcagactttgaacctagccaaaatcattcacagggcccgctccgctctatggtcgaggaccttcagtccgaggaaagcgatgaggatgactcttcctccggcgaggaggctgcgggaaagacaaaccccggaagagacagcaggcttagttttagtgacagtgaatccgataattcagccgattcatcgctgccctcccgggaaccccccccaccccagaaaccccccccacccaacagtaaagtctcagggcgccggagccctgaatcctgctctaagccagagaaaatcttgaagaaaggtacatacgacaaggcttacacagacgagttagtcgagctgcacaggcggctgatggctctgagagaaagaaatgtgctgcaacagatcgtgaatctcatagaagaaaccgggcactttaatgttacaaacaccacatttgactttgacttgttcagccttgacgagactactgtcaggaaactccagagttgcctggaggcggtcgcaacctag

SEQ ID NO: 160484 - DNA, 1680 bp, Artificial Sequence
  derived and/or modified sequence
atggacaaccagtgtaccgtgcaggtccgcctggagctgggccaccgggctcagctgcggaagaaacccacgacggagggattcacccatgattggatggtctttgtcagggggcctgagcagtgcgatatccaacacttcgtggagaaagtcgtcttctggctgcacgactcattcccgaagccgagacgtgtttgcaaggaaccaccttacaaagtggaggaatcaggctatgcaggatttatcatgcctatagaggtgcatttcaaaaacaaagaggagccaaggaaagtgtgttttacttatgacctatttctaaatctggaaggcaaccctccagtgaaccaccttaggtgtgaaaagttgacttttaacaatccaaccactgagttccgatataagttactgcgggcagggggagtgatggtgatgcctgagggggctgacacagtgtccagaccaagtcccgattatcccatgttacccaccattccactctctgctttcagcgacccgaagaagacaaagccatcccacggcagcaaagatgcaaacaaagagtccagtaagacttccaagccccataaggtaactaaggaacatagggagcggccaagaaaagattcggaatcaaaatcatcctcaaaagagctcgagcgcgagcaggcaaagagctccaaggacacatcccggaagcttggcgaggggagactccccaaagaggagaaagccccacctcctaaagccgcattcaaggagcctaaaatggctctgaaggaaactaaactggagagtaccagccctaaaggaggccctcctccaccacctcctccgcctccaagagcgtcttctaaaagacctgccaccgccgattccccaaagccttcagcgaagaagcagaagaagagcagttcaaaaggcagcagatccgctcccggtacatctccacggactagcagttcctctagtttctccgataagaaaccagcgaaggacaaaagctctacacgcggagagaaagtgaaggctgagagcgagcccagggaggcgaagaaagcattggaggtggaggagtctaactctgaagacgaggcatcgtttaagagcgagagcgcacaatctagtcccagtaacagcagttccagtagtgattcgtcttcagactcagacttcgagccttcacagaaccattcacaggggcctctgcggtccatggttgaggacctgcaaagcgaagagtccgacgaggatgatagttcatctggggaagaagccgcaggtaagacaaacccgggaagggactcaaggttgtcattcagtgacagcgagagcgataatagtgccgactccagcttgccctcccgcgaaccccctccaccccaaaagcctccaccccctaactccaaagtgagcggacgcagatcgcccgaatcgtgttctaaacctgagaagatcttgaagaagggaacttatgacaaagcctacaccgatgaactagtggagttacatcgacgccttatggcccttagggagcgaaacgtgctgcaacagattgtgaacctaatcgaggaaacagggcacttcaatgtgactaatacaacattcgacttcgatctcttcagcctggacgaaaccacggtgcgaaagctgcagtcttgtctggaggctgtcgcgacctag

SEQ ID NO: 160485 - DNA, 1680 bp, Artificial Sequence
  derived and/or modified sequence
atggacaaccagtgcaccgtgcaggtgagactggagctgggccacagagcccagctgagaaagaagcccaccaccgagggcttcacccacgactggatggtgttcgtgagaggccccgagcagtgcgacatccagcacttcgtggagaaggtggtgttctggctgcacgacagcttccccaagcccagaagagtgtgcaaggagcccccctacaaggtggaggagagcggctacgccggcttcatcatgcccatcgaggtgcacttcaagaacaaggaggagcccagaaaggtgtgcttcacctacgacctgttcctgaacctggagggcaacccccccgtgaaccacctgagatgcgagaagctgaccttcaacaaccccaccaccgagttcagatacaagctgctgagagccggcggcgtgatggtgatgcccgagggcgccgacaccgtgagcagacccagccccgactaccccatgctgcccaccatccccctgagcgccttcagcgaccccaagaagaccaagcccagccacggcagcaaggacgccaacaaggagagcagcaagaccagcaagccccacaaggtgaccaaggagcacagagagagacccagaaaggacagcgagagcaagagcagcagcaaggagctggagagagagcaggccaagagcagcaaggacaccagcagaaagctgggcgagggcagactgcccaaggaggagaaggcccccccccccaaggccgccttcaaggagcccaagatggccctgaaggagaccaagctggagagcaccagccccaagggcggccccccccccccccccccccccccccccagagccagcagcaagagacccgccaccgccgacagccccaagcccagcgccaagaagcagaagaagagcagcagcaagggcagcagaagcgcccccggcaccagccccagaaccagcagcagcagcagcttcagcgacaagaagcccgccaaggacaagagcagcaccagaggcgagaaggtgaaggccgagagcgagcccagagaggccaagaaggccctggaggtggaggagagcaacagcgaggacgaggccagcttcaagagcgagagcgcccagagcagccccagcaacagcagcagcagcagcgacagcagcagcgacagcgacttcgagcccagccagaaccacagccagggccccctgagaagcatggtggaggacctgcagagcgaggagagcgacgaggacgacagcagcagcggcgaggaggccgccggcaagaccaaccccggcagagacagcagactgagcttcagcgacagcgagagcgacaacagcgccgacagcagcctgcccagcagagagcccccccccccccagaagccccccccccccaacagcaaggtgagcggcagaagaagccccgagagctgcagcaagcccgagaagatcctgaagaagggcacctacgacaaggcctacaccgacgagctggtggagctgcacagaagactgatggccctgagagagagaaacgtgctgcagcagatcgtgaacctgatcgaggagaccggccacttcaacgtgaccaacaccaccttcgacttcgacctgttcagcctggacgagaccaccgtgagaaagctgcagagctgcctggaggccgtggccacctag

SEQ ID NO: 160486 - protein, 1210 aa, Artificial Sequence
  derived and/or modified sequence
MAAQSSLYNDDRNLLRIREKERRNQEAHQEKEAFPEKIPLFGEPYKTAKGDELSSRIQNMLGNYEEVKEFLSTKSHTHRLDASENRLGKPKYPLIPDKGSSIPSSSFHTSVHHQSIHTPASGPLSVGNISHNPKMAQPRTEPMPSLHAKSCGPPDSQHLTQDRLGQEGFGSSHHKKGDRRADGDHCASVTDSAPERELSPLISLPSPVPPLSPIHSNQQTLPRTQGSSKVHGSSNNSKGYCPAKSPKDLAVKVHDKETPQDSLVAPAQPPSQTFPPPSLPSKSVAMQQKPTAYVRPMDGQDQAPSESPELKPLPEDYRQQTFEKTDLKVPAKAKLTKLKMPSQSVEQTYSNEVHCVEEILKEMTHSWPPPLTAIHTPSTAEPSKFPFPTKDSQHVSSVTQNQKQYDTSSKTHSNSQQGTSSMLEDDLQLSDSEDSDSEQTPEKPPSSSAPPSAPQSLPEPVASAHSSSAESESTSDSDSSSDSESESSSSDSEENEPLETPAPEPEPPTTNKWQLDNWLTKVSQPAAPPEGPRSTEPPRRHPESKGSSDSATSQEHSESKDPPPKSSSKAPRAPPEAPHPGKRSCQKSPAQQEPPQRQTVGTKQPKKPVKASARAGSRTSLQGEREPGLLPYGSRDQTSKDKPKVKTKGRPRAAASNEPKPAVPPSSEKKKHKSSLPAPSKALSGPEPAKDNVEDRTPEHFALVPLTESQGPPHSGSGSRTSGCRQAVVVQEDSRKDRLPLPLRDTKLLSPLRDTPPPQSLMVKITLDLLSRIPQPPGKGSRQRKAEDKQPPAGKKHSSEKRSSDSSSKLAKKRKGEAERDCDNKKIRLEKEIKSQSSSSSSSHKESSKTKPSRPSSQSSKKEMLPPPPVSSSSQKPAKPALKRSRREADTCGQDPPKSASSTKSNHKDSSIPKQRRVEGKGSRSSSEHKGSSGDTANPFPVPSLPNGNSKPGKPQVKFDKQQADLHMREAKKMKQKAELMTDRVGKAFKYLEAVLSFIECGIATESESQSSKSAYSVYSETVDLIKFIMSLKSFSDATAPTQEKIFAVLCMRCQSILNMAMFRCKKDIAIKYSRTLNKHFESSSKVAQAPSPCIASTGTPSPLSPMPSPASSVGSQSSAGSVGSSGVAATISTPVTIQNMTSSYVTITSHVLTAFDLWEQAEALTRKNKEFFARLSTNVCTLALNSSLVDLVHYTRQGFQQLQELTKTP

SEQ ID NO: 160487 - DNA, 9378 bp, Artificial Sequence
  derived and/or modified sequence
cctttctaactgtggcccgcgttgtgctgttgctgggcaggcgttgggcgccggcggtcttcgagcgtgggggcccgctggctttcccttctcagaaactgcgccgggggcgctcgcttgccccggattcggacgcggcgctccccgggctcgtctgaagtgcagatcgccgcagaggccccagtgcccggatgtccatcaggattagcgcgagccaatacgggccgagcccggggctgcgccgaggacgcccggggctcgagagcaggtagtcccgtaacatcggggcgccgcgccgggacgcgtccccgcccggctccgccaaatggtgagcgcggcgctggcagcagggcccgcggggtgaaggcgctcatggacggaagacccctggctctataagctgaattatggcagcccagtcaagtttgtacaatgacgacagaaacctgcttcgaattagagagaaggaaagacgcaaccaggaagcccaccaagagaaagaggcatttcctgaaaagattcccctttttggagagccctacaagacagcaaaaggtgatgagctgtctagtcgaatacagaacatgttgggaaactacgaagaagtgaaggagttccttagtactaagtctcacactcatcgcctggatgcttctgaaaataggttgggaaagccgaaatatcctttaattcctgacaaagggagcagcattccatccagctccttccacactagtgtccaccaccagtccattcacactcctgcgtctggaccactttctgttggcaacattagccacaatccaaagatggcgcagccaagaactgaaccaatgccaagtctccatgccaaaagctgcggcccaccggacagccagcacctgacccaggatcgccttggtcaggaggggttcggctctagtcatcacaagaaaggtgaccgaagagctgacggagaccactgtgcttcggtgacagattcggctccagagagggagctttctcccttaatctctttgccttccccagttccccctttgtcacctatacattccaaccagcaaactcttccccggacgcaaggaagcagcaaggttcatggcagcagcaataacagtaaaggctattgcccagccaaatctcccaaggacctagcagtgaaagtccatgataaagagacccctcaagacagtttggtggcccctgcccagccgccttctcagacatttccacctccctccctcccctcaaaaagtgttgcaatgcagcagaagcccacggcttatgtccggcccatggatggtcaagatcaggcccctagtgaatcccctgaactgaaaccactgccggaggactatcgacagcagacctttgaaaaaacagacttgaaagtgcctgccaaagccaagctcaccaaactgaagatgccttctcagtcagttgagcagacctactccaatgaagtccattgtgttgaagagattctgaaggaaatgacccattcatggccgcctcctttgacagcaatacatacgcctagtacagctgagccatccaagtttcctttccctacaaaggactctcagcatgtcagttctgtaacccaaaaccaaaaacaatatgatacatcttcaaaaactcactcaaattctcagcaaggaacgtcatccatgctcgaagacgaccttcagctcagtgacagtgaggacagtgacagtgaacaaaccccagagaagcctccctcctcatctgcacctccaagtgctccacagtcccttccagaaccagtggcatcagcacattccagcagtgcagagtcagaaagcaccagtgactcagacagttcctcagactcagagagcgagagcagttcaagtgacagcgaagaaaatgagcccctagaaaccccagctccggagcctgagcctccaacaacaaacaaatggcagctggacaactggctgaccaaagtcagccagccagctgcgccaccagagggccccaggagcacagagcccccacggcggcacccagagagtaagggcagcagcgacagtgccacgagtcaggagcattctgaatccaaagatcctccccctaaaagctccagcaaagccccccgggccccacccgaagccccccaccccggaaagaggagctgtcagaagtctccggcacagcaggagcccccacaaaggcaaaccgttggaaccaaacaacccaaaaaacctgtcaaggcctctgcccgggcaggttcacggaccagcctgcagggggaaagggagccagggcttcttccctatggctcccgagaccagacttccaaagacaagcccaaggtgaagacgaaaggacggccccgggccgcagcaagcaacgaacccaagccagcagtgcccccctccagtgagaagaagaagcacaagagctccctccctgccccctctaaggctctctcaggcccagaacccgcgaaggacaatgtggaggacaggacccctgagcactttgctcttgttcccctgactgagagccagggcccaccccacagtggcagcggcagcaggactagtggctgccgccaagccgtggtggtccaggaggacagccgcaaagacagactcccattgcctttgagagacaccaagctgctctcaccgctcagggacactcctcccccacaaagcttgatggtgaagatcaccctagacctgctctctcggataccccagcctcccgggaaggggagccgccagaggaaagcagaagataaacagccgcccgcagggaagaagcacagctctgagaagaggagctcagacagctcaagcaagttggccaaaaagagaaagggtgaagcagaaagagactgtgataacaagaaaatcagactggagaaggaaatcaaatcacagtcatcttcatcttcatcctcccacaaagaatcttctaaaacaaagccctccaggccctcctcacagtcctcaaagaaggaaatgctccccccgccacccgtgtcctcgtcctcccagaagccagccaagcctgcacttaagaggtcaaggcgggaagcagacacctgtggccaggaccctcccaaaagtgccagcagtaccaagagcaaccacaaagactcttccattcccaagcagagaagagtagaggggaagggctccagaagctcctcggagcacaagggttcttccggagatactgcaaatccttttccagtgccttctttgccaaatggtaactctaaaccagggaagcctcaagtgaagtttgacaaacaacaagcagaccttcacatgagggaggcaaaaaagatgaagcagaaagcagagttaatgacggacagggttggaaaggcttttaagtacctggaagccgtcttgtccttcattgagtgcggaattgccacagagtctgaaagccagtcatccaagtcagcttactctgtctactcagaaactgtagatctcattaaattcataatgtcattaaaatccttctcagatgccacagcgccaacacaagagaaaatatttgctgttttatgcatgcgttgccagtccattttgaacatggcgatgtttcgttgtaaaaaagacatagcaataaagtattctcgtactcttaataaacacttcgagagttcttccaaagtcgcccaggcaccttctccatgcattgcaagcacaggcacaccatcccctctttccccaatgccttctcctgccagctccgtagggtcccagtcaagtgctggcagtgtggggagcagtggggtggctgccactatcagcaccccagtcaccatccagaatatgacatcttcctatgtcaccatcacatcccatgttcttaccgcctttgacctttgggaacaggccgaggccctcacgaggaagaataaagaattctttgctcggctcagcacaaatgtgtgcaccttggccctcaacagcagtttggtggacctggtgcactatacacgacagggttttcagcagctacaagaattaaccaaaacaccttaatggagccccaggttgattcaatgccttgggaactatttttgcacattggaagcctcaaaaacagtccagacatttgtttcatcaggacaccaaactctaaaaaagaagcaccacgagatggccaggacatttgtccacttaaactctcaacaacagtgtgatcattggttggacactgtggttatgcagaagcagagatgaggaggctggccccagagatgatcttgcccttcctaactaaaggacagaagtgcaatttagcttaaatgggtgtatgaatggtctagaaacatttctattttttttttaaaccagcaggatacaagttgcaaatgaaatgaggagaaacagtttcaactctgaaagtgaatttcacgtcatctcagtagccacgctagtccattcccagaaggaaatttttttttttaacaatgacttttggtaaagggttttgtggatgattttttttcttttgagttttgggagaaatatttgtttagtaacttctaatggccatctgtaaaccataagtaatgaaggactccactgtgccccactttctgccaatgaacagtggcttgataataccaagtattgttgtaatttataaaattgaaggcaacccccgctcctgccgcccccaatctccccattgcctagagcgctgcacattgaccccagctctgacttctcattactgtgctgaaagtcagcccacgtcggagcggtgaggaggagccacagcacatggggtgccacctcgaggtctgcacaggaggacttggcgctgccatttcctacccctgccatttcccacccctgcttcagcgaaagggactctctaacagggcagtcactgttgactctattctgaatttcctcccttggggaagaagggaaccaacatttatacctgaccagatggctaaagtgcttttaaagttttgtttaagtagagctggaatttgaggtgctgatctgtggtctacagttatgtggtaactcatgttgtccagccaactcagagtttcgtcagtgaacaagaaacatgaaatctgcttcttagagaggctatatttttctgctacaaatattttatatttatagcaaaactagactttcagagtccttgattgtctaggggaagttaactccctgagaggatgtagagatttggggtggttgattagacttttgaaaaactcatcaccacatgccttcactccagagtgttctcagctagatttgatttggttgaggaggaactgtggccctccgtaagttattgccatagtgtatgcattaaaccaagtccattttgaatgacctaaaatgaagtaacacaatcagaaatcccatgtgcccataagcacagatttttctttttcattgaaactttaaaggttattattggaaacattactttgagtgcagtgtttttaaaagccaattcttttttatcccttttagaagtagaatttgcacacttactacaattgaggagtgtcatctctataactttttctccgcctttgtcccattctgcccctgtacatgtttcctaccaagcatgtttcacattttcctattagtggaggagggagaaccatatttatttataatgaagacatctaagatccctatgatgaatgcaggaactctcttggtagtttgtaaatacacaaagggatgtgtcgagggatgggagcgatgcttatctctcacagtgtgagtggtctgtgtgaggctgttccttcagtttcttctccagactgttctttggttgtcactaagtcagaggtctggtccctcatgtttaggtgaaagccagagaatgacagctgtagtcatatctgagcataagaccttgatgtgtgattcctgatgaccggtttcatttattcatgttataaagcaaagccctggtcctttttaaactactagttttaaaaacctgtgttaaatgaacagtaattgcctggtaggtttggtgtgtgtgtagcattgtgtgtccatctgttatatgtaaaggacaaggcaccagaatcaggctttatttcgatattgaagatgttatttaacatctttcttttttccttactcccttagccatcccctccccttttgtcctatcattccctagaacaagccacctgtcaattgtgaagggttgtgttctttatggcaggttctatgcagattgtgccagagcatgtgcgtgttctgttggcaagccacagtgctcccttgactgaagacatttccaggtagatttctcagccagctctaaaacagattgctttttcagtggccttactctttgtgggtttttttttttttctctgaacttgatataaagattttatttgtcccttgaaaaagtaacaaatgtgcatagatcaatttgtactactttggtcattggatatttctgatccttattgcattgtacctaaaggagagtaactaatggtaacctttttaatagagtatgtgaaaggtagtggctgatgaatccttaacgttcatagggtctttttgctgttacggttgtatatagaggtctgaaggatttttaaaatgatttgcactttttcactgcatgcttacaattcccaaaggcaaaatctgtactgaggtagatcatttgaaagggctagattataaaattaagccttagagtatggaaagttcttataacaataatagtacacacttcagagtaagacaaatgcaaagcatcttaaggagtgaaaatagagtgtaaatcttgcctttggcactacaaggtgtgtgtgtgtgtgtgtgtgtgtgtgtgtgtctttagtaggaaatggaagaacactgttttattttttaaagtgtttaatgtttctgtcctttctgtgaattattgaatttaagagccctgctaaataatgaaaaaacactttactaaaatttatcaaattatactgggttcggattgtgaaaacattggccacctagtagcagtggtgaggagtgggagggcccagcaagcatttatcagaaatagaatcacaataggaggagaatttgactgtctgatattatgatttgattacaatactgaatgggaaaagtatctaatattttgtaacaaaaagaccttcatattatctgttttgaccaaaatatgtagctatttcccttacacagattggaccgcacttatctcccttgtcctgtatcctttaatttcaggtctcaggatgtttagaaagctaaaaccccctacccctttctggctgaaaacttgccttatttggtatcttacacattaatgttactagcatcaggagcttactgttttattatgattcatcttcagtaatttttagaagcaagaagaaagccattgtgtcctctacaattaacaaaacttatctctgatatacaaagggatataaatatatacacttaaatagagaaaaagaggttgattgaattgtgcctttgagtgaacccagtttttaaataccgctgtgtttgtttcgccatggcttcagggatgctacatggctcttgcaccttttactcctctgctttatgaagtttgagttgtatttgtgcatcttaaagtaggttgaggcttgaggctgggctttcgggtttttttgttttttgttttgttttgttttgttttgttttcttgtacttaaacctgcttgcttcctaccacagattctttattttcccaaacactacaaaaaaacttttaaaactttgccatttcatctgtttacactctttgccactgattagcagtatttaaatcttgcaagaatattttgtgctttctttagaaacacaagagtatagatttttctcactgaaaagtgagagttacgcattgcagccatgaagggatgctaggatcaattatggcagtaccttttttcccctcctgttcttgagccagttgtctcttttgttttgggtcccacttaggattaatggatgtaaggtattttcctgtgcctttattttgtgtcattctattggaaggaggtgtaacggcagaatagcatcgtgttgggggttttccttcaaacactgcaagtgatattgccaccatgtgaacctcaaatatgcaatccagttgtgttggtttctcggtgacttggagtgttcatctcttcatgaattgtgagcactgaccatgttcttcagttcttaattatggtgagttgacaaataccaactactgcttttctttaggtggctataaatttcttactgtcaggaggaaatgacattatattctgttccactgaacgtcagagatcagcaggcactgtactgggtagagaagtgcctatacttctctacctaagagggcaggagggaaaccctacagctccttgtgagcctatatattagtatatcggcctggagaggacaagggaataagaccactcatagtgaggctggccaagctgcactggtcggaccaggcagtggctgacctaaggaagacaacttgctttgcttaaaagtagattttttaagcaatgcttaacacaggcagcattcacctttgttcaggccatcgacatgtattgttaaaattactgcatatccccctcagatatcaagtatacactgttcatgttggggttgtgtgtgtgtatgtgtgtatgtacgcacgcatgtgtcccaaatcttgttttaattttttttttctgaatgtgatcatgttttggatgatacctgagcagggttgccttttttttatttattaccattatatattatattatattatattatatattttttgctttcttataactttggaggaaagtcaaatcttggtattattaaaattgttttaaaaaggagtaaattttccagttgataaatgaaaatcactggcctatgtttaataagtttttctttaattactgtggaataacgtgccagctatcatcaacacaatgattttgtacatagggtagggaagcagtgatgctctcaatgggaagatgtgcaacacaaattaaggggaactccatgtattttacctacttcagcaatggaactgcaacttggggctttgtgaataaaatttagctgccttgtatagtcgtttgaaagaatatgtgatctgtgagagaattatagtttttttttagaagaaaaatctgcaaaagatctttccaaagacaatgtgccacagatcttttgttctctgtaatgaggattaattgctgtttaaacaaaaatgtaattgttcatctttaaattctttccttttcataagaggatcaagctgtaaaaaaacaaaaaaattaataaaaatttcgagaaatca

SEQ ID NO: 160488 - DNA, 3633 bp, Artificial Sequence
  derived and/or modified sequence
atggcagcccagtccagtctgtataacgatgaccgcaacctgctacggattcgcgaaaaggaacgacgtaatcaggaagctcatcaggaaaaggaagccttcccggaaaagatccccttgttcggagagccatataaaaccgccaaaggcgacgagctgagctcccggattcagaacatgctgggcaactacgaagaagtgaaagaattcctcagcaccaaatcacacacacatcggctcgatgctagcgaaaatcggttaggaaaaccaaaatatcccctgatccccgataaaggaagcagcatcccctcgtcatcctttcacaccagtgtgcaccatcagtccatccacacgcctgcaagcggccctctttctgtgggaaatatttcccataatcctaagatggctcagccccgtactgaaccaatgccttcccttcatgccaaatcctgtggcccccctgacagtcagcacttgacgcaggaccgtcttggccaggagggctttgggtcatcccaccacaaaaagggagatcggcgggcggacggagaccactgcgccagcgtgaccgactctgccccagaacgggagttgtcacccttgattagtctcccgtctcctgtaccgcctctcagccccatacactctaatcaacaaactctgccaaggacgcaaggctcaagcaaggtccacggcagctcaaataacagcaagggctattgtcccgctaaaagcccaaaagatttagctgtgaaggtgcacgataaagagactccccaggattccctggtggcacccgcacagcccccgagtcagacttttccccctccaagcctcccctccaagtcagtggccatgcagcagaagccaaccgcctacgtaagaccaatggacgggcaagatcaagcaccttcagagagtcccgaattgaagccactgccagaagattatcgccaacagacgttcgaaaaaaccgatctcaaagtgccagccaaggcgaaactgaccaagttgaagatgccctctcaatctgtcgaacagacttacagcaacgaggtgcattgcgttgaggagatcctgaaggaaatgactcatagctggccgcctcccctgacagctattcatactccgtccacagctgaaccatccaagttcccctttccaaccaaggactctcagcatgtgagctctgtcactcagaatcagaagcagtatgacacgtcttctaagacacatagtaatagccagcaaggaactagtagtatgttggaagatgacctgcagctcagcgattccgaggatagcgactccgaacaaactccagagaagccaccatcttcctcagctccaccaagtgcgcctcagagcctgccagagcccgtggcaagcgcacattcaagttcggccgagtccgagtccacttcagactcagatagcagctcagactcagaaagcgagtcttcatccagcgattcagaagaaaacgagccactcgagactccagccccggagcctgagcctcctacgaccaacaagtggcagctggataactggctgaccaaggtgagccagccggctgctccacccgaggggccacggtcaactgaacccccgagaagacatccagaaagcaagggctctagtgactctgccacctcacaggagcacagtgaaagtaaagaccccccccccaagtccagctctaaggctcctcgagcccctccagaggcaccccatccaggaaagaggtcctgccagaagagcccggctcagcaggaacctccacagagacagacggtgggcactaaacaaccgaaaaaaccagtcaaggccagtgcccgcgccggcagtaggacttctctgcagggtgagagagagcctggcctgcttccttatggcagccgagatcaaacctctaaggacaagcctaaagtgaagaccaagggcagaccgagggcagctgcaagtaacgaacctaagccagcagtacccccctcaagcgagaagaaaaagcacaaatcttccctgcccgcgccaagtaaagcccttagcggaccagaacccgccaaggacaatgtggaggatcgcaccccagagcatttcgccttggtgcctttaacagagtcacaaggtcccccgcacagcggttccggctctcgcacaagcggctgtcgccaggcagtagttgtccaggaagactcgcgaaaagatcgactccctctgcccttgagagataccaaactgctcagccctcttagggacacaccaccaccgcagtccttaatggtcaaaataaccctggatctgctcagccggattccacaacctcccggaaaaggttcacggcagaggaaagccgaggataaacagccccctgcggggaaaaagcatagtagcgaaaagaggtccagcgactcgagtagcaagctggccaagaaaaggaagggagaagccgagagggactgtgacaataaaaaaatccggctggagaaagagatcaaatcacagtcctcatcttcttcctcaagccataaggagagctctaagactaagccaagtagaccttcttctcaaagtagcaagaaagaaatgctccctcctcctccagtaagctcaagctcccagaagcccgctaaacctgcgctcaaacgcagtcgccgagaagctgatacgtgtggccaggaccccccgaagtccgctagttctaccaagagtaatcataaagactccagcatccccaaacagaggagggtcgaaggcaaaggatcacgctcttcaagcgagcacaagggctcctcgggagacacagctaatccatttccagtcccaagcctgccaaatggtaactcaaaaccaggcaagcctcaggtcaaattcgataaacagcaggcagatctgcacatgcgtgaggccaaaaagatgaagcagaaggctgagctcatgaccgatagagtgggaaaagcttttaagtatctggaagcagttttatcctttatagagtgcggtatagccaccgagagcgaatcccagtcctctaagtccgcttactctgtctatagcgagaccgtggatttgattaagttcattatgtccctcaaatccttctccgatgcaacagcacccactcaagaaaagatttttgccgtcctgtgtatgcgctgccagagtatacttaacatggccatgttccgctgtaaaaaggacattgcaataaaatactcaaggacacttaacaagcattttgagtcatcatcaaaggtagcccaggctcctagtccgtgcatcgcttctactggcaccccttcgccattgtctccaatgccttctcctgcctcctcggtgggatcgcagtcatccgccggcagtgtgggttcctcaggagtggccgcaacaatttcaacccccgtgaccattcagaacatgacctctagctacgtcaccatcacatcacacgttctgacagcttttgatctgtgggagcaagcggaggcattgactagaaaaaataaggagttctttgcccgactcagcactaacgtttgcacgctcgccctaaacagtagcctggttgatctcgtgcactacacacgtcagggctttcaacagctgcaggagttaaccaagaccccctag

SEQ ID NO: 160489 - DNA, 3633 bp, Artificial Sequence
  derived and/or modified sequence
atggccgcccagagcagcctgtacaatgatgacaggaacctgctgcgcatccgggagaaggagaggaggaaccaggaggcccaccaggagaaggaggccttccctgagaagatccccctgtttggagagccctacaagacagccaagggagatgagctgagcagccgcatccagaacatgctgggcaactatgaggaggtgaaggagttcctgagcaccaagagccacacccaccggctggatgccagcgagaaccggctgggcaagcccaagtaccccctcatcccagacaagggcagcagcatccccagcagcagcttccacacctctgtgcaccaccagagcatccacaccccagccagcggccccctgtctgtgggcaacatcagccacaaccccaagatggcccagcccaggacagagcccatgcccagcctgcacgccaagagctgtggccccccagacagccagcacctgacccaggaccggctgggccaggagggcttcggcagcagccaccacaagaagggggacagaagagcagatggagaccactgtgcctctgtgacagacagcgcccctgagcgggagctgagccccctcatcagcctgcccagccctgtgccccccctgagccccatccacagcaaccagcagaccctgcccaggacccagggcagcagcaaggtgcacggcagcagcaacaacagcaagggctactgcccagccaagagccccaaggacctggccgtgaaggtgcatgacaaggagaccccccaggacagcctggtggccccagcccagccccccagccagaccttccccccacccagcctgcccagcaagtctgtggccatgcagcagaagcccacagcctacgtgcggcccatggatggccaggaccaggcccccagcgagagccctgagctgaagcccctgcctgaggactaccggcagcagacctttgagaagacagacctgaaggtgcctgccaaggccaagctgaccaagctgaagatgcccagccagagcgtggagcagacctacagcaatgaggtgcactgtgtggaggagatcctgaaggagatgacccacagctggcccccacccctgacagccatccacacccccagcacagctgagcccagcaagttccccttccccaccaaggacagccagcacgtgtcctctgtgacccagaaccagaagcagtatgacaccagcagcaagacccacagcaacagccagcagggcaccagctccatgctggaggatgacctgcagctgagtgacagtgaagattctgattctgagcagaccccagagaagccacccagcagcagcgccccacccagcgccccccagagcctgcctgagcctgtggccagcgcccacagcagcagcgctgagagcgagagcaccagtgacagcgacagcagcagtgacagcgagagcgagagcagcagcagtgacagcgaggagaatgagcccctggagaccccagcccctgagcctgagccccccaccaccaacaagtggcagctggacaactggctgaccaaggtgtcccagcctgctgcccctcctgagggccccaggagcacagagcccccaagaagacaccctgagagcaagggcagcagtgacagcgccaccagccaggagcacagcgagagcaaggaccccccacccaagagcagcagcaaggccccccgggcccctcctgaggccccccaccctgggaagaggagctgccagaagagccctgcccagcaggagcccccccagaggcagacagtgggcaccaagcagcccaagaagcctgtgaaggccagcgcccgggccggcagcaggaccagcctgcagggcgagcgggagcccggcctgctgccctacggcagccgggaccagaccagcaaggacaagcccaaggtgaagaccaagggccggcccagggctgctgccagcaatgagcccaagccagctgtgccccccagcagcgagaagaagaagcacaagagcagcctgcctgcccccagcaaggccctgagcggccctgagcccgccaaggacaacgtggaggacaggaccccagagcactttgccctggtgcccctgacagagagccagggccccccccacagcggcagcggcagcaggaccagcggctgccggcaggccgtggtggtgcaggaggacagcaggaaggaccggctgcccctgcccctgcgggacaccaagctgctgagccccctgcgggacaccccaccaccccagagcctgatggtgaagatcaccctggacctgctgagccgcatcccccagcccccaggcaagggcagccggcagaggaaggccgaggacaagcagcccccagctgggaagaagcacagcagcgagaagaggagcagtgacagcagcagcaagctggccaagaagaggaaaggagaggccgagcgggactgtgacaacaagaagatccggctggagaaggagatcaagagccagagcagcagcagcagcagcagccacaaggagagcagcaagaccaagcccagccggcccagcagccagagcagcaagaaggagatgctgcccccacctcctgtgagcagcagcagccagaagccagccaagccagccctgaagaggagccggcgggaggccgacacctgtggccaggacccccccaagagcgccagcagcaccaagagcaaccacaaggacagcagcatccccaagcagaggagagtggagggcaagggcagccgcagcagcagcgagcacaagggcagcagcggggacacagccaaccccttccctgtgcccagcctgcccaatggaaacagcaagccaggcaagccccaggtgaagtttgacaagcagcaggccgacctgcacatgagggaggccaagaagatgaagcagaaggccgagctgatgacagacagagtgggcaaggccttcaagtacctggaggccgtgctgtccttcattgaatgtggcatcgccacagaaagtgagagccagagcagcaagagcgcctacagcgtgtacagcgagaccgtggacctgatcaagttcatcatgagcctgaagagcttcagtgatgccacagcccccacccaggagaagatctttgctgtgctgtgcatgcgctgccagagcatcctgaacatggccatgttccgctgcaagaaggacatcgccatcaagtacagcaggaccctgaacaagcactttgagagcagcagcaaggtggcccaggcccccagcccctgcatcgccagcacaggcacccccagccccctgagccccatgcccagccctgccagctctgtgggcagccagagcagcgctggctctgtgggcagcagcggcgtggccgccaccatcagcacccctgtgaccatccagaacatgaccagcagctatgtgaccatcaccagccacgtgctgacagcctttgacctgtgggagcaggccgaggccctgaccaggaagaacaaggagttctttgcccggctgagcaccaacgtgtgcaccctggccctgaacagcagcctggtggacctggtgcactacacccggcagggcttccagcagctgcaggagctgaccaagaccccctag

SEQ ID NO: 160490 - DNA, 3633 bp, Artificial Sequence
  derived and/or modified sequence
atggccgcccagagcagcctgtacaacgacgaccggaacctgctgcggattcgtgaaaaagagcggcgaaatcaggaggcccaccaggaaaaggaggcattccccgaaaagattccgctgttcggggagccatacaaaaccgccaaaggggacgagctgagtagccggatccagaatatgctgggaaactatgaggaggttaaggagtttttgtccaccaaatcccacacccataggctggatgcctcggaaaacaggctcgggaagcccaagtatccattaattccagataaaggctccagtatcccttccagttccttccacacctccgtgcaccatcagtctatccacacacccgccagcgggcctctttctgttgggaatattagccacaacccaaagatggctcaacccaggactgagcccatgccatccctgcatgctaaatcgtgtgggccaccggacagccaacatctgactcaggacaggctgggtcaagagggattcgggtcatcccaccataagaagggcgatcgtagagctgacggcgaccattgcgcttcggtcaccgactcagcccctgaaagggaactctcgcccctgatttctctgcccagccccgtccctcctctctcccccattcattccaaccaacaaacactgccaaggactcagggatcttctaaggtgcacggttcctcaaataattctaaggggtattgccccgcaaagagtcctaaagaccttgcagtaaaagtgcacgacaaagaaacacctcaggacagtctggtcgcacctgcacaaccaccgagccagactttcccccctccatcactaccctctaagtccgtggccatgcagcagaagcccaccgcatacgtgcgacctatggatgggcaggaccaggcccctagtgaaagccccgagttgaaacccctccctgaggactacaggcagcagacattcgagaaaacggatctgaaagtgcctgcaaaggccaagttgacgaaactgaagatgccctcccagagtgtggagcagacttattccaatgaggtccactgcgtcgaggaaatcctgaaagagatgactcatagttggccccctccgctgacagccatacatacacccagcacagccgaaccatctaagtttccttttcctaccaaagattcccagcacgtttcaagtgtgacacagaatcagaagcagtatgatacgagctccaaaacccactcaaatagccaacagggtacatcctcaatgctcgaggacgatctgcagctgagcgatagcgaggactccgacagcgaacaaacacccgagaagcctcctagcagcagcgctcctcccagtgctccacagtcccttcctgagccagtggctagcgcccactcaagtagcgcggaaagcgaatccaccagtgattccgactcatcttcagatagcgaaagtgagtcgagttcaagcgatagtgaggaaaatgagcccctcgaaaccccagcacctgaacccgagccacccaccaccaataaatggcagttagataactggctgaccaaagtttcacaacctgctgcaccgcccgagggaccacgatccaccgagcctccacggcggcaccctgaatcaaagggctcgtcagattctgctacgagtcaggagcattctgagagtaaagatccgccccccaagagttcgagtaaagctccaagggcccctcctgaggcaccccaccctggcaagcggtcgtgccagaaatcacccgcccagcaggaacctcctcagcgccagacagttggaacaaagcaacctaagaaacctgtgaaagcaagcgcccgggctggttcgaggaccagcttacagggagaaagagaacctggtttactcccctatggtagtcgagaccagacctcaaaagataagccaaaagttaagaccaaggggaggcctagagctgcagccagtaacgaacccaaacccgccgtacccccatcctccgaaaagaagaagcataaatcttcactacctgccccttcaaaggcactctcaggccctgagcctgctaaggacaatgtcgaggatcgaaccccagagcattttgcgctcgtgcctctgacagagtcccagggccccccccactcaggttcaggcagccgcacatccggatgtagacaggccgtcgtggtgcaggaagatagccgtaaggataggctgcccctccccctcagggacaccaaacttctgtcgccactccgggacaccccacctccccagagcctgatggtgaagataaccctagacctgttatcaaggattcctcagccccctgggaagggcagtagacagaggaaagccgaagacaaacagcctccggccggcaaaaaacattcttctgagaagcgaagtagtgactcgtcttctaagctggccaaaaagcggaagggggaggcagagcgagactgcgataataagaaaattaggctcgagaaagaaattaaatcacagagttcctcttctagctcctctcacaaggagtccagcaagaccaagccaagcaggccctcctcccaaagctccaaaaaggaaatgctcccgcctccccccgtaagttccagtagtcaaaaacccgcgaaaccagcactgaagcgatctcgacgagaggcagacacatgtggtcaggacccacccaaaagcgcgtcaagcacaaagagtaaccataaagattcttctatccccaagcagaggagggttgaaggcaaaggcagccgatcatccagcgagcacaaaggctcctcgggtgatacagccaatccgttccctgtgccttcactgccaaatggcaactcaaagcctggaaagccccaggtgaagttcgataagcagcaggccgacctgcacatgcgggaagccaagaaaatgaagcagaaagctgaactgatgacggatcgggtgggtaaggcattcaagtacctggaggccgtcctgtctttcatcgagtgcggaattgctactgaatctgaaagtcaatcctccaaaagcgcctacagcgtctatagcgaaacagtggatctgatcaagtttatcatgtctctcaagtccttcagcgacgcaaccgccccaacccaggaaaagatcttcgcagtgttatgcatgcgttgtcagagcatactcaacatggccatgtttcgctgtaagaaagacatagcgattaagtacagtcggaccttgaataagcacttcgagagcagttctaaagtcgcccaggccccaagtccatgcattgcctcaactggaacccctagcccactttcgccaatgccatctcccgcctcatccgtaggatcccaaagctccgccgggtccgtgggctcatcaggcgtggctgcaaccatcagtacccctgtgaccatccagaacatgacaagttcatatgtgaccatcacgagtcatgtcctgacagccttcgatctgtgggaacaggccgaggcactgactcgtaagaataaggaattcttcgcgaggctatcaacaaacgtatgtaccctggcgctcaacagcagcctggtggatctcgtgcattacactaggcaggggttccaacagttgcaggaactcacaaaaaccccctag

SEQ ID NO: 160491 - DNA, 9390 bp, Artificial Sequence
  derived and/or modified sequence
ggcaatttcttttcctttctaactgtggcccgcgttgtgctgttgctgggcaggcgttgggcgccggcggtcttcgagcgtgggggcccgctggctttcccttctcagaaactgcgccgggggcgctcgcttgccccggattcggacgcggcgctccccgggctcgtctgaagtgcagatcgccgcagaggccccagtgcccggatgtccatcaggattagcgcgagccaatacgggccgagcccggggctgcgccgaggacgcccggggctcgagagcaggtagtcccgtaacatcggggcgccgcgccgggacgcgtccccgcccggctccgccaaatggtgagcgcggcgctggcagcagggcccgcggggtgaaggcgctcatggacggaagacccctggctctataagctgaattatggcagcccagtcaagtttgtacaatgacgacagaaacctgcttcgaattagagagaaggaaagacgcaaccaggaagcccaccaagagaaagaggcatttcctgaaaagattcccctttttggagagccctacaagacagcaaaaggtgatgagctgtctagtcgaatacagaacatgttgggaaactacgaagaagtgaaggagttccttagtactaagtctcacactcatcgcctggatgcttctgaaaataggttgggaaagccgaaatatcctttaattcctgacaaagggagcagcattccatccagctccttccacactagtgtccaccaccagtccattcacactcctgcgtctggaccactttctgttggcaacattagccacaatccaaagatggcgcagccaagaactgaaccaatgccaagtctccatgccaaaagctgcggcccaccggacagccagcacctgacccaggatcgccttggtcaggaggggttcggctctagtcatcacaagaaaggtgaccgaagagctgacggagaccactgtgcttcggtgacagattcggctccagagagggagctttctcccttaatctctttgccttccccagttccccctttgtcacctatacattccaaccagcaaactcttccccggacgcaaggaagcagcaaggttcatggcagcagcaataacagtaaaggctattgcccagccaaatctcccaaggacctagcagtgaaagtccatgataaagagacccctcaagacagtttggtggcccctgcccagccgccttctcagacatttccacctccctccctcccctcaaaaagtgttgcaatgcagcagaagcccacggcttatgtccggcccatggatggtcaagatcaggcccctagtgaatcccctgaactgaaaccactgccggaggactatcgacagcagacctttgaaaaaacagacttgaaagtgcctgccaaagccaagctcaccaaactgaagatgccttctcagtcagttgagcagacctactccaatgaagtccattgtgttgaagagattctgaaggaaatgacccattcatggccgcctcctttgacagcaatacatacgcctagtacagctgagccatccaagtttcctttccctacaaaggactctcagcatgtcagttctgtaacccaaaaccaaaaacaatatgatacatcttcaaaaactcactcaaattctcagcaaggaacgtcatccatgctcgaagacgaccttcagctcagtgacagtgaggacagtgacagtgaacaaaccccagagaagcctccctcctcatctgcacctccaagtgctccacagtcccttccagaaccagtggcatcagcacattccagcagtgcagagtcagaaagcaccagtgactcagacagttcctcagactcagagagcgagagcagttcaagtgacagcgaagaaaatgagcccctagaaaccccagctccggagcctgagcctccaacaacaaacaaatggcagctggacaactggctgaccaaagtcagccagccagctgcgccaccagagggccccaggagcacagagcccccacggcggcacccagagagtaagggcagcagcgacagtgccacgagtcaggagcattctgaatccaaagatcctccccctaaaagctccagcaaagccccccgggccccacccgaagccccccaccccggaaagaggagctgtcagaagtctccggcacagcaggagcccccacaaaggcaaaccgttggaaccaaacaacccaaaaaacctgtcaaggcctctgcccgggcaggttcacggaccagcctgcagggggaaagggagccagggcttcttccctatggctcccgagaccagacttccaaagacaagcccaaggtgaagacgaaaggacggccccgggccgcagcaagcaacgaacccaagccagcagtgcccccctccagtgagaagaagaagcacaagagctccctccctgccccctctaaggctctctcaggcccagaacccgcgaaggacaatgtggaggacaggacccctgagcactttgctcttgttcccctgactgagagccagggcccaccccacagtggcagcggcagcaggactagtggctgccgccaagccgtggtggtccaggaggacagccgcaaagacagactcccattgcctttgagagacaccaagctgctctcaccgctcagggacactcctcccccacaaagcttgatggtgaagatcaccctagacctgctctctcggataccccagcctcccgggaaggggagccgccagaggaaagcagaagataaacagccgcccgcagggaagaagcacagctctgagaagaggagctcagacagctcaagcaagttggccaaaaagagaaagggtgaagcagaaagagactgtgataacaagaaaatcagactggagaaggaaatcaaatcacagtcatcttcatcttcatcctcccacaaagaatcttctaaaacaaagccctccaggccctcctcacagtcctcaaagaaggaaatgctccccccgccacccgtgtcctcgtcctcccagaagccagccaagcctgcacttaagaggtcaaggcgggaagcagacacctgtggccaggaccctcccaaaagtgccagcagtaccaagagcaaccacaaagactcttccattcccaagcagagaagagtagaggggaagggctccagaagctcctcggagcacaagggttcttccggagatactgcaaatccttttccagtgccttctttgccaaatggtaactctaaaccagggaagcctcaagtgaagtttgacaaacaacaagcagaccttcacatgagggaggcaaaaaagatgaagcagaaagcagagttaatgacggacagggttggaaaggcttttaagtacctggaagccgtcttgtccttcattgagtgcggaattgccacagagtctgaaagccagtcatccaagtcagcttactctgtctactcagaaactgtagatctcattaaattcataatgtcattaaaatccttctcagatgccacagcgccaacacaagagaaaatatttgctgttttatgcatgcgttgccagtccattttgaacatggcgatgtttcgttgtaaaaaagacatagcaataaagtattctcgtactcttaataaacacttcgagagttcttccaaagtcgcccaggcaccttctccatgcattgcaagcacaggcacaccatcccctctttccccaatgccttctcctgccagctccgtagggtcccagtcaagtgctggcagtgtggggagcagtggggtggctgccactatcagcaccccagtcaccatccagaatatgacatcttcctatgtcaccatcacatcccatgttcttaccgcctttgacctttgggaacaggccgaggccctcacgaggaagaataaagaattctttgctcggctcagcacaaatgtgtgcaccttggccctcaacagcagtttggtggacctggtgcactatacacgacagggttttcagcagctacaagaattaaccaaaacaccttaatggagccccaggttgattcaatgccttgggaactatttttgcacattggaagcctcaaaaacagtccagacatttgtttcatcaggacaccaaactctaaaaaagaagcaccacgagatggccaggacatttgtccacttaaactctcaacaacagtgtgatcattggttggacactgtggttatgcagaagcagagatgaggaggctggccccagagatgatcttgcccttcctaactaaaggacagaagtgcaatttagcttaaatgggtgtatgaatggtctagaaacatttctattttttttttaaaccagcaggatacaagttgcaaatgaaatgaggagaaacagtttcaactctgaaagtgaatttcacgtcatctcagtagccacgctagtccattcccagaaggaaatttttttttttaacaatgacttttggtaaagggttttgtggatgattttttttcttttgagttttgggagaaatatttgtttagtaacttctaatggccatctgtaaaccataagtaatgaaggactccactgtgccccactttctgccaatgaacagtggcttgataataccaagtattgttgtaatttataaaattgaaggcaacccccgctcctgccgcccccaatctccccattgcctagagcgctgcacattgaccccagctctgacttctcattactgtgctgaaagtcagcccacgtcggagcggtgaggaggagccacagcacatggggtgccacctcgaggtctgcacaggaggacttggcgctgccatttcctacccctgccatttcccacccctgcttcagcgaaagggactctctaacagggcagtcactgttgactctattctgaatttcctcccttggggaagaagggaaccaacatttatacctgaccagatggctaaagtgcttttaaagttttgtttaagtagagctggaatttgaggtgctgatctgtggtctacagttatgtggtaactcatgttgtccagccaactcagagtttcgtcagtgaacaagaaacatgaaatctgcttcttagagaggctatatttttctgctacaaatattttatatttatagcaaaactagactttcagagtccttgattgtctaggggaagttaactccctgagaggatgtagagatttggggtggttgattagacttttgaaaaactcatcaccacatgccttcactccagagtgttctcagctagatttgatttggttgaggaggaactgtggccctccgtaagttattgccatagtgtatgcattaaaccaagtccattttgaatgacctaaaatgaagtaacacaatcagaaatcccatgtgcccataagcacagatttttctttttcattgaaactttaaaggttattattggaaacattactttgagtgcagtgtttttaaaagccaattcttttttatcccttttagaagtagaatttgcacacttactacaattgaggagtgtcatctctataactttttctccgcctttgtcccattctgcccctgtacatgtttcctaccaagcatgtttcacattttcctattagtggaggagggagaaccatatttatttataatgaagacatctaagatccctatgatgaatgcaggaactctcttggtagtttgtaaatacacaaagggatgtgtcgagggatgggagcgatgcttatctctcacagtgtgagtggtctgtgtgaggctgttccttcagtttcttctccagactgttctttggttgtcactaagtcagaggtctggtccctcatgtttaggtgaaagccagagaatgacagctgtagtcatatctgagcataagaccttgatgtgtgattcctgatgaccggtttcatttattcatgttataaagcaaagccctggtcctttttaaactactagttttaaaaacctgtgttaaatgaacagtaattgcctggtaggtttggtgtgtgtgtagcattgtgtgtccatctgttatatgtaaaggacaaggcaccagaatcaggctttatttcgatattgaagatgttatttaacatctttcttttttccttactcccttagccatcccctccccttttgtcctatcattccctagaacaagccacctgtcaattgtgaagggttgtgttctttatggcaggttctatgcagattgtgccagagcatgtgcgtgttctgttggcaagccacagtgctcccttgactgaagacatttccaggtagatttctcagccagctctaaaacagattgctttttcagtggccttactctttgtgggtttttttttttttctctgaacttgatataaagattttatttgtcccttgaaaaagtaacaaatgtgcatagatcaatttgtactactttggtcattggatatttctgatccttattgcattgtacctaaaggagagtaactaatggtaacctttttaatagagtatgtgaaaggtagtggctgatgaatccttaacgttcatagggtctttttgctgttacggttgtatatagaggtctgaaggatttttaaaatgatttgcactttttcactgcatgcttacaattcccaaaggcaaaatctgtactgaggtagatcatttgaaagggctagattataaaattaagccttagagtatggaaagttcttataacaataatagtacacacttcagagtaagacaaatgcaaagcatcttaaggagtgaaaatagagtgtaaatcttgcctttggcactacaaggtgtgtgtgtgtgtgtgtgtgtgtgtgtgtgtctttagtaggaaatggaagaacactgttttattttttaaagtgtttaatgtttctgtcctttctgtgaattattgaatttaagagccctgctaaataatgaaaaaacactttactaaaatttatcaaattatactgggttcggattgtgaaaacattggccacctagtagcagtggtgaggagtgggagggcccagcaagcatttatcagaaatagaatcacaataggaggagaatttgactgtctgatattatgatttgattacaatactgaatgggaaaagtatctaatattttgtaacaaaaagaccttcatattatctgttttgaccaaaatatgtagctatttcccttacacagattggaccgcacttatctcccttgtcctgtatcctttaatttcaggtctcaggatgtttagaaagctaaaaccccctacccctttctggctgaaaacttgccttatttggtatcttacacattaatgttactagcatcaggagcttactgttttattatgattcatcttcagtaatttttagaagcaagaagaaagccattgtgtcctctacaattaacaaaacttatctctgatatacaaagggatataaatatatacacttaaatagagaaaaagaggttgattgaattgtgcctttgagtgaacccagtttttaaataccgctgtgtttgtttcgccatggcttcagggatgctacatggctcttgcaccttttactcctctgctttatgaagtttgagttgtatttgtgcatcttaaagtaggttgaggcttgaggctgggctttcgggtttttttgttttttgttttgttttgttttgttttgttttcttgtacttaaacctgcttgcttcctaccacagattctttattttcccaaacactacaaaaaaacttttaaaactttgccatttcatctgtttacactctttgccactgattagcagtatttaaatcttgcaagaatattttgtgctttctttagaaacacaagagtatagatttttctcactgaaaagtgagagttacgcattgcagccatgaagggatgctaggatcaattatggcagtaccttttttcccctcctgttcttgagccagttgtctcttttgttttgggtcccacttaggattaatggatgtaaggtattttcctgtgcctttattttgtgtcattctattggaaggaggtgtaacggcagaatagcatcgtgttgggggttttccttcaaacactgcaagtgatattgccaccatgtgaacctcaaatatgcaatccagttgtgttggtttctcggtgacttggagtgttcatctcttcatgaattgtgagcactgaccatgttcttcagttcttaattatggtgagttgacaaataccaactactgcttttctttaggtggctataaatttcttactgtcaggaggaaatgacattatattctgttccactgaacgtcagagatcagcaggcactgtactgggtagagaagtgcctatacttctctacctaagagggcaggagggaaaccctacagctccttgtgagcctatatattagtatatcggcctggagaggacaagggaataagaccactcatagtgaggctggccaagctgcactggtcggaccaggcagtggctgacctaaggaagacaacttgctttgcttaaaagtagattttttaagcaatgcttaacacaggcagcattcacctttgttcaggccatcgacatgtattgttaaaattactgcatatccccctcagatatcaagtatacactgttcatgttggggttgtgtgtgtgtatgtgtgtatgtacgcacgcatgtgtcccaaatcttgttttaattttttttttctgaatgtgatcatgttttggatgatacctgagcagggttgccttttttttatttattaccattatatattatattatattatattatatattttttgctttcttataactttggaggaaagtcaaatcttggtattattaaaattgttttaaaaaggagtaaattttccagttgataaatgaaaatcactggcctatgtttaataagtttttctttaattactgtggaataacgtgccagctatcatcaacacaatgattttgtacatagggtagggaagcagtgatgctctcaatgggaagatgtgcaacacaaattaaggggaactccatgtattttacctacttcagcaatggaactgcaacttggggctttgtgaataaaatttagctgccttgtatagtcgtttgaaagaatatgtgatctgtgagagaattatagtttttttttagaagaaaaatctgcaaaagatctttccaaagacaatgtgccacagatcttttgttctctgtaatgaggattaattgctgtttaaacaaaaatgtaattgttcatctttaaattctttccttttcataagaggatcaagctgtaaaaaaacaaaaaaattaataaaaatttcgagaaatc

SEQ ID NO: 160492 - DNA, 3633 bp, Artificial Sequence
  derived and/or modified sequence
atggccgctcaaagttccctttataacgatgacagaaatctcctgagaatccgggaaaaggaaagacgaaaccaggaggcccatcaggaaaaagaggcatttccggaaaagattcccctgttcggtgaaccctataagaccgctaagggtgatgagttgagtagccgaattcagaacatgctcgggaactacgaggaggtaaaggagtttttatcgacgaagagccatactcataggctggacgcaagtgagaaccgactgggaaagcccaaataccctctgatcccggacaaggggtcgtcgatcccatcctcttcatttcacacatctgtacaccaccagagtatccatacccccgctagtggacctctgtccgttggcaatattagccacaatcctaagatggcacagcccaggacagaaccaatgccctccctccatgccaaatcttgcgggccaccagactcccagcatctgacacaggaccggctagggcaggaagggttcgggtctagccaccacaagaagggggatcggagggcagacggagaccattgtgcatctgtcacagacagtgcccctgagagggaactttcccccctcatctctttgccttccccagtgccacctttaagccctatccatagcaaccagcagactttgccaaggacccaggggagcagcaaagtgcacggatccagcaataactccaaaggttactgcccagccaaaagcccaaaggatttggctgtgaaggttcacgacaaggaaaccccccaggattcgcttgtcgctccagcccagcctccctcccagaccttcccccctccctcgctacctagtaagagtgtagccatgcagcagaagccgaccgcttacgttagacccatggatggacaggaccaggcgccatcagagagccctgagttgaaacctctcccagaagattatcggcaacagacattcgagaagacggatttaaaggttccagcgaaggccaagttgactaagctcaagatgccttcacagtctgtggagcaaacgtatagcaacgaagtgcactgtgtagaggaaattctcaaagaaatgacccacagctggcccccaccgcttaccgctatccacaccccctcaactgctgagccttcgaagtttccctttccgaccaaagatagtcagcacgtgtcgagtgtcacccagaatcagaaacagtatgatacaagcagcaaaactcacagtaatagccagcaaggtacctcctccatgctggaggatgatttgcagttgtctgatagcgaggatagcgattccgagcagacacctgagaaacctccctcctcgtccgctcctccatccgccccacaatctttgccagagcctgttgcttctgcgcactccagtagtgctgaaagcgaaagcacatccgatagcgatagttcatctgatagtgagtcagagtcttcaagctcagacagcgaggagaacgaaccactcgagaccccagccccagagcctgaaccgcctacaactaacaaatggcagctggataattggttaacaaaggtctcccagcccgcagcgccacctgaggggcctaggtccacggaaccccctcgaagacatcccgagagtaaaggttctagcgacagtgcaaccagtcaagaacacagcgagagcaaggatccaccgcctaagtcctcttccaaagcaccacgagcccctccagaggcacctcacccaggaaaaagatcttgtcaaaaaagcccggcacagcaggaacctccacagcgacaaactgtcggcacaaagcagccgaaaaagcctgttaaagcctccgctagagcaggtagtcgcacttcactgcagggagagcgcgaaccgggactcctgccatacggatctcgtgaccagacttcaaaggacaaacctaaggtgaaaactaagggacggcctagagcggcagcatcaaacgagccaaaaccagccgttcccccatcatcggaaaagaagaagcataaatcctctctgcctgccccttctaaagcactaagtggccctgagccagccaaggacaacgtcgaagatagaacccctgagcatttcgcgcttgtgcctctgacggaatcccagggaccccctcacagcggatccggcagtcgcaccagtggctgtcgccaggctgtggttgtccaggaggatagccggaaagatcgactgccactgcctttgcgtgacacaaaactcctatccccactgcgggatactcctccaccccagagtttgatggtaaagattaccctggaccttcttagcaggatacctcagccccctgggaaagggtcgagacaaaggaaagctgaagataagcagccgcctgccggtaagaagcactccagtgagaaacgttcctccgatagcagcagtaaattagccaagaaaaggaagggcgaagccgaacgagattgcgacaataagaaaattcgattggaaaaggaaattaagagccagagctcctcctcttcatccagccacaaggagagctcaaagaccaagccatcacgaccaagcagccagtcatcgaagaaggagatgctgccccctcccccagtttcatcttcatcccaaaaaccagcaaaacctgccctgaaacgctctaggagagaggctgacacttgcggtcaagatccgccaaaatcagcctccagcacgaaatcaaaccataaggattccagtattccaaagcagaggagggttgagggcaaagggtctagaagctcatctgagcataagggttcatccggtgatactgccaatccctttcccgttccttcattacccaatgggaacagcaaaccaggtaagccccaagtcaagttcgataaacagcaggctgatctccacatgcgcgaggcgaagaaaatgaagcagaaggcggagctcatgacagatcgcgtcggtaaggccttcaaatatttggaggcggtccttagcttcatcgagtgtggcattgcaacagagagcgaatcacagagtagtaagagtgcttactccgtgtatagcgaaaccgtcgacttgattaagttcataatgtccttaaaatccttttccgacgctaccgcccctacacaggagaagatattcgctgtcctgtgcatgcggtgtcaaagtatcctgaatatggctatgttccgctgcaaaaaggacatcgccatcaagtatagccggacccttaataaacactttgagtccagcagtaaagtggcccaggccccaagcccctgcattgccagcaccggaacaccatcccctctttcacccatgcccagccctgcttcctccgttgggtcacagtccagcgccggttcagtcggctcgagtggggtagccgctaccatatccacccccgttaccattcagaatatgaccagctcgtatgtcacaatcaccagtcatgtcttaacggccttcgatctgtgggagcaggccgaagcactcactaggaagaataaggagttcttcgcacgtctgtccaccaatgtgtgtaccttggcactgaactcatcccttgtcgacctggtacattacacaaggcagggcttccagcagctgcaggaactaaccaaaaccccatag

SEQ ID NO: 160493 - DNA, 3633 bp, Artificial Sequence
  derived and/or modified sequence
atggccgcccagagcagcctgtacaacgacgacagaaacctgctgagaatcagagagaaggagagaagaaaccaggaggcccaccaggagaaggaggccttccccgagaagatccccctgttcggcgagccctacaagaccgccaagggcgacgagctgagcagcagaatccagaacatgctgggcaactacgaggaggtgaaggagttcctgagcaccaagagccacacccacagactggacgccagcgagaacagactgggcaagcccaagtaccccctgatccccgacaagggcagcagcatccccagcagcagcttccacaccagcgtgcaccaccagagcatccacacccccgccagcggccccctgagcgtgggcaacatcagccacaaccccaagatggcccagcccagaaccgagcccatgcccagcctgcacgccaagagctgcggcccccccgacagccagcacctgacccaggacagactgggccaggagggcttcggcagcagccaccacaagaagggcgacagaagagccgacggcgaccactgcgccagcgtgaccgacagcgcccccgagagagagctgagccccctgatcagcctgcccagccccgtgccccccctgagccccatccacagcaaccagcagaccctgcccagaacccagggcagcagcaaggtgcacggcagcagcaacaacagcaagggctactgccccgccaagagccccaaggacctggccgtgaaggtgcacgacaaggagaccccccaggacagcctggtggcccccgcccagccccccagccagaccttccccccccccagcctgcccagcaagagcgtggccatgcagcagaagcccaccgcctacgtgagacccatggacggccaggaccaggcccccagcgagagccccgagctgaagcccctgcccgaggactacagacagcagaccttcgagaagaccgacctgaaggtgcccgccaaggccaagctgaccaagctgaagatgcccagccagagcgtggagcagacctacagcaacgaggtgcactgcgtggaggagatcctgaaggagatgacccacagctggcccccccccctgaccgccatccacacccccagcaccgccgagcccagcaagttccccttccccaccaaggacagccagcacgtgagcagcgtgacccagaaccagaagcagtacgacaccagcagcaagacccacagcaacagccagcagggcaccagcagcatgctggaggacgacctgcagctgagcgacagcgaggacagcgacagcgagcagacccccgagaagccccccagcagcagcgccccccccagcgccccccagagcctgcccgagcccgtggccagcgcccacagcagcagcgccgagagcgagagcaccagcgacagcgacagcagcagcgacagcgagagcgagagcagcagcagcgacagcgaggagaacgagcccctggagacccccgcccccgagcccgagccccccaccaccaacaagtggcagctggacaactggctgaccaaggtgagccagcccgccgccccccccgagggccccagaagcaccgagccccccagaagacaccccgagagcaagggcagcagcgacagcgccaccagccaggagcacagcgagagcaaggaccccccccccaagagcagcagcaaggcccccagagccccccccgaggccccccaccccggcaagagaagctgccagaagagccccgcccagcaggagcccccccagagacagaccgtgggcaccaagcagcccaagaagcccgtgaaggccagcgccagagccggcagcagaaccagcctgcagggcgagagagagcccggcctgctgccctacggcagcagagaccagaccagcaaggacaagcccaaggtgaagaccaagggcagacccagagccgccgccagcaacgagcccaagcccgccgtgccccccagcagcgagaagaagaagcacaagagcagcctgcccgcccccagcaaggccctgagcggccccgagcccgccaaggacaacgtggaggacagaacccccgagcacttcgccctggtgcccctgaccgagagccagggccccccccacagcggcagcggcagcagaaccagcggctgcagacaggccgtggtggtgcaggaggacagcagaaaggacagactgcccctgcccctgagagacaccaagctgctgagccccctgagagacaccccccccccccagagcctgatggtgaagatcaccctggacctgctgagcagaatcccccagccccccggcaagggcagcagacagagaaaggccgaggacaagcagccccccgccggcaagaagcacagcagcgagaagagaagcagcgacagcagcagcaagctggccaagaagagaaagggcgaggccgagagagactgcgacaacaagaagatcagactggagaaggagatcaagagccagagcagcagcagcagcagcagccacaaggagagcagcaagaccaagcccagcagacccagcagccagagcagcaagaaggagatgctgccccccccccccgtgagcagcagcagccagaagcccgccaagcccgccctgaagagaagcagaagagaggccgacacctgcggccaggacccccccaagagcgccagcagcaccaagagcaaccacaaggacagcagcatccccaagcagagaagagtggagggcaagggcagcagaagcagcagcgagcacaagggcagcagcggcgacaccgccaaccccttccccgtgcccagcctgcccaacggcaacagcaagcccggcaagccccaggtgaagttcgacaagcagcaggccgacctgcacatgagagaggccaagaagatgaagcagaaggccgagctgatgaccgacagagtgggcaaggccttcaagtacctggaggccgtgctgagcttcatcgagtgcggcatcgccaccgagagcgagagccagagcagcaagagcgcctacagcgtgtacagcgagaccgtggacctgatcaagttcatcatgagcctgaagagcttcagcgacgccaccgcccccacccaggagaagatcttcgccgtgctgtgcatgagatgccagagcatcctgaacatggccatgttcagatgcaagaaggacatcgccatcaagtacagcagaaccctgaacaagcacttcgagagcagcagcaaggtggcccaggcccccagcccctgcatcgccagcaccggcacccccagccccctgagccccatgcccagccccgccagcagcgtgggcagccagagcagcgccggcagcgtgggcagcagcggcgtggccgccaccatcagcacccccgtgaccatccagaacatgaccagcagctacgtgaccatcaccagccacgtgctgaccgccttcgacctgtgggagcaggccgaggccctgaccagaaagaacaaggagttcttcgccagactgagcaccaacgtgtgcaccctggccctgaacagcagcctggtggacctggtgcactacaccagacagggcttccagcagctgcaggagctgaccaagaccccctag

SEQ ID NO: 160494 - protein, 1093 aa, Artificial Sequence [sequence omitted]

SEQ ID NO: 160495 - protein, 505 aa, Artificial Sequence
  derived and/or modified sequence
MDPGNENSATEAAAIIDLDPDFEPQSRPRSCTWPLPRPEIANQPSEPPEVEPDLGEKVHTEGRSEPILLPSRLPEPAGGPQPGILGAVTGPRKGGSRRNAWGNQSYAELISQAIESAPEKRLTLAQIYEWMVRTVPYFKDKGDSNSSAGWKNSIRHNLSLHSKFIKVHNEATGKSSWWMLNPEGGKSGKAPRRRAASMDSSSKLLRGRSKAPKKKPSVLPAPPEGATPTSPVGHFAKWSGSPCSRNREEADMWTTFRPRSSSNASSVSTRLSPLRPESEVLAEEIPASVSSYAGGVPPTLNEGLELLDGLNLTSSHSLLSRSGLSGFSLQHPGVTGPLHTYSSSLFSPAEGPLSAGEGCFSSSQALEALLTSDTPPPPADVLMTQVDPILSQAPTLLLLGGLPSSSKLATGVGLCPKPLEAPGPSSLVPTLSMIAPPPVMASAPIPKALGTPVLTPPTEAASQDRMPQDLDLDMYMENLECDMDNIISDLMDEGEGLDFNFEPDP

SEQ ID NO: 160496 - DNA, 3365 bp, Artificial Sequence
  derived and/or modified sequence
aaaagggggagggaactgcggctaaggagacgttcggtgatgggagcgcaatatatgaggggatacagtgcctcaggtttaaaagagcaggaagctgagtgagaggttgcagaaaaagtgtcttcgctcggcagaggttacaggtggcatctcagaaagagctttgaggctacaggctgtagtcgggaaggggatcggagaactgtgtgaagggacagcttagggactagcgtcctgggactagggggaagttcgcgactttctgaagactggcaggaatgtgcctcctggccctcgatgcttcccccctgaggggaggcatcgtgagggactgtggcaggcttcactgaacgctgagccggggaggtccaactccacgtatggatccggggaatgagaattcagccacagaggctgccgcgatcatagacctagatcccgacttcgaaccccagagccgtccccgctcctgcacctggccccttccccgaccagagatcgctaaccagccgtccgagccgcccgaggtggagccagatctgggggaaaaggtacacacggaggggcgctcagagccgatcctgttgccctctcggctcccagagccggccgggggcccccagcccggaatcctgggggctgtaacaggtcctcggaagggaggctcccgccggaatgcctggggaaatcagtcatatgcagaactcatcagccaggccattgaaagcgccccggagaagcgactgacacttgcccagatctacgagtggatggtccgtactgtaccctacttcaaggacaagggtgacagcaacagctcagcaggatggaagaactcgatccgccacaacctgtccctgcacagcaagttcatcaaggttcacaacgaggccaccggcaaaagctcttggtggatgctgaaccctgagggaggcaagagcggcaaagccccccgccgccgggccgcctccatggatagcagcagcaagctgctccggggccgcagtaaagcccccaagaagaaaccatctgtgctgccagctccacccgaaggtgccactccaacgagccctgtcggccactttgccaagtggtcaggcagcccttgctctcgaaaccgtgaagaagccgatatgtggaccaccttccgtccacgaagcagttcaaatgccagcagtgtcagcacccggctgtcccccttgaggccagagtctgaggtgctggcggaggaaataccagcttcagtcagcagttatgcagggggtgtccctcccaccctcaatgaaggtctagagctgttagatgggctcaatctcacctcttcccattccctgctatctcggagtggtctctctggcttctctttgcagcatcctggggttaccggccccttacacacctacagcagctcccttttcagcccagcagaggggcccctgtcagcaggagaagggtgcttctccagctcccaggctctggaggccctgctcacctctgatacgccaccaccccctgctgacgtcctcatgacccaggtagatcccattctgtcccaggctccgactcttctgttgctgggggggcttccttcctccagtaagctggccacgggcgtcggcctgtgtcccaagcccctagaggctccaggccccagcagtctggttcccaccctttctatgatagcaccacctccagtcatggcaagtgcccccatccccaaggctctggggactcctgtgctcacaccccctactgaagctgcaagccaagacagaatgcctcaggatctagatcttgatatgtatatggagaacctggagtgtgacatggataacatcatcagtgacctcatggatgagggcgagggactggacttcaactttgagccagatccctgagtcatgcctggaagctttgtcccctgcttcagatgtggagccaggcgtgttcatatctactctttacccttgagccctccccaggaatttgggaccctgctttagagctagggtggggtctggtcacacacaggtgttgaagaaattataaagataaagctgccccatctggggacgatatggggagggagatgggaggggaaaggggagagggtttttctcactgtgccaattagggggtaaggccccctctcaggagccatcatcggctttccccattcctacccacttaggctttgtagcaagatgagcaatgctgttggaaatgtgaagtcaccagtggccttacccctgcctttgggagcaggatttttttgtagagagtcttatctgagctgagccaggctagctggagcctgggatttctatgcagtggccccttaggccagtgatgtgcggtgggtgggctgtttaggggatctggaagggccaaggtctgagcactggagtggctcgccaggccaaatcacccttagaaggctgcagataacagaaaggctttttataaacttttaaagaaatataaacacaaatatagagattttttaaccatggcagggtgctagtggtgggcagaatgcttttttttctttctgaaggctttgtgatagtgacatgatacaaacactacagacaataaatattaggagacacagggaagtggggagaggtggggagtaatagtaaacacagggaagagctcccctacggaccaggtatagagaaaggtctatgcagaaataggttagagtttccctaacaaaaaagctaacccaggtcccctcattccttcaacttgtgcctgggagtgtgtggtgttagggtgcagccacactcttctatgacccagcatgggttagtgctatggtgggagagtacattgaaggcctggaattagcttggggccagggaagggactgggaggggagagaagagaaggagggaaggatttaggatggtaaagttaggtacagagacctccctgttcaaggcccctgacagctgtccctgcccttcttccccttccctgactgcaggggttatgtggaagtgtgtgtggcagcaggcagcggggaggggaggaacagggaagggggagctggggagcttggctgagggtctgggaaatgagcagggatggggggggatgtggatcaggtttactagcacctgccagggaggccatctggggctccttctccaccccagcccccaaagcagcccttcccccagtgccctttgcatcgtcccctcccccacccctgctgtgggttcccatcatttcctgtgtcagcgcctggcctacccagattgtatcatgtgctagattggagtggggaagtgtgtcaaatcaataaatgaataaattcaataaatgcctataaccagcaaaaaaaaaaaaaaaaa

SEQ ID NO: 160497 - DNA, 1518 bp, Artificial Sequence
  derived and/or modified sequence
atggaccccggcaacgagaacagcgccaccgaggccgccgccatcatcgacctggaccccgacttcgagccccagagcagacccagaagctgcacctggcccctgcccagacccgagatcgccaaccagcccagcgagccccccgaggtggagcccgacctgggcgagaaggtgcacaccgagggcagaagcgagcccatcctgctgcccagcagactgcccgagcccgccggcggcccccagcccggcatcctgggcgccgtgaccggccccagaaagggcggcagcagaagaaacgcctggggcaaccagagctacgccgagctgatcagccaggccatcgagagcgcccccgagaagagactgaccctggcccagatctacgagtggatggtgagaaccgtgccctacttcaaggacaagggcgacagcaacagcagcgccggctggaagaacagcatcagacacaacctgagcctgcacagcaagttcatcaaggtgcacaacgaggccaccggcaagagcagctggtggatgctgaaccccgagggcggcaagagcggcaaggcccccagaagaagagccgccagcatggacagcagcagcaagctgctgagaggcagaagcaaggcccccaagaagaagcccagcgtgctgcccgccccccccgagggcgccacccccaccagccccgtgggccacttcgccaagtggagcggcagcccctgcagcagaaacagagaggaggccgacatgtggaccaccttcagacccagaagcagcagcaacgccagcagcgtgagcaccagactgagccccctgagacccgagagcgaggtgctggccgaggagatccccgccagcgtgagcagctacgccggcggcgtgccccccaccctgaacgagggcctggagctgctggacggcctgaacctgaccagcagccacagcctgctgagcagaagcggcctgagcggcttcagcctgcagcaccccggcgtgaccggccccctgcacacctacagcagcagcctgttcagccccgccgagggccccctgagcgccggcgagggctgcttcagcagcagccaggccctggaggccctgctgaccagcgacaccccccccccccccgccgacgtgctgatgacccaggtggaccccatcctgagccaggcccccaccctgctgctgctgggcggcctgcccagcagcagcaagctggccaccggcgtgggcctgtgccccaagcccctggaggcccccggccccagcagcctggtgcccaccctgagcatgatcgcccccccccccgtgatggccagcgcccccatccccaaggccctgggcacccccgtgctgaccccccccaccgaggccgccagccaggacagaatgccccaggacctggacctggacatgtacatggagaacctggagtgcgacatggacaacatcatcagcgacctgatggacgagggcgagggcctggacttcaacttcgagcccgacccctag

SEQ ID NO: 160498 - DNA, 1518 bp, Artificial Sequence
  derived and/or modified sequence
atggaccctggcaatgagaattctgctactgaggctgctgcaatcattgatctcgatcctgacttcgaaccccagagcagaccgcgctcctgtacatggcctctcccgcgtccagaaatagcaaatcagccaagcgagcccccggaagtggagcctgatctgggagagaaggtccacaccgaagggcgtagcgagcctatactgttaccctccagactgcctgagcccgctggggggccacaacccggaatcttaggggcagttacaggcccccgaaagggaggttcgcggcggaatgcttggggaaatcagtcttacgcggaactgatcagccaagcaattgagtccgcgccagaaaagaggctaacattggcgcagatctatgagtggatggtcagaacagtaccatactttaaggataagggggactctaattctagcgccgggtggaagaatagcataaggcacaatctttcactgcactccaagtttatcaaagtccataacgaggcaaccggaaaaagctcctggtggatgctgaaccccgaaggagggaagagcggtaaggcgccaaggagacgggccgcctccatggattccagctccaagcttctccggggcaggtccaaggcaccaaagaaaaaacccagcgtattgcctgcccctccagagggagcaaccccaaccagtcccgtcggccacttcgcgaaatggagcggatcaccttgctcacggaaccgagaggaagcggatatgtggaccacgtttcgcccgcgatcttcctctaatgcctcatctgtgtccactagactttctcccctgcgaccagaatctgaggtgctggcggaggaaattccagcatccgtctccagttatgctggaggcgtgccacctaccctcaacgaagggctcgagctgctggatggactcaatttgacaagcagccactcgctgttgtctaggtcaggcttgtcaggcttctctctgcagcaccccggagttacggggcccctgcatacttattcaagctctctctttagtcccgcggaaggtcctctgtccgccggagagggatgcttctctagcagtcaggccttggaggcactgctcacttctgacacccctcctccgcctgcagacgtgctcatgacccaggtagacccaatcctgtcacaggcgcctactctgctattgctgggtggcctccccagttcttccaaactcgctactggagtcggcctgtgtccaaagcctcttgaggcccctggccccagtagtcttgtacccactctgagcatgatcgctcctcctccagtgatggcatcagctcctattccgaaggcgctcggcacaccagtgcttacacccccaaccgaggctgcatcgcaggaccgaatgccacaggatcttgacctcgatatgtacatggagaacctggaatgtgacatggacaacatcatttccgatttgatggacgagggtgaaggactggatttcaactttgagcccgacccctag

SEQ ID NO: 160499 - DNA, 3301 bp, Artificial Sequence
  derived and/or modified sequence
caatatatgaggggatacagtgcctcaggtttaaaagagcaggaagctgagtgagaggttgcagaaaaagtgtcttcgctcggcagaggttacaggtggcatctcagaaagagctttgaggctacaggctgtagtcgggaaggggatcggagaactgtgtgaagggacagcttagggactagcgtcctgggactagggggaagttcgcgactttctgaagactggcaggaatgtgcctcctggccctcgatgcttcccccctgaggggaggcatcgtgagggactgtggcaggcttcactgaacgctgagccggggaggtccaactccacgtatggatccggggaatgagaattcagccacagaggctgccgcgatcatagacctagatcccgacttcgaaccccagagccgtccccgctcctgcacctggccccttccccgaccagagatcgctaaccagccgtccgagccgcccgaggtggagccagatctgggggaaaaggtacacacggaggggcgctcagagccgatcctgttgccctctcggctcccagagccggccgggggcccccagcccggaatcctgggggctgtaacaggtcctcggaagggaggctcccgccggaatgcctggggaaatcagtcatatgcagaactcatcagccaggccattgaaagcgccccggagaagcgactgacacttgcccagatctacgagtggatggtccgtactgtaccctacttcaaggacaagggtgacagcaacagctcagcaggatggaagaactcgatccgccacaacctgtccctgcacagcaagttcatcaaggttcacaacgaggccaccggcaaaagctcttggtggatgctgaaccctgagggaggcaagagcggcaaagccccccgccgccgggccgcctccatggatagcagcagcaagctgctccggggccgcagtaaagcccccaagaagaaaccatctgtgctgccagctccacccgaaggtgccactccaacgagccctgtcggccactttgccaagtggtcaggcagcccttgctctcgaaaccgtgaagaagccgatatgtggaccaccttccgtccacgaagcagttcaaatgccagcagtgtcagcacccggctgtcccccttgaggccagagtctgaggtgctggcggaggaaataccagcttcagtcagcagttatgcagggggtgtccctcccaccctcaatgaaggtctagagctgttagatgggctcaatctcacctcttcccattccctgctatctcggagtggtctctctggcttctctttgcagcatcctggggttaccggccccttacacacctacagcagctcccttttcagcccagcagaggggcccctgtcagcaggagaagggtgcttctccagctcccaggctctggaggccctgctcacctctgatacgccaccaccccctgctgacgtcctcatgacccaggtagatcccattctgtcccaggctccgactcttctgttgctgggggggcttccttcctccagtaagctggccacgggcgtcggcctgtgtcccaagcccctagaggctccaggccccagcagtctggttcccaccctttctatgatagcaccacctccagtcatggcaagtgcccccatccccaaggctctggggactcctgtgctcacaccccctactgaagctgcaagccaagacagaatgcctcaggatctagatcttgatatgtatatggagaacctggagtgtgacatggataacatcatcagtgacctcatggatgagggcgagggactggacttcaactttgagccagatccctgagtcatgcctggaagctttgtcccctgcttcagatgtggagccaggcgtgttcatatctactctttacccttgagccctccccaggaatttgggaccctgctttagagctagggtggggtctggtcacacacaggtgttgaagaaattataaagataaagctgccccatctggggacgatatggggagggagatgggaggggaaaggggagagggtttttctcactgtgccaattagggggtaaggccccctctcaggagccatcatcggctttccccattcctacccacttaggctttgtagcaagatgagcaatgctgttggaaatgtgaagtcaccagtggccttacccctgcctttgggagcaggatttttttgtagagagtcttatctgagctgagccaggctagctggagcctgggatttctatgcagtggccccttaggccagtgatgtgcggtgggtgggctgtttaggggatctggaagggccaaggtctgagcactggagtggctcgccaggccaaatcacccttagaaggctgcagataacagaaaggctttttataaacttttaaagaaatataaacacaaatatagagattttttaaccatggcagggtgctagtggtgggcagaatgcttttttttctttctgaaggctttgtgatagtgacatgatacaaacactacagacaataaatattaggagacacagggaagtggggagaggtggggagtaatagtaaacacagggaagagctcccctacggaccaggtatagagaaaggtctatgcagaaataggttagagtttccctaacaaaaaagctaacccaggtcccctcattccttcaacttgtgcctgggagtgtgtggtgttagggtgcagccacactcttctatgacccagcatgggttagtgctatggtgggagagtacattgaaggcctggaattagcttggggccagggaagggactgggaggggagagaagagaaggagggaaggatttaggatggtaaagttaggtacagagacctccctgttcaaggcccctgacagctgtccctgcccttcttccccttccctgactgcaggggttatgtggaagtgtgtgtggcagcaggcagcggggaggggaggaacagggaagggggagctggggagcttggctgagggtctgggaaatgagcagggatggggggggatgtggatcaggtttactagcacctgccagggaggccatctggggctccttctccaccccagcccccaaagcagcccttcccccagtgccctttgcatcgtcccctcccccacccctgctgtgggttcccatcatttcctgtgtcagcgcctggcctacccagattgtatcatgtgctagattggagtggggaagtgtgtcaaatcaataaatgaataaattcaataaatgcctataaccagct

SEQ ID NO: 160500 - DNA, 1518 bp, Artificial Sequence
  derived and/or modified sequence
atggaccctggaaatgaaaacagcgccacagaggccgccgccatcatcgacctggaccctgactttgagccccagagccggcccaggagctgcacctggcccctgcccaggcctgagatcgccaaccagcccagcgagcccccagaggtggagccagacctgggggagaaggtgcacacagagggccgctctgagcccatcctgctgcccagccggctgcctgagcctgctgggggcccccagcccggcatcctgggcgctgtgacaggccccaggaaaggaggcagcagaagaaatgcctggggcaaccagagctatgcagagctgatcagccaggccatcgagagcgcccctgagaagaggctgaccctggcccagatctatgagtggatggtgaggacagtgccctacttcaaggacaagggggacagcaacagcagcgctggctggaagaacagcatccgccacaacctgagcctgcacagcaagttcatcaaggtgcacaatgaggccaccgggaagagctcctggtggatgctgaaccctgagggcggcaagagcggcaaggcccccaggagaagagctgcctccatggacagcagcagcaagctgctgcggggccgcagcaaggcccccaagaagaagcccagcgtgctgcctgcccctcctgagggcgccacccccaccagccctgtgggccactttgccaagtggagcggcagcccctgcagcaggaaccgggaggaggccgacatgtggaccaccttccggcccaggagcagcagcaatgccagctctgtgtccacccggctgagccccctgcggcctgagagcgaggtgctggccgaggagatcccagcctctgtgtcctcctatgctgggggcgtgccccccaccctgaatgaaggcctggagctgctggatggcctgaacctgaccagcagccacagcctgctgagccgcagcggcctgagcggcttcagcctgcagcaccctggggtgacaggccccctgcacacctacagcagcagcctcttcagccctgctgagggccccctgtctgctggggagggctgcttcagcagcagccaggccctggaggccctgctgaccagtgacaccccacctcctccagcagatgtgctgatgacccaggtggaccccatcctgagccaggcccccaccctgctgctgctgggcggcctgcccagcagcagcaagctggccaccggggtgggcctgtgccccaagcccctggaggcccctggccccagcagcctggtgcccaccctgtccatgattgcccctcctcctgtgatggccagcgcccccatccccaaggccctgggcacccctgtgctgaccccacccacagaggccgccagccaggacaggatgccccaggacctggacctggacatgtacatggagaacctggagtgtgacatggacaacatcatcagtgacctgatggatgaaggagagggcctggacttcaactttgagccagacccctag

SEQ ID NO: 160501 - DNA, 1518 bp, Artificial Sequence
  derived and/or modified sequence
atggaccccggcaacgagaacagcgccaccgaggccgccgccatcatcgacctggacccagattttgagcctcagtcaaggccacgaagctgcacttggcccctgccacgtccggagattgccaatcaaccatctgagcccccagaggtggagcccgatctcggtgagaaagtacataccgaaggccgcagcgagcctatcctcctcccctctagacttccagaacccgcaggcggaccacagcctggcattctgggtgctgtgacggggccacggaagggtgggtcaaggagaaacgcatggggaaatcagtcttacgctgagctgatatcacaggcaattgagagcgcccctgaaaaaagactgaccctcgcgcagatttacgaatggatggtgaggaccgtgccttatttcaaggacaagggcgacagtaactcatcagcgggatggaagaacagcatccggcacaacctgagtttgcattccaagttcattaaagtgcacaatgaggcaactggcaaatctagctggtggatgctgaatcccgagggcgggaaatctggaaaagctccacggaggcgtgcagcgtccatggattcaagcagcaagctgctgagaggccgctctaaggctcccaaaaagaaaccgtccgtcttacctgctcctccagaaggtgcaaccccaaccagccccgtcggtcatttcgccaagtggtctgggtctccctgctcccgcaacagagaggaggctgacatgtggaccaccttccgtcctcgctcttcgtcgaacgcctcatctgtcagtacaaggctgtcccctctgagacccgagagcgaggtactcgcagaagagatacccgcctcagtaagctcctatgcgggaggcgtgccaccaaccctgaatgagggcctcgagcttttagacgggctgaacttgaccagcagccacagcctactgtcccgatcggggctgagcggctttagtctccagcaccctggagtgactggccccctgcacacatattctagttccttgttcagccctgcagagggccccctctccgcaggggagggttgtttttccagcagtcaggcactggaggccctgctcacttcagatacccctccgcccccggcagatgtccttatgacccaggtggaccccatcctgtcccaggcgcccaccctgctcctgctcgggggcctcccctcctcatctaagctggcgaccggggtaggcctgtgccctaagccactggaggcccccgggccatcttcgctggtgcccacgctgtctatgattgcaccccctcccgtgatggcatccgctcctatccctaaagccttgggaaccccggtactgactccacccacagaagctgccagccaagataggatgcctcaggacctggatctcgatatgtatatggagaacctcgagtgtgatatggacaacatcatttctgatcttatggatgagggagaaggcctggactttaacttcgaacctgatccctag

SEQ ID NO: 160502 - DNA, 1518 bp, Artificial Sequence
  derived and/or modified sequence
atggatccagggaacgaaaattctgccacggaggcggcagctattatcgacctggacccagacttcgagccccaatcacggcctcgatcgtgcacttggccccttcccaggcccgagatcgccaatcaaccctctgaaccgccagaggtggaacccgatttgggagagaaggtgcacacagaaggaagaagcgagcccattttgctgccgtccagactccctgagcccgctgggggaccccaacctggaatactgggtgccgtgacggggcctcgtaaaggagggtcacgccgaaatgcgtggggtaatcagagttacgcagagcttatctctcaagctattgagtccgctccggagaagaggttgaccctggcccagatttacgagtggatggtccggacagttccttacttcaaggataagggtgatagcaattcttctgctggttggaaaaatagcataaggcacaatctgtcccttcacagtaaattcatcaaggtacacaacgaggccacaggcaagtcaagctggtggatgctgaacccagaagggggtaagtctgggaaggcaccacgtagaagagccgcaagcatggacagctccagtaaacttctcaggggtagaagcaaagccccaaagaaaaagccctcagtgctccctgcacctccggagggtgctacgccaaccagcccagtgggtcacttcgccaagtggtctggctcaccgtgttcccgcaacagagaggaagcagatatgtggactacattccgtcctcgctcctcctccaatgctagctctgtgagcacacgactctcgccactgcggcctgaaagtgaagtgctcgccgaagaaatccccgctagcgttagctcctatgcgggaggcgtcccccctacacttaacgagggactagaattattagacggattaaacctcacatctagccatagcttactgtctaggtccggtctttccggattctctctgcagcacccaggagtgaccggcccactgcacacctacagctcaagcctcttttctcctgctgaggggccactgtctgctggtgagggctgtttttcctcatcgcaggctctggaagctttactgacatctgatactcctccaccaccagccgatgttctgatgacgcaggttgaccccatcctgagccaggctcccaccctcctgttgctgggaggactgccctcctccagtaagctggctaccggagtggggctgtgccccaagccgcttgaagctccaggacccagcagtctggtgccgactttgtccatgatcgcaccacctccagtcatggccagcgcccctatcccaaaggctctgggcacccctgtgttaacccctcccaccgaagccgcatcccaggatcggatgccccaagacttagatctcgatatgtacatggaaaatttagagtgcgacatggacaatatcatttcagacctaatggatgaaggggaaggtttagactttaacttcgaacctgatccttag

SEQ ID NO: 160503 - protein, 488 aa, Artificial Sequence
  derived and/or modified sequence
MAPAAWLRSAAARALLPPMLLLLLQPPPLLARALPPDAHHLHAERRGPQPWHAALPSSPAPAPATQEAPRPASSLRPPRCGVPDPSDGLSARNRQKRFVLSGGRWEKTDLTYRILRFPWQLVQEQVRQTMAEALKVWSDVTPLTFTEVHEGRADIMIDFARYWHGDDLPFDGPGGILAHAFFPKTHREGDVHFDYDETWTIGDDQGTDLLQVAAHEFGHVLGLQHTTAAKALMSAFYTFRYPLSLSPDDCRGVQHLYGQPWPTVTSRTPALGPQAGIDTNEIAPLEPDAPPDACEASFDAVSTIRGELFFFKAGFVWRLRGGQLQPGYPALASRHWQGLPSPVDAAFEDAQGHIWFFQGAQYWVYDGEKPVLGPAPLTELGLVRFPVHAALVWGPEKNKIYFFRGRDYWRFHPSTRRVDSPVPRRATDWRGVPSEIDAAFQDADGYAYFLRGRLYWKFDPVKVKALEGFPRLVGPDFFGCAEPANTFL

SEQ ID NO: 160504 - DNA, 2291 bp, Artificial Sequence
  derived and/or modified sequence
ataaggggcggcggcccggagcggcccagcaagcccagcagccccggggcggatggctccggccgcctggctccgcagcgcggccgcgcgcgccctcctgcccccgatgctgctgctgctgctccagccgccgccgctgctggcccgggctctgccgccggacgcccaccacctccatgccgagaggagggggccacagccctggcatgcagccctgcccagtagcccggcacctgcccctgccacgcaggaagccccccggcctgccagcagcctcaggcctccccgctgtggcgtgcccgacccatctgatgggctgagtgcccgcaaccgacagaagaggttcgtgctttctggcgggcgctgggagaagacggacctcacctacaggatccttcggttcccatggcagttggtgcaggagcaggtgcggcagacgatggcagaggccctaaaggtatggagcgatgtgacgccactcacctttactgaggtgcacgagggccgtgctgacatcatgatcgacttcgccaggtactggcatggggacgacctgccgtttgatgggcctgggggcatcctggcccatgccttcttccccaagactcaccgagaaggggatgtccacttcgactatgatgagacctggactatcggggatgaccagggcacagacctgctgcaggtggcagcccatgaatttggccacgtgctggggctgcagcacacaacagcagccaaggccctgatgtccgccttctacacctttcgctacccactgagtctcagcccagatgactgcaggggcgttcaacacctatatggccagccctggcccactgtcacctccaggaccccagccctgggcccccaggctgggatagacaccaatgagattgcaccgctggagccagacgccccgccagatgcctgtgaggcctcctttgacgcggtctccaccatccgaggcgagctctttttcttcaaagcgggctttgtgtggcgcctccgtgggggccagctgcagcccggctacccagcattggcctctcgccactggcagggactgcccagccctgtggacgctgccttcgaggatgcccagggccacatttggttcttccaaggtgctcagtactgggtgtacgacggtgaaaagccagtcctgggccccgcacccctcaccgagctgggcctggtgaggttcccggtccatgctgccttggtctggggtcccgagaagaacaagatctacttcttccgaggcagggactactggcgtttccaccccagcacccggcgtgtagacagtcccgtgccccgcagggccactgactggagaggggtgccctctgagatcgacgctgccttccaggatgctgatggctatgcctacttcctgcgcggccgcctctactggaagtttgaccctgtgaaggtgaaggctctggaaggcttcccccgtctcgtgggtcctgacttctttggctgtgccgagcctgccaacactttcctctgaccatggcttggatgccctcaggggtgctgacccctgccaggccacgaatatcaggctagagacccatggccatctttgtggctgtgggcaccaggcatgggactgagcccatgtctcctcagggggatggggtggggtacaaccaccatgacaactgccgggagggccacgcaggtcgtggtcacctgccagcgactgtctcagactgggcagggaggctttggcatgacttaagaggaagggcagtcttgggcccgctatgcaggtcctggcaaacctggctgccctgtctccatccctgtccctcagggtagcaccatggcaggactgggggaactggagtgtccttgctgtatccctgttgtgaggttccttccaggggctggcactgaagcaagggtgctggggccccatggccttcagccctggctgagcaactgggctgtagggcagggccacttcctgaggtcaggtcttggtaggtgcctgcatctgtctgccttctggctgacaatcctggaaatctgttctccagaatccaggccaaaaagttcacagtcaaatggggaggggtattcttcatgcaggagaccccaggccctggaggctgcaacatacctcaatcctgtcccaggccggatcctcctgaagcccttttcgcagcactgctatcctccaaagccattgtaaatgtgtgtacagtgtgtataaaccttcttcttctttttttttttttaaactgaggattgtcattaaacacagttgttttcta

SEQ ID NO: 160505 - DNA, 1467 bp, Artificial Sequence
  derived and/or modified sequence
atggctcctgcggcatggctgaggtcagcggccgcacgagctctcctgcctccaatgctgttgctgctcctccagccccctcctctcctggctcgcgcactccctcctgacgcccaccacctccacgcagagcgaagagggcctcaaccgtggcatgctgctctgccgtcatccccagctcctgcgccagcaacacaggaagcaccccggccagccagttcactccgcccgcccagatgtggcgtgccagatcctagcgacgggctcagcgctcggaacaggcagaaacgattcgttctaagcggggggaggtgggagaagacggatttgacttatagaatactgcgatttccttggcagttggtgcaggagcaagtgagacaaacaatggccgaggcccttaaggtgtggtctgatgtgacccccctgacgtttaccgaagttcacgaaggccgggccgatattatgatcgacttcgccaggtattggcatggagatgatctaccctttgatggaccaggtggcatcctcgctcacgccttttttcctaaaacacacagagagggagacgtccactttgactatgatgagacctggaccataggggacgaccagggaacggacttgttgcaggttgccgcccacgagtttggacacgtcctgggactccagcacaccacagccgctaaggcccttatgagcgccttctatacctttcggtatccactctccctgagcccagacgactgtcgaggtgtgcagcatctgtacggccagccatggccaacggtcacaagtaggacgccagcactcggcccacaggctgggattgataccaacgaaatcgcccctctagaacccgacgccccgccggatgcttgcgaagcctcctttgatgctgtctccacaattaggggagagttgttcttctttaaagccggattcgtgtggcgattaagggggggtcagttacagccagggtatccggctctggcatcccggcattggcaaggactaccctctcctgtggatgcagccttcgaggacgcacaaggccatatttggtttttccagggagctcagtattgggtgtatgatggagagaagccagttctcggccccgcaccactcaccgagcttgggctggtcaggtttccagtgcacgccgctttagtctggggtcctgaaaaaaataaaatttatttttttcggggcagagattactggcgcttccaccccagcaccaggagagtagacagtccggtcccgaggcgcgcaaccgactggcgcggtgtgccatctgaaatcgacgcagcattccaagatgcagacggatatgcctacttcctgagaggaagactgtactggaaatttgatcctgttaaagttaaggcgttggaaggctttccccgcttagtggggcccgattttttcggttgcgcggagccagccaatacctttctttag

SEQ ID NO: 160506 - DNA, 1467 bp, Artificial Sequence
  derived and/or modified sequence
atggccccagctgcctggctgcggtctgctgctgcccgggccctgctgccccccatgctgctgctgctgctgcagcccccacccctgctggcccgggccctgcccccagatgcccaccacctgcatgctgagcggcggggcccccagccctggcatgctgccctgcccagcagccctgccccagccccagccacccaggaggcccccaggcctgccagcagcctgcggcccccaagatgtggggtgcctgaccccagtgatggcctgagcgccaggaaccggcagaagagatttgtgctgagcggcggccgctgggagaagacagacctgacctaccgcatcctgcgcttcccctggcagctggtgcaggagcaggtgcggcagaccatggccgaggccctgaaggtgtggagcgatgtgacccccctgaccttcacagaggtgcatgagggccgggctgacatcatgattgactttgcccgctactggcatggagatgacctgccctttgatggccctgggggcatcctggcccacgccttcttccccaagacccaccgggagggagatgtgcactttgattatgatgagacctggaccatcggagatgaccagggcacagacctgctgcaggtggccgcccatgaatttggacatgtgctgggcctgcagcacaccacagctgccaaggccctgatgtctgccttctacaccttccgctaccccctgagcctgagcccagatgactgccggggcgtgcagcacctgtatggccagccctggcccaccgtgaccagcaggaccccagccctgggcccccaggccggcatcgacaccaatgagatcgcccccctggagccagatgcccccccagatgcctgtgaggccagctttgatgctgtgtccaccatccggggggagctgttcttcttcaaggccggctttgtgtggaggctgcggggcggccagctgcagcccggctacccagccctggccagccgccactggcagggcctgcccagccctgtggatgctgcctttgaagatgcccagggccacatctggttcttccagggcgcccagtactgggtgtatgatggagagaagcctgtgctgggccctgcccccctgacagagctgggcctggtgcgcttccctgtgcatgctgccctggtgtggggccctgagaagaacaagatctacttcttccggggccgggactactggaggttccaccccagcacccggcgggtggacagccctgtgccccggcgggccacagactggaggggcgtgcccagcgagattgatgctgccttccaggatgctgatggctacgcctacttcctgcggggccgcctgtactggaagtttgatcctgtgaaggtgaaggccctggagggcttcccccggctggtgggccctgacttcttcggctgtgccgagcccgccaacaccttcctgtag

SEQ ID NO: 160507 - DNA, 1467 bp, Artificial Sequence
  derived and/or modified sequence
atggcccccgccgcctggctgcggagcgccgccgcccgggccctgctcccccctatgttgctgctgctgctgcagcccccacccttactagctcgggctctgcccccagacgcacaccacctccacgccgagcgccgaggtccccagccctggcacgcagccctcccaagttctccagcacctgcgcccgccacacaggaagcgcccagacctgcctctagtctcaggccaccgcgctgcggggttcctgacccctccgatggccttagcgccagaaatcggcaaaaaaggtttgtactatcaggtgggcgctgggagaaaaccgaccttacctataggatacttaggttcccttggcaactcgtgcaggagcaggttaggcagaccatggcagaagcactcaaggtgtggagtgacgtgacacccctcacgttcaccgaggtgcacgaaggacgcgcagacattatgatcgactttgcaaggtactggcacggggatgatttgcccttcgacgggccaggaggcatcctggctcacgcgttcttccctaaaacacacagagaaggcgacgttcattttgattatgatgaaacatggacgattggcgatgatcagggtaccgatctgcttcaggttgctgctcacgagttcgggcatgtgctgggcctccagcacactaccgctgccaaggctttaatgtctgcattctataccttccgctaccccctttcactctcgcccgacgattgtcgcggcgtgcaacacctgtacggccaaccatggcccactgtcacgagtcgcacaccagcactgggtccgcaggccggtatcgatactaacgaaatcgccccccttgaacctgacgcaccgccggacgcttgtgaagcctctttcgatgccgtcagcaccatccgcggcgaactattttttttcaaggcgggttttgtctggcggctgcgcggagggcaattacagcctggctaccctgcgctggcctctcgccattggcaagggctacctagtcccgtcgacgccgcattcgaagacgctcaggggcatatttggttcttccagggtgctcagtactgggtttatgacggggagaaacctgtcctgggccccgcacctctgactgaactcgggctcgtccgctttcccgttcacgctgctttagtgtgggggcccgagaaaaataagatctatttcttccggggacgcgactattggcggttccatcccagtacacggcgcgtcgattccccagtacctaggcgcgcgactgactggcgcggcgtgccatccgaaattgatgccgcgtttcaggatgccgacgggtacgcctatttcctgagaggcagactgtactggaagttcgaccccgtcaaggtcaaggccctggaaggcttccctcgtttagtgggacccgacttttttggctgtgctgagccagcaaatacattcctttag

SEQ ID NO: 160508 - DNA, 1467 bp, Artificial Sequence
  derived and/or modified sequence
atggctccagctgcgtggctgcgctcggccgctgcccgagcactcctgccccctatgctgctgctcctgctccagcctcctcccctcctggctcgcgcactacctcccgatgcacatcaccttcatgccgaacgccgaggcccacagccatggcacgcagccttaccatccagccctgcccctgccccagcaactcaggaggctcccaggcccgcaagctcacttaggccgccacgctgcggagtgccagacccatcagacggtctcagcgctaggaatcggcagaaacggtttgtgttgagcggcggtagatgggagaagaccgatctcacatatagaattctgagattcccttggcagctagtccaggagcaggtaagacagaccatggccgaggctctgaaggtttggagcgacgtcaccccacttacctttaccgaagtccatgagggccgagccgacattatgatagacttcgccaggtattggcacggagacgacttgcccttcgatggcccaggcggtattttggcccatgcattttttcctaaaacgcatagggagggcgatgtgcactttgattatgacgagacgtggaccatcggcgatgaccaggggacggatttgttgcaggtggctgcccatgagttcggacatgtcctgggattacagcacacaactgctgccaaggcccttatgagcgccttctacacttttcggtaccccctttcactgtcccccgacgactgcaggggcgtgcaacatttgtatggacagccctggcctacagtaaccagcagaactcccgctctgggaccacaggctggtatagatacaaatgagatagcacccttggagccggatgcccctcctgatgcttgcgaagccagctttgatgcggtctctaccatcagaggagagttgttcttcttcaaggccggattcgtttggagattgcgcggtggtcaactacaaccagggtaccccgcactggcctctaggcactggcaaggtctgccgtccccggtggacgctgcctttgaagacgctcaaggacacatctggttttttcagggggctcagtactgggtgtacgacggcgagaaaccggttctggggcctgcccctctgacagagctcgggctggtgcgatttccagtgcacgcggctcttgtgtggggcccagagaaaaataaaatatacttcttcagggggagagattattggaggtttcacccctctactcggagagtggactccccagtgcctcggcgtgctactgattggcgtggggtcccttcagaaatcgatgcagctttccaggacgccgatggctacgcttatttcctcagagggaggctgtactggaagttcgaccctgtcaaagtcaaagctctcgaaggattcccaagacttgtggggcctgacttttttggctgcgccgaacccgctaacacattcctctag

SEQ ID NO: 160509 - DNA, 1467 bp, Artificial Sequence
  derived and/or modified sequence
atggcccccgccgcctggctgagaagcgccgccgccagagccctgctgccccccatgctgctgctgctgctgcagcccccccccctgctggccagagccctgccccccgacgcccaccacctgcacgccgagagaagaggcccccagccctggcacgccgccctgcccagcagccccgcccccgcccccgccacccaggaggcccccagacccgccagcagcctgagaccccccagatgcggcgtgcccgaccccagcgacggcctgagcgccagaaacagacagaagagattcgtgctgagcggcggcagatgggagaagaccgacctgacctacagaatcctgagattcccctggcagctggtgcaggagcaggtgagacagaccatggccgaggccctgaaggtgtggagcgacgtgacccccctgaccttcaccgaggtgcacgagggcagagccgacatcatgatcgacttcgccagatactggcacggcgacgacctgcccttcgacggccccggcggcatcctggcccacgccttcttccccaagacccacagagagggcgacgtgcacttcgactacgacgagacctggaccatcggcgacgaccagggcaccgacctgctgcaggtggccgcccacgagttcggccacgtgctgggcctgcagcacaccaccgccgccaaggccctgatgagcgccttctacaccttcagataccccctgagcctgagccccgacgactgcagaggcgtgcagcacctgtacggccagccctggcccaccgtgaccagcagaacccccgccctgggcccccaggccggcatcgacaccaacgagatcgcccccctggagcccgacgccccccccgacgcctgcgaggccagcttcgacgccgtgagcaccatcagaggcgagctgttcttcttcaaggccggcttcgtgtggagactgagaggcggccagctgcagcccggctaccccgccctggccagcagacactggcagggcctgcccagccccgtggacgccgccttcgaggacgcccagggccacatctggttcttccagggcgcccagtactgggtgtacgacggcgagaagcccgtgctgggccccgcccccctgaccgagctgggcctggtgagattccccgtgcacgccgccctggtgtggggccccgagaagaacaagatctacttcttcagaggcagagactactggagattccaccccagcaccagaagagtggacagccccgtgcccagaagagccaccgactggagaggcgtgcccagcgagatcgacgccgccttccaggacgccgacggctacgcctacttcctgagaggcagactgtactggaagttcgaccccgtgaaggtgaaggccctggagggcttccccagactggtgggccccgacttcttcggctgcgccgagcccgccaacaccttcctgtag

SEQ ID NO: 160510 - protein, 607 aa, Artificial Sequence
  derived and/or modified sequence
MILLTFSTGRRLDFVHHSGVFFLQTLLWILCATVCGTEQYFNVEVWLQKYGYLPPTDPRMSVLRSAETMQSALAAMQQFYGINMTGKVDRNTIDWMKKPRCGVPDQTRGSSKFHIRRKRYALTGQKWQHKHITYSIKNVTPKVGDPETRKAIRRAFDVWQNVTPLTFEEVPYSELENGKRDVDITIIFASGFHGDSSPFDGEGGFLAHAYFPGPGIGGDTHFDSDEPWTLGNPNHDGNDLFLVAVHELGHALGLEHSNDPTAIMAPFYQYMETDNFKLPNDDLQGIQKIYGPPDKIPPPTRPLPTVPPHRSIPPADPRKNDRPKPPRPPTGRPSYPGAKPNICDGNFNTLAILRREMFVFKDQWFWRVRNNRVMDGYPMQITYFWRGLPPSIDAVYENSDGNFVFFKGNKYWVFKDTTLQPGYPHDLITLGSGIPPHGIDSAIWWEDVGKTYFFKGDRYWRYSEEMKTMDPGYPKPITVWKGIPESPQGAFVHKENGFTYFYKGKEYWKFNNQILKVEPGYPRSILKDFMGCDGPTDRVKEGHSPPDDVDIVIKLDNTASTVKAIAIVIPCILALCLLVLVYTVFQFKRKGTPRHILYCKRSMQEWV

SEQ ID NO: 160511 - DNA, 1824 bp, Artificial Sequence
  derived and/or modified sequence
atgatcctgctgaccttcagcaccggcagaagactggacttcgtgcaccacagcggcgtgttcttcctgcagaccctgctgtggatcctgtgcgccaccgtgtgcggcaccgagcagtacttcaacgtggaggtgtggctgcagaagtacggctacctgccccccaccgaccccagaatgagcgtgctgagaagcgccgagaccatgcagagcgccctggccgccatgcagcagttctacggcatcaacatgaccggcaaggtggacagaaacaccatcgactggatgaagaagcccagatgcggcgtgcccgaccagaccagaggcagcagcaagttccacatcagaagaaagagatacgccctgaccggccagaagtggcagcacaagcacatcacctacagcatcaagaacgtgacccccaaggtgggcgaccccgagaccagaaaggccatcagaagagccttcgacgtgtggcagaacgtgacccccctgaccttcgaggaggtgccctacagcgagctggagaacggcaagagagacgtggacatcaccatcatcttcgccagcggcttccacggcgacagcagccccttcgacggcgagggcggcttcctggcccacgcctacttccccggccccggcatcggcggcgacacccacttcgacagcgacgagccctggaccctgggcaaccccaaccacgacggcaacgacctgttcctggtggccgtgcacgagctgggccacgccctgggcctggagcacagcaacgaccccaccgccatcatggcccccttctaccagtacatggagaccgacaacttcaagctgcccaacgacgacctgcagggcatccagaagatctacggcccccccgacaagatccccccccccaccagacccctgcccaccgtgcccccccacagaagcatcccccccgccgaccccagaaagaacgacagacccaagccccccagaccccccaccggcagacccagctaccccggcgccaagcccaacatctgcgacggcaacttcaacaccctggccatcctgagaagagagatgttcgtgttcaaggaccagtggttctggagagtgagaaacaacagagtgatggacggctaccccatgcagatcacctacttctggagaggcctgccccccagcatcgacgccgtgtacgagaacagcgacggcaacttcgtgttcttcaagggcaacaagtactgggtgttcaaggacaccaccctgcagcccggctacccccacgacctgatcaccctgggcagcggcatccccccccacggcatcgacagcgccatctggtgggaggacgtgggcaagacctacttcttcaagggcgacagatactggagatacagcgaggagatgaagaccatggaccccggctaccccaagcccatcaccgtgtggaagggcatccccgagagcccccagggcgccttcgtgcacaaggagaacggcttcacctacttctacaagggcaaggagtactggaagttcaacaaccagatcctgaaggtggagcccggctaccccagaagcatcctgaaggacttcatgggctgcgacggccccaccgacagagtgaaggagggccacagcccccccgacgacgtggacatcgtgatcaagctggacaacaccgccagcaccgtgaaggccatcgccatcgtgatcccctgcatcctggccctgtgcctgctggtgctggtgtacaccgtgttccagttcaagagaaagggcacccccagacacatcctgtactgcaagagaagcatgcaggagtgggtgtag

SEQ ID NO: 160512 - DNA, 1824 bp, Artificial Sequence
  derived and/or modified sequence
atgattcttctgacatttagcacgggtcggcgcctggactttgtccaccacagcggggtgttcttccttcagacattgctgtggatcctctgtgctacggtatgtggcacggagcaatactttaatgtcgaggtttggctgcagaaatatggatacttgccccctactgacccgcggatgagcgtcctccgcagcgctgaaacgatgcaatccgccctggccgcgatgcaacaattctatggaatcaatatgacaggcaaggttgacagaaacactatagactggatgaaaaagcccaggtgcggcgtgcctgatcaaacccgtggctcttccaagtttcatatccgtaggaaacgctatgctctcaccggccagaagtggcagcacaagcacatcacatacagcataaagaacgtcacccctaaagtgggagacccggaaactcgcaaggccatcagacgcgctttcgatgtctggcagaacgtcacaccgctgactttcgaagaggtgccctatagcgagctcgagaatgggaagagagacgtggatatcacgattatattcgcaagtgggttccatggcgacagctcaccattcgatggagaaggagggtttctggcccatgcctattttcccggtccgggaatcggcggggacacccatttcgactctgatgaaccgtggactctgggcaaccctaaccacgacggtaacgacctctttctcgtggccgtgcatgaattaggtcacgccctcggcctggagcattctaacgatccaaccgcaatcatggctcctttctaccagtacatggaaactgataacttcaagttgcccaacgacgacctccaggggattcagaaaatttatgggccccctgacaagattcctcctccaacacggcctctccctacagtaccaccgcacaggtcaatacccccagccgacccaagaaaaaacgatcgaccaaagccacctagaccccccaccggcagaccttcgtaccctggggccaagcccaatatttgcgacggcaatttcaacacgctggccatcttgcggcgcgagatgtttgtatttaaggaccagtggttctggagggtgcgtaataacagggtcatggacggctatcccatgcagatcacctacttttggcggggcctgcctccatcaattgacgccgtctatgaaaatagcgatggaaactttgtttttttcaaaggcaataagtactgggtatttaaggacaccacattgcaacccgggtaccctcacgatctgattactctggggagtgggatcccaccacatggtattgatagcgctatctggtgggaggacgtgggaaaaacctactttttcaaaggggacagatactggaggtactcagaagagatgaaaactatggacccagggtatcctaagccgatcacggtctggaaggggatccccgagagtccgcaaggggccttcgtccataaggaaaatgggtttacttatttttataagggtaaggagtactggaaatttaataaccagatcctgaaggtggagccgggttaccctcgctccatcctcaaggactttatggggtgtgacggaccgacggatagagtgaaggagggacattcgcctccagatgatgtcgatattgtgattaaactggacaatacagcaagcacagtgaaggcgattgcaatcgttatcccctgcatcttggcattgtgcctgctggtcctcgtgtacaccgtcttccagtttaaaaggaagggaacaccccgccatattttgtattgtaagagatctatgcaggagtgggtatag

SEQ ID NO: 160513 - DNA, 1824 bp, Artificial Sequence
  derived and/or modified sequence
atgatcctgctgaccttcagcacaggccggcggctggactttgtgcaccacagcggggtcttcttcctgcagaccctgctgtggatcctgtgtgccaccgtgtgtggcacagagcagtacttcaacgtggaggtgtggctgcagaagtatggctacctgcccccaacagaccccaggatgtctgtgctgcggtctgctgagaccatgcagagcgccctggccgccatgcagcagttctacggcatcaacatgaccgggaaggtggacaggaacaccatcgactggatgaagaagccccgctgtggggtgcctgaccagacccggggcagcagcaagttccacatccggaggaagagatatgccctgaccggccagaagtggcagcacaagcacatcacctacagcatcaagaatgtgacccccaaggtgggggaccctgagaccaggaaggccatcagaagagcctttgatgtgtggcagaatgtgacccccctgacctttgaggaggtgccctacagcgagctggagaatggcaagagagatgtggacatcaccatcatctttgccagcggcttccatggagacagcagcccctttgatggagagggcggcttcctggcccacgcctacttccctggccctggcatcggcggggacacccactttgacagtgatgagccctggaccctgggcaaccccaaccatgatggaaatgacctcttcctggtggccgtgcatgagctgggccacgccctgggcctggagcacagcaatgaccccacagccatcatggcccccttctaccagtacatggagacagacaacttcaagctgcccaatgatgacctgcagggcatccagaagatctacggccccccagacaagatccccccacccacccggcccctgcccaccgtgcccccccacaggagcatccccccagctgaccccaggaagaatgaccggcccaagccaccccggccccccaccggccggcccagctacccaggggccaagcccaacatctgtgatggcaacttcaacaccctggccatcctgcggcgggagatgtttgtgttcaaggaccagtggttctggagggtgaggaacaacagagtgatggatggctaccccatgcagatcacctacttctggaggggcctgcccccatccattgatgctgtgtatgaaaattctgatggcaactttgtgttcttcaagggcaacaagtactgggtgttcaaggacaccaccctgcagcccggctacccccatgacctgatcaccctgggcagcggcatcccccctcatggaattgattctgccatctggtgggaggatgtgggcaagacctacttcttcaagggggaccgctactggagatacagcgaggagatgaagaccatggaccccggctaccccaagcccatcaccgtgtggaagggcatccctgagagcccccagggcgcctttgtgcacaaggaaaatggcttcacctacttctacaagggcaaggagtactggaagttcaacaaccagatcctgaaggtggagcccggctaccccaggagcatcctgaaggacttcatgggctgtgatggccccacagacagagtgaaggagggccacagccccccagatgatgtggacatcgtcatcaagctggacaacacagccagcacagtgaaggccatcgccatcgtcatcccctgcatcctggccctgtgcctgctggtgctggtgtacacagtgttccagttcaagaggaagggcacccccaggcacatcctgtactgcaagaggtccatgcaggagtgggtgtag

SEQ ID NO: 160514 - DNA, 1824 bp, Artificial Sequence
  derived and/or modified sequence
atgatcctgctgaccttcagcaccggccggcggctggacttcgtgcaccacagtggagtattttttctgcagacactgctgtggatcttgtgcgcaactgtctgcggtaccgagcagtacttcaatgtcgaggtctggttgcagaagtacggatatctgccccccacagatccgcgcatgagcgtacttcgatccgccgagaccatgcaaagcgcccttgcagcaatgcagcagttttatgggatcaacatgactggcaaagtcgaccgtaatacaattgattggatgaagaagccgcggtgcggggtgcccgatcagacacgcggctccagcaaattccatatcaggcgaaaacggtacgcccttaccggccagaagtggcaacataaacacataacttacagcatcaagaatgtgacccctaaagtgggagatcccgaaacacgaaaagccatccgccgggcattcgacgtctggcagaatgtgaccccactcacgtttgaagaagtgccatactcagaactggaaaacggtaagcgtgatgtggacattacaatcattttcgccagtggattccacggcgatagctcaccgtttgacggcgagggtggcttcctggctcatgcttatttccccggaccaggcatcggcggtgacacgcactttgacagcgatgagccttggacactggggaacccaaatcatgatggtaatgacttattccttgttgcggtgcacgagctgggacatgcgctgggcctggaacacagtaacgatcctaccgccattatggctccattctatcagtacatggaaacggataactttaagttgccaaacgacgacctgcagggcatccaaaaaatatatggcccacccgataaaattccacccccaacacggccactcccaactgttccacctcaccgcagtattcccccggctgatcctagaaaaaatgacagaccaaagcccccacggccacctacaggcagaccctcctaccccggcgctaaaccaaacatctgcgacgggaactttaacacgttggccatactgcgaagagaaatgtttgtattcaaagatcagtggttctggcgggtgcggaataacagagtgatggatgggtacccaatgcaaatcacttacttctggcgcgggcttcccccatccatagacgcggtttacgaaaactccgacggaaactttgtcttcttcaaaggcaataagtattgggtctttaaagataccaccctccaaccaggctaccctcacgatctgatcacattagggtcagggatcccaccacatggcatagactccgctatatggtgggaggatgtggggaagacatactttttcaagggggaccgttactggcgttactcggaggaaatgaaaacaatggatcctggctatcccaaaccaattaccgtatggaagggcattccagagagtccccagggcgcatttgtgcataaagaaaatggctttacctacttttataaaggtaaagaatattggaaattcaataatcagattttgaaggtcgaaccaggatatccacggagcattctgaaggactttatgggctgcgatggacctaccgatcgcgtgaaggagggacatagtccgccagatgacgtagatatagtgattaagctcgataacactgcttcgaccgtgaaagcaatcgctatcgtgataccttgcatccttgcactctgcttgctggtgctcgtgtatactgtttttcagttcaagcgaaaggggacacccagacatattctctattgtaagagatctatgcaagaatgggtctag

SEQ ID NO: 160515 - DNA, 1824 bp, Artificial Sequence
  derived and/or modified sequence
atgatcctgcttacattcagcacaggccgacggctggattttgtacaccattccggggtgtttttccttcagaccctactctggatcctttgcgctactgtctgtggtaccgaacagtattttaatgtggaggtctggctgcagaaatatggctatctacccccaacagacccacgcatgtctgtactccgttcagcagagactatgcagagtgcgctggccgcaatgcaacaattctacggcataaatatgacagggaaggtggacaggaacacaatagactggatgaagaaacctaggtgcggagtgcccgatcagacccgtgggagtagcaagttccacatcagacgcaagagatacgccctaacggggcaaaagtggcagcacaagcatattacctactccatcaaaaatgtcactcctaaggttggcgatcccgaaactcggaaggccattcgcagggcgtttgacgtctggcagaatgtgacccccctgacctttgaggaggtgccgtactccgagcttgagaacggtaaaagagatgtcgatatcactattattttcgcaagcgggttccatggggattccagcccattcgatggcgaggggggtttcttggcacacgcctatttccccggtccaggcattggtggcgatacccattttgatagcgatgagccttggacccttggaaatcccaatcacgatgggaacgaccttttcttggtcgcggtacacgaactcggccatgcactgggcctagagcattccaatgatcctaccgctatcatggcccctttctaccaatatatggagaccgacaattttaagttgccaaacgacgacctccagggaatacagaagatctacggccctcctgacaagattcctccaccaacgcgtccgcttcccacagttcccccacacagaagtatcccaccggcagacccgaggaagaatgatcggcctaagccacctcggcctcccacgggacgaccctcctacccgggagccaagcccaacatctgtgacggtaattttaatactcttgctattttgaggcgagaaatgtttgtttttaaagaccagtggttctggagagtgaggaacaaccgggtgatggacggatatccaatgcagatcacatatttttggcgcggactacctcccagcattgatgcagtatatgagaactctgacggtaatttcgtgttctttaagggaaacaaatattgggtgttcaaagatacaacactgcaacccggatacccacatgatttgatcactcttggatcgggcatccctccacacggcatcgatagcgccatatggtgggaggatgtgggtaagacctacttttttaagggggacagatattggcgatacagcgaggagatgaagaccatggatcccggatatcccaagccaatcaccgtttggaaaggtatccctgaatctccccagggcgcatttgtgcataaggagaatggattcacttacttttataagggaaaagagtattggaaattcaacaatcagattcttaaggtggagccgggttatcccagatcaattctcaaagactttatgggatgtgatggaccaactgatagagttaaagagggacattctcctcccgacgatgtggacatcgttataaagcttgataatacagccagtaccgtcaaagccattgccatcgtgattccctgtatactggccctatgcctcctagtcctggtgtacacagttttccagttcaagagaaaggggacacctcgacacattttgtactgtaagaggtccatgcaggagtgggtgtag

SEQ ID NO: 160516 - DNA, 11558 bp, Artificial Sequence
  derived and/or modified sequence
tctttgagccggaaccgccggtgaacttaggcgccacgttcccggtgactgaccccggaggatggtgaacaggaactactgctgaccctgtcttcgccgctgcctctcgggggctgccgagcgcggggcccctgtctcctccccttgcccggctgtgggtgaacctgcaggctccttacccacccggaggacttttttttgaaaggaaacgagggagggagggagagggagagagggagaaaacgaaggggagctcgtccatccattgaagcacagttcactatgatcttactcacattcagcactggaagacggttggatttcgtgcatcattcgggggtgtttttcttgcaaaccttgctttggattttatgtgctacagtctgcggaacggagcagtatttcaatgtggaggtttggttacaaaagtacggctaccttccaccgactgaccccagaatgtcagtgctgcgctctgcagagaccatgcagtctgccctagctgccatgcagcagttctatggcattaacatgacaggaaaagtggacagaaacacaattgactggatgaagaagccccgatgcggtgtacctgaccagacaagaggtagctccaaatttcatattcgtcgaaagcgatatgcattgacaggacagaaatggcagcacaagcacatcacttacagtataaagaacgtaactccaaaagtaggagaccctgagactcgtaaagctattcgccgtgcctttgatgtgtggcagaatgtaactcctctgacatttgaagaagttccctacagtgaattagaaaatggcaaacgtgatgtggatataaccattatttttgcatctggtttccatggggacagctctccctttgatggagagggaggatttttggcacatgcctacttccctggaccaggaattggaggagatacccattttgactcagatgagccatggacactaggaaatcctaatcatgatggaaatgacttatttcttgtagcagtccatgaactgggacatgctctgggattggagcattccaatgaccccactgccatcatggctccattttaccagtacatggaaacagacaacttcaaactacctaatgatgatttacagggcatccagaagatatatggtccacctgacaagattcctccacctacaagacctctaccgacagtgcccccacaccgctctattcctccggctgacccaaggaaaaatgacaggccaaaacctcctcggcctccaaccggcagaccctcctatcccggagccaaacccaacatctgtgatgggaactttaacactctagctattcttcgtcgtgagatgtttgttttcaaggaccagtggttttggcgagtgagaaacaacagggtgatggatggatacccaatgcaaattacttacttctggcggggcttgcctcctagtatcgatgcagtttatgaaaatagcgacgggaattttgtgttctttaaaggtaacaaatattgggtgttcaaggatacaactcttcaacctggttaccctcatgacttgataacccttggaagtggaattccccctcatggtattgattcagccatttggtgggaggacgtcgggaaaacctatttcttcaagggagacagatattggagatatagtgaagaaatgaaaacaatggaccctggctatcccaagccaatcacagtctggaaagggatccctgaatctcctcagggagcatttgtacacaaagaaaatggctttacgtatttctacaaaggaaaggagtattggaaattcaacaaccagatactcaaggtagaacctggatatccaagatccatcctcaaggattttatgggctgtgatggaccaacagacagagttaaagaaggacacagcccaccagatgatgtagacattgtcatcaaactggacaacacagccagcactgtgaaagccatagctattgtcattccctgcatcttggccttatgcctccttgtattggtttacactgtgttccagttcaagaggaaaggaacaccccgccacatactgtactgtaaacgctctatgcaagagtgggtgtgatgtagggttttttcttctttctttcttttgcaggagtttgtggtaacttgagattcaagacaagagctgttatgctgtttcctagctaggagcaggcttgtggcagcctgattcggggctgacctttcaaacccagagggttgctggtcctgcacatgagtggaaatacactcatggggaagcttccatgatgcacagtatctgctgttcttcagtcctttgtctttctttgtcattcagttctaggcctttcctctgcacgctcaatgcccagtaaaatttcaggattaactaaagaagaggagaaaaagaagaaaagattcttcttaaaagtttctaatgttattttccttctgaagtctgagcccatttctggggggagaaaaaaaaagcaaatcagaaaacccacggtttttctttttttctttttttctttttttctttttttgctttaaaacaaagggaaaaaagagtttaaacaaaaaacccacaattgaacttccaggaaagtgtgaagacccaaaacagctttgtctccaaagaagatagctctctgactgctttggatagtctcctacgcaccattttgtcaggtgggagatttggaatacacatgcaggacgttagactgttgggacagccattttccaacaaccaaggggccaaaatatctgcaatatagtaacagccttaataatacatccatttttcgttttatacagctgttctcagctatgtcctcagtgtttcatcgcatttatattcatagctattttcaaacacgaccttttaattgtttttgaagtatttctaaaccccttctttccaccttactcctccatcattgtgataatcttcccaagttgtattaggccattgccccaggccttccatgggtctgtcaggaatattcgttacaaagcagagcaagaagcagtatgtctctgaagtggattacagtggcagttattttacaaggatttgtgacactagtaacatacccgtgtaaccctttgagaactatcagaccagctttcagagtcttaggattgtcggtcttgcgatctgataaattatagaactgggcaatggtaaaaacagtcacaagttcaagaagttcaggtttttaaaacagatatcctataatgtcatataatttttaaatgatttacaagactacataaatgtgtttataacaaacagaaatgatgttacttgccaaaatttttctggcaaataaaaaaggtattttattaagattctcataaatctgaaattttatttgaaaaactgataatagcctaagtcttcttttcttttttttaggcatactgaatttctgttttaaaatccattgcatgaaaattcaatttgccttggtatatgcagttagcattgccattttaaaaatgaattaaaacggtgactctgaagttgcatgaatatcctccagtgcattacctattgcatgtccaccatagttctcaaagggttagtgtggcttctggcatttagccgtccatttgatcactgacagagccaagagaccaccaaagcatttcattgttgagtgtaatttgtcctaacagcagtattgtcattttcatgtgacctgcagagcaggtttgtatcaatatttttttcctagagaaaagtcagcaactgacagacctctttattgatttttaggagctgcttcttgcagtgaaaggctttacagccactgggctgtgaacttattagagatggtcagaatgaatgcaccccatgagtcagacattggctttgtgtgaaagccagctttgaggggattagcttttgaaacaatgaacagcttgccttgaacttgattattgatctattgactgtcattaacaacaacttaaacattgtcttctgtgaaaattttccttgaagagtcctgttctatgtctttgccctttgacctttaacttgcaaactggcacaaactgaaggaaatctggtgttgcttctccattggattagttgttctctaaaacctagtaagcatgagctgtttccttagagtggagagagtggtgatggcagatctgcagatggacactttgctctttacatgcacactctgaaaatgccctataggtagaagtgaattttaatttcattttaatataatttcaagtctaaattcatcattttagtacaaattacaaaaactataggaaaaaaaaaacctcaaatacttgaatggccagtgtggcttttatataaagcaggaattttatactagtaaaaatttcttactcatttgctaatacacatttccagatgatttttaatgagtgtaggtatacattcttatttggaaatggatagtttggctgccttgaatttatatttatactcaacgtagcatgaaaattagaatgccttttggttaaactacatgtttatgatttggttggggaaaatattttataattgtgggtggcatgctgcaaagccttgcagattgttatttcttacaacctgagcgtatatagtatgagcctaagaaaaaagaagagtaagaaaagaagaatggctttacagtaaaatatcatacaatgcagacaatattttaagaggatattggagattatgtacgcaagggccaagaaagcaagaaatgagaaccagagtcagccctgtagctttacttcagtgcttccattctagatgatgctgatattataaagagttagtcactgctgctaagcatggaggactatatacataagctcgtttatacagtgtttgcttgtgggagggtttaatccttttagggccttgatgtcaagaaaaaaataactggaaactatattttgctaaagatagaaatgaggaactgtgtcattttgggacatgtgcaaatcattgaggaactccatcaccctgcattgaaaattgatttttttttcctctaaaatgagaaagaaactgaataagcaatctgttgcctctttactcattcatcacaatatcctgattcgtcataaggctatcagtatataagggctagaaaataatcatagcattaagaaggaaggagtctatcattatgcttgaattctggcaaatgtcatgaataagggttgggtcatatttactttaatatgagacaagatttatgtgataagcaaaggcatataaggctgctcttttgaacagaacatttcagttatcaggctgtactattacaagagataagaagacaataaggacaatgtaatcacaaacagtgggattccatttgtttattgtacaccagctactttgtgggtatggttcctgactcctcttctacatgaggtttgggaaaaaagtctcaaaccaaatggaacagtgaaagggaaagtaattcatctagcacataagaatagtgattcaaaaccaatgcagaataaatttccatgggtcaataacataaggtgtcagttcagtgttactagagatatgcaaggcataaaatattttcatcaccccatcactaataacatgaaaagctcagacataggatttcccaaattgaaatgaaaacacattcatgcctgcaaaaataattctccttctgcttcatttctcattactttatctaatataaacacaaatgtaaacaaggtaatggtcttcatgtaaaatgaccatatagttaagaattttagtaaaatattgttgttctgtgtattattaaacaaatgcaatgaagtattaaaatagctgatcagtttgaatttcctgtaaagcagtaattccgcatcagaattgtagataaggttgtgaatttattgactcatttcagaacagtgtctgttgacatggcagtcagagcaggtgaatacagatgctctttctgattgcaaaggttatagagctaaattagacagcattatgtgatactagcaaagacaacttctgttataaatcagagggcaaggcttttctgaatcgatgtgataaattactaagtaatgattaccaaaaataattactaagtaataaaagatacagactggtttactgaaataagcaagtgttacatttaataattacctataatctttttttgttaacacataagcaagtgttacctttaataattacctataatctttttttgttaacacataatttggccatttcatatactgtgtacctattttcattccctctctgtgggtcattaaaaaacacaatgtggtggataagaacattgtccaaacttcactgctagttccaatacatagatgatggtgtgtaaactggattgtaggggtagtcatatttgcaagttctacatgttatgctaatatatctagtatggtacacatacacgcccacactttgtggatcttacagtggaataaatagtgtgtccatattaactaaactcaaagtgctatctgaagaggaatggatgttataagcagacagacagactgagttaaactgagtcatgaaaaaatatatattttaaagtttttggaatcatttccagaaactaataaagggaattatttactggtagtattgagtctgtgagattgtagtatatactgaaacaatcttctggatggtggtaaggtcttttttagcaaacacagtaaagagcttatttcatttctgatgctttcaagggcatattccaaagtatcacagatgtcaaatagaatatgctatataaaccaaaaatgtgcatttcagatgacctattacagcaatctcagccaatatgtaatatcacaaaatgtgtcaagtcaatcatataagaggatctaatcattcggctgtatttcatgtaccttcatgttgttgatatattgtgaccacaggaaataggtgccagagcatatgcagttaagttacaggctccacgttgcctaggagggaatcataactacatcagaaaatttttaacagttatatcttaaaaattagaattttatgtaataaataaagcggcaaccaggaatagcaacgcaacaaatatgaaagctaattattatatttagctttcatatttatataatatgatggaaatggaggaggaaaaatgagtcttttgttaaatataaagacaaactataacactccttgataatacaactggaaattttactttagcaagcataaaatagtggaggaaaaaaatccaacttcaagctctttgcactagtgatgattatgtgatatatcaatgtaatatttagccagtggtcattagatgttactgtgcttaaacacatctgatactcatgcattgccttacaggctaaaaatgtaagaggtaggtgttcagtaacctcaagttggaaagatatataatgttagaatcccctgagacaagccatttccctgaaatagaaatttacctcaatactcatgtaatctaagacacttggcgtagtagcaaagaagttgccttcatgttctagtctcatctaattgtgacctttgtctttcatgtacttctgaaatcattttccactttttccactggtgtgattttgaaacaattctgaaatatttcaggtaagattaataacatccaattacaaatatatgtttcaatattttatacgtatgtctactttgaaagttaaaccaatagtatagaaagcctaagaatgaacactgattggacatactcacagaaattaagggaaaaacacatattgtaaaattcctgtcaatgtttgagtagaatacagaagtacatagcagtcttcaatttttaaacacaattatgggcttataactggacgtgacatgcatcatttattagaacaatattatttatttatactaagtaaggatataagatcacagaagcttagtgttataacggagacttcacagacattcataactaatgttttctaaggcaaataagggcataaaccagaactcatggtcagtgcagagtaagtataaaaagttatgtatgaaagacatttatttatagagatttctgaggattctatgccttttcaacttaaagatgagtgtgtcttagaatttgttttatgcatcattggactggggatgatattcaaatgtgcactcagcgtgtcctcacattaaagggcacattgaacagtataggaaaatacatcataaactagaatgttgtacagattcatataactttcccatgtgctctgctgtagagctgaatttatatgcccttaaaaagggataagaatcaattaaatataaatacggaaatatacttatgttaggtcacttagcttcagagcaagatgtcattaacctttatttcacagagaaaaactggaagaaaagaatggtgaacaagaataaaatgataaactttttggcttatagagatgtttcttgggaattttttccacttgtttttatacatgaaaaaaatatcagtcacaatacagacatttctgtagtatttggtctgtgggtaaactggatcccaggcagaatactttttgacacaggcctttttatacatgctttatatatgatgaagctttggtgagatgtgactgcatggtaggatgcattttcctaggataggatatggtgctgcttgtacttgccaccttttatatgaatgtatgtcgctacattggcctgtcttgccaagacatggttgaatgaagcctggtgtgagctgtctatttgaaaagtcactaggatgcatgtttcatttgccgttacataatgccaatttgaacctgtttcctctatatattaacaatccaattgttaagataaaatatactttgcttgaatgaatgattttggtagtaatatgagcgttatccttaaatcaatgttacaatttttgctattactgaaataccgtcacagaggccacattattggctgtctataccattgcctgagtaaaattaggtttttaggtctttttggcatttacttcttttacagctgatgtggaatcaattattcctttatatgttcataagtacaaaatttcactatcttaattacttccaaacaaacaatttccaagcaagggtatgtgtgcctggtttttctgctcctccaattctaagatcgttatttgtttgccttctgtttctcacccaaaaatacagatggttgggaaagatacatcttattgagttgtcctatgcagtctctgtctatatttgcatttctttctattcctatcttgccttttttttttttttttacacagatttggttttcccttccctttgtgaaaaccagaattgagcagcattgtacatcagagatggtacccaggaaatgtctttgttcctcagtatttttcgtcaaaacttccatgcaaagacagtcccagcaaagttgacatacatcccaacctctctcattggcttttctaactttttatagagctattcccctgagaaaagtgaaatgctgagtatgatgggtattgcctgttgataggatagctaaggaaatttgcttttggagaatgtatcttaaataattatacaggaaagtagtcacagtatagtgttctgtttaaggtacatcatgggtacataaatgcctaaaaccttcatcctttggtctatttctctgtaagtgtaaattacatatatattagaaagagagatagaatcaaagaattaggggtgttacagaggcagctttttgctgccttggttttgactgtatcagcatttctattgcagacctctattttcaggggttttagagactcgaccataaaaatttgtttcaggcttaaaagttttgaaagatttttttaggtatctgattttaaacaaatagatcttgtttttatattataggagggaaataaatggagtttactagttcaattttgcgctaatataacttttaataaacttaactttttaaacaaaaacataaaatctaattagttcatagttggttgatgcttttttaaaagaatcaattattgaccttgagaaacttgcctgcttcatcagtatagtaacctatctttaagatattttaaaacgtgtatacctttattaacattatcttgattccagcggtggatcagtatgataatgcagatttatgacatccatataagctatctggtaatatagatttaggaatatatagtatatatgatacatatatatatatatatttactagatagattaaggagaaaaagctcccataaacttagtttgtcaaataaataccatatatttaaaaaatgcacagacatttatcattcagagtcagaatgagattcaagtaattgcaaagggaagttgtctcttgggtaaacaatacacattttatagcttcttgtgaaactaattttttcctttctatattgtggttatgggaaagtaaaagaattaaaattaatacagactttatttaaataacattaaactgtgaagcagagagaaacgccaggaaattaaatatttaggccattatcttgtggttgtctgacaatacttcacctttcttttaattccccatgatgttttcaattatggagagagtattaaaatctagatttaagtttctgcattgttctcattacactcaacactatttcattaagttcttgataatatgtagtcttctgtgtgcaaggaaagaaataaataacacatttatttgctgaatgagttttaaggtgtgcaagttgtagtgatgtttttcccacacaggattctatacacttataccatcttaaatctggcattttttttttcagatagcttctactgacaaacacaaagcttgtttgtgtgcaaatataaggctaaataaatggtgctaaagtgtattatgactgtcagataaaatcaggcaaaattttgtggtgcttaaattaattttttcattgattttattgatcagtgcattgaacagtgtttattattcacaagttgtcttttattagtaaatcaaggcctcatagcacattgttaaataaagtggttgactagtctatgtaacagctcaccaagctactatctcttttaactccttataatgttgcgtcattaaaggtcaaggggtcatgctattaatctcattgctatagaccattaacatgactgaacttttccacaaagtacttatgtttacaatgctataaccctttgactgctgcggcaacctttaaccacacaaatgtcacaagctagaatcatcagcatggttcttgccatggcaatcaaagagttaagggctgtgcagtgatttgttttgtatttattaatttatatttattttgtttccattcaaggaggggattaggggtggggcagtttttgtctgctgtaagtgtcttaacctagggaagggttaaatggctttttatactattgcatcttctgtatttaccatcaattcattgtgttgtaattaaaagaaactgtcaataaataagagaacagaaaaatg

SEQ ID NO: 160517 - protein, 356 aa, Artificial Sequence
  derived and/or modified sequence
MWKSWKLRTDVREVSRRRQFLREHAAPFSAFLTDSFGRQHSYLRISLTEKCNLRCQYCMPEEGVPLTPKANLLTTEEILTLARLFVKEGIDKIRLTGGEPLIRPDVVDIVAQLQRLEGLRTIGVTTNGINLARLLPQLQKAGLSAINISLDTLVPAKFEFIVRRKGFHKVMEGIHKAIELGYNPVKVNCVVMRGLNEDELLDFAALTEGLPLDVRFIEYMPFDGNKWNFKKMVSYKEMLDTVRQQWPELEKVPEEESSTAKAFKIPGFQGQISFITSMSEHFCGTCNRLRITADGNLKVCLFGNSEVSLRDHLRAGASEQELLRIIGAAVGRKKRQHAGMFSISQMKNRPMILIGG

SEQ ID NO: 160518 - protein, 385 aa, Artificial Sequence
  derived and/or modified sequence
MWKSWKLRTDVRVREGAGGSPCASSQPGSRGPCFLPGLSSQEVSRRRQFLREHAAPFSAFLTDSFGRQHSYLRISLTEKCNLRCQYCMPEEGVPLTPKANLLTTEEILTLARLFVKEGIDKIRLTGGEPLIRPDVVDIVAQLQRLEGLRTIGVTTNGINLARLLPQLQKAGLSAINISLDTLVPAKFEFIVRRKGFHKVMEGIHKAIELGYNPVKVNCVVMRGLNEDELLDFAALTEGLPLDVRFIEYMPFDGNKWNFKKMVSYKEMLDTVRQQWPELEKVPEEESSTAKAFKIPGFQGQISFITSMSEHFCGTCNRLRITADGNLKVCLFGNSEVSLRDHLRAGASEQELLRIIGAAVGRKKRQHAGMFSISQMKNRPMILIGG

SEQ ID NO: 160519 - DNA, 1071 bp, Artificial Sequence
  derived and/or modified sequence
atgtggaaatcttggaagcttcgaacagatgtgcgcgaggtttcccgacgcagacaattcttacgcgagcacgcggctccattctccgcctttctgaccgactcatttggccgccagcacagctacctacggatttccctaacagaaaaatgtaacctgcggtgccaatactgcatgcctgaagagggtgtgccattaaccccaaaagccaatctgttaacaaccgaagagattttgactttagcccgtctgtttgtgaaagagggcatcgataagatccgcctcacgggcggggaaccattgattagacccgatgttgttgacatcgttgcccagctgcagcggctggaaggtcttcgtacgatcggggtcactactaatggcataaacctggccaggttgctgccacaactgcagaaagctgggctttccgcgataaacatctctctcgataccctcgtgcccgcaaaattcgaattcatcgtcagaagaaaaggtttccacaaggtgatggagggtatccataaggctattgagttaggatacaaccccgtgaaggtgaactgtgtggtcatgcggggtctgaatgaagatgaactgctggatttcgccgctctgaccgaagggctaccattggacgtccgcttcatcgaatacatgccttttgatggcaacaaatggaacttcaaaaagatggtaagctacaaggagatgttagatacagttcgccagcagtggccagaattggaaaaggtcccagaggaagagagtagcacagcaaaagcattcaagattcctggatttcagggccaaatctccttcatcacttcaatgtctgagcatttctgcgggacatgtaaccggctgaggataaccgctgatggaaacctcaaagtttgtcttttcggaaactcagaggtcagcctccgagaccatttgcgcgccggcgccagtgagcaggaactgttacggattattggagccgctgtcggtcgcaagaaaaggcagcacgcgggtatgttcagcatttcccagatgaaaaaccggcctatgatcttaattggggggtag

SEQ ID NO: 160520 - DNA, 1158 bp, Artificial Sequence
  derived and/or modified sequence
atgtggaagtcgtggaaactgcgtacagacgtgcgggtaagggaaggtgctgggggctctccatgtgcatcatcacagcccggatcccgaggaccgtgctttctgccaggactctcatcccaagaagtgtctaggaggagacagttcttgagggaacacgcagctccattctccgccttcctcaccgactcctttggacgccagcacagctaccttagaatctctctcacggagaaatgtaatcttcgatgtcaatactgtatgccagaggagggagtgcctctgacccccaaggccaatctcctgaccacagaagagatcctcaccctggctagacttttcgtaaaggagggaatcgacaagatcagactcacgggcggcgagcccttgatccgaccagatgtggtggacattgtggcccagttgcagcgactcgagggtttgagaaccatcggcgttacaactaacggaattaacctggcacgcctgctacctcaactgcagaaggccggactttcggccatcaatatcagcttagatacgctcgtgccggctaaatttgagttcattgtccgccggaagggatttcataaggtgatggaggggatacataaggctatcgagttgggctataacccagtcaaggtcaactgtgtggtcatgagaggtctgaacgaggatgagctcctggatttcgcagccctgacagaggggttacccctcgatgtgcgatttattgaatatatgcctttcgatggaaacaagtggaattttaaaaagatggtttcctacaaagaaatgctggacaccgttcggcagcagtggccggaactagagaaagtccccgaggaggaatcatctaccgccaaggctttcaagattcccggttttcagggacagatcagctttatcacctcaatgagcgagcacttctgcgggacatgtaaccgcctgaggatcacagccgatggcaacctcaaagtctgcctgttcggcaacagtgaggtgtctcttcgtgaccatctcagagcgggtgctagcgagcaggagctcctgaggatcatcggcgccgccgtggggcgaaagaaaaggcaacacgccgggatgttctcaattagtcagatgaagaaccgccctatgatacttatcggaggctag

SEQ ID NO: 160521 - DNA, 1071 bp, Artificial Sequence
  derived and/or modified sequence
atgtggaaaagttggaaacttagaaccgacgtgagggaggtgtcccggaggcggcagttcctgcgggaacacgccgctcccttttccgcttttctgaccgattcttttgggcgtcagcattcctacttacggatttcactgaccgagaaatgcaatctcaggtgccaatattgcatgcctgaggaaggtgtgcccctcactcctaaggctaacctgcttactactgaggagattctcacgctggctaggctgtttgtgaaagaaggcattgataagatccgactgaccggcggagagcctttgatcagacccgatgttgttgatatagtagctcagctgcagaggctcgagggcttgaggactatcggcgtgacgacaaacgggatcaacctcgctcgccttctgccccagctacagaaagccggcctctccgccatcaacatctccctcgacaccctggtcccggcaaagtttgagttcatcgttcgcaggaagggcttccacaaagttatggaaggaattcataaggcaattgaactggggtataaccccgtgaaagttaattgtgtggtgatgagggggctcaatgaggatgagcttttggacttcgccgcccttacagaggggctgccacttgatgtgcggttcatcgaatacatgcctttcgatggcaacaagtggaactttaaaaaaatggtctcttataaggaaatgttagacacggttcggcagcagtggcctgagttggagaaggtacccgaagaagagtcaagcacagcgaaggcctttaaaataccaggattccagggccagatcagcttcatcaccagcatgagcgagcacttctgcggtacatgtaatcgcttgcgcattaccgcggacggaaatttgaaagtgtgtttattcgggaactccgaggtgagcttgcgggatcatctcagggcaggagctagcgaacaggagttactccgcatcatcggcgccgccgtgggtcgaaaaaaaaggcagcatgcaggcatgttctcgatctcccagatgaaaaacaggccaatgattctgattggcggatag

SEQ ID NO: 160522 - DNA, 1071 bp, Artificial Sequence
  derived and/or modified sequence
atgtggaagtcctggaagctgaggacagatgtgcgggaggtgtccagaagacggcagttcctgcgggagcacgccgcccccttcagcgccttcctgacagacagctttggccggcagcacagctacctgcgcatcagcctgacagagaagtgcaacctgcgctgccagtactgcatgcctgaggagggcgtgcccctgacccccaaggccaacctgctgaccacagaggagatcctgaccctggcccggctgtttgtgaaggagggcatcgacaagatccggctgaccggcggggagcccctcatccggccagatgtggtggacatcgtggcccagctgcagaggctggagggcctgcggaccatcggcgtgaccaccaacggcatcaacctggcccggctgctgccccagctgcagaaggccggcctgagcgccatcaacatcagcctggacaccctggtgcctgccaagtttgagttcatcgtgcggaggaagggcttccacaaggtgatggagggcatccacaaggccatcgagctgggctacaaccctgtgaaggtgaactgtgtggtgatgaggggcctgaatgaagatgagctgctggactttgctgccctgacagagggcctgcccctggatgtgcgcttcatcgagtacatgccctttgatggcaacaagtggaacttcaagaagatggtgtcctacaaggagatgctggacacagtgcggcagcagtggccagagctggagaaggtgcctgaggaggagagcagcacagccaaggccttcaagatccctggcttccagggccagatctccttcatcacctccatgtctgagcacttctgtggcacctgcaaccggctgcgcatcacagcagatggcaacctgaaggtgtgcctgtttggaaattctgaggtgtccctgcgggaccacctgcgggccggggccagcgagcaggagctgctgcgcatcatcggggctgctgtgggcaggaagaagaggcagcacgccggcatgttcagcatcagccagatgaagaaccggcccatgatcctgattggaggatag

SEQ ID NO: 160523 - DNA, 1158 bp, Artificial Sequence
  derived and/or modified sequence
atgtggaagtcctggaagctgaggacagatgtgcgggtgcgggagggcgccggcggcagcccctgtgccagcagccagcccggcagccggggcccctgcttcctgcccggcctgagcagccaggaggtgtccagaagacggcagttcctgcgggagcacgccgcccccttcagcgccttcctgacagacagctttggccggcagcacagctacctgcgcatcagcctgacagagaagtgcaacctgcgctgccagtactgcatgcctgaggagggcgtgcccctgacccccaaggccaacctgctgaccacagaggagatcctgaccctggcccggctgtttgtgaaggagggcatcgacaagatccggctgactggaggagagcccctcatccggccagatgtggtggacatcgtggcccagctgcagaggctggagggcctgcggaccatcggcgtgaccaccaacggcatcaacctggcccggctgctgccccagctgcagaaggccggcctgagcgccatcaacatcagcctggacaccctggtgcctgccaagtttgagttcatcgtgcggaggaagggcttccacaaggtgatggagggcatccacaaggccatcgagctgggctacaaccctgtgaaggtgaactgtgtggtgatgaggggcctgaatgaagatgagctgctggactttgctgccctgacagagggcctgcccctggatgtgcgcttcatcgagtacatgccctttgatggcaacaagtggaacttcaagaagatggtgtcctacaaggagatgctggacacagtgcggcagcagtggccagagctggagaaggtgcctgaggaggagagcagcacagccaaggccttcaagatccctggcttccagggccagatctccttcatcacctccatgtctgagcacttctgtggcacctgcaaccggctgcgcatcacagcagatggcaacctgaaggtgtgcctgtttggaaacagcgaggtgtccctgcgggaccacctgcgggccggggccagcgagcaggagctgctgcgcatcattggagctgctgtgggcaggaagaagaggcagcacgccggcatgttcagcatcagccagatgaagaaccggcccatgatcctgattggaggatag

SEQ ID NO: 160524 - DNA, 1071 bp, Artificial Sequence
  derived and/or modified sequence
atgtggaagagttggaagctccgcacagatgtcagagaggtgtccaggcggaggcagttcctgcgggagcatgcggcccccttctccgccttcctcacagacagcttcggccggcagcacagctacctgcggatctccctcacagagaagtgcaacctcagatgtcagtactgcatgcccgaggagggggtcccgctgacccccaaagccaacctgctgaccacagaggagatcctgaccctcgcccggctctttgtgaaggaaggcatcgacaagatccggctcacaggtggagagccgcttatccggccggacgtggtggacattgtggcccagctccagcggctggaagggctgagaaccataggtgttaccaccaatggcatcaacctggcccggctactgccccagcttcagaaggctggtctcagtgccatcaacatcagcctggacaccctggtgcctgccaagtttgagttcattgtccgcaggaaaggcttccacaaggtcatggagggcatccacaaggccatcgagctgggctacaaccctgtgaaggtgaactgtgtggtgatgcgaggccttaacgaggatgaactcctggactttgcggccttgactgagggcctccccctggatgtgcgcttcatagagtatatgccctttgatggcaacaagtggaacttcaagaagatggtcagctataaggagatgctagacactgtccggcagcagtggccagagctggagaaggtgccagaggaggaatccagcacagccaaggcctttaaaatccctggcttccaaggccagatcagcttcatcacatccatgtctgagcatttctgtgggacctgcaaccgcctgcgaatcacagctgatgggaacctcaaggtctgcctctttggaaactctgaggtatccctgcgggatcacctgcgagctggggcctctgagcaggagctgctgagaatcattggggctgctgtgggcaggaagaagcggcagcatgcaggcatgttcagtatttcccagatgaagaaccggcccatgatcctcatcggtgggtga

SEQ ID NO: 160525 - DNA, 1071 bp, Artificial Sequence
  derived and/or modified sequence
atgtggaagagctggaagctgcggaccgacgtgcgggaggtgagccgccgccgccagtttttgcgcgaacacgcagcacccttctctgcattcctgaccgactccttcggccgccagcacagctatctgaggatctccttgacagagaaatgcaacctgagatgccagtactgcatgcctgaggaaggagtgccccttactccgaaggccaatctgctgaccaccgaggagatcctgacactggccaggctcttcgtcaaggagggtatagataagatccgtctgacgggcggggagcctttgattcgccccgacgttgtcgacattgttgctcagctgcagcgacttgaaggacttcgaactatcggggtgaccactaacgggataaatctggcacgtctgttgcctcaactgcagaaagctggcctgtccgccatcaacatttcactggatactctggtgcccgccaagtttgagttcatagtgcgcaggaaaggctttcacaaagtgatggaagggatccacaaggctatagagttaggatacaaccctgttaaagtcaactgtgttgtgatgcgcggcctgaatgaggacgagctgcttgattttgccgctctcaccgaagggctcccccttgacgtccgatttatcgaatacatgcctttcgacggtaacaaatggaacttcaagaagatggtgtcctataaagagatgctcgacacggtgagacagcaatggccggagctggaaaaggtcccagaagaagaaagcagcaccgccaaagctttcaaaattccggggttccagggacaaatcagctttattacctctatgtctgagcatttttgcggcacctgcaatcgtctgaggattacagccgacggcaatctgaaagtgtgcctgtttggtaacagcgaggtgagcctgcgcgatcacctgagggcaggcgcttccgagcaggagttattgcgtatcattggtgccgctgtgggaagaaagaaacgccagcatgccggaatgttctcaatttctcagatgaagaatcgccccatgatactgatcgggggatag

SEQ ID NO: 160526 - DNA, 1158 bp, Artificial Sequence
  derived and/or modified sequence
atgtggaagagctggaagctgcggaccgacgtgcgggtgcgggagggcgccggcggtagcccctgtgcatcctcgcagcctgggtccaggggcccctgttttctgccagggttgagcagccaggaggtgagcaggagacgtcagttcctcagagaacacgccgcccctttctctgcttttctcaccgatagctttggtcggcagcactcctatctgagaatttcactgacagagaaatgtaacttgagatgccagtactgcatgcctgaggagggggtgccactgacaccaaaggcgaatctgctgacaaccgaagagatccttacgctggccagattgtttgtcaaagagggtatcgacaagattcggctcacgggcggcgaacccctgatacggcccgatgttgtggacatcgtggcccagctccagcgtctggagggcctacgtactataggagtgacgacaaacggaatcaacctggccagactgttacctcagctccagaaagcgggtctttccgcgatcaatataagcctggacacacttgtacccgccaaattcgagttcattgtgaggcggaagggctttcacaaggtgatggagggcatccacaaggcaattgagctgggatacaaccctgttaaggtgaattgcgtagtcatgcgaggtctaaacgaggacgagctattggatttcgctgctctaacagaaggacttccgctggacgtgcgatttatagagtacatgccttttgacggtaacaaatggaactttaaaaaaatggtgtcttataaggagatgctggatactgttcgccagcagtggcccgagctggagaaggttcccgaggaggagagcagtacagccaaagcatttaaaattcccgggtttcaggggcaaatttcattcatcacttctatgtcagagcatttttgcgggacctgcaacaggctgaggatcacagccgacggaaatctgaaggtctgtctgtttggaaactccgaagtatcccttcgggaccatttgagagcaggtgcctctgagcaggagctgcttcgcattatcggcgccgccgtcgggagaaaaaaacggcagcatgccggaatgttttccatttcccagatgaagaatcgacctatgatcctaatcggaggctag

SEQ ID NO: 160527 - DNA, 1071 bp, Artificial Sequence
  derived and/or modified sequence
atgtggaagagctggaagctgcggaccgacgtgcgggaggtgagccggcgccggcagtttctcagggaacacgccgctcctttctccgcttttctgactgattcatttggcagacagcacagttatttgcgcatcagcctcacagaaaaatgcaatctccgctgtcaatactgtatgccagaagagggcgtgcctcttactcctaaggcgaacctgcttacgactgaggagatcttgactttagcacgattgttcgtaaaagagggtattgacaagatacgcctgacagggggcgaacccctcatccggccagacgttgtggacatagtggcgcagctgcagcgcctcgaaggcttgagaacaatcggcgtgacaacgaacggtattaatctggctagattgctgcctcagttacagaaggcaggcctctctgccatcaatatctctttagacaccctcgttccagccaagtttgagtttatcgtaagacgaaaaggttttcacaaggtcatggaaggcatccacaaagccattgaactgggctacaatcctgtgaaggtcaactgtgtggtgatgagaggccttaatgaggacgagctgctggatttcgcagcacttaccgagggtcttccacttgacgtgagattcattgaatatatgccatttgacgggaataagtggaattttaaaaagatggtaagctataaagagatgcttgacaccgttcgccaacagtggcccgagcttgaaaaggtcccagaggaggaatcgtccaccgccaaagcttttaagattcccgggtttcagggccagatctcatttatcacatccatgagcgagcacttctgtggtacttgtaacagacttcgcatcacggccgacggcaatctcaaagtttgtctcttcggaaactctgaggtgtccctgagagaccatcttagagcaggcgcttctgaacaggagctcctgagaattatcggcgctgccgtcgggagaaaaaagcgtcagcatgccggaatgtttagcattagtcagatgaagaatcgaccaatgatcctgattggcggctag

SEQ ID NO: 160528 - DNA, 1071 bp, Artificial Sequence
  derived and/or modified sequence
atgtggaaatcctggaaattgagaacggatgtcagggaggtgtccaggcggaggcaattcctgcgcgaacatgcagcacccttttcagctttcctgactgattctttcggacgtcagcacagctatcttcggatctcccttaccgagaagtgtaatctgcggtgccagtactgtatgccggaggaaggcgttcccttgacacctaaagcaaacctccttactaccgaagaaatattgacactagcccgactgtttgtgaaagaaggaattgacaagatcagacttaccggcggtgaaccattgattcgccctgatgtcgtggatattgtggctcaactgcagcggctggagggccttcgaaccatcggcgtcaccactaacggaattaatcttgctcgtctgctgcctcaactgcagaaggccggactgagcgccattaatatttcactggatacgctggtccctgccaaattcgaattcattgtgagacgtaagggttttcacaaggtcatggagggtatacacaaggctattgaactggggtacaaccctgtgaaggttaattgcgtcgtgatgcgcggtcttaatgaagacgaactgctcgattttgcagcactgaccgaaggactgccacttgatgtcagatttattgaatatatgccgttcgatggaaataagtggaattttaagaagatggtgagttataaagaaatgctcgacacagtccgtcagcagtggcccgaattagagaaggtgcctgaagaggagagttccaccgcaaaggctttcaagatacccggttttcaaggacagatctctttcatcaccagtatgagtgaacacttctgtggcacctgcaatagactccgtatcacagcagacggaaacctgaaggtatgcctgttcggcaacagcgaagtgtctctgcgcgatcacctgagggccggagcttccgaacaggagttgttacggattattggtgcagctgtaggcagaaagaagagacagcatgccggaatgttctctatcagtcagatgaagaaccgcccaatgatactgattggcggatag

SEQ ID NO: 160529 - DNA, 1158 bp, Artificial Sequence
  derived and/or modified sequence
atgtggaaatcgtggaaactgagaactgacgtcagagtacgtgagggggcaggagggagcccatgcgcctcctcacagcctgggagtaggggaccctgcttcctgccaggcctgtccagccaggaagtgtctcgcaggaggcagttcctacgtgagcacgcggctcccttttccgccttcctgacagactcttttggtcgtcagcactcctaccttagaatctccctgacagagaagtgcaacttacgctgtcagtattgtatgccagaggagggagtgcctttgactcctaaggcaaaccttctcacgacagaggagatcctgaccctcgctcggctgtttgtgaaggagggtatagacaaaatacgccttacaggaggagaacctctgatccgcccagacgtggtagatatcgttgcccagttgcagcgcctggagggcttgcgtaccattggggtgacaaccaacgggatcaatcttgccaggcttttgccacagctgcaaaaggccggactcagcgccattaacataagcttggacacgttggtgcccgcaaagtttgaattcattgtgaggcggaaggggttccataaggtgatggaaggtatccacaaagctattgaactaggatataatcctgtgaaagtgaactgcgtcgtcatgcgcggactcaatgaagacgaacttcttgatttcgccgctttaacagaggggttgccccttgatgtgagattcattgaatacatgccgttcgacggtaataaatggaacttcaagaagatggtatcttacaaggagatgttggatactgtgcggcagcagtggccggagctggaaaaagtgcccgaggaggaaagtagcaccgccaaggcctttaaaatcccgggttttcagggacagatttcgtttattacctctatgtccgagcacttctgtggcacatgcaatcgactaagaattaccgccgatggaaatcttaaagtgtgcctctttggaaactctgaggtgagcctacgggatcacctcagggcaggggcaagcgaacaagaacttctgaggatcatcggggctgcagtcgggaggaaaaaaagacaacatgccggtatgttctcaatcagccagatgaaaaaccgcccaatgattctgattggcggatag

SEQ ID NO: 160530 - DNA, 1071 bp, Artificial Sequence
  derived and/or modified sequence
atgtggaagtcgtggaagttgcgtaccgacgttagggaggtcagccggagaagacaatttctgagagagcacgccgctccgttctccgccttcctgaccgacagctttggccgacagcacagttacctccgcatttctttaacagaaaaatgcaatttgagatgtcaatattgcatgcccgaagagggcgtgcctctcacacccaaggccaatttactgacaacagaggagatcttaacccttgccaggctcttcgtgaaggaaggaatcgacaaaatcaggttaacagggggagaaccgcttatccgacccgatgtcgtggatatagtcgctcagctccagcgccttgaggggttaagaactataggagtcacaactaacggaattaacctggctagactgctccctcagctacagaaggccggactcagcgccataaacatttccctggacactctcgtcccggcaaagttcgaattcatcgtgaggaggaaagggttccataaagttatggagggtatacataaggcaattgagcttggctataatcccgttaaagtgaattgtgtcgttatgaggggcctgaacgaagacgagttacttgacttcgccgcactgacagaaggactgccgctggacgtgaggtttattgagtacatgccgttcgatggtaacaagtggaatttcaaaaagatggtctcgtataaggagatgctcgacacggtaagacaacagtggcctgagctcgaaaaagtccccgaagaggagtcatcaaccgctaaggccttcaagattcctgggttccagggacaaatctcttttattacctctatgagcgagcatttctgtgggacgtgcaatagactgaggattaccgctgatggtaacttgaaggtgtgcttgttcggtaattctgaagtgtcccttcgcgatcacctgcgggcaggggctagcgaacaggagctcttgcgaatcataggagcggctgtgggacgaaagaaacgccagcacgccggaatgttttcaatctcgcagatgaagaacagaccaatgatcctcattggaggttag

SEQ ID NO: 160531 - DNA, 1071 bp, Artificial Sequence
  derived and/or modified sequence
atgtggaagagctggaagctgagaaccgacgtgagagaggtgagcagaagaagacagttcctgagagagcacgccgcccccttcagcgccttcctgaccgacagcttcggcagacagcacagctacctgagaatcagcctgaccgagaagtgcaacctgagatgccagtactgcatgcccgaggagggcgtgcccctgacccccaaggccaacctgctgaccaccgaggagatcctgaccctggccagactgttcgtgaaggagggcatcgacaagatcagactgaccggcggcgagcccctgatcagacccgacgtggtggacatcgtggcccagctgcagagactggagggcctgagaaccatcggcgtgaccaccaacggcatcaacctggccagactgctgccccagctgcagaaggccggcctgagcgccatcaacatcagcctggacaccctggtgcccgccaagttcgagttcatcgtgagaagaaagggcttccacaaggtgatggagggcatccacaaggccatcgagctgggctacaaccccgtgaaggtgaactgcgtggtgatgagaggcctgaacgaggacgagctgctggacttcgccgccctgaccgagggcctgcccctggacgtgagattcatcgagtacatgcccttcgacggcaacaagtggaacttcaagaagatggtgagctacaaggagatgctggacaccgtgagacagcagtggcccgagctggagaaggtgcccgaggaggagagcagcaccgccaaggccttcaagatccccggcttccagggccagatcagcttcatcaccagcatgagcgagcacttctgcggcacctgcaacagactgagaatcaccgccgacggcaacctgaaggtgtgcctgttcggcaacagcgaggtgagcctgagagaccacctgagagccggcgccagcgagcaggagctgctgagaatcatcggcgccgccgtgggcagaaagaagagacagcacgccggcatgttcagcatcagccagatgaagaacagacccatgatcctgatcggcggctag

SEQ ID NO: 160532 - DNA, 1158 bp, Artificial Sequence
  derived and/or modified sequence
atgtggaagagctggaagctgagaaccgacgtgagagtgagagagggcgccggcggcagcccctgcgccagcagccagcccggcagcagaggcccctgcttcctgcccggcctgagcagccaggaggtgagcagaagaagacagttcctgagagagcacgccgcccccttcagcgccttcctgaccgacagcttcggcagacagcacagctacctgagaatcagcctgaccgagaagtgcaacctgagatgccagtactgcatgcccgaggagggcgtgcccctgacccccaaggccaacctgctgaccaccgaggagatcctgaccctggccagactgttcgtgaaggagggcatcgacaagatcagactgaccggcggcgagcccctgatcagacccgacgtggtggacatcgtggcccagctgcagagactggagggcctgagaaccatcggcgtgaccaccaacggcatcaacctggccagactgctgccccagctgcagaaggccggcctgagcgccatcaacatcagcctggacaccctggtgcccgccaagttcgagttcatcgtgagaagaaagggcttccacaaggtgatggagggcatccacaaggccatcgagctgggctacaaccccgtgaaggtgaactgcgtggtgatgagaggcctgaacgaggacgagctgctggacttcgccgccctgaccgagggcctgcccctggacgtgagattcatcgagtacatgcccttcgacggcaacaagtggaacttcaagaagatggtgagctacaaggagatgctggacaccgtgagacagcagtggcccgagctggagaaggtgcccgaggaggagagcagcaccgccaaggccttcaagatccccggcttccagggccagatcagcttcatcaccagcatgagcgagcacttctgcggcacctgcaacagactgagaatcaccgccgacggcaacctgaaggtgtgcctgttcggcaacagcgaggtgagcctgagagaccacctgagagccggcgccagcgagcaggagctgctgagaatcatcggcgccgccgtgggcagaaagaagagacagcacgccggcatgttcagcatcagccagatgaagaacagacccatgatcctgatcggcggctag

SEQ ID NO: 160533 - protein, 269 aa, Artificial Sequence
  derived and/or modified sequence
MERLVIRMPFSHLSTYSLVWVMAAVVLCTAQVQVVTQDEREQLYTPASLKCSLQNAQEALIVTWQKKKAVSPENMVTFSENHGVVIQPAYKDKINITQLGLQNSTITFWNITLEDEGCYMCLFNTFGFGKISGTACLTVYVQPIVSLHYKFSEDHLNITCSATARPAPMVFWKVPRSGIENSTVTLSHPNGTTSVTSILHIKDPKNQVGKEVICQVLHLGTVTDFKQTVNKGYWFSVPLLLSIVSLVILLVLISILLYWKRHRNQDREP

SEQ ID NO: 160534 - DNA, 810 bp, Artificial Sequence
  derived and/or modified sequence
atggagagactggtgatcagaatgcccttcagccacctgagcacctacagcctggtgtgggtgatggccgccgtggtgctgtgcaccgcccaggtgcaggtggtgacccaggacgagagagagcagctgtacacccccgccagcctgaagtgcagcctgcagaacgcccaggaggccctgatcgtgacctggcagaagaagaaggccgtgagccccgagaacatggtgaccttcagcgagaaccacggcgtggtgatccagcccgcctacaaggacaagatcaacatcacccagctgggcctgcagaacagcaccatcaccttctggaacatcaccctggaggacgagggctgctacatgtgcctgttcaacaccttcggcttcggcaagatcagcggcaccgcctgcctgaccgtgtacgtgcagcccatcgtgagcctgcactacaagttcagcgaggaccacctgaacatcacctgcagcgccaccgccagacccgcccccatggtgttctggaaggtgcccagaagcggcatcgagaacagcaccgtgaccctgagccaccccaacggcaccaccagcgtgaccagcatcctgcacatcaaggaccccaagaaccaggtgggcaaggaggtgatctgccaggtgctgcacctgggcaccgtgaccgacttcaagcagaccgtgaacaagggctactggttcagcgtgcccctgctgctgagcatcgtgagcctggtgatcctgctggtgctgatcagcatcctgctgtactggaagagacacagaaaccaggacagagagccctag

SEQ ID NO: 160535 - DNA, 810 bp, Artificial Sequence
  derived and/or modified sequence
atggaaaggctggtcatcagaatgcctttctcccacctgagtacctactccctggtgtgggtcatggccgcagtggtactatgcacagcacaggtgcaggtagtcactcaagacgagcgggagcagttgtacaccccagcttctcttaagtgcagcctgcagaacgcccaggaagcgctgatcgtgacatggcagaagaagaaggccgttagccccgagaacatggttaccttttctgaaaaccatggcgtggttatacaaccagcatataaggataaaatcaacataacccagctgggcctacagaactcaaccatcaccttctggaatattactctggaggatgagggatgctatatgtgcctattcaatacctttgggttcggtaagatttccgggacagcctgtctcaccgtctatgtgcaacccattgtgagcctccattacaaattttctgaggatcatctgaacattacatgctcagcgaccgcccgccctgcacccatggttttctggaaggtgccccggtccggtatagagaatagcaccgtgaccctttcacacccaaatggaacaacatcagtaacctctatcctacatattaaggatcccaagaatcaggttgggaaagaagtgatctgtcaggtcttgcacctgggcacagtcactgactttaaacagaccgttaataagggctattggttttcagttccgctgttactcagtatcgtttcccttgtgatcctgttagtcctgatttcaatactgctctactggaagagacacaggaaccaggatagagagccttag

SEQ ID NO: 160536 - DNA, 810 bp, Artificial Sequence
  derived and/or modified sequence
atggagcggctggtgatccgcatgcccttcagccacctgagcacctacagcctggtgtgggtgatggctgctgtggtgctgtgcacagcccaggtgcaggtggtgacccaggatgagcgggagcagctgtacaccccagccagcctgaagtgcagcctgcagaatgcccaggaggccctgattgtgacctggcagaagaagaaggctgtgtccccagagaacatggtgaccttcagcgagaaccacggcgtggtgatccagcctgcctacaaggacaagatcaacatcacccagctgggcctgcagaacagcaccatcaccttctggaacatcaccctggaggatgagggctgctacatgtgcctcttcaacaccttcggctttgggaagatcagcggcacagcctgcctgactgtgtatgtgcagcccatcgtgtccctgcactacaagttcagcgaggaccacctgaacatcacctgcagcgccacagcccggcctgcccccatggtgttctggaaggtgcccaggtctggaattgagaacagcacagtgaccctgagccaccccaacggcaccacctctgtgaccagcatcctgcacatcaaggaccccaagaaccaggtgggcaaggaggtgatctgccaggtgctgcacctgggcaccgtgacagacttcaagcagacagtgaacaagggctactggttctctgtgcccctgctgctgagcatcgtgtccctggtgatcctgctggtgctgatcagcatcctgctgtactggaagaggcacaggaaccaggaccgggagccctag

SEQ ID NO: 160537 - DNA, 810 bp, Artificial Sequence
  derived and/or modified sequence
atggagcggctggtgatccggatgcccttcagccacctgagcacctactccctcgtgtgggtgatggctgccgttgttctgtgcacagcacaggtgcaggttgtgactcaggacgagagagaacagctttatacgccagcttctctgaaatgtagtcttcaaaatgcacaggaagctctgatcgttacctggcagaaaaagaaagctgtgtctccagagaatatggtgaccttcagtgagaatcacggcgtcgtcattcagcccgcctataaggataaaatcaatatcactcagctggggctgcagaatagtactattacgttctggaatatcaccctggaagacgaggggtgttacatgtgtctcttcaacacattcgggttcggcaagatctccggaactgcgtgcctcactgtgtacgtgcagccaatcgtttccttgcactataagttcagcgaggatcacctgaacattacctgttccgccaccgcaagaccggcaccaatggtcttttggaaagttccaagaagcggtattgagaacagcactgtgactctttctcaccccaacggtactacttctgtgacatcaattctgcatatcaaagatcctaaaaaccaagtggggaaagaagtgatttgccaggtcctgcacctcggtaccgttactgactttaagcaaactgtgaacaaagggtattggtttagcgtgccgttgctgctgtccattgtgtcactggtgattcttctggtactgatttctatacttttgtactggaagcgtcacagaaaccaggaccgcgaaccatag

SEQ ID NO: 160538 - DNA, 810 bp, Artificial Sequence
  derived and/or modified sequence
atggagcgcctggtgattcggatgcccttttcacacctgtcgacctattccctagtgtgggtgatggctgcggtcgtgctttgcacagcacaggttcaggtggtaacccaggatgagcgagagcagctttacacgcctgccagccttaagtgctccctgcagaacgcccaggaagcgttaatagtaacatggcagaaaaagaaggctgtctccccagagaatatggtcaccttttccgaaaatcatggtgtggtgatccagcctgcatataaggacaaaataaatatcactcagttgggtctgcagaattccacaattactttctggaatattacgttggaagacgaaggatgctatatgtgcttgttcaacaccttcgggtttgggaagattagcgggactgcttgtctgaccgtctatgttcaaccaatcgtgtccttgcactacaagtttagcgaggatcacttgaacatcacgtgcagcgcgactgcacggcctgctcccatggttttctggaaagtgccccgatccggcatagaaaattccaccgttaccctgagtcacccaaacggaacaacctccgtgacctcgatcctgcacataaaggacccaaagaaccaggtgggcaaggaagtcatctgtcaggtgttgcatctggggactgtgactgactttaagcaaaccgttaataaggggtactggttcagcgtcccccttctgttgtctatcgtctccttggttatattgctagtcctgatcagcatcttactttattggaaaaggcatcggaaccaagatagagaaccgtag

SEQ ID NO: 160539 - DNA, 2129 bp, Artificial Sequence
  derived and/or modified sequence
agagctccaggcgcacatccgcagtcagccacctcgcgcgcgcctccaggagcaaggatggagaggctggtgatcaggatgcccttctctcatctgtctacctacagcctggtttgggtcatggcagcagtggtgctgtgcacagcacaagtgcaagtggtgacccaggatgaaagagagcagctgtacacacctgcttccttaaaatgctctctgcaaaatgcccaggaagccctcattgtgacatggcagaaaaagaaagctgtaagcccagaaaacatggtcaccttcagcgagaaccatggggtggtgatccagcctgcctataaggacaagataaacattacccagctgggactccaaaactcaaccatcaccttctggaatatcaccctggaggatgaagggtgttacatgtgtctcttcaatacctttggttttgggaagatctcaggaacggcctgcctcaccgtctatgtacagcccatagtatcccttcactacaaattctctgaagaccacctaaatatcacttgctctgccactgcccgcccagcccccatggtcttctggaaggtccctcggtcagggattgaaaatagtacagtgactctgtctcacccaaatgggaccacgtctgttaccagcatcctccatatcaaagaccctaagaatcaggtggggaaggaggtgatctgccaggtgctgcacctggggactgtgaccgactttaagcaaaccgtcaacaaaggctattggttttcagttccgctattgctaagcattgtttccctggtaattcttctcgtcctaatctcaatcttactgtactggaaacgtcaccggaatcaggaccgagagccctaaataagtcacacagcaccctgaaagtgattccctggtctacttgaatttgacacaagagaaaagcaggaggaaaaggggccattctccaaaggacctgaaagagcaaaagaggtgggagcgaaagccttaaggatcccacgactttttactgccatctgagctactcagtgtttgaatcccaagaggaagtcagtttacctctcaggtctgttgtaggacttgattttgtaaagcaatgccatgttatgtggttgaaagggcactggacttagttagtatcaggagcactgagctcacagactgacttgggctcctactggtggggacctctgttagtcactttacctcatccaaagtataaaggaattggaccaaataatttaccacatagctctaaaacttaatttaaaatgtaattccagaaaaaaaaagggaataagcaaagggggaagaattgaaagagagagagaagaaagaatacagagagcttaccttttgcctttctgttgatgttacatctcttcttcctatgttcttaggtctatgagtctgtttccccatcatttggtatctagtccagttcctgcttactgctttgctaatagctggccttgctagaatccttggtttcactgctgttcttcatgtgcttctatgagatttactccaacacaaataggactgaatttattgtgaagtaacattggcaatcttaacttattcatttaacttatttttatagctagataaatattgttagtcttagacaatagctcacattttttgagaagcatgccctccctgtccatttgtcttataacatgacccagccctattttacgtcattctaaattcagcctcatataatgaaaatacattatgaaaacagatgtttaggagatttcctgtatagcagtcagccaattcatatgctttgtctctgctggcttctttttccatgcgttaacttttcccaatagcagaggaggcaaatatgagcatacaatccctttgttctaaagatattgttccagctagtggaatgatgttgaatctttaataaccataattagttgctttttcagtatcttctgctttgtctgtgtctatccagtggcctaggaattaaagtgtaagttgttttcgctgttaaattggatatttatatatatatatagcaagattttcatgtgttatttaattctgtattgtttcttatatttgtagtaaaatattgaacaattaaaagtgttgactccaaa

SEQ ID NO: 160540 - protein, 61 aa, Artificial Sequence
  derived and/or modified sequence
MDPNCSCATGGSCTCTGSCKCKECKCTSCKKSCCSCCPMSCAKCAQGCICKGASEKCSCCA

SEQ ID NO: 160541 - DNA, 186 bp, Artificial Sequence
  derived and/or modified sequence
atggaccctaactgttcctgcgccaccggagggagctgtacctgcaccgggtcgtgcaaatgcaaggaatgcaaatgcacctcctgcaaaaagtcatgttgtagctgttgtcccatgtcttgcgcgaaatgtgcacaagggtgcatttgcaaaggcgcgagcgagaagtgttcttgttgcgcatag

SEQ ID NO: 160542 - DNA, 186 bp, Artificial Sequence
  derived and/or modified sequence
atggatccaaattgtagctgtgaggccgggggatcatgtgcatgcgcagggtcatgtaaatgcaagaaatgcaaatgtaccagttgtaaaaagtcctgctgtagctgctgtcccttggggtgcgccaaatgtgcccaaggatgcatttgcaagggtgcatccgagaagtgctcatgttgcgcttag

SEQ ID NO: 160543 - DNA, 186 bp, Artificial Sequence
  derived and/or modified sequence
atggaccccaactgcagctgtgccactggaggcagctgcacctgcaccggcagctgcaagtgcaaggagtgcaagtgcaccagctgcaagaagagctgctgcagctgctgccccatgagctgtgccaagtgtgcccagggctgcatctgcaagggggccagcgagaagtgcagctgctgtgcctag

SEQ ID NO: 160544 - DNA, 186 bp, Artificial Sequence
  derived and/or modified sequence
atggaccccaactgcagctgtgaggccggcggcagctgtgcctgtgccggcagctgcaagtgcaagaagtgcaagtgcaccagctgcaagaagagctgctgcagctgctgccccctgggctgtgccaagtgtgcccagggctgcatctgcaagggggccagcgagaagtgcagctgctgtgcctag

SEQ ID NO: 160545 - DNA, 394 bp, Artificial Sequence
  derived and/or modified sequence
accaagccttccacgtgcgccttatagcctctcaacttcttgcttgggatctccaacctcaccgcggctcgaaatggaccccaactgctcctgcgccactggtggctcctgcacctgcactggctcctgcaaatgcaaagagtgcaaatgcacctcctgcaagaagagctgctgctcctgctgccccatgagctgtgccaagtgtgcccagggctgcatctgcaaaggggcatcagagaagtgcagctgctgtgcctgatgtccggacagccctgctcgaagatatagaaagagtgacctgcacaaacttggaattttttttccatacaaccctgacccatttactgtattttttttaatgaaatatgtgaatgataataaaagttgctgactt

SEQ ID NO: 160546 - DNA, 397 bp, Artificial Sequence
  derived and/or modified sequence
accacgccctccacgtgttccactgcctcttctcttctcgcttgggaactccagtctcacctcggcttgcaatggaccccaactgctcctgcgaggctggtggctcctgcgcctgcgccggctcctgcaagtgcaaaaagtgcaaatgcacctcctgcaagaagagctgctgctcctgttgccccctgggctgtgccaagtgtgcccagggctgcatctgcaaaggggcgtcagagaagtgcagctgctgtgcctgatgtcgggacagccctgctgtcagatgaaaacagaatgacacgtaaaatccaggattttttttttctacaactccgactcatttgctacattcctttttttctgtgaaatatgtgaataataattaaacacttagacttga

SEQ ID NO: 160547 - DNA, 186 bp, Artificial Sequence
  derived and/or modified sequence
atggaccccaactgcagctgcgccaccggcggcagctgcacctgcaccgggtcctgtaaatgtaaggagtgtaaatgtacgtcatgcaagaaaagctgctgttcctgctgcccaatgtcttgcgctaagtgcgcccagggctgcatctgcaagggcgcaagtgaaaaatgttcctgttgtgcctag

SEQ ID NO: 160548 - DNA, 186 bp, Artificial Sequence
  derived and/or modified sequence
atggaccccaactgcagctgcgaggccggcggcagctgcgcctgcgccggcagctgcaagtgcaagaaatgtaagtgcacgtcttgtaaaaaatcatgttgcagctgctgtcccttaggatgtgcaaagtgtgcccagggatgtatttgtaaaggggcgagcgagaagtgttcatgctgtgcgtag

SEQ ID NO: 160549 - DNA, 186 bp, Artificial Sequence
  derived and/or modified sequence
atggaccctaattgcagttgcgccaccggcggaagttgcacttgcaccggctcttgcaagtgtaaagaatgtaagtgtacatcctgcaaaaagtcttgctgcagctgttgccccatgtcatgcgcaaagtgtgcacagggctgcatatgtaagggcgcatctgagaaatgctcctgttgcgcatag

SEQ ID NO: 160550 - DNA, 186 bp, Artificial Sequence
  derived and/or modified sequence
atggatccaaattgcagttgcgaggctgggggatcctgtgcatgcgcaggtagctgcaagtgcaaaaaatgtaagtgcacatcctgtaaaaagagctgctgcagctgctgtccacttgggtgtgccaaatgcgctcaaggctgcatttgcaaaggagcctccgagaagtgttcatgctgcgcctag

SEQ ID NO: 160551 - DNA, 186 bp, Artificial Sequence
  derived and/or modified sequence
atggaccccaactgcagctgcgccaccggcggcagctgcacctgcaccggcagctgcaagtgcaaggagtgcaagtgcaccagctgcaagaagagctgctgcagctgctgccccatgagctgcgccaagtgcgcccagggctgcatctgcaagggcgccagcgagaagtgcagctgctgcgcctag

SEQ ID NO: 160552 - DNA, 186 bp, Artificial Sequence
  derived and/or modified sequence
atggaccccaactgcagctgcgaggccggcggcagctgcgcctgcgccggcagctgcaagtgcaagaagtgcaagtgcaccagctgcaagaagagctgctgcagctgctgccccctgggctgcgccaagtgcgcccagggctgcatctgcaagggcgccagcgagaagtgcagctgctgcgcctag

SEQ ID NO: 160553 - protein, 61 aa, Artificial Sequence
  derived and/or modified sequence
MDPNCSCTTGGSCACAGSCKCKECKCTSCKKCCCSCCPVGCAKCAQGCVCKGSSEKCRCCA

SEQ ID NO: 160554 - DNA, 408 bp, Artificial Sequence
  derived and/or modified sequence
cgctccaccacgccgtccacgtgcgccttgcggtctctccatttatcgcttgagatctccagccttaccgcggctcgaaatggaccccaactactcctgcaccactggtggctcctgcacgtgcgccggctcctgcaagtgcaaagagtgcaaatgcacctcctgcaagaagagctgctgcttctgctgccccatgggctgagccaagtgtgcccacggctgcatctgcaaagggacgtcggagaagtgcagctgctgtgcctgatgtgggaacagctcttctcccagatgttaatagaacaacctgcacaacctggattttttttttatacaatactgagccatttgctgcatttctttttatattaaatatgtgagtgacaataaaacaattttgacttgaatctt

SEQ ID NO: 160555 - DNA, 186 bp, Artificial Sequence
  derived and/or modified sequence
atggatccaaactgcagttgcaccaccggtgggagctgcgcatgtgctgggagttgtaaatgcaaagaatgtaagtgtacctcctgtaagaagtgctgctgctcttgttgccccgtcggttgtgcgaagtgtgcccaagggtgcgtatgcaaaggtagcagtgagaagtgcaggtgctgtgcgtag

SEQ ID NO: 160556 - DNA, 186 bp, Artificial Sequence
  derived and/or modified sequence
atggaccccaactgcagctgcaccactggaggcagctgtgcctgtgccggcagctgcaagtgcaaggagtgcaagtgcaccagctgcaagaagtgctgctgcagctgctgccctgtgggctgtgccaagtgtgcccagggctgtgtgtgcaagggcagcagcgagaagtgccgctgctgtgcctag

SEQ ID NO: 160557 - DNA, 380 bp, Artificial Sequence
  derived and/or modified sequence
cctgccctgacttctcatatcttgcctaggaactccaggcttgtcttggctccaaatggatcccaactgctcctgcaccacaggtggctcctgtgcctgcgccggctcctgcaagtgcaaagagtgcaaatgtacctcctgcaagaagtgctgctgctcttgctgccccgtgggctgtgccaagtgtgcccagggctgtgtctgcaaaggctcatcagagaagtgccgctgctgtgcctgatgttgggagagccctgctcccagacataaatagagcaaccagtactaacctggatttttttttttaactaccctgaccggtttgctacattcttttttctattcaatatgtgaaagacaataaaacacttttgacttga

SEQ ID NO: 160558 - DNA, 186 bp, Artificial Sequence
  derived and/or modified sequence
atggaccccaactgcagctgcaccaccggcggcagctgcgcctgcgctgggtcttgtaagtgcaaagaatgcaaatgtactagctgcaaaaaatgttgctgctcatgttgccctgtgggctgtgcaaagtgcgcccaggggtgtgtgtgtaagggctcttcagaaaagtgccgatgctgtgcatag

SEQ ID NO: 160559 - DNA, 186 bp, Artificial Sequence
  derived and/or modified sequence
atggaccctaactgcagttgtaccaccgggggaagctgtgcctgcgcaggctcctgtaagtgtaaagaatgcaagtgtactagctgcaagaaatgttgctgttcatgctgtcccgtggggtgtgccaagtgcgcgcagggatgtgtgtgcaaaggcagttctgaaaagtgccggtgctgcgcctag

SEQ ID NO: 160560 - DNA, 186 bp, Artificial Sequence
  derived and/or modified sequence
atggaccccaactgcagctgcaccaccggcggcagctgcgcctgcgccggcagctgcaagtgcaaggagtgcaagtgcaccagctgcaagaagtgctgctgcagctgctgccccgtgggctgcgccaagtgcgcccagggctgcgtgtgcaagggcagcagcgagaagtgcagatgctgcgcctag

SEQ ID NO: 160561 - protein, 61 aa, Artificial Sequence
  derived and/or modified sequence
MDPNCSCAAGVSCTCAGSCKCKECKCTSCKKSCCSCCPVGCSKCAQGCVCKGASEKCSCCD

SEQ ID NO: 160562 - DNA, 186 bp, Artificial Sequence
  derived and/or modified sequence
atggaccccaattgtagctgtgccgctggtgtgtcctgtacctgtgccgggagttgcaagtgtaaagagtgtaagtgtacatcatgtaaaaaatcctgctgcagctgctgtccagtaggctgcagtaagtgtgcacagggctgtgtctgcaaaggggcctctgagaagtgttcctgttgtgactag

SEQ ID NO: 160563 - DNA, 186 bp, Artificial Sequence
  derived and/or modified sequence
atggaccccaactgcagctgtgccgccggcgtgtcctgcacctgtgccggcagctgcaagtgcaaggagtgcaagtgcaccagctgcaagaagagctgctgcagctgctgccctgtgggctgcagcaaatgtgcccagggctgtgtgtgcaagggggccagcgagaagtgcagctgctgtgactag

SEQ ID NO: 160564 - DNA, 440 bp, Artificial Sequence
  derived and/or modified sequence
gccccctcccctgactatcaaagcagcggccggctgttggggtccaccacgccttccacctgccccactgcttcttcgcttctctcttggaaagtccagtctctcctcggcttgcaatggaccccaactgctcctgcgccgctggtgtctcctgcacctgcgctggttcctgcaagtgcaaagagtgcaaatgcacctcctgcaagaagagctgctgctcctgctgccccgtgggctgtagcaagtgtgcccagggctgtgtttgcaaaggggcgtcagagaagtgcagctgctgcgactgatgccaggacaacctttctcccagatgtaaacagagagacatgtacaaacctggattttttttttataccaccttgacccatttgctacattccttttcctgtgaaatatgtgagtgataattaaacactttagacctg

SEQ ID NO: 160565 - DNA, 186 bp, Artificial Sequence
  derived and/or modified sequence
atggaccccaactgcagctgcgccgccggcgtgagctgcacctgcgcaggttcctgtaagtgtaaggagtgcaagtgtacctcttgcaagaaatcctgttgttcctgctgccctgtcggctgcagcaagtgcgctcaaggatgtgtttgcaaaggggccagcgagaagtgtagttgttgtgattag

SEQ ID NO: 160566 - DNA, 186 bp, Artificial Sequence
  derived and/or modified sequence
atggatccaaactgcagctgcgctgccggtgtgagttgtacatgtgcagggagctgcaaatgcaaagaatgcaagtgtacttcttgtaaaaaatcttgttgcagttgttgcccagttggctgtagcaaatgtgctcagggttgcgtttgcaaaggcgctagcgagaaatgctcttgttgcgactag

SEQ ID NO: 160567 - DNA, 186 bp, Artificial Sequence
  derived and/or modified sequence
atggaccccaactgcagctgcgccgccggcgtgagctgcacctgcgccggcagctgcaagtgcaaggagtgcaagtgcaccagctgcaagaagagctgctgcagctgctgccccgtgggctgcagcaagtgcgcccagggctgcgtgtgcaagggcgccagcgagaagtgcagctgctgcgactag

SEQ ID NO: 160568 - protein, 61 aa, Artificial Sequence
  derived and/or modified sequence
MDPNCSCAAGVSCTCASSCKCKECKCTSCKKSCCSCCPVGCAKCAQGCICKGASEKCSCCA

SEQ ID NO: 160569 - DNA, 186 bp, Artificial Sequence
  derived and/or modified sequence
atggaccccaattgttcttgcgccgctggcgtgagttgcacctgtgcctcctcttgcaaatgtaaggaatgcaagtgtacctcctgcaagaaatcctgttgttcctgttgtcctgtagggtgcgccaagtgcgcacaggggtgcatttgcaagggcgctagcgaaaagtgtagctgttgcgcttag

SEQ ID NO: 160570 - DNA, 186 bp, Artificial Sequence
  derived and/or modified sequence
atggaccccaactgcagctgtgccgccggcgtgtcctgcacctgtgccagcagctgcaagtgcaaggagtgcaagtgcaccagctgcaagaagagctgctgcagctgctgccctgtgggctgtgccaagtgtgcccagggctgcatctgcaagggggccagcgagaagtgcagctgctgtgcctag

SEQ ID NO: 160571 - DNA, 402 bp, Artificial Sequence
  derived and/or modified sequence
actccgccttccacgtgcacccactgcctcttcccttctcgcttgggaactctagtctcgcctcgggttgcaatggaccccaactgctcctgtgccgctggtgtctcctgcacctgcgccagctcctgcaagtgcaaagagtgcaaatgcacctcctgcaagaagagctgctgctcctgctgccctgtgggctgtgccaagtgtgcccagggctgcatctgcaaaggggcatcggagaagtgcagctgctgcgcctgatgtcgggacagccctgctcccaagtacaaatagagtgacccgtaaaatccaggattttttgttttttgctacaatcttgacccctttgctacattcctttttttctgtgaaatatgtgaataataattaaacacttagacttga

SEQ ID NO: 160572 - DNA, 186 bp, Artificial Sequence
  derived and/or modified sequence
atggaccccaactgcagctgcgccgccggcgtgagctgcacctgcgccagcagctgcaagtgcaaggaatgcaagtgcacatcctgcaagaagagctgttgctcctgctgtccagtagggtgtgctaagtgcgctcagggctgcatctgcaaaggagcaagcgaaaagtgtagttgttgtgcatag

SEQ ID NO: 160573 - DNA, 186 bp, Artificial Sequence
  derived and/or modified sequence
atggaccctaactgtagttgcgccgctggcgtgagctgcacttgcgcctccagttgcaaatgtaaggagtgcaaatgcactagttgcaagaagtcctgctgttcatgttgcccagtgggctgcgccaaatgcgcgcagggctgcatatgcaagggcgctagtgaaaaatgcagctgttgcgcctag

SEQ ID NO: 160574 - DNA, 186 bp, Artificial Sequence
  derived and/or modified sequence
atggaccccaactgcagctgcgccgccggcgtgagctgcacctgcgccagcagctgcaagtgcaaggagtgcaagtgcaccagctgcaagaagagctgctgcagctgctgccccgtgggctgcgccaagtgcgcccagggctgcatctgcaagggcgccagcgagaagtgcagctgctgcgcctag

SEQ ID NO: 160575 - protein, 61 aa, Artificial Sequence
  derived and/or modified sequence
MDPNCSCEAGGSCACAGSCKCKKCKCTSCKKSCCSCCPLGCAKCAQGCICKGASEKCSCCA

SEQ ID NO: 160576 - protein, 61 aa, Artificial Sequence
  derived and/or modified sequence
MDPNCSCSPVGSCACAGSCKCKECKCTSCKKSCCSCCPVGCAKCAQGCICKGTSDKCSCCA

SEQ ID NO: 160577 - DNA, 186 bp, Artificial Sequence
  derived and/or modified sequence
atggaccccaattgttcatgttctcccgtaggcagctgcgcctgtgccggctcctgtaaatgcaaggaatgtaaatgtaccagctgtaagaagtcttgttgcagctgctgtccagttgggtgtgccaagtgtgctcaagggtgcatttgcaagggcacatcagacaaatgctcctgctgtgcctag

SEQ ID NO: 160578 - DNA, 186 bp, Artificial Sequence
  derived and/or modified sequence
atggaccccaactgcagctgcagccctgtgggcagctgtgcctgtgccggcagctgcaagtgcaaggagtgcaagtgcaccagctgcaagaagagctgctgcagctgctgccctgtgggctgtgccaagtgtgcccagggctgcatctgcaagggcaccagtgacaagtgcagctgctgtgcctag

SEQ ID NO: 160579 - DNA, 450 bp, Artificial Sequence
  derived and/or modified sequence
ggccctcttcccggactataaagagagccgccggcttctgggctccaccacgcttttcatctgtcccgctgcgtgttttcctcttgatcgggaactcctgcttctccttgcctcgaaatggaccccaactgctcctgctcgcctgttggctcctgtgcctgtgccggctcctgcaaatgcaaagagtgcaaatgcacctcctgcaagaagagctgctgctcctgctgccctgtgggctgtgccaagtgtgcccagggctgcatctgcaaagggacgtcagacaagtgcagctgctgtgcctgatgccaggacagctgtgctctcagatgtaaatagagcaacctatataaacctggattttttttttttttttttttgtacaaccctgacccgtttgctacatctttttttctatgaaatatgtgaatggcaataaattcatctagacta

SEQ ID NO: 160580 - DNA, 186 bp, Artificial Sequence
  derived and/or modified sequence
atggaccccaactgcagctgcagccccgtgggcagctgcgcctgcgcaggaagctgtaaatgcaaagaatgcaaatgtacgagctgtaaaaaaagttgctgctcttgctgtcccgtaggatgcgccaaatgtgcccaggggtgtatatgcaaggggactagtgacaagtgttcctgttgtgcttag

SEQ ID NO: 160581 - DNA, 186 bp, Artificial Sequence
  derived and/or modified sequence
atggatccgaactgttcatgcagtcccgtgggttcttgcgcttgcgcgggatcttgtaagtgcaaagagtgcaagtgtactagttgtaagaaaagctgctgcagttgctgccctgtcggatgcgccaaatgcgcccaaggatgtatttgtaaaggaacatccgacaaatgttcatgctgcgcatag

SEQ ID NO: 160582 - DNA, 186 bp, Artificial Sequence
  derived and/or modified sequence
atggaccccaactgcagctgcagccccgtgggcagctgcgcctgcgccggcagctgcaagtgcaaggagtgcaagtgcaccagctgcaagaagagctgctgcagctgctgccccgtgggctgcgccaagtgcgcccagggctgcatctgcaagggcaccagcgacaagtgcagctgctgcgcctag

SEQ ID NO: 160583 - protein, 50 aa, Artificial Sequence
  derived and/or modified sequence
SCTYASFCKCKEYKCTSCKKNCCSCYPVGCAKCAQGCICKGASDKCSCCA

SEQ ID NO: 160584 - protein, 61 aa, Artificial Sequence
  derived and/or modified sequence
MDPNCSCAAGDSCTCAGSCKCKECKCTSCKKSCCSCCPVGCAKCAQGCICKGASDKCSCCA

SEQ ID NO: 160585 - DNA, 153 bp, Artificial Sequence
  derived and/or modified sequence
agctgcacctacgccagcttctgcaagtgcaaggagtacaagtgcaccagctgcaagaagaactgctgcagctgctaccccgtgggctgcgccaagtgcgcccagggctgcatctgcaagggcgccagcgacaagtgcagctgctgcgcctag

SEQ ID NO: 160586 - DNA, 153 bp, Artificial Sequence
  derived and/or modified sequence
tcatgcacctacgcatctttctgcaagtgtaaggaatacaagtgtacctcttgcaaaaagaattgttgctcctgttaccctgtaggctgcgctaaatgcgctcaggggtgtatctgcaagggcgcttccgacaaatgttcctgctgtgcatag

SEQ ID NO: 160587 - DNA, 153 bp, Artificial Sequence
  derived and/or modified sequence
agctgcacctacgccagcttctgcaagtgcaaggagtacaagtgcaccagctgcaagaagaactgctgcagctgctaccctgtgggctgtgccaagtgtgcccagggctgcatctgcaagggggccagtgacaagtgcagctgctgtgcctag

SEQ ID NO: 160588 - DNA, 153 bp, Artificial Sequence
  derived and/or modified sequence
agctgcacctacgccagcttctgcaagtgcaaggagtacaagtgcactagttgcaagaagaactgttgtagttgctacccggtgggttgtgcgaaatgcgcccaaggctgtatctgtaagggcgcgagcgacaaatgttcttgttgcgcttag

SEQ ID NO: 160589 - DNA, 153 bp, Artificial Sequence
  derived and/or modified sequence
tcctgcacttatgccagcttctgcaaatgcaaagagtacaaatgcacctcttgcaagaagaactgctgctcctgctaccctgtgggctgtgccaagtgtgcccaaggctgcatttgcaaaggggcatcagataagtgcagctgctgtgcctga

SEQ ID NO: 160590 - DNA, 153 bp, Artificial Sequence
  derived and/or modified sequence
agctgcacatacgcttccttttgtaagtgcaaggagtacaagtgcacctcttgtaaaaagaattgttgtagctgctatcccgtcggttgcgctaagtgcgcccagggctgtatctgcaaaggagctagcgacaagtgttcatgctgtgcttag

SEQ ID NO: 160591 - DNA, 186 bp, Artificial Sequence
  derived and/or modified sequence
atggatcccaattgttcttgcgcagccggcgattcttgtacctgcgctggtagctgcaagtgcaaagaatgcaagtgtaccagttgcaaaaagtcctgctgctcctgttgtcccgtgggctgtgctaagtgcgctcaaggctgcatctgcaagggtgcctctgacaagtgctcttgctgcgcttag

SEQ ID NO: 160592 - DNA, 186 bp, Artificial Sequence
  derived and/or modified sequence
atggaccccaactgcagctgtgccgccggggacagctgcacctgtgccggcagctgcaagtgcaaggagtgcaagtgcaccagctgcaagaagagctgctgcagctgctgccctgtgggctgtgccaagtgtgcccagggctgcatctgcaagggggccagtgacaagtgcagctgctgtgcctag

SEQ ID NO: 160593 - DNA, 786 bp, Artificial Sequence
  derived and/or modified sequence
aagcagcattcccaagtcccgctttcacccgcgcgctaacggctcaggttcgagtacaggacaggagggaggggagctgtgcacacggcggaggcgcacggcgtgggcacccagcacccggtacactgtgtcctcccgctgcacccagccccttccgcgccgaggcgtccccgaggcgcaagtgggccgccttcagggaactgaccgcccgcggcccgtgtgcagagccgggtgcgcccggcccagtgcgcgcggccgggtgtttcgcctggagccgcaagtgactcagcgcggggcgtgtgcaggcagcgcccggccggggcggggcttttgcactcgtcccggctctttctagctataaacactgcttgccgcgctgcactccaccacgcctcctccaagtcccagcgaacccgcgtgcaacctgtcccgactctagccgcctcttcagctcgccatggatcccaactgctcctgcgccgccggtgactcctgcacctgcgccggctcctgcaaatgcaaagagtgcaaatgcacctcctgcaagaaaagctgctgctcctgctgccctgtgggctgtgccaagtgtgcccagggctgcatctgcaaaggggcgtcggacaagtgcagctgctgcgcctgatgctgggacagccccgctcccagatgtaaagaacgcgacttccacaaacctggattttttatgtacaaccctgaccgtgaccgtttgctatattcctttttctatgaaataatgtgaatgataataaaacagctttgacttga

SEQ ID NO: 160594 - DNA, 186 bp, Artificial Sequence
  derived and/or modified sequence
atggaccccaactgcagctgcgccgccggcgacagctgcacctgcgccggttcatgtaaatgcaaggagtgtaaatgcacaagttgcaaaaaatcctgctgctcatgctgcccagtggggtgtgccaagtgcgcacagggatgcatctgtaagggtgctagcgataagtgcagctgctgcgcatag

SEQ ID NO: 160595 - DNA, 186 bp, Artificial Sequence
  derived and/or modified sequence
atggaccccaattgcagctgcgcagctggagacagttgcacgtgcgctgggtcttgcaagtgtaaggaatgcaagtgtacatcttgtaagaaatcttgttgtagctgctgtcctgtgggatgtgctaagtgcgcccagggatgcatctgcaagggcgcttccgataaatgttcatgttgcgcttag

SEQ ID NO: 160596 - DNA, 186 bp, Artificial Sequence
  derived and/or modified sequence
atggaccccaactgcagctgcgccgccggcgacagctgcacctgcgccggcagctgcaagtgcaaggagtgcaagtgcaccagctgcaagaagagctgctgcagctgctgccccgtgggctgcgccaagtgcgcccagggctgcatctgcaagggcgccagcgacaagtgcagctgctgcgcctag

SEQ ID NO: 160597 - protein, 68 aa, Artificial Sequence
  derived and/or modified sequence
MDPETCPCPSGGSCTCADSCKCEGCKCTSCKKSCCSCCPAECEKCAKDCVCKGGEAAEAEAEKCSCCQ

SEQ ID NO: 160598 - DNA, 207 bp, Artificial Sequence
  derived and/or modified sequence
atggatccagagacctgtccctgcccttccgggggatcatgcacctgtgccgacagttgtaaatgtgagggctgcaagtgtaccagctgcaaaaagtcctgctgttcatgctgcccagccgagtgcgagaagtgtgcgaaggactgtgtttgcaaaggtggcgaagcggctgaagcggaagccgaaaagtgtagttgctgtcaatag

SEQ ID NO: 160599 - DNA, 207 bp, Artificial Sequence
  derived and/or modified sequence
atggaccctgagacctgcccctgccccagcggcggcagctgcacctgtgccgacagctgcaagtgtgagggctgcaagtgcaccagctgcaagaagagctgctgcagctgctgcccagcagaatgtgagaagtgtgccaaggactgtgtgtgcaagggcggggaggccgctgaggccgaggccgagaagtgcagctgctgccagtag

SEQ ID NO: 160600 - DNA, 665 bp, Artificial Sequence
  derived and/or modified sequence
gcgcgcacagcggcggcgagtgggtcgtgcacgcggatgcggggtgggagtgggggcgcacgcgcgggcgtgggcgagcgggccccggcagtgcacacacacggcaggggcgggcgacagatgcagtgcgtgcgccggagcccaagcgcacaaacggaaagagcgggcgcggtgcgcaggggcgggcgcccagcgggcttggcatgcgcgcccccgcccgaggctataaaagcatcgccacctgctgccactagccaagccgcgcgtccagttgcttggagaagcccgttcaccgcctccagctgctgctctcctcgacatggaccctgagacctgcccctgcccttctggtggctcctgcacctgcgcggactcctgcaagtgcgagggatgcaaatgcacctcctgcaagaagagctgctgctcctgctgccctgcggagtgtgagaagtgtgccaaggactgtgtgtgcaaaggcggagaggcagctgaggcagaagcagagaagtgcagctgctgccagtgagaaggcacccctccgtgtggagcacgtggagatagtgccaggtggctcagtgccacctatgcctgtggtgaagtgtggctggtgtccccttcccctgctgaccttggaggaatgacaataaatcccatgaacagcatga

SEQ ID NO: 160601 - DNA, 207 bp, Artificial Sequence
  derived and/or modified sequence
atggaccccgagacctgcccctgccccagcggcggcagctgcacctgtgcggatagttgtaagtgtgagggttgtaagtgcacaagttgcaagaaaagttgctgcagttgttgccctgccgaatgcgaaaaatgcgctaaggactgtgtatgtaaagggggagaggctgcagaagccgaggccgagaaatgcagctgctgccagtag

SEQ ID NO: 160602 - DNA, 207 bp, Artificial Sequence
  derived and/or modified sequence
atggaccccgaaacatgtccttgcccatccggaggtagctgcacctgtgctgacagctgtaagtgcgagggatgtaagtgcacttcatgcaaaaaatcctgctgttcatgctgtccagctgaatgtgagaaatgtgccaaagattgcgtctgcaagggcggtgaggccgcagaagctgaggccgaaaaatgtagttgctgccagtag

SEQ ID NO: 160603 - DNA, 207 bp, Artificial Sequence
  derived and/or modified sequence
atggaccccgagacctgcccctgccccagcggcggcagctgcacctgcgccgacagctgcaagtgcgagggctgcaagtgcaccagctgcaagaagagctgctgcagctgctgccccgccgagtgcgagaagtgcgccaaggactgcgtgtgcaagggcggcgaggccgccgaggccgaggccgagaagtgcagctgctgccagtag

SEQ ID NO: 160604 - protein, 991 aa, Artificial Sequence
  derived and/or modified sequence
MRHRVCRGRSGQGRRRSSVIPWPVPKHVGWVVLLGCGGSGTSILVVSIVGSGLIKAMAPAEILNGKEISAQIRARLKNQVTQLKEQVPGFTPRLAILQVGNRDDSNLYINVKLKAAEEIGIKATHIKLPRTTTESEVMKYITSLNEDSTVHGFLVQLPLDSENSINTEEVINAIAPEKDVDGLTSINAGKLARGDLNDCFIPCTPKGCLELIKETGVPIAGRHAVVVGRSKIVGAPMHDLLLWNNATVTTCHSKTAHLDEEVNKGDILVVATGQPEMVKGEWIKPGAIVIDCGINYVPDDKKPNGRKVVGDVAYDEAKERASFITPVPGGVGPMTVAMLMQSTVESAKRFLEKFKPGKWMIQYNNLNLKTPVPSDIDISRSCKPKPIGKLAREIGLLSEEVELYGETKAKVLLSALERLKHRPDGKYVVVTGITPTPLGEGKSTTTIGLVQALGAHLYQNVFACVRQPSQGPTFGIKGGAAGGGYSQVIPMEEFNLHLTGDIHAITAANNLVAAAIDARIFHELTQTDKALFNRLVPSVNGVRRFSDIQIRRLKRLGIEKTDPTTLTDEEINRFARLDIDPETITWQRVLDTNDRFLRKITIGQAPTEKGHTRTAQFDISVASEIMAVLALTTSLEDMRERLGKMVVASSKKGEPVSAEDLGVSGALTVLMKDAIKPNLMQTLEGTPVFVHAGPFANIAHGNSSIIADRIALKLVGPEGFVVTEAGFGADIGMEKFFNIKCRYSGLCPHVVVLVATVRALKMHGGGPTVTAGLPLPKAYIQENLELVEKGFSNLKKQIENARMFGIPVVVAVNAFKTDTESELDLISRLSREHGAFDAVKCTHWAEGGKGALALAQAVQRAAQAPSSFQLLYDLKLPVEDKIRIIAQKIYGADDIELLPEAQHKAEVYTKQGFGNLPICMAKTHLSLSHNPEQKGVPTGFILPIRDIRASVGAGFLYPLVGTMSTMPGLPTRPCFYDIDLDPETEQVNGLF

SEQ ID NO: 160605 - protein, 935 aa, Artificial Sequence [sequence omitted]

SEQ ID NO: 160606 - DNA, 2808 bp, Artificial Sequence
  derived and/or modified sequence
atggcccccgccgagatcctgaacggcaaggagatcagcgcccagatcagagccagactgaagaaccaggtgacccagctgaaggagcaggtgcccggcttcacccccagactggccatcctgcaggtgggcaacagagacgacagcaacctgtacatcaacgtgaagctgaaggccgccgaggagatcggcatcaaggccacccacatcaagctgcccagaaccaccaccgagagcgaggtgatgaagtacatcaccagcctgaacgaggacagcaccgtgcacggcttcctggtgcagctgcccctggacagcgagaacagcatcaacaccgaggaggtgatcaacgccatcgcccccgagaaggacgtggacggcctgaccagcatcaacgccggcaagctggccagaggcgacctgaacgactgcttcatcccctgcacccccaagggctgcctggagctgatcaaggagaccggcgtgcccatcgccggcagacacgccgtggtggtgggcagaagcaagatcgtgggcgcccccatgcacgacctgctgctgtggaacaacgccaccgtgaccacctgccacagcaagaccgcccacctggacgaggaggtgaacaagggcgacatcctggtggtggccaccggccagcccgagatggtgaagggcgagtggatcaagcccggcgccatcgtgatcgactgcggcatcaactacgtgcccgacgacaagaagcccaacggcagaaaggtggtgggcgacgtggcctacgacgaggccaaggagagagccagcttcatcacccccgtgcccggcggcgtgggccccatgaccgtggccatgctgatgcagagcaccgtggagagcgccaagagattcctggagaagttcaagcccggcaagtggatgatccagtacaacaacctgaacctgaagacccccgtgcccagcgacatcgacatcagcagaagctgcaagcccaagcccatcggcaagctggccagagagatcggcctgctgagcgaggaggtggagctgtacggcgagaccaaggccaaggtgctgctgagcgccctggagagactgaagcacagacccgacggcaagtacgtggtggtgaccggcatcacccccacccccctgggcgagggcaagagcaccaccaccatcggcctggtgcaggccctgggcgcccacctgtaccagaacgtgttcgcctgcgtgagacagcccagccagggccccaccttcggcatcaagggcggcgccgccggcggcggctacagccaggtgatccccatggaggagttcaacctgcacctgaccggcgacatccacgccatcaccgccgccaacaacctggtggccgccgccatcgacgccagaatcttccacgagctgacccagaccgacaaggccctgttcaacagactggtgcccagcgtgaacggcgtgagaagattcagcgacatccagatcagaagactgaagagactgggcatcgagaagaccgaccccaccaccctgaccgacgaggagatcaacagattcgccagactggacatcgaccccgagaccatcacctggcagagagtgctggacaccaacgacagattcctgagaaagatcaccatcggccaggcccccaccgagaagggccacaccagaaccgcccagttcgacatcagcgtggccagcgagatcatggccgtgctggccctgaccaccagcctggaggacatgagagagagactgggcaagatggtggtggccagcagcaagaagggcgagcccgtgagcgccgaggacctgggcgtgagcggcgccctgaccgtgctgatgaaggacgccatcaagcccaacctgatgcagaccctggagggcacccccgtgttcgtgcacgccggccccttcgccaacatcgcccacggcaacagcagcatcatcgccgacagaatcgccctgaagctggtgggccccgagggcttcgtggtgaccgaggccggcttcggcgccgacatcggcatggagaagttcttcaacatcaagtgcagatacagcggcctgtgcccccacgtggtggtgctggtggccaccgtgagagccctgaagatgcacggcggcggccccaccgtgaccgccggcctgcccctgcccaaggcctacatccaggagaacctggagctggtggagaagggcttcagcaacctgaagaagcagatcgagaacgccagaatgttcggcatccccgtggtggtggccgtgaacgccttcaagaccgacaccgagagcgagctggacctgatcagcagactgagcagagagcacggcgccttcgacgccgtgaagtgcacccactgggccgagggcggcaagggcgccctggccctggcccaggccgtgcagagagccgcccaggcccccagcagcttccagctgctgtacgacctgaagctgcccgtggaggacaagatcagaatcatcgcccagaagatctacggcgccgacgacatcgagctgctgcccgaggcccagcacaaggccgaggtgtacaccaagcagggcttcggcaacctgcccatctgcatggccaagacccacctgagcctgagccacaaccccgagcagaagggcgtgcccaccggcttcatcctgcccatcagagacatcagagccagcgtgggcgccggcttcctgtaccccctggtgggcaccatgagcaccatgcccggcctgcccaccagaccctgcttctacgacatcgacctggaccccgagaccgagcaggtgaacggcctgttctag

SEQ ID NO: 160607 - DNA, 2808 bp, Artificial Sequence
  derived and/or modified sequence
atggcacccgcagagatcttgaatggaaaggaaatcagtgcccaaattcgggcccggctcaagaaccaggttacccagcttaaagaacaggtgcctgggtttacacctaggctggccattcttcaggtaggcaacagggatgattccaacctctatatcaacgtgaagctcaaagctgccgaagaaatcggtattaaggctacgcacatcaaactgccaaggacgaccactgaaagcgaggtgatgaaatacattacttcattaaatgaagactctaccgttcacggcttcttggtacagttgcccctcgactctgagaacagtatcaacacagaggaggtcataaatgccatagctcccgaaaaggacgtggatggactcacaagcatcaacgcgggtaaactagcccgaggggacctgaacgattgttttattccctgcactcccaagggctgcttggagcttatcaaggaaaccggtgtaccgattgctggcaggcacgctgtggtcgtgggtcggagcaagatcgtgggcgctcctatgcacgacctgctgctctggaacaatgcgactgttactacctgccattcgaagacagcccacctcgatgaagaagtgaacaagggggacatcctcgtcgtggccaccggacagccggagatggtcaaaggagagtggatcaaacccggagcaatcgtcatagattgcggcatcaattacgtgcctgacgataaaaaacccaacggccgaaaagtcgtgggcgacgtggcctacgatgaagccaaggagagagcaagttttatcacccctgttccagggggagtcggccctatgaccgtcgccatgttaatgcagagcacagttgaaagcgctaaacgttttctggagaagtttaaaccgggcaaatggatgattcagtacaacaacctgaacctcaaaacacccgtcccatcggacatcgatatatcaagaagctgcaaacccaagcccattggcaagctggcaagagaaattggcctcttgtctgaagaggttgagttatatggtgaaactaaagccaaggttctgctttctgctctggagcggctaaaacacaggcctgatggaaagtacgtggtggtgactgggattacccccacaccactcggcgagggaaaatctacaacaacaattggcctcgttcaggccctgggtgcacacctatatcaaaacgtcttcgcatgcgtgagacagccctctcaagggcctacattcggaattaaggggggagccgcgggcggtggttattctcaggtgattccgatggaggagttcaatctgcatttgaccggggatatccatgccattacagctgctaataacctcgtggcagctgcaatcgacgctcgcatctttcacgaattaacccagacagataaagccctctttaaccgcctagtgccatctgtgaacggagtgagacgcttttcagatatccaaatcagaagattgaaaagactgggcattgagaaaactgaccccaccaccttaacggatgaagagataaacagattcgctagactcgatatcgacccggaaaccatcacctggcaacgggttttagacactaatgataggttcctacgcaaaattacaattggacaggccccaaccgagaaaggacataccagaaccgcacaattcgacatatccgtcgctagtgaaattatggctgttttggccctaaccactagcctggaggatatgagggagaggctcgggaagatggtggtagccagcagcaagaaaggagagcctgtctcagctgaagacttgggcgtgtcgggtgccttaactgtgctcatgaaggacgcgattaaaccaaatcttatgcagaccttagagggcactcccgtgttcgtccatgccggccctttcgctaatattgcccacggcaacagctcaatcatagctgacaggattgccctgaaactcgtgggcccagagggcttcgtagtcacagaagccgggtttggtgcagatatcggcatggaaaagttttttaatatcaagtgcaggtatagcggcttatgccctcatgttgtggtcctcgttgctaccgtgcgggcactgaaaatgcacgggggcggccctacggttactgccggtttaccactcccaaaagcttatatccaggagaacctggagctggtcgaaaaaggttttagtaatctgaaaaaacaaatcgagaacgcccggatgtttggcatccccgttgtcgtcgcagttaatgcattcaagactgacacagaatcagagctcgacctgatttcgagactctctcgggaacacggagcattcgatgccgtgaaatgtactcactgggccgagggcggtaaaggggccctggccctggcacaagcagttcagcgcgcagcgcaggccccttcctctttccagctgctttacgatctgaaactgccagtcgaagacaagatccgtatcatagctcagaagatatacggcgcggatgacattgaactgctacctgaggctcagcataaggcagaagtttacacaaagcagggttttggcaaccttcctatctgcatggccaagacccatctgagcttaagtcataacccggaacagaagggtgtgcccaccggctttattctgccgattagagacatcagagcctctgttggcgccggattcctgtacccactggtgggaacaatgagtaccatgcccggtcttcccactcggccctgcttctacgacatcgatctggatcccgagaccgagcaagttaacggactcttttag

SEQ ID NO: 160608 - DNA, 2808 bp, Artificial Sequence
  derived and/or modified sequence
atggccccagctgagatcctgaatggcaaggagatcagcgcccagatccgggcccggctgaagaaccaggtgacccagctgaaggagcaggtgcccggcttcaccccccggctggccatcctgcaggtgggcaacagagatgacagcaacctgtacatcaacgtgaagctgaaggctgctgaggagatcggcatcaaggccacccacatcaagctgcccaggaccaccacagaaagtgaggtgatgaagtacatcaccagcctgaatgaagacagcacagtgcacggcttcctggtgcagctgcccctggacagcgagaacagcatcaacacagaggaggtgatcaatgccatcgcccctgagaaggatgtggatggcctgaccagcatcaatgctgggaagctggcccggggggacctgaatgactgcttcatcccctgcacccccaagggctgcctggagctgatcaaggagactggagtgcccatcgccggcagacatgctgtggtggtgggccgcagcaagatcgtgggcgcccccatgcatgacctgctgctgtggaacaatgccaccgtgaccacctgccacagcaagacagcccacctggatgaggaggtgaacaagggggacatcctggtggtggccaccggccagcctgagatggtgaagggggagtggatcaagccaggggccatcgtcatcgactgtggcatcaactacgtgcctgatgacaagaagcccaacggcaggaaggtggtgggagatgtggcctatgatgaggccaaggagcgggccagcttcatcacccctgtgcctgggggcgtgggccccatgacagtggccatgctgatgcagagcacagtggagagcgccaagcgcttcctggagaagttcaagccaggcaagtggatgatccagtacaacaacctgaacctgaagacccctgtgcccagcgacatcgacatcagccgcagctgcaagcccaagcccatcggcaagctggcccgggagatcggcctgctgtctgaggaggtggagctgtatggagagaccaaggccaaggtgctgctgagcgccctggagcggctgaagcacaggccagatggcaagtatgtggtggtgacaggcatcacccccacccccctgggggagggcaagagcaccaccaccatcggcctggtgcaggccctgggcgcccacctgtaccagaatgtgtttgcctgtgtgcggcagcccagccagggccccaccttcggcatcaagggcggcgctgctgggggcggctacagccaggtgatccccatggaggagttcaacctgcacctgactggagacatccacgccatcacagctgccaacaacctggtggccgccgccattgatgcccgcatcttccacgagctgacccagacagacaaggccctcttcaaccggctggtgcccagcgtgaatggagtgcggcgcttcagtgacatccagatccggcggctgaagaggctgggcatcgagaagacagaccccaccaccctgacagatgaggagatcaacagatttgcccggctggacattgatcctgagaccatcacctggcagagggtgctggacaccaatgaccgcttcctgaggaagatcaccatcggccaggcccccacagagaagggccacaccaggacagcccagtttgacatctctgtggccagcgagatcatggctgtgctggccctgaccaccagcctggaggacatgagggagcggctgggcaagatggtggtggccagcagcaagaagggggagcctgtgtctgctgaggacctgggcgtgtctggggccctgactgtgctgatgaaggatgccatcaagcccaacctgatgcagaccctggagggcacccctgtgtttgtgcacgccggcccctttgccaacatcgcccacggcaacagcagcatcatcgctgaccgcatcgccctgaagctggtgggccctgagggctttgtggtgacagaagctggctttggagctgacatcggcatggagaagttcttcaacatcaagtgccgctacagcggcctgtgcccccacgtggtggtgctggtggccaccgtgcgggccctgaagatgcatggaggcggccccaccgtgacagctggcctgcccctgcccaaggcctacatccaggagaacctggagctggtggagaagggcttcagcaacctgaagaagcagattgaaaatgccaggatgtttggcatccctgtggtggtggccgtgaatgccttcaagacagacacagaaagtgagctggacctgatcagccggctgagccgggagcacggggcctttgatgctgtgaagtgcacccactgggccgagggcggcaaaggagccctggccctggcccaggccgtgcagagagctgcccaggcccccagcagcttccagctgctgtatgacctgaagctgcctgtggaggacaagatccgcatcatcgcccagaagatctacggggctgatgacatcgagctgctgcctgaggcccagcacaaggccgaggtgtacaccaagcagggctttggaaacctgcccatctgcatggccaagacccacctgagcctgagccacaaccctgagcagaagggcgtgcccaccggcttcatcctgcccatccgggacatccgggcctctgtgggcgccggcttcctgtaccccctggtgggcaccatgagcaccatgcctggcctgcccacccggccctgcttctatgacatcgacctggaccctgagacagagcaggtgaatggcctcttctag

SEQ ID NO: 160609 - DNA, 2808 bp, Artificial Sequence
  derived and/or modified sequence
atggcccccgccgagatcctgaacggcaaggagatcagcgcccagattcgggcccggttgaagaaccaggtgacgcagctcaaagagcaggttccgggattcacacctaggctcgctatcctgcaggtcggtaatagggatgattccaatctctatatcaacgtgaaactgaaggcagccgaagagatcggtatcaaagccacccacatcaaattgcccaggaccacaactgagtcagaggtgatgaagtatatcacctctctcaatgaagactctaccgtgcacgggttcctggtgcaattgcctctcgactcagaaaactctatcaatactgaggaagtgataaatgctatagccccagaaaaggatgtggacggtcttacaagtattaacgctggtaaactcgcacgcggcgacctgaatgattgtttcatcccttgcacccctaaaggatgtcttgagcttatcaaggagacgggagtccctattgccggcaggcatgcagtggtcgtcggccgctccaaaatagtaggggccccgatgcatgatctgctcttatggaacaatgcaaccgtgaccacttgtcacagcaaaaccgcgcacctagacgaggaggtgaacaaaggagatattcttgtcgttgccacgggacagcccgagatggtgaagggcgagtggattaaacccggagcgattgttattgattgcgggataaattacgtcccagacgacaagaagccaaatggaaggaaagtggtcggcgacgtggcttatgacgaggccaaggagagagcctccttcataacccctgtgcccggcggcgtaggacctatgacagtcgctatgctaatgcagagtaccgtcgagagcgcaaagagatttctagagaaattcaagcccggcaaatggatgatccaatacaacaatctcaacctaaagacaccagtcccgtcggacatagacatctcccgtagttgcaaaccgaagcccattggcaagctggcacgcgaaattggccttctgtccgaggaggttgagctgtacggagagacaaaagccaaagtactgctttccgcccttgagagattaaagcacaggcctgatggcaaatatgtggtcgtcacaggtattacacctacaccactaggcgaaggtaaatcaacaaccactatcggcctagttcaagccctgggggcccatctttatcagaacgtattcgcctgcgtacggcagccgtctcaggggccaacattcgggattaaaggaggtgccgccggtgggggttacagccaggtgattccgatggaagaatttaatttacatctaacaggtgacatccatgcaataactgcagcgaacaatctagtcgccgcagctatcgacgcacgaattttccacgagctgacgcaaacagataaggcactgtttaaccgcctagtgccatctgttaacggcgtacggcgcttttctgacatccagatccggcgcttgaagaggctgggcatcgagaaaaccgaccccaccacgctaaccgatgaggagattaacagatttgcgagactcgatattgacccggaaaccatcacgtggcaaagggtgctggacacaaatgataggtttctgcgcaagatcacgattggacaagcccctacagaaaaagggcatactagaacggcccagtttgacatctccgttgcctcggagatcatggccgtactggctcttaccactagtttggaagacatgcgggagcgcctggggaagatggtggtggcctcgtcgaagaaaggggagcccgtgagcgctgaggacctcggggtgtccggtgctctgacagtcctaatgaaagacgcgattaagccaaatcttatgcagacgcttgaaggtactccagtctttgtccacgccgggccatttgcaaatatcgcccacggaaacagctcgatcatcgctgatagaattgccctaaagcttgtgggccctgagggcttcgtggtgacggaagccggattcggcgcagacattggcatggagaaattctttaacatcaagtgtcgctattctgggctgtgtccacacgtggtggtgctggttgccactgtgagggcactgaaaatgcacggaggagggcctacagtcaccgccggattgcccctgcctaaggcgtatattcaggaaaatctggaattggtcgagaaaggcttttctaatttgaagaagcagattgaaaatgcacgtatgttcggaatccccgtggtggtcgctgtgaatgccttcaaaacagatactgaatccgagcttgatctcatcagccggttaagcagagagcacggcgcattcgacgctgtgaaatgtacgcattgggccgagggcggcaaaggtgcgctagccctggctcaggctgttcaacgggcggcccaagctccctccagcttccaattgctgtatgatttaaagcttccggtcgaggacaaaattagaattattgcccaaaaaatttacggagcggatgacatcgagctacttcccgaggctcagcacaaggccgaagtctataccaaacagggcttcggtaatttgcccatttgtatggctaaaacacacttatccctcagtcacaacccggagcagaaaggagtccccacaggctttatccttccaatacgggacataagagccagcgtaggagccggcttcttgtaccctctggtgggtactatgtcaactatgccgggcctgcctacaaggccctgtttctatgatatagatcttgacccagaaactgaacaggtgaacggcctgttttag

SEQ ID NO: 160610 - DNA, 3245 bp, Artificial Sequence
  derived and/or modified sequence
cgggtccttccgaactgcgcatgcgccaccgcgtctgcagggggagaagcgggcaggggcgcaggcgcagtagtgtgatcccctggccagtccctaagcacgtgggttgggttgtcctgcttggctgcggagggagtggaacctcgatattggtggtgtccatcgtgggcagcggactaataaaggccatggcgccagcagaaatcctgaacgggaaggagatctccgcgcaaataagggcgagactgaaaaatcaagtcactcagttgaaggagcaagtacctggtttcacaccacgcctggcaatattacaggttggcaacagagatgattccaatctttatataaatgtgaagctgaaggctgctgaagagattgggatcaaagccactcacattaagttaccaagaacaaccacagaatctgaggtgatgaagtacattacatctttgaatgaagactctactgtacatgggttcttagtgcagctacctttagattcagagaattccattaacactgaagaagtgatcaatgctattgcacccgagaaggatgtggatggattgactagcatcaatgctgggaaacttgctagaggtgacctcaatgactgtttcattccttgtacgcctaagggatgcttggaactcatcaaagagacaggggtgccgattgccggaaggcatgctgtggtggttgggcgcagtaaaatagttggggccccgatgcatgacttgcttctgtggaacaatgccacagtgaccacctgccactccaagactgcccatctggatgaggaggtaaataaaggtgacatcctggtggttgcaactggtcagcctgaaatggttaaaggggagtggatcaaacctggggcaatagtcatcgactgtggaatcaattatgtcccagatgataaaaaaccaaatgggagaaaagttgtgggtgatgtggcatacgacgaggccaaagagagggcgagcttcatcactcctgttcctggcggcgtagggcccatgacagttgcaatgctcatgcagagcacagtagagagtgccaagcgtttcctggagaaatttaagccaggaaagtggatgattcagtataacaaccttaacctcaagacacctgttccaagtgacattgatatatcacgatcttgtaaaccgaagcccattggtaagctggctcgagaaattggtctgctgtctgaagaggtagaattatatggtgaaacaaaggccaaagttctgctgtcagcactagaacgcctgaagcaccggcctgatgggaaatacgtggtggtgactggaataactccaacacccctgggagaagggaaaagcacaactacaatcgggctagtgcaagcccttggtgcccatctctaccagaatgtctttgcgtgtgtgcgacagccttctcagggccccacctttggaataaaaggtggcgctgcaggaggcggctactcccaggtcattcctatggaagagtttaatctccacctcacaggtgacatccatgccatcactgcagctaataacctcgttgctgcggccattgatgctcggatatttcatgaactgacccagacagacaaggctctctttaatcgtttggtgccatcagtaaatggagtgagaaggttctctgacatccaaatccgaaggttaaagagactaggcattgaaaagactgaccctaccacactgacagatgaagagataaacagatttgcaagattggacattgatccagaaaccataacttggcaaagagtgttggataccaatgatagattcctgaggaagatcacgattggacaggctccaacggagaagggtcacacacggacggcccagtttgatatctctgtggccagtgaaattatggctgtcctggctctcaccacttctctagaagacatgagagagagactgggcaaaatggtggtggcatccagtaagaaaggagagcccgtcagtgccgaagatctgggggtgagtggtgcactgacagtgcttatgaaggacgcaatcaagcccaatctcatgcagacactggagggcactccagtgtttgtccatgctggcccgtttgccaacatcgcacatggcaattcctccatcattgcagaccggatcgcactcaagcttgttggcccagaagggtttgtagtgacggaagcaggatttggagcagacattggaatggaaaagttttttaacatcaaatgccggtattccggcctctgcccccacgtggtggtgcttgttgccactgtcagggctctcaagatgcacgggggcggccccacggtcactgctggactgcctcttcccaaggcttacatacaggagaacctggagctggttgaaaaaggcttcagtaacttgaagaaacaaattgaaaatgccagaatgtttggaattccagtagtagtggccgtgaatgcattcaagacggatacagagtctgagctggacctcatcagccgcctttccagagaacatggggcttttgatgccgtgaagtgcactcactgggcagaagggggcaagggtgccttagccctggctcaggccgtccagagagcagcacaagcacccagcagcttccagctcctttatgacctcaagctcccagttgaggataaaatcaggatcattgcacagaagatctatggagcagatgacattgaattacttcccgaagctcaacacaaagctgaagtctacacgaagcagggctttgggaatctccccatctgcatggctaaaacacacttgtctttgtctcacaacccagagcaaaaaggtgtccctacaggcttcattctgcccattcgcgacatccgcgccagcgttggggctggttttctgtaccccttagtaggaacgatgagcacaatgcctggactccccacccggccctgtttttatgatattgatttggaccctgaaacagaacaggtgaatggattattctaaacagatcaccatccatcttcaagaagctactttgaaagtctggccagtgtctattcaggcccactgggagttaggaagtataagtaagccaagagaagtcagcccctgcccagaagatctgaaactaatagtaggagtttccccagaagtcattttcagccttaattctcatcatgtataaattaacataaatcatgcatgtctgtttactttagtgacgttccacagaataaaaggaaacaagtttgc

SEQ ID NO: 160611 - DNA, 3448 bp, Artificial Sequence
  derived and/or modified sequence
aattacggccggattccggagtcctttccagctccctcttcggccgggtttcccgccgaatacaaaggcgcactgtgaactggctctttctttccgccaatcatttccgccagccattcatcaccgattttcttcatcttcccctccctcttccgtcccgcagtccccgacctgttagctctcggttagttaagggactcgggtccttccgaactgcgcatgcgccaccgcgtctgcagggggagaagcgggcaggggcgcaggcgcagtagtgtgatcccctggccagtccctaagcacgtgggttgggttgtcctgcttggctgcggagggagtggaacctcgatattggtggtgtccatcgtgggcagcggactaataaaggccatggcgccagcagaaatcctgaacgggaaggagatctccgcgcaaataagggcgagactgaaaaatcaagtcactcagttgaaggagcaagtacctggtttcacaccacgcctggcaatattacaggttggcaacagagatgattccaatctttatataaatgtgaagctgaaggctgctgaagagattgggatcaaagccactcacattaagttaccaagaacaaccacagaatctgaggtgatgaagtacattacatctttgaatgaagactctactgtacatgggttcttagtgcagctacctttagattcagagaattccattaacactgaagaagtgatcaatgctattgcacccgagaaggatgtggatggattgactagcatcaatgctgggaaacttgctagaggtgacctcaatgactgtttcattccttgtacgcctaagggatgcttggaactcatcaaagagacaggggtgccgattgccggaaggcatgctgtggtggttgggcgcagtaaaatagttggggccccgatgcatgacttgcttctgtggaacaatgccacagtgaccacctgccactccaagactgcccatctggatgaggaggtaaataaaggtgacatcctggtggttgcaactggtcagcctgaaatggttaaaggggagtggatcaaacctggggcaatagtcatcgactgtggaatcaattatgtcccagatgataaaaaaccaaatgggagaaaagttgtgggtgatgtggcatacgacgaggccaaagagagggcgagcttcatcactcctgttcctggcggcgtagggcccatgacagttgcaatgctcatgcagagcacagtagagagtgccaagcgtttcctggagaaatttaagccaggaaagtggatgattcagtataacaaccttaacctcaagacacctgttccaagtgacattgatatatcacgatcttgtaaaccgaagcccattggtaagctggctcgagaaattggtctgctgtctgaagaggtagaattatatggtgaaacaaaggccaaagttctgctgtcagcactagaacgcctgaagcaccggcctgatgggaaatacgtggtggtgactggaataactccaacacccctgggagaagggaaaagcacaactacaatcgggctagtgcaagcccttggtgcccatctctaccagaatgtctttgcgtgtgtgcgacagccttctcagggccccacctttggaataaaaggtggcgctgcaggaggcggctactcccaggtcattcctatggaagagtttaatctccacctcacaggtgacatccatgccatcactgcagctaataacctcgttgctgcggccattgatgctcggatatttcatgaactgacccagacagacaaggctctctttaatcgtttggtgccatcagtaaatggagtgagaaggttctctgacatccaaatccgaaggttaaagagactaggcattgaaaagactgaccctaccacactgacagatgaagagataaacagatttgcaagattggacattgatccagaaaccataacttggcaaagagtgttggataccaatgatagattcctgaggaagatcacgattggacaggctccaacggagaagggtcacacacggacggcccagtttgatatctctgtggccagtgaaattatggctgtcctggctctcaccacttctctagaagacatgagagagagactgggcaaaatggtggtggcatccagtaagaaaggagagcccgtcagtgccgaagatctgggggtgagtggtgcactgacagtgcttatgaaggacgcaatcaagcccaatctcatgcagacactggagggcactccagtgtttgtccatgctggcccgtttgccaacatcgcacatggcaattcctccatcattgcagaccggatcgcactcaagcttgttggcccagaagggtttgtagtgacggaagcaggatttggagcagacattggaatggaaaagttttttaacatcaaatgccggtattccggcctctgcccccacgtggtggtgcttgttgccactgtcagggctctcaagatgcacgggggcggccccacggtcactgctggactgcctcttcccaaggcttacatacaggagaacctggagctggttgaaaaaggcttcagtaacttgaagaaacaaattgaaaatgccagaatgtttggaattccagtagtagtggccgtgaatgcattcaagacggatacagagtctgagctggacctcatcagccgcctttccagagaacatggggcttttgatgccgtgaagtgcactcactgggcagaagggggcaagggtgccttagccctggctcaggccgtccagagagcagcacaagcacccagcagcttccagctcctttatgacctcaagctcccagttgaggataaaatcaggatcattgcacagaagatctatggagcagatgacattgaattacttcccgaagctcaacacaaagctgaagtctacacgaagcagggctttgggaatctccccatctgcatggctaaaacacacttgtctttgtctcacaacccagagcaaaaaggtgtccctacaggcttcattctgcccattcgcgacatccgcgccagcgttggggctggttttctgtaccccttagtaggaacgatgagcacaatgcctggactccccacccggccctgtttttatgatattgatttggaccctgaaacagaacaggtgaatggattattctaaacagatcaccatccatcttcaagaagctactttgaaagtctggccagtgtctattcaggcccactgggagttaggaagtataagtaagccaagagaagtcagcccctgcccagaagatctgaaactaatagtaggagtttccccagaagtcattttcagccttaattctcatcatgtataaattaacataaatcatgcatgtctgtttactttagtgacgttccacagaataaaaggaaacaagtttgccatc

SEQ ID NO: 160612 - DNA, 2808 bp, Artificial Sequence
  derived and/or modified sequence
atggcgccagcagagatcctgaatggaaaggagatttcagcgcagatcagggccaggctgaagaatcaagtcacccagctgaaggaacaagtcccgggatttacgcctcggcttgctatactgcaggtaggtaacagggatgacagtaatctatacattaatgtcaaactgaaggctgccgaggagatcggaattaaggccacacacatcaaactacccaggaccacaacagagtccgaggtgatgaagtacatcacatctctgaacgaggattcaacagtgcacggctttctggtccaactcccactggactccgagaacagcatcaatacggaggaagtcattaacgccatcgcacccgaaaaagacgtcgatgggcttacttccatcaacgccggaaagctggccaggggggaccttaacgactgcttcatcccatgtaccccaaaagggtgtctggagctgatcaaggagacaggggtacccattgctggtcggcacgccgtcgtggttggacggagcaaaatagtgggcgcacccatgcatgaccttttgctttggaataacgcaaccgtgacgacctgtcattcgaagaccgcacatctggatgaagaggtaaataagggggatatcctcgtcgtggccacagggcagcccgagatggtgaagggagagtggattaaacctggtgctatcgtgattgactgcgggataaactatgttccggatgataagaaaccaaacggacggaaagtagtcggggacgtcgcctacgacgaagctaaggaaagagcatcttttattacccccgtgccaggaggtgtgggcccaatgacggtagcgatgctgatgcagagcactgtggagagcgccaagcgattcctggagaagtttaagcccggaaagtggatgatacagtacaataacctgaacttaaagacacctgttccttccgatatcgacatttccaggtcatgcaaaccaaagcccattggcaagttggcacgagaaatcggtcttttgagcgaagaggtggaactttacggggaaacgaaggccaaagttctcttaagtgctctggaaagactgaagcaccggcctgacggcaagtatgtggtggtgacgggcattacacctacccccttgggggagggtaaaagcacgacaaccataggactagttcaggcactgggggcacacctctaccaaaatgtctttgcgtgtgtcagacagccaagccaaggccctacattcggaatcaaaggaggcgctgccggtgggggatacagccaggtaattcctatggaggagtttaatctgcatcttactggagacattcacgctatcaccgccgctaataatctcgtcgccgcagcgattgacgcccgaatctttcacgaactgacccaaaccgataaagccctgttcaaccgcttggtgcccagcgtgaacggcgttagaaggttttctgatatccaaatccggagactcaaacgcctggggatcgagaagacagatcctacaaccttaaccgatgaagagattaatcggttcgcacggttggatattgatcccgagaccatcacctggcagcgggtccttgacacgaacgaccgctttctgcgcaaaattaccatcgggcaggcacctacggagaagggacacaccagaactgcgcagttcgatatctctgtggcatctgagatcatggctgtgctggccctcaccacctcactggaggacatgagagagcgtcttggcaaaatggttgtcgctagcagtaaaaagggcgagcctgtgagtgcggaagatcttggcgtttccggggcattaacagtcctgatgaaagatgcgattaagccgaatctcatgcagacactggagggtaccccggtcttcgtgcatgcaggcccattcgcaaacatcgctcatggcaactctagtatcatcgcagataggattgcacttaagctcgtgggacctgaagggtttgttgtcaccgaggccggattcggtgccgatatcgggatggagaagttctttaatataaagtgtcgttactcagggctttgccctcacgtggtcgtgctggtcgcaaccgtgagggccctgaagatgcacggcggtgggccaacagtgaccgctggtcttcctctgcctaaggcatacatccaggagaatctcgagctggtggagaaaggcttcagtaatcttaagaagcagattgagaatgcccgaatgttcggaattcccgtggtggtagcggttaacgcgtttaagaccgataccgaatcagagcttgatctcatctcccggctgtctcgggagcacggggcattcgatgccgtcaaatgtacccattgggccgagggcggtaaaggcgctctggctctggcccaggccgttcagcgggcagctcaagctccaagtagcttccaactcctgtacgatctgaaacttcctgtggaagacaaaattcgcatcattgcccagaagatatacggtgcagatgatatcgagctgctgcctgaagctcaacacaaggcggaagtttatacaaaacagggttttgggaatctccccatctgcatggctaagacccatttatccttgtcacataatccagagcagaaaggcgtgccgaccgggttcatccttcccattcgtgatatccgcgctagcgttggcgctggttttctgtatcctctagtgggcactatgtccacaatgccaggcctgcccacacgcccttgtttttatgacatcgacctggatccagaaacagagcaggtgaatggcctgttctag

SEQ ID NO: 160613 - DNA, 2976 bp, Artificial Sequence
  derived and/or modified sequence
atgcgtcatagagtgtgcagaggtcggtccggtcaaggacggaggagaagctccgtgattccatggcccgtgcctaagcacgtggggtgggtcgtactcctcggctgtggagggagcggtacttccatactggtggtttcaattgttggctctggactgatcaaagctatggctcccgccgagatcctgaatggtaaggaaatctcagctcagatcagagcccggctgaaaaaccaagtgacccaactgaaggagcaggttcccgggtttacgccccgactcgcaatcttgcaggtcggaaatagggacgattccaatctctacatcaatgtgaaactgaaagcggcggaggagataggcatcaaggctactcacattaaacttccacgaacaacaactgagagtgaggtcatgaagtatatcaccagtctcaatgaagactccaccgtgcatggcttcctggttcagctacccctggactcagagaactcaattaatacagaagaggtgatcaatgctatcgccccggaaaaggacgttgacggattgaccagcatcaatgctggcaaattagctcgcggagaccttaacgactgctttatcccctgtacaccaaaaggctgtttggagttgatcaaggaaacaggcgtgcctatcgctgggagacatgctgtagtggtgggtagatccaaaattgtcggggcaccaatgcatgacctgttactgtggaacaatgcaacagtcactacctgccatagcaaaacagcacatctcgacgaggaagtaaataaaggagacattctcgttgtggcgactggacagcctgaaatggtcaaaggagagtggataaaacctggggccatcgttatcgattgtgggatcaactatgtgcctgacgataaaaaacccaatggccggaaggtcgtcggagacgtagcctatgatgaagccaaggaaagggcgtcttttattacccctgttcccggaggcgtgggacctatgactgtggccatgctgatgcagtccacagtggaaagtgcaaaacgctttctggaaaagtttaagcccggcaagtggatgatacagtacaataacctcaacctgaaaacccctgttccgtccgacatcgacatatccaggagctgcaaacccaagcccatcggcaagctggccagggagattggcctgttaagcgaggaagtcgagctgtacggcgagacaaaagcgaaagtgctcctgtccgcccttgagcgcttgaaacatagacctgacggcaaatacgtcgtcgtgacgggaataacccccactccattaggagaggggaagagcacaaccacaatcggcctagtacaagcacttggcgcgcacctatatcagaacgtgtttgcctgcgtgagacagccttctcaaggacccacctttggaatcaaggggggcgccgccggcggaggatatagccaggtgattccaatggaggagttcaatctccatctcacaggtgacatccacgcaataaccgcggccaataacctggttgccgccgccatcgacgccaggatattccacgagctcacccagaccgacaaggcactattcaacagactggtcccaagcgtgaatggggttaggaggttctcagacatccagatcagacggctgaagaggttgggcatcgaaaagacagatcccaccacccttaccgatgaagagatcaatcggttcgcaagactggacatcgatcctgagactattacctggcaaagggtccttgacacaaatgataggtttctgcgtaagattactattggccaagcaccaaccgagaagggccacactagaacagctcaatttgatatcagtgttgccagcgaaatcatggcagtcttagcattgaccacatcacttgaggacatgcgggagaggctgggtaagatggttgtggccagctccaaaaagggggagcctgtgagtgcagaggacttaggcgtctccggcgccctgacagtgctcatgaaggatgcaatcaagccgaacctgatgcagactctggaggggacgcctgtgtttgtgcatgccggaccatttgccaatatagcacacggaaattcctctataatcgccgacaggattgctctgaaactcgtgggaccggagggctttgtagtgactgaggctggttttggagcggacatcggcatggaaaaattttttaacattaagtgccgatattccggcctttgtccccacgttgttgtgctggttgctaccgtcagggccttgaagatgcacggtggcggaccaacagtgactgcgggattgccgctcccaaaggcctacattcaggagaacctggagttagtagagaaaggtttctctaatctgaaaaagcaaatcgagaacgctagaatgttcgggattccggtcgtcgttgcagttaacgccttcaaaactgacaccgaatcggaactggatcttatctcccgactaagtcgggaacatggcgctttcgacgccgtgaagtgcacacattgggctgaaggcgggaaaggtgccctcgcattggcccaggccgtccagagggctgctcaggctccttctagtttccagctgctgtacgatttgaaattaccagtggaggataagatcagaatcattgcccaaaagatttacggcgctgacgatatagagcttctgccagaggctcagcacaaggccgaagtatatacgaagcaaggttttggaaacctgcctatctgcatggccaagacgcacctcagtttatcgcacaatcccgagcagaaaggggtgcccactggcttcatactccccattagagacataagggcctcggttggcgctggttttctgtatcccctcgtcgggacaatgagcacaatgccaggactacccactcgaccttgcttctatgacatcgatctggaccccgagactgaacaagtgaacgggttgttctag

SEQ ID NO: 160614 - DNA, 2976 bp, Artificial Sequence
  derived and/or modified sequence
atgaggcaccgggtgtgccggggccgcagcggccagggcagaagaagaagcagcgtcatcccctggcctgtgcccaagcacgtgggctgggtggtgctgctgggctgcggcggcagcggcaccagcatcctggtggtgtccatcgtgggcagcggcctcatcaaggccatggccccagctgagatcctgaatggcaaggagatcagcgcccagatccgggcccggctgaagaaccaggtgacccagctgaaggagcaggtgcccggcttcaccccccggctggccatcctgcaggtgggcaacagagatgacagcaacctgtacatcaacgtgaagctgaaggctgctgaggagatcggcatcaaggccacccacatcaagctgcccaggaccaccacagaaagtgaggtgatgaagtacatcaccagcctgaatgaagacagcacagtgcacggcttcctggtgcagctgcccctggacagcgagaacagcatcaacacagaggaggtgatcaatgccatcgcccctgagaaggatgtggatggcctgaccagcatcaatgctgggaagctggcccggggggacctgaatgactgcttcatcccctgcacccccaagggctgcctggagctgatcaaggagactggagtgcccatcgccggcagacatgctgtggtggtgggccgcagcaagatcgtgggcgcccccatgcatgacctgctgctgtggaacaatgccaccgtgaccacctgccacagcaagacagcccacctggatgaggaggtgaacaagggggacatcctggtggtggccaccggccagcctgagatggtgaagggggagtggatcaagccaggggccatcgtcatcgactgtggcatcaactacgtgcctgatgacaagaagcccaacggcaggaaggtggtgggagatgtggcctatgatgaggccaaggagcgggccagcttcatcacccctgtgcctgggggcgtgggccccatgacagtggccatgctgatgcagagcacagtggagagcgccaagcgcttcctggagaagttcaagccaggcaagtggatgatccagtacaacaacctgaacctgaagacccctgtgcccagcgacatcgacatcagccgcagctgcaagcccaagcccatcggcaagctggcccgggagatcggcctgctgtctgaggaggtggagctgtatggagagaccaaggccaaggtgctgctgagcgccctggagcggctgaagcacaggccagatggcaagtatgtggtggtgacaggcatcacccccacccccctgggggagggcaagagcaccaccaccatcggcctggtgcaggccctgggcgcccacctgtaccagaatgtgtttgcctgtgtgcggcagcccagccagggccccaccttcggcatcaagggcggcgctgctgggggcggctacagccaggtgatccccatggaggagttcaacctgcacctgactggagacatccacgccatcacagctgccaacaacctggtggccgccgccattgatgcccgcatcttccacgagctgacccagacagacaaggccctcttcaaccggctggtgcccagcgtgaatggagtgcggcgcttcagtgacatccagatccggcggctgaagaggctgggcatcgagaagacagaccccaccaccctgacagatgaggagatcaacagatttgcccggctggacattgatcctgagaccatcacctggcagagggtgctggacaccaatgaccgcttcctgaggaagatcaccatcggccaggcccccacagagaagggccacaccaggacagcccagtttgacatctctgtggccagcgagatcatggctgtgctggccctgaccaccagcctggaggacatgagggagcggctgggcaagatggtggtggccagcagcaagaagggggagcctgtgtctgctgaggacctgggcgtgtctggggccctgactgtgctgatgaaggatgccatcaagcccaacctgatgcagaccctggagggcacccctgtgtttgtgcacgccggcccctttgccaacatcgcccacggcaacagcagcatcatcgctgaccgcatcgccctgaagctggtgggccctgagggctttgtggtgacagaagctggctttggagctgacatcggcatggagaagttcttcaacatcaagtgccgctacagcggcctgtgcccccacgtggtggtgctggtggccaccgtgcgggccctgaagatgcatggaggcggccccaccgtgacagctggcctgcccctgcccaaggcctacatccaggagaacctggagctggtggagaagggcttcagcaacctgaagaagcagattgaaaatgccaggatgtttggcatccctgtggtggtggccgtgaatgccttcaagacagacacagaaagtgagctggacctgatcagccggctgagccgggagcacggggcctttgatgctgtgaagtgcacccactgggccgagggcggcaaaggagccctggccctggcccaggccgtgcagagagctgcccaggcccccagcagcttccagctgctgtatgacctgaagctgcctgtggaggacaagatccgcatcatcgcccagaagatctacggggctgatgacatcgagctgctgcctgaggcccagcacaaggccgaggtgtacaccaagcagggctttggaaacctgcccatctgcatggccaagacccacctgagcctgagccacaaccctgagcagaagggcgtgcccaccggcttcatcctgcccatccgggacatccgggcctctgtgggcgccggcttcctgtaccccctggtgggcaccatgagcaccatgcctggcctgcccacccggccctgcttctatgacatcgacctggaccctgagacagagcaggtgaatggcctcttctag

SEQ ID NO: 160615 - DNA, 2976 bp, Artificial Sequence
  derived and/or modified sequence
atgcggcaccgggtgtgccggggccggagcggccagggccggcggcgctctagcgttattccttggcctgtacccaaacatgtgggctgggtggtactgctggggtgtggggggagtggcacatccatcctggtcgtgtcgatcgtgggatcaggcttaatcaaggcgatggcccccgctgaaattcttaacggaaaagaaatctccgcccagataagagctcgcctgaagaatcaagtgactcagttgaaggagcaggttcccggattcactccgcggttggccatcttgcaggtgggtaatagggacgactccaatctatatatcaacgtgaagctgaaggccgccgaagaaatcggtattaaggcaacccacatcaaactgccaagaaccaccaccgagtcagaggttatgaaatacataactagtttaaacgaagattctacggtccacggatttctcgtgcaattaccactcgattctgagaactccataaacactgaagaggtgatcaatgcaatcgccccggaaaaagatgtggacggactgacctctattaatgccggtaaattagcccgaggcgacttgaacgattgcttcataccctgcacaccaaagggctgcttggagctgattaaggagacaggcgtgccaattgcagggaggcacgctgtggtggtgggccggagcaagatagttggagcgccaatgcacgaccttctgctgtggaacaatgcaaccgtgactacctgccactctaaaactgcccacttggatgaggaggtgaacaagggcgatatcctggtggtagctactggccagcctgagatggtcaaaggggaatggatcaagcccggcgccatcgtgatcgactgtgggattaactatgtgcccgatgacaaaaaaccgaatggtaggaaagtggttggcgacgtggcgtatgacgaagcaaaggagagagcaagttttatcacaccggtgcctggaggtgttggtccgatgaccgttgccatgctaatgcagtcaactgtggaaagcgcgaaacggttcctcgagaagttcaagccaggaaaatggatgatacagtataataatttgaatttaaaaacccccgtgccatccgacattgacatctcacggagctgtaagcctaagcctatcgggaaactggcccgggaaattggattgttgtccgaagaggttgaactctacggcgagacaaaagccaaggtcctgcttagtgctttagaacggctaaaacaccgacctgatggaaaatacgtggtggtcaccggcattacccctactcctctgggggaagggaagagcacaacaacaatcgggcttgtgcaggcactcggagcacatctgtaccaaaatgtgttcgcctgtgttcgccagccaagccaaggcccgacgtttggcataaaaggaggggcagccggtggaggatatagccaggtgattccaatggaggagtttaacttgcacctgaccggcgatattcacgctatcactgcagcaaacaacctagtcgctgctgcaattgatgcccggattttccacgagctgactcaaaccgataaagcacttttcaaccgtctcgttcccagcgtgaacggggtcaggcgcttctccgatattcaaattcggaggcttaaacgcctagggatcgagaaaaccgatccaactactctgactgacgaagaaattaataggttcgcccggttagatatcgatcctgagacaattacttggcagcgtgtgctggatacaaatgatcggtttttgcggaaaatcacaatcggccaagctccaacggaaaagggacacacaaggacagcccagtttgatattagcgtggccagtgaaattatggcagtattagccctcacaacctccctcgaggatatgagggagcgactgggaaagatggtggtagccagtagcaagaaaggcgagccggtcagcgctgaagacctcggcgtgtccggagctctgacagtgttaatgaaggatgcgatcaaacccaatctgatgcagacactcgaaggcacgccagtgtttgtccacgctgggcctttcgctaacatcgcacacgggaacagcagcattatagcagacagaatagccttgaaacttgtcggccctgagggcttcgtagtgaccgaggccggctttggggccgacatcggcatggagaagttctttaatatcaagtgtcgttatagcggactgtgccctcacgtcgtcgtgctggttgctacagtgagggcactcaagatgcacgggggggggcctaccgtcaccgccggtctgccacttcccaaggcttacattcaggaaaacctggagctcgtagaaaaagggttttcaaatcttaaaaaacaaattgagaatgctagaatgtttggtattcccgtcgtagttgcagtgaacgcatttaagacggacacagagtctgagctggacctcatctcccggctttctcgggaacacggggcgtttgatgccgtgaaatgtacacattgggccgagggagggaaaggagctctcgccttagcccaggccgtccagagggctgcacaggccccgagctcgttccagctcctttatgacctgaagttacccgtggaagataagatcaggattattgcccagaaaatctatggagctgatgatatcgagttgttacccgaggctcaacacaaggcagaagtgtataccaaacagggctttgggaatctcccgatttgcatggccaaaacccatcttagcttatcccataaccccgagcaaaagggcgtgcctaccggtttcatactgccaataagagacatccgcgccagtgtgggggctgggttcctctaccctctagtaggaacaatgtccaccatgccggggcttccaactagaccatgcttctatgatatagacctggatcctgaaacagagcaggtcaacggactgttctag

SEQ ID NO: 160616 - DNA, 2976 bp, Artificial Sequence
  derived and/or modified sequence
atgaggcatcgcgtgtgtagaggccgatctgggcagggacggaggcgcagctccgtgatcccttggcccgtccccaaacatgtgggttgggtggtgctcctgggatgtggaggaagtggaacctccatcctggtggtgtctatcgtgggctcaggactaattaaggcgatggccccagctgaaattctgaacgggaaggagattagcgcccaaatccgcgctaggctcaaaaatcaggtaacacagctgaaagagcaggtcccaggcttcacaccacgcttggccatcctccaagtaggaaacagagatgactctaatctttatattaatgtgaagctaaaagccgctgaggaaatcggcattaaggccactcacataaaattgccccgtacaaccacggagtcagaggtgatgaagtacatcacaagtttaaacgaggactctactgtacacgggttcctggtacagctgccccttgatagcgagaattccattaatacagaagaggtgattaatgctatcgccccagagaaggatgtagatggtctaacatccataaatgctggtaaactggcaaggggagacctcaacgattgcttcatcccatgcacacctaaaggatgcctggaacttattaaggaaacaggcgtacccatcgccggaagacatgcggttgtggtgggcagaagcaagattgtgggtgccccaatgcacgacctgttgctgtggaataacgctacagttaccacttgtcactctaaaaccgcacaccttgatgaggaagtgaacaaaggcgacattctggtcgtcgctactggtcagcctgaaatggtcaaaggtgagtggatcaagcctggcgctattgtgatcgactgcggaattaactacgttccggacgacaagaaaccaaacggccgaaaggtcgtgggggacgtggcttacgatgaggcaaaggaaagagcttcctttatcacccccgtaccaggaggggttggccctatgacagtggccatgctaatgcaatcaacggtagaaagtgccaagagatttctggagaagttcaagccaggcaaatggatgattcaatataataacctcaatctgaaaacacctgtgccaagcgacatagatatctcccggtcctgtaagcctaaaccaattggcaagctggcgagggaaatcggactgctgagtgaggaggtggagctgtatggtgagaccaaggccaaggtcctcctttctgcactggaacgcctaaagcataggccagacgggaaatacgtcgttgtaaccgggattacgcctacacctctcggagaaggaaaaagcacaactacgattggactggtccaggccctgggggctcacctgtatcagaatgtcttcgcctgcgtccgccagccaagccagggtcctacctttggaattaaagggggagctgcgggtggcggatatagccaggtgatacctatggaggaatttaaccttcatctgactggtgacatccatgctatcactgccgctaataatctagtggccgctgccatcgacgctagaatctttcacgagttgacacaaacagataaagcactcttcaaccggttagtcccatccgtgaacggtgtacgacgattctctgacatccagattcgacggcttaaaaggctcggcatcgagaaaaccgatccaaccactttgactgatgaggaaatcaaccggtttgctcgcctggacattgatcctgaaacaattacctggcaacgagttttagacactaacgataggtttcttagaaagataactatcggccaggcgcctaccgagaagggccacactaggaccgcacaattcgatatctccgtggccagcgagatcatggcagtacttgcactgaccacatccctcgaggacatgcgcgaacggctcggtaaaatggtggtcgcttcaagcaagaagggagagcctgtgagcgcagaagatttaggggtgtcaggagctctaacggtcctcatgaaggacgccatcaaaccgaatttgatgcagaccctcgaagggactccagtgtttgtccacgctggaccattcgcaaacatcgcacatgggaacagctccatcatcgcagatcgcattgctcttaagttggtcggtcctgaggggttcgtggtgaccgaagctgggttcggcgcagatatcgggatggaaaaattctttaatattaaatgccggtacagcggactctgcccacatgtggtagttctggtggccaccgtgcgagccctaaaaatgcatggcggtggacccaccgtcaccgccggtctgccattgcctaaggcctatatccaggaaaacttagagttggtggagaagggcttctcgaacctgaagaaacagattgagaacgcacggatgttcggcatccctgtagtagtggccgtgaacgccttcaaaacagatactgagtctgagctagacctgatttcgcgactttctcgcgaacacggagcttttgatgcagtgaagtgtacacactgggctgagggtggtaaaggagccctggcactggcccaggccgtgcagcgggctgcacaggctccttctagctttcagctgctgtatgatctcaagctgcccgttgaggataagatcagaataatcgcacagaagatctacggcgcagatgatatcgagttactgcctgaagcacaacataaggccgaggtgtatacgaaacagggttttggcaacttacccatttgtatggcaaaaacccatctctccctatctcataatcccgaacaaaagggagttccgacaggtttcattttaccaatcagagacattcgggcatctgtgggtgcaggcttcttataccctctcgtcggcacaatgtctactatgcctgggctcccaactcggccttgtttctatgacatagacctcgaccccgaaaccgagcaagtgaatggtttattctag

SEQ ID NO: 160617 - DNA, 2976 bp, Artificial Sequence
  derived and/or modified sequence
atgagacacagagtgtgcagaggcagaagcggccagggcagaagaagaagcagcgtgatcccctggcccgtgcccaagcacgtgggctgggtggtgctgctgggctgcggcggcagcggcaccagcatcctggtggtgagcatcgtgggcagcggcctgatcaaggccatggcccccgccgagatcctgaacggcaaggagatcagcgcccagatcagagccagactgaagaaccaggtgacccagctgaaggagcaggtgcccggcttcacccccagactggccatcctgcaggtgggcaacagagacgacagcaacctgtacatcaacgtgaagctgaaggccgccgaggagatcggcatcaaggccacccacatcaagctgcccagaaccaccaccgagagcgaggtgatgaagtacatcaccagcctgaacgaggacagcaccgtgcacggcttcctggtgcagctgcccctggacagcgagaacagcatcaacaccgaggaggtgatcaacgccatcgcccccgagaaggacgtggacggcctgaccagcatcaacgccggcaagctggccagaggcgacctgaacgactgcttcatcccctgcacccccaagggctgcctggagctgatcaaggagaccggcgtgcccatcgccggcagacacgccgtggtggtgggcagaagcaagatcgtgggcgcccccatgcacgacctgctgctgtggaacaacgccaccgtgaccacctgccacagcaagaccgcccacctggacgaggaggtgaacaagggcgacatcctggtggtggccaccggccagcccgagatggtgaagggcgagtggatcaagcccggcgccatcgtgatcgactgcggcatcaactacgtgcccgacgacaagaagcccaacggcagaaaggtggtgggcgacgtggcctacgacgaggccaaggagagagccagcttcatcacccccgtgcccggcggcgtgggccccatgaccgtggccatgctgatgcagagcaccgtggagagcgccaagagattcctggagaagttcaagcccggcaagtggatgatccagtacaacaacctgaacctgaagacccccgtgcccagcgacatcgacatcagcagaagctgcaagcccaagcccatcggcaagctggccagagagatcggcctgctgagcgaggaggtggagctgtacggcgagaccaaggccaaggtgctgctgagcgccctggagagactgaagcacagacccgacggcaagtacgtggtggtgaccggcatcacccccacccccctgggcgagggcaagagcaccaccaccatcggcctggtgcaggccctgggcgcccacctgtaccagaacgtgttcgcctgcgtgagacagcccagccagggccccaccttcggcatcaagggcggcgccgccggcggcggctacagccaggtgatccccatggaggagttcaacctgcacctgaccggcgacatccacgccatcaccgccgccaacaacctggtggccgccgccatcgacgccagaatcttccacgagctgacccagaccgacaaggccctgttcaacagactggtgcccagcgtgaacggcgtgagaagattcagcgacatccagatcagaagactgaagagactgggcatcgagaagaccgaccccaccaccctgaccgacgaggagatcaacagattcgccagactggacatcgaccccgagaccatcacctggcagagagtgctggacaccaacgacagattcctgagaaagatcaccatcggccaggcccccaccgagaagggccacaccagaaccgcccagttcgacatcagcgtggccagcgagatcatggccgtgctggccctgaccaccagcctggaggacatgagagagagactgggcaagatggtggtggccagcagcaagaagggcgagcccgtgagcgccgaggacctgggcgtgagcggcgccctgaccgtgctgatgaaggacgccatcaagcccaacctgatgcagaccctggagggcacccccgtgttcgtgcacgccggccccttcgccaacatcgcccacggcaacagcagcatcatcgccgacagaatcgccctgaagctggtgggccccgagggcttcgtggtgaccgaggccggcttcggcgccgacatcggcatggagaagttcttcaacatcaagtgcagatacagcggcctgtgcccccacgtggtggtgctggtggccaccgtgagagccctgaagatgcacggcggcggccccaccgtgaccgccggcctgcccctgcccaaggcctacatccaggagaacctggagctggtggagaagggcttcagcaacctgaagaagcagatcgagaacgccagaatgttcggcatccccgtggtggtggccgtgaacgccttcaagaccgacaccgagagcgagctggacctgatcagcagactgagcagagagcacggcgccttcgacgccgtgaagtgcacccactgggccgagggcggcaagggcgccctggccctggcccaggccgtgcagagagccgcccaggcccccagcagcttccagctgctgtacgacctgaagctgcccgtggaggacaagatcagaatcatcgcccagaagatctacggcgccgacgacatcgagctgctgcccgaggcccagcacaaggccgaggtgtacaccaagcagggcttcggcaacctgcccatctgcatggccaagacccacctgagcctgagccacaaccccgagcagaagggcgtgcccaccggcttcatcctgcccatcagagacatcagagccagcgtgggcgccggcttcctgtaccccctggtgggcaccatgagcaccatgcccggcctgcccaccagaccctgcttctacgacatcgacctggaccccgagaccgagcaggtgaacggcctgttctag

SEQ ID NO: 160618 - protein, 350 aa, Artificial Sequence [sequence omitted]

SEQ ID NO: 160619 - DNA, 1053 bp, Artificial Sequence
  derived and/or modified sequence
atgcagggaaacgggtctgccctgcccaacgcttcgcagcctgtgttgaggggagatggggccagacccagttggttggcttcagctctggcttgtgtcctgatttttactatcgtggtggacattctcgggaacttgcttgttattttgtcggtgtaccgcaacaagaaactacgcaatgctggcaacatcttcgtcgtgtctctcgcggtggccgacttagtggtggctatttacccgtacccccttgttctcatgtctatttttaataatggatggaatctagggtacctgcactgtcaggtatcgggatttctgatgggcttatctgtgatcggcagtatcttcaacatcacgggaatcgccatcaatcgttattgctatatatgtcacagcctgaaatacgataaactgtatagctccaagaactctctctgctatgtgttgctaatatggcttctgacactggcagccgtcctgcctaatctacgcgcgggtacattgcagtatgaccccagaatctactcttgtactttcgcacagtccgttagcagtgcatatactattgcagttgtggtgtttcacttcctggtccctatgataatagtgattttctgttaccttaggatctggatcctcgtgttacaagtacgccaacgggtaaagcccgaccggaaaccgaaactcaaaccccaagacttccggaatttcgtaaccatgtttgtggtctttgttttgtttgctatatgctgggcacctctcaatttcatcggtctggctgtggcgtctgaccctgcttccatggtgccgcgcatcccagagtggctgtttgtggcctcatactatatggcttactttaattcttgtctgaacgcgatcatttacggactactgaatcagaactttcgtaaggagtaccggcgaatcatcgtctccttgtgcacggcccgtgtgttcttcgtggatagttctaatgacgtggcagatcgtgtgaaatggaagcccagccctctgatgactaacaataatgtggtcaaagtggattcagtgtag

SEQ ID NO: 160620 - DNA, 1053 bp, Artificial Sequence
  derived and/or modified sequence
atgcagggcaatggcagcgccctgcccaatgccagccagcctgtgctgcggggagatggagcccggcccagctggctggccagcgccctggcctgtgtgctgatcttcaccatcgtggtggacatcctgggcaacctgctggtgatcctgtctgtgtacagaaacaagaagctgagaaatgccggcaacatctttgtggtgtccctggccgtggccgacctggtggtggccatctacccctaccccctggtgctgatgagcatcttcaacaacggctggaacctgggctacctgcactgccaggtgtctggcttcctgatgggcctgagcgtcatcggcagcatcttcaacatcactggaattgccatcaaccgctactgctacatctgccacagcctgaagtatgacaagctgtacagcagcaagaacagcctgtgctacgtgctgctgatctggctgctgaccctggccgctgtgctgcccaacctgcgggccggcaccctgcagtatgacccccgcatctacagctgcacctttgcccagagcgtgtcctctgcctacaccatcgctgtggtggtgttccacttcctggtgcccatgatcatcgtcatcttctgctacctgcgcatctggatcctggtgctgcaggtgcggcagagggtgaagccagacaggaagcccaagctgaagccccaggacttcaggaactttgtgaccatgtttgtggtgtttgtgctgtttgccatctgctgggcccccctgaacttcatcggcctggccgtggccagtgaccctgcctccatggtgccccgcatccctgagtggctgtttgtggccagctactacatggcctacttcaacagctgcctgaatgccatcatctacggcctgctgaaccagaacttcaggaaggagtaccgccgcatcatcgtgtccctgtgcacagcccgggtcttctttgtggacagcagcaatgatgtggccgacagagtgaagtggaagcccagccccctgatgaccaacaacaacgtggtgaaggtggacagcgtgtag

SEQ ID NO: 160621 - DNA, 1289 bp, Artificial Sequence
  derived and/or modified sequence
gggaatccaagcgggctcgcggcggacaccaggtgtcacctggccgtggcgtccggcgcggcgtgggcgtccgggggcgcggcgtggaggagcgcgcgggatggggcgtgggcgcggggagcgccgggcggagccttaacaagtggtcgggcgggcggacgaggcgggcgatggccccgcggccgggacgcgcacagggaccatgcagggcaacggcagcgcgctgcccaacgcctcccagcccgtgctccgcggggacggcgcgcggccctcgtggctggcgtccgccctggcctgcgtcctcatcttcaccatcgtggtggacatcctgggcaacctcctggtcatcctgtcggtgtatcggaacaagaagctcaggaacgcaggaaacatctttgtggtgagcttagcggtggcagacctggtggtggccatttatccgtacccgttggtgctgatgtcgatatttaacaacgggtggaacctgggctatctgcactgccaagtcagtgggttcctgatgggcctgagcgtcatcggctccatattcaacatcaccggcatcgccatcaaccgctactgctacatctgccacagtctcaagtacgacaaactgtacagcagcaagaactccctctgctacgtgctcctcatatggctcctgacgctggcggccgtcctgcccaacctccgtgcagggactctccagtacgacccgaggatctactcgtgcaccttcgcccagtccgtcagctccgcctacaccatcgccgtggtggttttccacttcctcgtccccatgatcatagtcatcttctgttacctgagaatatggatcctggttctccaggtcagacagagggtgaaacctgaccgcaaacccaaactgaaaccacaggacttcaggaattttgtcaccatgtttgtggtttttgtcctttttgccatttgctgggctcctctgaacttcattggcctggccgtggcctctgaccccgccagcatggtgcctaggatcccagagtggctgtttgtggccagttactacatggcgtatttcaacagctgcctcaatgccattatatacgggctactgaaccaaaatttcaggaaggaatacaggagaattatagtctcgctctgtacagccagggtgttctttgtggacagctctaacgacgtggccgatagggttaaatggaaaccgtctccactgatgaccaacaataatgtagtaaaggtggactccgtttaaaaaagcaccacgttccgggtgagatggacacgct

SEQ ID NO: 160622 - DNA, 1053 bp, Artificial Sequence
  derived and/or modified sequence
atgcagggcaacggcagcgccctgcccaacgccagccagcccgtgttgcgcggagacggtgctcgcccgtcatggctcgcgtccgcattggcctgtgtgctaatcttcaccatcgttgttgacatcctgggaaatctcctggttatcctatcagtctacaggaacaaaaagctgcggaatgcagggaatatctttgtggtcagtctcgccgtagctgacttggtcgtcgctatctacccctaccccctagttctgatgagtatttttaacaacggatggaatctaggctacctgcattgccaagtctctggctttctgatggggctcagtgtgatcggatcgatcttcaacatcacaggaatcgccattaataggtactgctacatctgtcattcattgaaatatgacaagctttactcctccaagaacagcctgtgctatgtgcttctgatatggttgctcaccctggccgcagtgctacctaacctgagagcgggaaccctccagtacgacccaagaatctatagttgcaccttcgcccagagcgtaagttcggcctatactattgctgttgtggtcttccactttttagtgccaatgattatcgtgatcttttgttaccttcgcatttggatcctggttcttcaggtgcgccagcgagtgaagccagaccggaagccaaagctgaaaccacaggatttcaggaatttcgttacaatgttcgtagtgttcgtcctgttcgcgatttgctgggctcctctcaatttcatcgggttggccgtcgcttctgatcctgcctctatggtcccacgaattcccgagtggctcttcgtggctagttactatatggcctacttcaactcctgtctcaatgctattatttatggccttctgaatcagaatttcagaaaggagtaccgtcgaatcattgtgagcctgtgtactgctcgagtgttcttcgtcgattcgagtaatgacgtggctgatcgagtgaagtggaagccaagccctctgatgacgaataacaatgtggttaaggtcgacagcgtttag

SEQ ID NO: 160623 - DNA, 1053 bp, Artificial Sequence
  derived and/or modified sequence
atgcaaggcaatggatctgcactgccaaacgcctcgcagccggtcctgcggggtgatggcgctcggccttcgtggctggccagcgccctggcttgcgtgttgatttttaccattgtggtggatattctgggcaatttgctggttatcctctctgtctaccgcaacaagaagcttcgaaatgcaggtaacatcttcgttgtgtcattagctgtggcagatttggtggtagccatatatccataccctttggtcctcatgtcaattttcaataacggttggaatttaggctacctccattgccaggtgtccggctttctcatgggactgtctgtaatcggatcaatcttcaacataactggaatcgccataaataggtactgttatatctgccacagccttaagtatgataagttatattcatctaagaattccctgtgctacgttttacttatctggctgctgacgctggcagccgtgctcccaaacctacgggctgggacactgcagtatgatcccagaatttactcatgtaccttcgctcagtctgtgtctagcgcgtacacaatagccgtggtggttttccacttcctggtgcccatgatcattgtgatattctgttacctgcgcatctggatactagtgctccaagtaaggcaaagagttaaaccagaccggaagcccaaattgaagcctcaggattttagaaacttcgtgaccatgtttgtggtgtttgtgctgtttgcgatatgctgggcccctcttaactttatcgggctggcagtcgcgtctgatccagcctccatggtgccacgcataccggagtggctatttgtggcaagctattatatggcgtatttcaattcttgcctgaacgctatcatttacgggttgctaaaccagaatttccgaaaagagtacaggcgaataattgtctccctgtgcacggctcgcgtgttcttcgtggatagttcaaacgacgtggccgaccgggtcaaatggaagcccagccctctgatgacaaacaacaacgtggtgaaggtggattctgtatag

SEQ ID NO: 160624 - DNA, 1053 bp, Artificial Sequence
  derived and/or modified sequence
atgcagggcaacggcagcgccctgcccaacgccagccagcccgtgctgagaggcgacggcgccagacccagctggctggccagcgccctggcctgcgtgctgatcttcaccatcgtggtggacatcctgggcaacctgctggtgatcctgagcgtgtacagaaacaagaagctgagaaacgccggcaacatcttcgtggtgagcctggccgtggccgacctggtggtggccatctacccctaccccctggtgctgatgagcatcttcaacaacggctggaacctgggctacctgcactgccaggtgagcggcttcctgatgggcctgagcgtgatcggcagcatcttcaacatcaccggcatcgccatcaacagatactgctacatctgccacagcctgaagtacgacaagctgtacagcagcaagaacagcctgtgctacgtgctgctgatctggctgctgaccctggccgccgtgctgcccaacctgagagccggcaccctgcagtacgaccccagaatctacagctgcaccttcgcccagagcgtgagcagcgcctacaccatcgccgtggtggtgttccacttcctggtgcccatgatcatcgtgatcttctgctacctgagaatctggatcctggtgctgcaggtgagacagagagtgaagcccgacagaaagcccaagctgaagccccaggacttcagaaacttcgtgaccatgttcgtggtgttcgtgctgttcgccatctgctgggcccccctgaacttcatcggcctggccgtggccagcgaccccgccagcatggtgcccagaatccccgagtggctgttcgtggccagctactacatggcctacttcaacagctgcctgaacgccatcatctacggcctgctgaaccagaacttcagaaaggagtacagaagaatcatcgtgagcctgtgcaccgccagagtgttcttcgtggacagcagcaacgacgtggccgacagagtgaagtggaagcccagccccctgatgaccaacaacaacgtggtgaaggtggacagcgtgtag

SEQ ID NO: 160625 - protein, 362 aa, Artificial Sequence
  derived and/or modified sequence
MSENGSFANCCEAGGWAVRPGWSGAGSARPSRTPRPPWVAPALSAVLIVTTAVDVVGNLLVILSVLRNRKLRNAGNLFLVSLALADLVVAFYPYPLILVAIFYDGWALGEEHCKASAFVMGLSVIGSVFNITAIAINRYCYICHSMAYHRIYRRWHTPLHICLIWLLTVVALLPNFFVGSLEYDPRIYSCTFIQTASTQYTAAVVVIHFLLPIAVVSFCYLRIWVLVLQARRKAKPESRLCLKPSDLRSFLTMFVVFVIFAICWAPLNCIGLAVAINPQEMAPQIPEGLFVTSYLLAYFNSCLNAIVYGLLNQNFRREYKRILLALWNPRHCIQDASKGSHAEGLQSPAPPIIGVQHQADAL

SEQ ID NO: 160626 - DNA, 1089 bp, Artificial Sequence
  derived and/or modified sequence
atgtccgagaacggctcatttgcaaactgttgcgaggccggtggctgggctgtgaggcccggatggagtggagcaggaagcgcgcggccaagccgcactcctcgcccaccctgggtggccccggccttgtcggccgtgctcatcgtcacgacagcagtcgatgtagtggggaatctgctcgttattctgtccgtactacggaatcgcaagctgagaaatgctggaaatttatttcttgtcagcttagcgctagccgatctagtcgtggccttctatccctatcctctaattctcgtcgcaattttctatgatggatgggcattgggcgaagaacactgtaaggcatccgcctttgtgatgggactgtccgtaatcggaagtgtgttcaatatcactgctatcgccataaacagatattgctatatctgccactcaatggcgtatcatagaatataccggcgctggcacacaccactgcacatttgtctcatctggcttttgacagttgtggcactgttacccaatttttttgtcgggtccctggagtacgacccacgcatctattcttgcacattcattcaaacagcctcaacccaatatacagccgcggtcgtagtgatccatttcctgctgcccatcgctgtcgtgtctttttgctacttgcgtatttgggtgctggtgcttcaggcgagaaggaaagcaaaaccggaatctcggctgtgccttaaaccttctgatctccgctcttttctgactatgttcgtggtattcgtgatcttcgctatttgttgggcccccctgaattgcatcggattagccgtggccataaacccacaagagatggctccacagatcccagagggactcttcgtgacatcctaccttctggcatactttaattcctgtctcaatgctatcgtctatggtctgttgaaccagaacttcaggcgagagtataagcggatactgctggctttatggaacccacgccactgtatccaggacgcctcaaagggctcacatgccgaaggcctccagagcccagccccgccaattatcggggtccagcaccaggctgacgccctgtag

SEQ ID NO: 160627 - DNA, 1089 bp, Artificial Sequence
  derived and/or modified sequence
atgtctgaaaatggcagctttgccaactgctgtgaggccggcggctgggccgtgcggcccggctggagcggggccggcagcgcccggcccagcaggaccccccggcccccctgggtggccccagccctgtctgctgtgctgattgtgaccacagctgtggatgtggtgggcaacctgctggtgatcctgtctgtgctgaggaacaggaagctgagaaatgccggcaacctcttcctggtgtccctggccctggccgacctggtggtggccttctacccctaccccctcatcctggtggccatcttctatgatggctgggccctgggggaggagcactgcaaggccagcgcctttgtgatgggcctgtctgtgattggctctgtgttcaacatcacagccatcgccatcaaccgctactgctacatctgccacagcatggcctaccaccgcatctaccgccgctggcacacccccctgcacatctgcctgatctggctgctgactgtggtggccctgctgcccaacttctttgtgggcagcctggagtatgacccccgcatctacagctgcaccttcatccagacagccagcacccagtacacagctgctgtggtggtgatccacttcctgctgcccatcgctgtggtgtccttctgctacctgcgcatctgggtgctggtgctgcaggcccggaggaaggccaagccagagagccggctgtgcctgaagcccagcgacctgcgctccttcctgaccatgtttgtggtgtttgtgatctttgccatctgctgggcccccctgaactgcatcggcctggccgtggccatcaacccccaggagatggccccccagatccctgagggcctgtttgtgaccagctacctgctggcctacttcaacagctgcctgaatgccatcgtgtatggcctgctgaaccagaacttccggcgggagtacaagaggatcctgctggccctgtggaaccccaggcactgcatccaggatgccagcaagggcagccacgccgagggcctgcagagccctgccccacccatcattggagtgcagcaccaggctgatgccctgtag

SEQ ID NO: 160628 - DNA, 1565 bp, Artificial Sequence
  derived and/or modified sequence
tctgcgatgtcagagaacggctccttcgccaactgctgcgaggcgggcgggtgggcagtgcgcccgggctggtcgggggctggcagcgcgcggccctccaggacccctcgacctccctgggtggctccagcgctgtccgcggtgctcatcgtcaccaccgccgtggacgtcgtgggcaacctcctggtgatcctctccgtgctcaggaaccgcaagctccggaacgcaggtaatttgttcttggtgagtctggcattggctgacctggtggtggccttctacccctacccgctaatcctcgtggccatcttctatgacggctgggccctgggggaggagcactgcaaggccagcgcctttgtgatgggcctgagcgtcatcggctctgtcttcaatatcactgccatcgccattaaccgctactgctacatctgccacagcatggcctaccaccgaatctaccggcgctggcacacccctctgcacatctgcctcatctggctcctcaccgtggtggccttgctgcccaacttctttgtggggtccctggagtacgacccacgcatctattcctgcaccttcatccagaccgccagcacccagtacacggcggcagtggtggtcatccacttcctcctccctatcgctgtcgtgtccttctgctacctgcgcatctgggtgctggtgcttcaggcccgcaggaaagccaagccagagagcaggctgtgcctgaagcccagcgacttgcggagctttctaaccatgtttgtggtgtttgtgatctttgccatctgctgggctccacttaactgcatcggcctcgctgtggccatcaacccccaagaaatggctccccagatccctgaggggctatttgtcactagctacttactggcttatttcaacagctgcctgaatgccattgtctatgggctcttgaaccaaaacttccgcagggaatacaagaggatcctcttggccctttggaacccacggcactgcattcaagatgcttccaagggcagccacgcggaggggctgcagagcccagctccacccatcattggtgtgcagcaccaggcagatgctctctagcctggatctgaggcacaccagcagcatgacaaactcatgaaatggtgggagagagtctgctgcaagggtgagaccaggcagcctgctgggccacactgtcctgttggcatcacagccccaaggctgggggaacttcatgctgggacaagcagcccatcaacgccatgggttcaggctgatccaggagatgctcacaggccacaggacctggaaaacactcttggtggtgtcttggggatttggtgcacacaagaccaaggaaaggacagaatgaggaaaggcctggggcagaagagcccaactccttctcatagctgaccctcatcctcctgccttggcctcctggctgctttctccccttccccccagcgtggcaggatctcttcctgttagcaaggatgaaagagagaggtcagtaggactggaacttggtaactgcaagggcctcaggtggggcaggtgcagagggc

SEQ ID NO: 160629 - DNA, 1089 bp, Artificial Sequence
  derived and/or modified sequence
atgagcgagaacggcagcttcgccaactgctgcgaggccggcggctgggcagtcagacctggctggtccggcgccggaagcgccaggccctccagaacaccacgtccaccgtgggtcgcgccagctctttccgccgtgctaatcgtcaccaccgccgtcgatgtggtggggaacctgctcgtgatcctgagcgtcctccggaacagaaagctacgaaacgcaggaaacctgttcctcgtgtccctggcactggcagacctggttgtcgccttttacccttaccctctcattctcgtagccatcttctatgatggctgggcccttggcgaggaacactgtaaggcctcagcttttgtgatggggctatctgtcatcgggtctgtctttaatattactgcgattgccatcaaccgctattgctatatctgtcatagcatggcataccaccgtatttaccgtcgctggcacacgccacttcatatttgcttaatctggctcctcacggtcgttgcgctgctgcccaatttctttgttggctccttagagtacgatccacgtatctatagctgtacattcattcaaacagcaagtacacagtacactgctgccgtggtggttatccactttctgctgcccatcgccgtggttagtttttgctacctgagaatctgggtccttgtgcttcaagcaaggaggaaggccaagcccgagtctaggctgtgtctgaagccctccgatctgcgatccttcctcactatgttcgtggtgttcgtgatcttcgctatctgttgggcacccctgaattgcattggtttggccgtcgctataaaccctcaagagatggccccgcaaatccccgaggggttgttcgtgacatcttacctgttagcctacttcaatagctgcctgaatgctattgtttatgggctcctgaaccaaaactttcgtagggagtacaagagaatcctattggcactctggaacccaaggcactgcatccaggacgcaagtaaggggtctcacgcagaggggctccaatcccccgccccccctatcatcggtgtgcaacaccaggccgacgccctgtag

SEQ ID NO: 160630 - DNA, 1089 bp, Artificial Sequence
  derived and/or modified sequence
atgtcggagaacggatcattcgccaattgctgtgaagcgggtgggtgggcggtaaggccaggttggagtggagccggaagcgcccgaccatcaagaactcccaggccaccctgggtggcccctgcactcagcgcagttctcatcgtgacaaccgcagtagacgtggtgggcaacctgctggtcatcctctctgtcctccgcaatcgaaaactgcgcaacgcaggaaatctgttcctcgtgtctctggccttggccgatcttgttgttgccttttatccctatccgcttatcttagtggccatattttacgatggctgggccctaggagaggaacactgtaaggcctcagcctttgttatgggtttaagtgttattggcagcgtgttcaatatcaccgctatcgctatcaatagatattgctatatctgtcatagcatggcttaccaccggatttaccgccgatggcatacgccgctgcatatctgccttatatggctcctgactgtggtcgcccttctgcccaattttttcgtcggcagtttagaatacgaccctcggatttattcatgcacttttattcagacagcgagtacacagtataccgcggctgtcgtggtgatccattttctactccctatcgccgtcgtctccttctgctatctgaggatttgggtcctggtgctgcaagcccgacgaaaggccaagccagagagcaggctgtgcctgaagccatctgacctgcggagcttcttaacaatgtttgtcgtctttgtgatctttgcaatttgttgggccccactgaattgtataggtctggcggtggcgatcaacccacaagaaatggccccacagattccggagggactctttgtgacttcatacttacttgcatacttcaactcctgtttgaacgctattgtttacggcttgctcaatcaaaatttcagacgggaatataaacgtattctgctagctttatggaatcccagacactgtatacaggacgcctccaaggggtcccacgctgaaggactccaatctcccgcaccccctatcatcggggtccagcaccaggcagacgccttatag

SEQ ID NO: 160631 - DNA, 1089 bp, Artificial Sequence
  derived and/or modified sequence
atgagcgagaacggcagcttcgccaactgctgcgaggccggcggctgggccgtgagacccggctggagcggcgccggcagcgccagacccagcagaacccccagacccccctgggtggcccccgccctgagcgccgtgctgatcgtgaccaccgccgtggacgtggtgggcaacctgctggtgatcctgagcgtgctgagaaacagaaagctgagaaacgccggcaacctgttcctggtgagcctggccctggccgacctggtggtggccttctacccctaccccctgatcctggtggccatcttctacgacggctgggccctgggcgaggagcactgcaaggccagcgccttcgtgatgggcctgagcgtgatcggcagcgtgttcaacatcaccgccatcgccatcaacagatactgctacatctgccacagcatggcctaccacagaatctacagaagatggcacacccccctgcacatctgcctgatctggctgctgaccgtggtggccctgctgcccaacttcttcgtgggcagcctggagtacgaccccagaatctacagctgcaccttcatccagaccgccagcacccagtacaccgccgccgtggtggtgatccacttcctgctgcccatcgccgtggtgagcttctgctacctgagaatctgggtgctggtgctgcaggccagaagaaaggccaagcccgagagcagactgtgcctgaagcccagcgacctgagaagcttcctgaccatgttcgtggtgttcgtgatcttcgccatctgctgggcccccctgaactgcatcggcctggccgtggccatcaacccccaggagatggccccccagatccccgagggcctgttcgtgaccagctacctgctggcctacttcaacagctgcctgaacgccatcgtgtacggcctgctgaaccagaacttcagaagagagtacaagagaatcctgctggccctgtggaaccccagacactgcatccaggacgccagcaagggcagccacgccgagggcctgcagagccccgccccccccatcatcggcgtgcagcaccaggccgacgccctgtag

SEQ ID NO: 160632 - protein, 308 aa, Artificial Sequence
  derived and/or modified sequence
CDNGGTWEQGQCACLPGFSGDRCQLQTRCQNGGQWDGLKCQCPSTFYGSSCEFAVEQVDLDVVETEVGMEVSVDQQFSPDLNDNTSQAYRDFNKTFWNQMQKIFADMQGFTFKGVEILSLRNGSIVVDYLVLLEMPFSPQLESEYEQVKTTLKEGLQNASQDANSCQDSQTLCFKPDSIKVNNNSKTELTPEAICRRAAPTGYEEFYFPLVEATRLRCVTKCTSGVDNAIDCHQGQCVLETSGPACRSWDQDRKWFETWDEEVVGTFSNWGFEDDGTDKDTNFHVALENVDTTMKVHIKRPEMTSSSV

SEQ ID NO: 160633 - DNA, 1008 bp, Artificial Sequence
  derived and/or modified sequence
atgcagctgctgggcctgctgggcctgctgtggatgctgaaggccagcccctgggccaccggcaccctgagcaccgccaccagcatcagccaggtgcccttccccagagccgaggccgccagcgccgtgctgagcaacagcccccacagcagagacctggccggctggcccctgggcgtgccccagctggccagccccgcccccggccacagagagaacgcccccatgaccctgaccaccagcccccacgacaccctgatcagcgagaccctgctgaacagccccgtgagcagcaacaccagcaccacccccaccagcaagttcgccttcaaggtggagaccaccccccccaccgtgctggtgtacagcgccaccaccgagtgcgtgtaccccaccagcttcatcatcaccatcagccaccccaccagcatctgcgtgaccaccacccaggtggccttcaccagcagctacaccagcacccccgtgacccagaagcccgtgaccaccgtgaccagcacctacagcatgaccaccaccgagaagggcaccagcgccatgaccagcagccccagcaccaccaccgccagagagacccccatcgtgaccgtgacccccagcagcgtgagcgccaccgacaccaccttccacaccaccatcagcagcaccaccagaaccaccgagagaacccccctgcccaccggcagcatccacaccaccaccagccccacccccgtgttcaccaccctgaagaccgccgtgaccagcaccagccccatcaccagcagcatcaccagcaccaacaccgtgaccagcatgaccaccaccgccagccagcccaccgccaccaacaccctgagcagccccaccagaaccatcctgagcagcacccccgtgctgagcaccgagaccatcaccagcggcatcaccaacaccacccccctgagcaccctggtgaccaccctgcccaccaccatcagcagaagcacccccaccagcgagaccacctag

SEQ ID NO: 160634 - DNA, 1008 bp, Artificial Sequence
  derived and/or modified sequence
atgcagcttcttggccttctgggcctgctgtggatgcttaaagcatccccctgggctacaggtaccttgagcaccgccacttcaatcagccaagtacctttccccagagccgaagcagcctctgccgtgctgtcaaattccccacactccagagacctggcagggtggccactaggcgttccccagttggctagtcccgctccaggccaccgcgagaacgcaccaatgactcttactacctctccacatgacaccctaatctccgagaccctgcttaattccccagtatcttccaatacctccactacacccaccagcaaattcgctttcaaagttgaaacaacacccccgactgtgctggtctactctgccactactgaatgcgtctaccctacttccttcattatcacgatttcgcatccaacgagtatttgcgtaactaccactcaagtcgcattcactagttcatacaccagtactccagtgacccagaaacccgttacaactgttaccagcacctattctatgacaacaaccgaaaagggaacgtctgctatgaccagctccccaagcaccacaaccgcaagggaaacccctatagtcacggtgaccccctcctctgtgagtgcgactgacaccacatttcataccaccattagctccaccaccagaactacagaaagaacaccactgccaactggaagcatacacactaccacgtctcctactcccgtattcaccactcttaaaaccgcagtcacaagtacatctcccatcacttcgagcatcacttctacaaataccgtcaccagcatgactactactgcttcgcaacctacagcgacgaacaccctgtcctccccgacaaggacaatcctgagttcaacgccagtgttatccacggagacgataactagtggaatcacaaatactactcccctttcaacacttgtcacaacgctgcctacgaccatcagtcggtcaacccccacatctgaaacaacctag

SEQ ID NO: 160635 - DNA, 1008 bp, Artificial Sequence
  derived and/or modified sequence
atgcagctgctgggcctgctgggcctgctgtggatgctgaaggccagcccctgggccaccggcaccctgagcacagccaccagcatcagccaggtgcccttccccagggctgaggccgccagcgctgtgctgagcaacagcccccacagccgggacctggccggctggcccctgggcgtgccccagctggccagccctgcccctggccaccgggagaatgcccccatgaccctgaccaccagcccccatgacaccctcatcagcgagaccctgctgaacagccctgtgagcagcaacaccagcaccacccccaccagcaagtttgccttcaaggtggagaccaccccacccaccgtgctggtgtacagcgccaccacagaatgtgtgtaccccaccagcttcatcatcaccatcagccaccccaccagcatctgtgtgaccaccacccaggtggccttcaccagcagctacaccagcacccctgtgacccagaagcctgtgaccaccgtgaccagcacctacagcatgaccaccacagagaagggcaccagcgccatgaccagcagccccagcaccaccacagcccgggagacccccatcgtgacagtgacccccagctctgtgtctgccacagacaccaccttccacaccaccatcagcagcaccaccaggaccacagagaggacccccctgcccaccggcagcatccacaccaccaccagccccacccctgtgttcaccaccctgaagacagctgtgaccagcaccagccccatcaccagcagcatcaccagcaccaacacagtgacctccatgaccaccacagccagccagcccacagccaccaacaccctgagcagccccaccaggaccatcctgagcagcacccctgtgctgagcacagagaccatcaccagcggcatcaccaacaccacccccctgagcaccctggtgaccaccctgcccaccaccatcagccgcagcacccccaccagcgagaccacctag

SEQ ID NO: 160636 - DNA, 1008 bp, Artificial Sequence
  derived and/or modified sequence
atgcagctgctgggcctgctgggcctgctgtggatgctgaaggcctccccttgggcaactgggacactgtcgaccgctacctctatctctcaggtgcccttccccagggccgaggccgcaagcgcggtcttgtccaacagcccacactctagagacctagctggatggccactcggagtaccccagctagcctctccagcccctgggcacagggaaaacgcacccatgacacttaccacgtcccctcacgataccctgatcagcgaaaccttactgaactcacctgtgtcctccaatactagtactacacccacttccaaattcgcttttaaggtggaaactaccccacccacggtcctggtctactcggcaactacggaatgtgtgtatccaacttccttcatcatcactatcagtcatcctacatcaatatgcgtgactactacacaggtcgcctttacatcctcctatactagcacgcccgtaacccagaaaccagtgacgactgtgacctccacctattccatgaccacgactgaaaagggcacatcagccatgacgagcagtccatccacaacaactgcacgcgaaactcccatcgtgactgtaacacccagctccgtgagtgctactgataccacatttcacactaccatatcttccaccacccgaaccaccgaacggacgccccttcctacggggtctatccacacgacaactagccctactccagtttttaccactttgaaaactgcagtcacgagtacttctcccatcacttctagcataactagcacgaacaccgtgacttctatgacaacaaccgcaagccagccaacagccactaatactctgtcttcccccacacggaccatcctgtcgagtactcccgtcttgagtacggagaccataacttcaggaattacgaacacgacccctcttagtaccctggtcaccaccctcccgacaaccatttcacggagcacacctacttcagaaacaacgtag

SEQ ID NO: 160637 - DNA, 1008 bp, Artificial Sequence
  derived and/or modified sequence
atgcagctcctgggcctgctcggcctcctttggatgctgaaagcaagtccctgggccacgggaactctgagcactgctacaagcatctctcaggtgccctttcctagagctgaggcagcatctgcagtgttgtccaattctccccatagtcgggacctagccggatggccactcggggtgccacagctagcttcccctgcacctggccacagagaaaacgctcccatgacactgacaactagtccccacgacactctgatcagcgaaactttactgaactctcccgtgtcttctaatacctctactaccccaacgagtaagtttgctttcaaggtcgagactaccccccctacggtcctcgtctattccgccacgactgagtgcgtttatccaacctcatttattatcaccattagccaccccacctcgatttgcgtcaccaccacccaggtagcctttacgtcctcctataccagtacccctgttacgcagaagcccgtcaccactgtcacttctacttactccatgaccaccaccgaaaaggggacttctgccatgacctcctctccatcgacgacaaccgctcgcgaaacacccatcgtcaccgttacccctagctccgtctctgccacagatacaacgttccacaccacgatttcatccactacgagaacaaccgaacgtactcccctgccaaccggttcaatccacaccacaacctcacccacccccgtcttcacaaccctgaaaactgccgtaacttcgactagtcccataacgagctcaattacttcgactaataccgtaaccagcatgaccaccacagccagccagccaacagccaccaatactctttcttctcctactagaacaattctgtcatctacacctgttctgagcacagaaactataacttctggcattacaaataccactccgctgagcacactggtcaccacccttcccaccacgatcagtcgatctacacccacttccgagaccacctag

SEQ ID NO: 160638 - DNA, 1005 bp, Artificial Sequence
  derived and/or modified sequence
atgcagctgttggggctcctcggcctcctctggatgctcaaggcctccccgtgggccacaggaactttatccacggccacatccatctctcaagtgcctttccccagagcagaagcagccagcgctgtgctcagcaattctccacactccagagacctggctgggtggccacttggtgtcccccagctcgcctctcctgctcctggccacagggaaaatgcacctatgacactcactacctccccccatgacacactcatctctgaaacattgctcaactctccagtcagttccaacacctcaaccaccccgacgtccaagtttgccttcaaggttgaaaccactccacccaccgtgttggtctattcagccaccactgagtgcgtgtatccaacgagctttataatcaccatctcccaccccacctccatctgtgtgaccacgacgcaggtggccttcaccagctcttacacctcgactcccgtgacacagaagccagtgaccaccgtcaccagtacttactctatgaccactactgagaaaggaacgtcagccatgacatcttctccctctaccaccactgcaagggaaactcccatagtgacagtgacaccctcctctgtgtcagccacagacacaaccttccacactacaatctcatctacaactagaaccacagaaaggactcccctgcccactggaagcatccatacaaccacgtccccaaccccagtatttactactctcaaaacagcagtgacttccacttcccccatcacttcttcaatcacttccacaaatacagtgacttctatgacaacgaccgcctcccagcccacagccactaatacattgtcatcacccactaggaccattttatcttccacacctgtcctgagcacagaaacaatcaccagtggtatcacaaacaccacccccctatccaccttggtgaccacactccccactaccatcagcaggtctacacctacatctgagaccacc

SEQ ID NO: 160639 - DNA, 2631 bp, Artificial Sequence
  derived and/or modified sequence
atctattccactgtttctacatctactaccgctattaccagccatttcaccactagcgagacagctgttacccctactccagtgaccccaagctcactgagcactgatatcccaactaccagcctgagaacactgacacccagttctgtggggacgtccacgtccctgacaacaactaccgattttcctagcattcctaccgacatttccacccttcctacacgaacacacatcatttctagctcacctagcatccagtccaccgagactagctcgttggtggggacgaccagccccaccatgtctactgtgaggatgactttacggataacagagaacactccaatctcctcattttctaccagcatcgtggtgatcccagagacacccacgcagaccccccctgtcctgacgagtgcaacaggaacacagaccagccccgctccgacgactgtgacctttgggagcaccgacagctcaacgagcacgttacacactctgacccctagcacggcccttagcactattgtatcgacctctcaggtgcccatcccatctactcactctagcactcttcagactacccccagcacccccagcctccagacttcactcacttcgacaagcgagtttacaaccgaatccttcaccagggggtcgacttccaccaacgctatccttacgagcttttcaactatcatttggtcgagcacccccacaatcatcatgagcagctcgccctcttccgcatctatcaccccagttttcagcaccactattcacagtgtgcctagcagtccctatatctttagcacagagaatgtgggatctgcatctatcactgggttcccatccctgagcagctcagcgaccacgagtacctcgtccacttcatcctcactgacgactgcccttaccgaaattacccccttttcttacatatctctgccaagtaccacaccttgtcccggaaccattactatcaccattgtcccagcatctcctacggacccttgcgtggaaatggatccctcgaccgaggccacatccccacccaccactccacttactgtgtttccctttacgaccgagatggtgacatgccctacatccatttcaattcagacgacgctgacgacctacatggatacgtcttcaatgatgccagagagtgaaagttctatttcccctaatgctagtagcagtacaggaactgggaccgtgccaacgaatacagtattcacttcgacacggctgcccaccagcgaaacttggctgtcaaactcttcagttataccattgcccctgccgggtgtttccacaatacctctcaccatgaagccgagtagcagcttgcccactatactccgaacaagcagcaagagcacccatccctctcctccgaccacaaggacttccgagacccctgtggctactacccaaactcccactacattaacttcgaggcggacaactcggattacttctcaaatgacaacacaatcaacactcactactacagcaggcacctgtgacaacggagggacctgggagcagggacagtgcgcatgtctgccgggtttctctggcgatcggtgccagctccagaccaggtgccagaatggggggcagtgggatggcctaaaatgccaatgccccagcacattctatggctcatcatgtgaatttgcggtggaacaggtagatctggacgtggttgagacagaagtggggatggaagtctccgtggatcagcagttttctcctgacctaaacgacaatacgagccaggcttatcgggacttcaataaaactttttggaaccagatgcagaagatctttgctgacatgcaaggctttacctttaagggagtcgaaattctctctcttaggaatggctccatcgttgtggattacctggtgctcttggaaatgccattctcccctcagttagaatccgaatatgaacaggtgaagactactctgaaggagggcctgcaaaacgcaagccaggatgcgaactcttgtcaggactcacagactctctgctttaagcccgatagcatcaaagtgaataacaatagcaagacagaattaacaccggaagcgatctgtcgacgggctgccccaacaggatacgaggagttctactttcctctggtcgaggccacacgactaaggtgtgtcacaaaatgcacttcaggagtcgacaacgccatcgattgtcaccagggccagtgcgtgttagagacctcagggccagcttgtcgatgttactctacggatactcattggttctctgggccccggtgtgaggtggccgtgcactggagggcccttgtgggcggtctaaccgccggcgccgccctgttagtactgctgcttttagctctaggcgtcagagcggtcagaagtgggtggtggggaggccagcgtagaggacggtcgtgggatcaggatcgcaagtggtttgagacttgggacgaagaggtggtcggtacattcagcaattggggcttcgaggatgatggaactgacaaggacaccaatttccacgtggctttagaaaacgtcgataccacaatgaaggtgcacatcaagcgcccagaaatgaccagttccagtgtttag

SEQ ID NO: 160640 - DNA, 2631 bp, Artificial Sequence
  derived and/or modified sequence
atctacagcacagtgtccaccagcaccacagccatcaccagccacttcaccaccagcgagacagctgtgacccccacccctgtgacccccagcagcctgagcacagacatccccaccaccagcctgcggaccctgacccccagctctgtgggcaccagcaccagcctgaccaccaccacagacttccccagcatccccacagacatcagcaccctgcccaccaggacccacatcatcagcagcagccccagcatccagagcacagagaccagcagcctggtgggcaccaccagccccaccatgagcacagtgaggatgaccctgcgcatcacagagaacacccccatcagcagcttcagcaccagcatcgtggtgattcctgagacccccacccagaccccacctgtgctgaccagcgccaccggcacccagaccagccctgcccccaccaccgtgaccttcggcagcacagacagcagcaccagcaccctgcacaccctgacccccagcacagccctgagcaccatcgtgtccaccagccaggtgcccatccccagcacccacagcagcaccctgcagaccacccccagcacccccagcctgcagaccagcctgaccagcaccagcgagttcaccacagagagcttcacccggggcagcaccagcaccaatgccatcctgaccagcttcagcaccatcatctggagcagcacccccaccatcatcatgagcagcagccccagcagcgccagcatcacccctgtgttcagcaccaccatccacagcgtgcccagcagcccctacatcttcagcacagaaaatgtgggcagcgccagcatcaccggcttccccagcctgagcagcagcgccaccaccagcaccagcagcaccagcagcagcctgaccacagccctgacagagatcacccccttctcctacatcagcctgcccagcaccaccccctgccccggcaccatcaccatcaccatcgtgcctgccagccccacagacccctgtgtggagatggaccccagcacagaggccaccagcccccccaccacccccctgactgtgttccccttcaccacagagatggtgacctgccccaccagcatcagcatccagaccaccctgaccacctacatggacaccagctccatgatgcctgagagcgagagcagcatcagccccaatgccagcagcagcactggaactggaacagtgcccaccaacacagtgttcaccagcacccggctgcccaccagcgagacctggctgagcaacagcagcgtcatccccctgcccctgcccggggtgtccaccatccccctgaccatgaagcccagcagcagcctgcccaccatcctgcggaccagcagcaagagcacccaccccagcccccccaccaccaggaccagcgagacccctgtggccaccacccagacccccaccaccctgaccagcaggaggaccacccgcatcaccagccagatgaccacccagagcaccctgaccaccacagctggcacctgtgacaatggaggcacctgggagcagggccagtgtgcctgcctgcccggcttcagcggggaccgctgccagctgcagacccgctgccagaatggaggccagtgggatggcctgaagtgccagtgccccagcaccttctacggcagcagctgtgaatttgctgtggagcaggtggacctggatgtggtggagacagaggtgggcatggaggtgtctgtggaccagcagttctccccagacctgaatgacaacaccagccaggcctacagagacttcaacaagaccttctggaaccagatgcagaagatctttgctgacatgcagggcttcaccttcaagggcgtggagatcctgagcctgagaaatggcagcatcgtggtggactacctggtgctgctggagatgcccttcagcccccagctggagagtgaatatgagcaggtgaagaccaccctgaaggagggcctgcagaatgccagccaggatgccaacagctgccaggacagccagaccctgtgcttcaagccagacagcatcaaggtgaacaacaacagcaagacagagctgaccccagaggccatctgccggcgggccgcccccaccggctatgaggagttctacttccccctggtggaggccacccggctgcgctgtgtgaccaagtgcaccagcggcgtggacaatgccatcgactgccaccagggccagtgtgtgctggagaccagcggccctgcctgccgctgctacagcacagacacccactggttcagcggcccccgctgtgaggtggccgtgcactggagggccctggtgggcggcctgacagctggggccgccctgctggtgctgctgctgctggccctgggcgtgcgggctgtgcgcagcggctggtggggcggccagaggcggggccgctcctgggaccaggacaggaagtggtttgagacctgggatgaggaggtggtgggcaccttcagcaactggggctttgaagatgatggaacagacaaggacaccaacttccacgtggccctggagaatgtggacaccaccatgaaggtgcacatcaagaggcctgagatgaccagcagctctgtgtag

SEQ ID NO: 160641 - DNA, 3338 bp, Artificial Sequence
  derived and/or modified sequence
atctactccacagtcagcacatccacaactgccatcacctcacattttactacctcagagactgcggtgactcccacacctgtaaccccatcttctctgagtacagacatcccgaccacaagcctacgaactctcaccccttcgtctgtgggcaccagcacttcattgactacaaccacagactttccctctatacccactgatatcagtaccttaccaactcgaacacacatcatttcatcttctccctccatccaaagtacagaaacctcatcccttgtgggcaccacctctcccaccatgtccactgtgagaatgaccctcagaattactgagaacaccccaatcagttcctttagcacaagtattgttgttatacctgaaaccccaacacagacccctcctgtactgacgtcagccactgggacccaaacatctcctgcacctactactgtcacctttggaagtacggattcctccacgtccactcttcatactcttactccatcaacagccttgagcacgatcgtgtcaacatcacaggttcctattcctagcacacattcctccacccttcaaacaactccttctactccctcattgcaaacttcactcacatctacaagtgagttcactacagaatctttcactaggggaagtacgtctacaaatgcaatcttgacttcttttagtaccatcatctggtcctcaacacccactattatcatgtcctcttctccatcttctgccagcataactccagtgttctccactaccattcattctgttccttcttcaccatacattttcagtacagaaaatgtgggctccgcttctatcacaggctttcctagtctctcttcctctgcaactaccagcacttcttcaaccagctcctctctgaccacagctctcactgaaataacccccttttcttatatttcccttccctccaccacaccctgtccaggaactataacaattaccatagtccctgcctctcccactgatccatgtgttgaaatggatcccagcactgaagctacttctcctcccaccaccccattaacagtctttccctttactaccgaaatggtcacctgtcctacctccatcagtatccaaactactcttactacatatatggacacttcttccatgatgccagaaagtgagtccagcatctcacccaatgcttccagttccactggcactgggactgtacccacaaacacagttttcacaagtactcgactgcccaccagtgagacctggctgagcaacagttctgtgatccccctacctcttcctggcgtctctaccatcccgctcaccatgaaaccaagcagtagcctcccgaccatcctgaggacttcaagcaagtcaacacacccctccccacccaccactaggacttcagagacaccagtggccactacccagactcctaccacccttacatcacgcaggacaactcgcatcacttctcagatgaccacacagtccacgttgaccaccactgcaggcacctgtgacaatggtggcacctgggaacagggacagtgtgcttgccttccggggttttctggggaccgctgtcagctccagaccagatgccagaatgggggtcagtgggatggcctcaaatgccagtgccccagcaccttctatggttccagttgtgagtttgctgtggaacaggtggatctagatgtagtggagaccgaggtgggcatggaagtgtctgtggatcagcagttctcgccggacctcaatgacaacacttcccaggcctacagggatttcaacaagaccttctggaatcagatgcagaagatttttgcagacatgcagggcttcaccttcaagggtgtggagatcctgtccctgaggaatggcagcatcgtggtggactacctggtcctgctggagatgcccttcagcccccagctggagagcgagtatgagcaggtgaagaccacgctgaaggaggggctccagaacgccagccaggatgcgaacagctgccaggactcccagaccctgtgttttaagcctgactccatcaaggtgaacaacaacagcaagacagagctgaccccggaagccatctgccgccgcgccgctcccacgggctatgaagagttctacttccctctggtggaggccacccggctccgctgtgtcaccaaatgcacgtcgggcgtggacaacgccatcgactgtcaccagggccagtgcgttctagagacgagcggtcccgcgtgtcgctgctactccaccgacacgcactggttctctggcccgcgctgcgaggtggccgtccactggagggcgctggtcgggggcctgacggccggcgccgcgctgctggtgctgctgctgctggcgctgggcgtccgggcggtgcgctccggatggtggggcggccagcgccgaggccggtcctgggaccaggacaggaaatggttcgagacctgggatgaggaagtcgtgggcactttttcaaactggggtttcgaggacgacggaacagacaaggatacaaatttccatgtggccttggagaacgtggacaccactatgaaggtgcacatcaagagacccgagatgacctcgtcctcagtgtgagccctgcggggccccttcaccaccccctccgccctgccccggacacaagggtctgcattgcgtccatttcaagaggtggccccaggacgcgggcagcccaggctcctgctgttcttgggcaagatgagactgttcccccaaatcccatccttctccttccaacttggctgaaacccacctggagacgcagttcacgtccaggctcttccactgtggaatcttgggcaagtcagtaacgagcctcagtttcctcacctgcaaaacgggtacagcattcctgtatgatagctcacgccgtcgttgtgaaaaccacatagacttggtcaattctcggtcctactctgccctcccgtctcagccctcgtgttgccattgcctctctcggatcctccaatcctcacgtccttcacctggtctctggccctggttcttattttctctcaattccctactgcctgtttcttactttgaacctggaggcagcctgcagccccatcccatctcctgccctctcctgatctaactccctgctgcatctcttgctctcattccttagacgtcctccccttttgaccccgttccttcatccatcctgcaccccagtcccccagccctaaatcctccctcctctcctcacatcctggtccctagcaaggtatagatagcctctgtgtcttaggataccccgggtgctgttccctcggtca

SEQ ID NO: 160642 - DNA, 2631 bp, Artificial Sequence
  derived and/or modified sequence
atctacagcaccgtgagcaccagcaccaccgccatcaccagccactttaccacctccgaaactgccgtgactccaacacctgtgacccctagttcactgagcaccgacatccctacaactagcttgcgcactttgactcccagtagcgtgggcacctcgacgtcactgactactactactgacttcccttcaatacctactgacatctccacacttccaacacggacccatatcatatctagctcaccctccatccagagcacggagacaagcagccttgttggcacaacgtcccctacaatgtcaacagtacgtatgactctccggataacagaaaatacgccaatcagttccttctcaacatcgatcgtggttattcccgagaccccaacccagacaccacccgtccttacgagtgctactggaacccaaaccagcccagcccctacaaccgtcacttttggatctacagactcttctactagcaccttgcataccctgacaccaagcaccgccttgagcaccattgtgtctacatcacaggtgcctatcccttccacacactctagtacccttcagacaacaccgtccacgcccagcctccagacaagcttgacgagcacctcagagttcaccacggagtcttttactcgcggaagcacatccactaatgcaatactcaccagtttttcaactatcatctggtcctccactccaaccatcattatgtcttctagtccaagcagtgcgtccatcacccccgtgttttctaccacgatacacagcgttccatcgtcaccgtacatattcagcaccgagaacgttggatctgctagcataactgggtttccatctctctcatcatcagccaccacttccacctcttctacgtcgagcagtctgacaacagcactcaccgaaattacccccttttcctatatttcccttccaagcaccactccgtgtccagggaccattaccatcaccatagtgccagcgtctcctaccgacccttgtgtcgaaatggatccctcaacagaagctacatcccctcccacaacccccttaacagtttttccttttaccacggagatggtgacgtgtcctacatcaattagtattcagacaacgttgaccacttatatggatacttcctctatgatgccggaaagtgagtcttcgatttctcctaatgcctcatccagtacggggactggcaccgtccccaccaatacagtgtttacgagtacgcggctgcccacttcagaaacgtggctgtctaactcttctgttatacccctgcctctcccaggagttagtaccatccctctaactatgaaaccaagttcgagtctgccaacaatactgagaaccagcagcaagagtacacacccgtctccccctaccactaggacttccgagacacccgttgctaccacccagactcctactacgctcacaagccgtagaactacacggatcacatctcagatgacgacccagagcaccctgacaaccacagccggaacatgtgataacgggggaacctgggagcaaggccagtgcgcctgcctgcctggattcagtggcgaccggtgccagttacagacaaggtgccagaacggtggccagtgggacggattgaagtgtcaatgcccctcaacgttttacggttccagttgcgagtttgccgtcgaacaagtagatctggacgtagtggaaaccgaagtcggcatggaagtttccgtggaccaacagtttagccctgacttaaacgataatacaagccaggcctatagagacttcaataagacgttctggaaccagatgcagaagattttcgcagacatgcaaggcttcacatttaagggagtagaaattctgtccttacggaacggtagcatagtggtggattacctggtgctgctcgagatgcccttcagtccacaactggagagtgaatatgaacaggtgaagacaactctgaaggagggattgcagaacgcctctcaggatgctaactcttgccaagatagccagaccctttgctttaaacccgatagtatcaaggtgaacaataatagcaaaacggagctgacaccagaggccatatgcagaagagcagcccctaccggttacgaggaattttactttcccctggttgaggctacccggctgcggtgcgtgacgaaatgcacctctggggtggacaatgccatagactgccaccagggccagtgtgtgctcgagacaagcggtccagcctgcaggtgctattcaacagacacccactggttttctggccccaggtgcgaggtcgctgtccactggagggccttggtcggggggctcacagcaggcgccgcacttttggtgctgctgctgctggcattaggtgtgagggctgtaagaagtggatggtggggcggccagcgccgaggccgaagctgggatcaagacagaaaatggtttgagacatgggatgaggaagtggtcgggacctttagtaattgggggttcgaggatgacggaaccgacaaggatacgaatttccatgtcgcgctagaaaacgtcgacactacgatgaaagttcacataaaacgaccagagatgactagcagtagcgtctag

SEQ ID NO: 160643 - DNA, 2631 bp, Artificial Sequence
  derived and/or modified sequence
atctatagtactgtgtcgacctctaccactgccattacgtcccactttaccacttccgaaacggccgtgacccccactccagtgacccccagttcattaagcactgacattccaacaactagtctgagaaccttgacaccaagtagcgttggaacaagtacatcgctgacaaccaccaccgatttcccaagcatccctactgacattagcacactgcccacaagaacacatattatctcttctagcccaagcattcagagcactgaaaccagctccctggtcggcaccacatcccctactatgtccaccgtgaggatgacattaagaatcacagagaacacgcccatatctagtttctctacctcaatcgtagtcatccctgagacaccgactcagactcctccggtactgacgagcgcgaccggaacacaaacaagcccagcccctactacagtgacctttggaagtaccgatagttcgaccagcaccttgcacacccttaccccgtcaacagctttgtctactatagtttcaacttctcaggtgccaatccctagtacacactcgagcaccttacagaccactccgtcgacgccttccctgcagacctcattgactagtaccagtgagttcacaaccgagtcatttaccaggggctcaaccagtaccaatgcaatcctgacctcgttttcaacgattatttggtcttcaacaccgactatcatcatgtcctcatctccatccagcgcttcaatcacccctgtgttcagcacaacaattcactcggtaccatcctccccatatattttttctacagagaatgttgggtctgcctcgattacgggcttccctagcctttcttcatctgctactacgagtacgagttccacatcctctagtttaactactgctctcaccgaaataaccccattcagctatatttcactgccatctaccactccatgtccaggcactatcacaataacaatcgttcccgcttccccgaccgacccatgtgtggaaatggacccgagtaccgaagcaacctcaccccctactacgcccctcaccgtgttcccatttacaactgaaatggtcacctgtccaacatccatcagcattcagaccaccctgactacttacatggatacctcctcaatgatgcctgagtcagagtcatctatcagccctaacgcttcttcctccactggaactggaactgtgccgaccaacactgtttttactagcacccgattaccgacctcggagacgtggctaagcaatagctctgtaatccctcttcccttaccaggggtgagtaccattccccttacgatgaagccgagttcttcacttcccactattctgaggacctcttccaagagcacacacccatctcccccaaccacacgcactagcgaaacccccgttgctacaacccagacacccacaaccctgacctcccggcgaactactaggatcacgtcacaaatgactacacagtctactctcacaacaactgcaggaacctgtgacaacggcggaacatgggagcagggacagtgtgcttgcctgccgggattctcaggcgaccgctgtcaactgcagacaaggtgccagaacggaggacagtgggatggcctgaaatgccaatgtcctagcaccttctatggtagttcatgcgagtttgccgtagaacaggtcgatctggacgtggttgagactgaggttgggatggaagtgagtgttgatcagcagttttccccagacctcaatgataatacgtctcaggcctatcgcgatttcaacaagactttctggaaccagatgcaaaaaattttcgccgacatgcaggggtttacatttaaaggagtggaaattctgtcgctgcgtaacggaagtattgtcgtcgactacctcgtgctgctcgagatgcctttcagcccgcagctcgagtccgagtatgagcaagtaaagaccactctgaaagaagggctccaaaacgcctcacaagatgccaactcctgccaggactcccagaccctgtgtttcaagcccgattccatcaaggtcaacaataatagcaagaccgagctgacaccagaagcaatttgtagacgtgctgctccaacgggttacgaagagttttattttcctctagtagaagccacccggctgaggtgcgtgacaaaatgtacaagtggggtcgacaacgccattgactgtcatcaagggcagtgcgtgttggaaacatcaggacctgcctgcagatgctatagtaccgatactcattggttttctggtccccgttgtgaggtcgcagtgcactggcgtgcgctggtcggcggtttgaccgcgggtgctgccctgctggtcctcctactgctggccctgggcgtcagagccgtgagatctgggtggtggggaggtcagcgacgcggaagaagttgggatcaggacagaaagtggtttgagacctgggacgaggaagtggtggggactttcagcaactggggcttcgaggatgacggaacagacaaagacaccaatttccacgtcgccctggaaaacgttgacactactatgaaggtgcacattaaacggcctgagatgacaagctcatccgtatag

SEQ ID NO: 160644 - DNA, 2631 bp, Artificial Sequence
  derived and/or modified sequence
atctacagcaccgtgagcaccagcaccaccgccatcaccagccacttcaccaccagcgagaccgccgtgacccccacccccgtgacccccagcagcctgagcaccgacatccccaccaccagcctgagaaccctgacccccagcagcgtgggcaccagcaccagcctgaccaccaccaccgacttccccagcatccccaccgacatcagcaccctgcccaccagaacccacatcatcagcagcagccccagcatccagagcaccgagaccagcagcctggtgggcaccaccagccccaccatgagcaccgtgagaatgaccctgagaatcaccgagaacacccccatcagcagcttcagcaccagcatcgtggtgatccccgagacccccacccagaccccccccgtgctgaccagcgccaccggcacccagaccagccccgcccccaccaccgtgaccttcggcagcaccgacagcagcaccagcaccctgcacaccctgacccccagcaccgccctgagcaccatcgtgagcaccagccaggtgcccatccccagcacccacagcagcaccctgcagaccacccccagcacccccagcctgcagaccagcctgaccagcaccagcgagttcaccaccgagagcttcaccagaggcagcaccagcaccaacgccatcctgaccagcttcagcaccatcatctggagcagcacccccaccatcatcatgagcagcagccccagcagcgccagcatcacccccgtgttcagcaccaccatccacagcgtgcccagcagcccctacatcttcagcaccgagaacgtgggcagcgccagcatcaccggcttccccagcctgagcagcagcgccaccaccagcaccagcagcaccagcagcagcctgaccaccgccctgaccgagatcacccccttcagctacatcagcctgcccagcaccaccccctgccccggcaccatcaccatcaccatcgtgcccgccagccccaccgacccctgcgtggagatggaccccagcaccgaggccaccagcccccccaccacccccctgaccgtgttccccttcaccaccgagatggtgacctgccccaccagcatcagcatccagaccaccctgaccacctacatggacaccagcagcatgatgcccgagagcgagagcagcatcagccccaacgccagcagcagcaccggcaccggcaccgtgcccaccaacaccgtgttcaccagcaccagactgcccaccagcgagacctggctgagcaacagcagcgtgatccccctgcccctgcccggcgtgagcaccatccccctgaccatgaagcccagcagcagcctgcccaccatcctgagaaccagcagcaagagcacccaccccagcccccccaccaccagaaccagcgagacccccgtggccaccacccagacccccaccaccctgaccagcagaagaaccaccagaatcaccagccagatgaccacccagagcaccctgaccaccaccgccggcacctgcgacaacggcggcacctgggagcagggccagtgcgcctgcctgcccggcttcagcggcgacagatgccagctgcagaccagatgccagaacggcggccagtgggacggcctgaagtgccagtgccccagcaccttctacggcagcagctgcgagttcgccgtggagcaggtggacctggacgtggtggagaccgaggtgggcatggaggtgagcgtggaccagcagttcagccccgacctgaacgacaacaccagccaggcctacagagacttcaacaagaccttctggaaccagatgcagaagatcttcgccgacatgcagggcttcaccttcaagggcgtggagatcctgagcctgagaaacggcagcatcgtggtggactacctggtgctgctggagatgcccttcagcccccagctggagagcgagtacgagcaggtgaagaccaccctgaaggagggcctgcagaacgccagccaggacgccaacagctgccaggacagccagaccctgtgcttcaagcccgacagcatcaaggtgaacaacaacagcaagaccgagctgacccccgaggccatctgcagaagagccgcccccaccggctacgaggagttctacttccccctggtggaggccaccagactgagatgcgtgaccaagtgcaccagcggcgtggacaacgccatcgactgccaccagggccagtgcgtgctggagaccagcggccccgcctgcagatgctacagcaccgacacccactggttcagcggccccagatgcgaggtggccgtgcactggagagccctggtgggcggcctgaccgccggcgccgccctgctggtgctgctgctgctggccctgggcgtgagagccgtgagaagcggctggtggggcggccagagaagaggcagaagctgggaccaggacagaaagtggttcgagacctgggacgaggaggtggtgggcaccttcagcaactggggcttcgaggacgacggcaccgacaaggacaccaacttccacgtggccctggagaacgtggacaccaccatgaaggtgcacatcaagagacccgagatgaccagcagcagcgtgtag

SEQ ID NO: 160645 - protein, 2439 aa, Artificial Sequence
  derived and/or modified sequence
MVQRWLLLSCCGALLSAGLANTSYTSPGLQRLKDSPQTAPDKGQCSTWGAGHFSTFDHHVYDFSGTCNYIFAATCKDAFPTFSVQLRRGPDGSISRIIVELGASVVTVSEAIISVKDIGVISLPYTSNGLQITPFGQSVRLVAKQLELELEVVWGPDSHLMVLVERKYMGQMCGLCGNFDGKVTNEFVSEEGKFLEPHKFAALQKLDDPGEICTFQDIPSTHVRQAQHARICTQLLTLVAPECSVSKEPFVLSCQADVAAAPQPGPQNSSCATLSEYSRQCSMVGQPVRRWRSPGLCSVGQCPANQVYQECGSACVKTCSNPQHSCSSSCTFGCFCPEGTVLNDLSNNHTCVPVTQCPCVLHGAMYAPGEVTIAACQTCRCTLGRWVCTERPCPGHCSLEGGSFVTTFDARPYRFHGTCTYILLQSPQLPEDGALMAVYDKSGVSHSETSLVAVVYLSRQDKIVISQDEVVTNNGEAKWLPYKTRNITVFRQTSTHLQMATSFGLELVVQLRPIFQAYVTVGPQFRGQTRGLCGNFNGDTTDDFTTSMGIAEGTASLFVDSWRAGNCPAALERETDPCSMSQLNKVCAETHCSMLLRTGTVFERCHATVNPAPFYKRCVYQACNYEETFPHICAALGDYVHACSLRGVLLWGWRSSVDNCTIPCTGNTTFSYNSQACERTCLSLSDRATECHHSAVPVDGCNCPDGTYLNQKGECVRKAQCPCILEGYKFILAEQSTVINGITCHCINGRLSCPQRPQMFLASCQAPKTFKSCSQSSENKFGAACAPTCQMLATGVACVPTKCEPGCVCAEGLYENADGQCVPPEECPCEFSGVSYPGGAELHTDCRTCSCSRGRWACQQGTHCPSTCTLYGEGHVITFDGQRFVFDGNCEYILATDVCGVNDSQPTFKILTENVICGNSGVTCSRAIKIFLGGLSVVLADRNYTVTGEEPHVQLGVTPGALSLVVDISIPGRYNLTLIWNRHMTILIRIARASQDPLCGLCGNFNGNMKDDFETRSRYVASSELELVNSWKESPLCGDVSFVTDPCSLNAFRRSWAERKCSVINSQTFATCHSKVYHLPYYEACVRDACGCDSGGDCECLCDAVAAYAQACLDKGVCVDWRTPAFCPIYCGFYNTHTQDGHGEYQYTQEANCTWHYQPCLCPSQPQSVPGSNIEGCYNCSQDEYFDHEEGVCVPCMPPTTPQPPTTPQLPTTGSRPTQVWPMTGTSTTIGLLSSTGPSPSSNHTPASPTQTPLLPATLTSSKPTASSGEPPRPTTAVTPQATSGLPPTATLRSTATKPTVTQATTRATASTASPATTSTAQSTTRTTMTLPTPATSGTSPTLPKSTNQELPGTTATQTTGPRPTPASTTGPTTPQPGQPTRPTATETTQTRTTTEYTTPQTPHTTHSPPTAGSPVPSTGPVTATSFHATTTYPTPSHPETTLPTHVPPFSTSLVTPSTHTVITPTHAQMATSASNHSAPTGTIPPPTTLKATGSTHTAPPITPTTSGTSQAHSSFSTNKTPTSLHSHTSSTHHPEVTPTSTTTITPNPTSTRTRTPVAHTNSATSSRPPPPFTTHSPPTGSSPFSSTGPMTATSFKTTTTYPTPSHPQTTLPTHVPPFSTSLVTPSTHTVITPTHAQMATSASIHSMPTGTIPPPTTLKATGSTHTAPTMTLTTSGTSQALSSLNTAKTSTSLHSHTSSTHHAEATSTSTTNITPNPTSTGTPPMTVTTSGTSQSRSSFSTAKTSTSLHSHTSSTHHPEVTSTSTTSITPNHTSTGTRTPVAHTTSATSSRLPTPFTTHSPPTGTTPISSTGPVTATSFQTTTTYPTPSHPHTTLPTHVPSFSTSLVTPSTHTVIIPTHTQMATSASIHSMPTGTIPPPTTIKATGSTHTAPPMTPTTSGTSQSPSSFSTAKTSTSLPYHTSSTHHPEVTPTSTTNITPKHTSTGTRTPVAHTTSASSSRLPTPFTTHSPPTGSSPFSSTGPMTATSFQTTTTYPTPSHPQTTLPTHVPPFSTSLVTPSTHTVIITTHTQMATSASIHSTPTGTVPPPTTLKATGSTHTAPPMTVTTSGTSQTHSSFSTATASSSFISSSSWLPQNSSSRPPSSPITTQLPHLSSATTPVSTTNQLSSSFSPSPSAPSTVSSYVPSSHSSPQTSSPSVGTSSSFVSAPVHSTTLSSGSHSSLSTHPTTASVSASPLFPSSPAASTTIRATLPHTISSPFTLSALLPISTVTVSPTPSSHLASSTIAFPSTPRTTASTHTAPAFSSQSTTSRSTSLTTRVPTSGFVSLTSGVTGIPTSPVTNLTTRHPGPTLSPTTRFLTSSLTAHGSTPASAPVSSLGTPTPTSPGVCSVREQQEEITFKGCMANVTVTRCEGACISAASFNIITQQVDARCSCCRPLHSYEQQLELPCPDPSTPGRRLVLTLQVFSHCVCSSVACGD

SEQ ID NO: 160646 - DNA, 7320 bp, Artificial Sequence
  derived and/or modified sequence
atggtgcagcgatggctgctgctgtcctgctgcggggctctgctgtctgccggactagccaacacctcctacacatcgccagggttgcaacgactgaaagattcaccacaaacagcaccggacaagggacagtgcagcacatggggcgccgggcacttttccacatttgaccaccatgtgtacgacttctccggcacctgtaactacattttcgccgctacatgcaaggacgcatttcctacattttccgtacaactgagacgcgggcccgacggaagcatctctagaatcatcgtggagctcggcgcttcagttgttactgtgtcagaggcaataatcagcgtcaaggacattggcgtgatatcattgccctacacctcaaacggcttgcagattaccccattcggtcagtctgtcagactcgtcgctaagcagctcgagctcgagctcgaggtggtttggggtcctgactcgcacctgatggtgctagtggagagaaagtatatggggcagatgtgcggtctttgtggcaatttcgacggaaaggttactaatgaatttgtatcagaggaaggaaaattccttgaacctcataagtttgccgccctgcaaaagttagacgaccctggcgaaatctgcacatttcaggacattcctagtacacatgtgaggcaggcccagcatgcgaggatctgtacccaacttctcaccctggtagcccccgagtgctcagttagtaaggagcccttcgtcctgtcatgtcaggccgatgtggctgccgcaccacagcccggaccccagaattccagctgcgctacactgtccgagtatagccgccagtgcagtatggtcgggcagcctgttaggagatggagaagtcctggactttgcagcgtgggacagtgcccagctaaccaggtttaccaagaatgcgggtccgcctgtgttaagacatgctccaaccctcagcactcgtgcagctcatcttgtactttcggatgtttctgtcctgagggtacagtgctcaacgacctctcgaacaaccacacctgcgtgccagtgacacagtgcccttgcgtccttcacggcgctatgtatgcaccgggcgaagtgacgattgccgcttgtcaaacctgtcggtgcaccttgggcagatgggtctgtacagagaggccctgcccagggcattgctctctcgagggaggaagcttcgttaccactttcgacgcaagaccttaccggttccacggcacatgcacttacatcttgctacagtctccacagttgcctgaagacggcgccttgatggccgtctacgataagagcggcgtgtcccattctgagactagcctggtagccgtcgtctacttgtctcggcaggataaaatagtgatcagccaggatgaagtggtaactaacaatggcgaggcgaaatggctcccctataagacaaggaatataacagtgtttagacagaccagtacccacttgcagatggccaccagttttgggttagaactcgtggtgcagctgaggccaatcttccaggcttatgttacagtcggccctcaatttaggggtcagacccggggattatgtggaaacttcaatggggatactactgacgatttcactaccagcatggggatagccgaggggacggctagcttgttcgtggactcctggcgggcaggaaactgcccagcagctctagagcgggaaactgatccgtgttccatgtctcagttgaataaggtgtgcgccgaaacccactgcagcatgctgctgagaacaggaaccgtgtttgaaagatgccatgcaaccgtgaacccagcacccttctacaagagatgcgtgtatcaggcttgcaattatgaagagacctttccacacatttgtgctgccctgggcgattacgttcatgcttgctctttgcgcggagttcttctctggggctggcgcagttcagttgataactgtaccattccatgtactgggaatactaccttctcttacaactcccaggcctgcgagcggacctgtctatctctgagcgaccgagccaccgagtgtcaccacagcgccgtgcctgtagatggatgcaactgccccgatgggacttacttgaaccagaagggtgaatgtgtaagaaaagcccagtgcccatgcattctggagggctataagttcatcctagcagaacagtcaacggtaatcaacggcatcacatgccactgtatcaatggaagattaagttgcccacagcgcccccagatgtttctcgcttcctgtcaggcaccaaaaacttttaagagttgcagccaatcaagcgaaaacaaattcggggccgcctgtgccccgacctgccagatgcttgccacaggggttgcgtgtgtgcccaccaaatgcgagccagggtgcgtgtgcgccgaaggtttgtatgagaacgcggacggacagtgtgttccacccgaggagtgcccctgtgaattctctggcgtttcctatcctggtggagcagaactccacacggactgtcgtacctgcagctgcagcaggggaaggtgggcctgtcagcaaggtactcattgtccgtccacttgtaccctgtacggcgagggccatgtgatcacttttgacggacagagattcgtcttcgatgggaattgtgaatacatactggctaccgatgtctgcggcgtgaacgactctcagcccacattcaaaatcctaaccgaaaacgtaatctgtggaaatagcggagtcacatgctcaagagctatcaaaattttcctcggcgggctcagcgttgtactagccgatcggaactacacggtgaccggcgaggagccacacgtccagctgggcgtgacccccggagccctcagcctggtggtcgacataagtattcctgggaggtataatctgacactgatatggaatcgacatatgacaattcttatcaggattgcaagagcatcacaggatcccctatgtgggttgtgcgggaatttcaacggcaacatgaaggacgatttcgagacaaggagccgctacgttgcaagttcggagctggaactagtgaatagttggaaggagagcccattgtgcggtgatgtcagtttcgttacagatccttgctctctgaatgccttccggcgatcatgggccgagagaaaatgttctgttattaattctcagacatttgccacttgtcacagcaaagtgtaccatctcccatattacgaggcatgcgtccgcgacgcctgtggatgtgattcagggggcgattgcgagtgcctctgcgacgctgtcgccgcatacgcccaagcttgtctcgataagggcgtctgcgtggattggaggactccagcattctgccccatctactgtggtttttataacacccatacccaagatggacacggcgagtaccagtatacccaggaggctaactgtacgtggcactaccagccctgtctttgccccagccagccacagagcgttcccgggagcaacatcgagggctgctataactgctctcaagatgagtattttgaccacgaggagggggtgtgcgtgccatgtatgccaccaactactcctcagccgccaaccactccacaactgccaacaactgggtccagacccacgcaggtgtggcccatgacagggacctctacaacaataggactgctttccagcaccggaccaagcccatctagtaatcacacaccagccagtccaactcagaccccactattacctgccaccctgactagctcaaaaccaaccgcctcaagcggtgagcctccacggccaaccacggctgtgactcctcaggctacgtccggcctgccacccactgcaaccctgagaagcacagccaccaaacctacggtcactcaggccactacgagagcgacggcttccactgcttcccccgccaccaccagcacggcacagtctacgactaggacgactatgactctccccacccctgccactagcggaacatcccccacacttccgaaaagcacaaaccaagagctgcccggaacaaccgcgactcaaactaccgggcccagaccaactcccgcaagcactaccggcccaaccaccccgcagcctggccagcccaccaggccaactgccaccgagacaacacagacacggaccacgacagagtataccacgccccagacccctcatactacacacagtcccccgactgctgggtcacctgttccttccactggcccagttaccgccacatcttttcatgctactaccacctacccaactccttcgcaccctgaaacgacgctgccgacccacgtccctcccttctctacctccctggtcacccctagtactcacacagtgatcactcccacccatgcacagatggccactagcgcctcaaaccattctgcaccaactggaactatcccaccccctaccaccctgaaagctactggatctacccacacagcaccccccattactcccacaacatccggaaccagtcaggcccactcctccttttccacaaacaagacacccacttcccttcactctcacacgagctccacacaccatcccgaggtgacccccacatctactaccacgataaccccaaatcctacctcaacccggactcgcactccggtggctcatacaaatagtgccacgtctagtcgaccgccccccccctttaccacacatagtccccctaccggctcctcccctttctcaagcactggaccaatgactgcaacgtcctttaaaaccacgacaacctacccgacgcccagccacccacagacaactttgcctacacatgtccccccgttctccacgagtctggtgactccatctacccatacggtcattacacccacacacgcacagatggctacatctgccagtattcacagcatgccaactggtactatccccccaccaacaactttaaaagccacggggagcactcatactgcccccacaatgactctcacaacatctgggacaagtcaagccctgtcatcgctcaacacagccaaaacgtccaccagcttgcactcacatacatctagtactcaccacgctgaggctaccagcacttccacgacaaacatcacaccgaatcctacgagtaccggcacacccccgatgacggttaccacctccggaacttctcagagtaggagcagcttttctacagccaagacttctaccagtctccacagccacaccagctccacccaccaccccgaggtgaccagcacctcaacgacctccatcacgccaaaccacaccagtacaggaaccagaacccctgtggcccatactaccagtgccacgagctctaggctccccactccctttactacccactcccccccgacaggaacgacacctatatctagtactggaccagtgaccgcgacttcatttcagaccaccaccacctatcccacgccgtcccatccacacactaccttgcctacccacgtccctagtttttcgacttctctggtcacaccctcaacccacaccgttatcattcctacccacactcaaatggcaacttccgcttcaatacactccatgccgacgggaaccataccccctccaacgaccattaaagccacgggatcaacccataccgctcctcccatgactcccaccacctcaggtactagccagtctcctagctctttcagcactgccaagacatctacctccctgccctatcatacctccagtacgcaccacccagaagttaccccgacatctacgacaaacataacacctaagcacacgagtactgggacccgcacacctgtcgctcacacaaccagtgctagcagtagccgcctgccaacaccatttactacccattcacctcctactggatccagcccgtttagttctacggggccgatgacagctacgagcttccagaccactacaacttaccctaccccaagtcacccacagaccacactcccaactcacgtacctccattttccacatctctggtcacccccagcacccatacagttataatcactacacatacccagatggcaacttcggcaagcatccattccacccctacaggaacagtcccgcccccaacaacactgaaggccaccggctcaacccatactgctccgcctatgacagtgaccacgagcggcacctcccagacccactcatcattcagtaccgccactgcttccagtagttttatctcttcctcaagttggctgccccagaatagctccagtaggcccccttcaagcccgataaccacacagctgcctcatctatcaagtgctacaacacccgttagcacgacaaaccagctgtcttccagtttttccccttcacccagcgccccaagtaccgtcagtagttacgtgcctagttcacattccagccctcagacctcctcgcctagcgtgggcaccagctcaagttttgttagtgctccggtgcatagtaccactttatcgtcggggtcacacagcagtttaagcacccatcccaccacagcctctgtcagcgcgtcgccactgttcccaagttccccagccgcatctacgactatccgggccactctgccacacacaatcagcagccccttcaccctgtctgctctgctcccaatttcaacagttactgtgagtcctacgcccagctcccacctggcctcaagtaccatcgcctttccttccactccaaggaccaccgccagcacgcacacggctccggcattttcctcacagagcaccacaagtaggtccacctcccttacgacgagagttcccacctcaggatttgtatcccttacctctggagttactggcataccaacttcaccagtcacaaacctcaccaccaggcaccctggaccgactctgtccccgactactcggtttttaacctcgtccctcacggctcacggctcaaccccagcatctgctccggtaagcagcctcgggactccaacgcctacttcgcccggagtctgttcagttcgggaacagcaggaggagatcaccttcaagggctgcatggccaacgtgactgtgactcgatgcgagggggcgtgcatttccgccgcgagcttcaatattattacacagcaggtcgacgctaggtgcagttgttgtcgcccattgcacagttacgagcagcagcttgagctcccttgtccagacccctccacaccagggcggagactagtcttaaccctccaggtgtttagccactgcgtttgttcttccgtggcatgcggcgattag

SEQ ID NO: 160647 - DNA, 7320 bp, Artificial Sequence
  derived and/or modified sequence
atggtgcagcgctggctgctgctgagctgctgcggggccctgctgtctgctggcctggccaacaccagctacaccagccctggcctgcagaggctgaaggacagcccccagacagccccagacaagggccagtgcagcacctggggcgccggccacttcagcacctttgaccaccacgtgtatgacttcagcggcacctgcaactacatctttgctgccacctgcaaggatgccttccccaccttctctgtgcagctgcggcggggcccagatggcagcatcagccgcatcatcgtggagctgggcgcctctgtggtgacagtgtctgaggccatcatctctgtgaaggacatcggggtcatcagcctgccctacaccagcaatggcctgcagatcaccccatttggccagagcgtgcggctggtggccaagcagctggagctggagctggaggtggtgtggggccctgacagccacctgatggtgctggtggagaggaagtacatgggccagatgtgtggcctgtgtggcaactttgatggcaaggtgaccaatgaatttgtgtctgaggagggcaagttcctggagccccacaagtttgctgccctgcagaagctggatgatcctggagagatctgcaccttccaggacatccccagcacccacgtgcggcaggcccagcacgcccgcatctgcacccagctgctgaccctggtggcccctgagtgcagcgtgtccaaggagccctttgtgctgagctgccaggctgatgtggccgccgccccccagcccggcccccagaacagcagctgtgccaccctgtctgagtacagccggcagtgcagcatggtgggccagcctgtgcggcgctggaggagccctggcctgtgcagcgtgggccagtgcccagccaaccaggtgtaccaggagtgtggcagcgcctgtgtgaagacctgcagcaacccccagcacagctgcagcagcagctgcaccttcggctgcttctgcccagagggcaccgtgctgaatgacctgagcaacaaccacacctgtgtgcctgtgacccagtgcccctgtgtgctgcacggggccatgtatgcccctggagaggtgaccatcgccgcctgccagacctgccgctgcaccctgggccgctgggtgtgcacagagcggccctgccccggccactgcagcctggagggcggcagctttgtgaccacctttgatgcccggccctaccgcttccacggcacctgcacctacatcctgctgcagagcccccagctgcctgaagatggagccctgatggctgtgtatgacaagagcggcgtgagccacagcgagaccagcctggtggccgtggtgtacctgagccggcaggacaagatcgtcatcagccaggatgaggtggtgaccaacaacggggaggccaagtggctgccctacaagaccaggaacatcaccgtcttccggcagaccagcacccacctgcagatggccaccagctttggcctggagctggtggtgcagctgcggcccatcttccaggcctacgtgacagtgggcccccagttccggggccagacccggggcctgtgtggcaacttcaatggagacaccacagatgacttcaccacctccatgggcattgctgagggcacagccagcctgtttgtggacagctggagggctggcaactgcccagctgccctggagcgggagacagacccctgcagcatgagccagctgaacaaggtgtgtgccgagacccactgcagcatgctgctgaggacaggcaccgtgtttgagcgctgccacgccaccgtgaacccagcccccttctacaagagatgtgtgtaccaggcctgcaactatgaggagaccttcccccacatctgtgccgccctgggggactatgtgcacgcctgcagcctgcggggcgtgctgctgtggggctggaggagctctgtggacaactgcaccatcccctgcaccggcaacaccaccttctcctacaacagccaggcctgtgagaggacctgcctgagcctgagtgaccgggccacagagtgccaccacagcgctgtgcctgtggatggctgcaactgcccagatggcacctacctgaaccagaagggggagtgtgtgaggaaggcccagtgcccctgcatcctggagggctacaagttcatcctggccgagcagagcaccgtcatcaatggcatcacctgccactgcatcaatggccgcctgagctgcccccagaggccccagatgttcctggccagctgccaggcccccaagaccttcaagagctgcagccagagcagcgagaacaagtttggagctgcctgtgcccccacctgccagatgctggccaccggggtggcctgtgtgcccaccaagtgtgagcccggctgtgtgtgtgccgagggcctgtatgaaaatgctgatggccagtgtgtgcccccagaggagtgcccctgtgagttcagcggcgtgtcctacccaggaggagctgagctgcacacagactgcaggacctgcagctgcagccggggccgctgggcctgccagcagggcacccactgccccagcacctgcaccctgtatggagagggccacgtgatcacctttgatggccagagatttgtgtttgatggcaactgtgagtacatcctggccacagatgtgtgtggggtgaatgacagccagcccaccttcaagatcctgacagaaaatgtcatctgtggcaacagcggcgtgacctgcagccgggccatcaagatcttcctgggcggcctgtctgtggtgctggccgacaggaactacacagtgactggagaggagccccacgtgcagctgggcgtgacccctggggccctgagcctggtggtggacatcagcatccctggccgctacaacctgaccctcatctggaacagacacatgaccatcctgatccgcatcgcccgggccagccaggaccccctgtgtggcctgtgtggcaacttcaacggcaacatgaaggatgactttgagaccaggagccgctacgtggccagcagcgagctggagctggtgaacagctggaaggagagccccctgtgtggagatgtgtcctttgtgacagacccctgcagcctgaatgccttcagaagatcctgggccgagaggaagtgcagcgtcatcaacagccagacctttgccacctgccacagcaaggtgtaccacctgccctactatgaggcctgtgtgagagatgcctgtggctgtgacagcggcggggactgtgaatgtctgtgtgatgctgtggccgcctatgcccaggcctgcctggacaagggcgtgtgtgtggactggaggaccccagccttctgccccatctactgcggcttctacaacacccacacccaggacggccacggggagtaccagtacacccaggaggccaactgcacctggcactaccagccctgcctgtgccccagccagccccagagcgtgcccggcagcaacatcgagggctgctacaactgcagccaggatgagtactttgaccacgaggagggcgtgtgtgtgccctgcatgccacccaccaccccccagccccccaccaccccccagctgcccaccaccggcagccggcccacccaggtgtggcccatgacaggcaccagcaccaccatcggcctgctgagcagcacaggccccagccccagcagcaaccacaccccagccagccccacccagacccccctgctgcctgccaccctgaccagcagcaagcccacagccagcagcggggagcccccccggcccaccacagctgtgaccccccaggccaccagcggcctgcccccaacagccaccctgcggagcacagccaccaagcccaccgtgacccaggccaccacccgggccacagccagcacagccagccctgccaccaccagcacagcccagagcaccaccaggaccaccatgaccctgcccaccccagccaccagcggcaccagccccaccctgcccaagagcaccaaccaggagctgcccggcaccacagccacccagaccaccggcccccggcccaccccagccagcaccaccggccccaccaccccccagcccggccagcccacccggcccacagccacagagaccacccagaccaggaccaccacagagtacaccaccccccagaccccccacaccacccacagccccccaacagctggcagccctgtgcccagcactggacctgtgacagccaccagcttccacgccaccaccacctaccccacccccagccaccctgagaccaccctgcccacccacgtgccccccttcagcaccagcctggtgacccccagcacccacacagtcatcacccccacccacgcccagatggccaccagcgccagcaaccacagcgcccccaccggcaccatccccccacccaccaccctgaaggccaccggcagcacccacacagccccacccatcacccccaccaccagcggcaccagccaggcccacagcagcttcagcaccaacaagacccccaccagcctgcacagccacaccagcagcacccaccaccctgaggtgacccccaccagcaccaccaccatcacccccaaccccaccagcaccaggaccaggacccctgtggcccacaccaacagcgccaccagcagcaggcctcctccacccttcaccacccacagcccccccaccggcagcagccccttcagcagcacaggccccatgacagccaccagcttcaagaccaccaccacctaccccacccccagccacccccagaccaccctgcccacccacgtgccccccttcagcaccagcctggtgacccccagcacccacacagtcatcacccccacccacgcccagatggccaccagcgccagcatccacagcatgcccaccggcaccatccccccacccaccaccctgaaggccaccggcagcacccacacagcccccaccatgaccctgaccaccagcggcaccagccaggccctgagcagcctgaacacagccaagaccagcaccagcctgcacagccacaccagcagcacccaccacgccgaggccaccagcaccagcaccaccaacatcacccccaaccccaccagcacaggcaccccacccatgacagtgaccaccagcggcaccagccagagccgcagcagcttcagcacagccaagaccagcaccagcctgcacagccacaccagcagcacccaccaccctgaggtgaccagcaccagcaccaccagcatcacccccaaccacaccagcacaggcaccaggacccctgtggcccacaccaccagcgccaccagcagccggctgcccacccccttcaccacccacagcccccccaccggcaccacccccatcagcagcacaggccctgtgacagccaccagcttccagaccaccaccacctaccccacccccagccacccccacaccaccctgcccacccacgtgcccagcttcagcaccagcctggtgacccccagcacccacacagtcatcatccccacccacacccagatggccaccagcgccagcatccacagcatgcccaccggcaccatccccccacccaccaccatcaaggccaccggcagcacccacacagccccacccatgacccccaccaccagcggcaccagccagagccccagcagcttcagcacagccaagaccagcaccagcctgccctaccacaccagcagcacccaccaccctgaggtgacccccaccagcaccaccaacatcacccccaagcacaccagcacaggcaccaggacccctgtggcccacaccaccagcgccagcagcagccggctgcccacccccttcaccacccacagccccccaacaggcagcagccccttcagcagcacaggccccatgacagccaccagcttccagaccaccaccacctaccccacccccagccacccccagaccaccctgcccacccacgtgccccccttcagcaccagcctggtgacccccagcacccacacagtcatcatcaccacccacacccagatggccaccagcgccagcatccacagcacccccactggaacagtgcccccacccaccaccctgaaggccaccggcagcacccacacagccccacccatgacagtgaccaccagcggcaccagccagacccacagcagcttcagcacagccacagccagcagcagcttcatcagcagcagctcctggctgccccagaacagcagcagccggccccccagcagccccatcaccacccagctgccccacctgagcagcgccaccacccctgtgtccaccaccaaccagctgagcagcagcttcagccccagccccagcgcccccagcacagtgtcctcctatgtgcccagcagccacagcagcccccagaccagcagccccagcgtgggcaccagcagcagctttgtgtctgcccctgtgcacagcaccaccctgagcagcggcagccacagcagcctgagcacccaccccaccacagcctctgtgtctgccagccccctcttccccagcagccctgctgccagcaccaccatccgggccaccctgccccacaccatcagcagccccttcaccctgagcgccctgctgcccatcagcacagtgacagtgagccccacccccagcagccacctggccagcagcaccatcgccttccccagcacccccaggaccacagccagcacccacacagccccagccttcagcagccagagcaccaccagccgcagcaccagcctgaccaccagggtgcccaccagcggctttgtgtccctgaccagcggcgtgacaggcatccccaccagccctgtgaccaacctgaccaccaggcaccctggccccaccctgagccccaccacccgcttcctgaccagcagcctgacagcccacggcagcaccccagccagcgcccctgtgagcagcctgggcacccccacccccaccagccctggggtgtgcagcgtgcgggagcagcaggaggagatcaccttcaagggctgcatggccaacgtgacagtgacccgctgtgagggcgcctgcatctctgctgccagcttcaacatcatcacccagcaggtggatgcccgctgcagctgctgccggcccctgcacagctatgagcagcagctggagctgccctgcccagaccccagcaccccaggccggcggctggtgctgaccctgcaggtgttcagccactgtgtgtgcagctctgtggcctgtggggactag

SEQ ID NO: 160648 - DNA, 8006 bp, Artificial Sequence
  derived and/or modified sequence
ggcagcagcaggcctgccgggcccagcgcgagctcctctccactgtgcaccatggtccagcggtggctgctgctgtcctgctgcggagccctgctcagcgctggtctggctaacacctcctacaccagcccaggcctccagaggctgaaggactctccacagacagccccggacaaaggccagtgctccacgtggggggctggtcacttctccaccttcgaccaccacgtgtacgacttctcggggacgtgcaactacatcttcgcggccacctgcaaggacgccttccccaccttcagtgtccagctgcggcgaggcccagacgggagcatctcgcggatcatcgtggagctgggggcctccgtcgtcactgtgagcgaagccatcatctcagtcaaggacatcggggtcatcagcctgccctataccagcaatggactccagatcacacccttcggccagagcgtgcggctggtggccaagcagctggagctggagctggaagtcgtgtggggtcctgacagccacctcatggttctggtggagcggaagtacatgggtcagatgtgcgggctctgcgggaactttgacgggaaggtgaccaacgagtttgtcagtgaggagggcaagttcctggaaccccacaagtttgctgccctccagaagctggacgaccccggcgagatctgcaccttccaggacatccccagcacccacgtccggcaggcccagcacgcccggatctgcacccagctgctgaccctggtggcccctgagtgcagcgtgtccaaggagcccttcgtgctaagctgccaggcggacgtggccgcagccccccagccaggcccacagaacagcagttgtgccaccctgtcggagtactcccgccagtgcagcatggtgggccagccggtccgccgctggcggagccccggcctgtgctccgtgggtcagtgcccggccaaccaggtgtaccaggagtgcggctcggcctgcgtgaagacctgctccaacccgcagcacagctgctccagctcctgcaccttcgggtgcttctgcccggaaggtacggtcctgaatgacctctccaataaccacacctgcgtgcccgtcacccagtgcccctgtgtgctccacggcgccatgtatgcccccggggaggtcacaatagctgcctgccaaacctgccggtgcaccctgggccgctgggtgtgcacggagcggccgtgccccggacactgctccctggaaggtggctcctttgttaccacatttgacgccaggccctaccgcttccacggcacctgcacctacatcctcctccagagcccccagcttcccgaggacggtgccctcatggctgtgtacgacaagtccggcgtctcacactccgagacctccctggtggctgtggtctacctctccaggcaggacaaaattgtgatctctcaggacgaggtggtcaccaacaacggagaagccaagtggctgccatacaagactcgcaacatcacggtcttcaggcagacgtccacccacctccagatggccaccagcttcgggctggagctcgtggtccagctgcgccccatcttccaggcctatgtcactgttgggccccagttcagaggtcagaccagagggctctgcggcaacttcaacggggacacaacggatgacttcaccactagcatgggtatcgccgagggcaccgcctcgctgtttgtggactcctggcgggcggggaactgtccggccgctctggagcgtgagactgacccctgctccatgagccagctcaacaaggtgtgtgcagagacccactgctccatgctgctgaggacaggcacggtgttcgagaggtgccacgccacagtgaaccctgcacccttctacaagaggtgcgtgtaccaggcctgcaactacgaggagacctttccccacatctgtgccgccctgggcgactacgtacacgcctgctccttgcggggcgtcctgctctggggctggagaagcagtgtggacaactgcaccatcccctgcacgggtaacaccaccttcagctacaacagccaagcctgtgagcgcacctgcctgtcgctgtcggaccgtgccaccgagtgccaccacagcgccgtgcccgtggacggttgcaactgccccgatggcacctacctgaaccaaaagggcgagtgtgtgcgcaaggcccagtgcccgtgcatactggagggttacaagttcatcctggccgagcagtccactgtcatcaacggcatcacctgccactgcatcaacgggcggctgagttgcccgcagcggccacagatgttcctggcctcctgccaggcccctaagaccttcaagtcctgcagccagtcctccgagaacaagtttggggcagcctgtgcccccacatgccagatgctggccaccggtgttgcctgcgtgcccaccaagtgtgagcctggctgtgtctgcgccgagggcctctacgagaatgccgacgggcagtgtgtgccccccgaggagtgcccatgtgagttctcgggggtctcctaccctggaggagctgagctccacactgactgcaggacctgctcctgctcaagggggaggtgggcctgtcagcagggcacccactgcccatccacctgcaccctctacggggagggccacgtcatcaccttcgacggccagcgcttcgtattcgacggcaactgcgagtacatcctggccacggacgtctgtggtgtcaacgactcacagcccaccttcaagatcctgacagagaacgtcatctgtgggaactccggggtcacatgctcacgggccatcaagatcttcctggggggcctgtccgtggtgctggcggacagaaactacacggtcaccggggaggagccccacgtgcagctcggggtgacgccgggtgcgctgagccttgtcgtggacatcagcatccccgggaggtacaacctgacgctcatctggaacaggcacatgaccatcctcatcaggatcgcccgtgcctcccaggatcccctctgcggcttgtgtggcaacttcaacgggaacatgaaggacgacttcgagacgcgcagcaggtacgtggcatccagcgagctggagttggtgaactcgtggaaggagagcccgctgtgcggggacgtgagcttcgtgacagacccctgcagtctcaatgccttccggcgctcctgggccgagcgcaagtgcagcgtcatcaacagccagacctttgccacctgccacagcaaggtataccacctgccctactacgaggcctgcgtgcgcgacgcatgtgggtgtgacagtggcggggactgtgagtgtctgtgcgatgccgtggctgcctacgcccaagcctgtctggacaagggtgtgtgcgtggactggaggaccccggccttctgccccatctactgcggcttctacaacacgcacacgcaggacggccatggcgagtaccagtacacacaggaggccaactgcacgtggcactaccagccctgcctctgccccagccagccacagagcgtcccaggcagcaacatcgaaggctgctacaactgctcccaggatgagtacttcgaccacgaggagggggtgtgcgtgccctgcatgccgcccaccacgccgcagccacccaccacgccgcagctgcccaccacaggctcacggcccacgcaagtctggcccatgacgggaacctccaccaccatcgggcttctcagctccaccggaccctcacccagctctaatcacacccctgccagccccacccagacacccctccttccagccacgctcacatcctccaagcccacagcctcctcgggagaaccacctagaccaaccacggccgtcaccccacaagccacatcagggctgcctcccacagccacactgagatcgacagccacaaaacccacagtgacccaggccacaaccagggccacggcgtcgaccgccagcccagccacgacgtccacagctcagtccacaacacggaccacaatgacactaccaaccccagccacatcagggacaagccccacgctgccaaaatcgaccaatcaggaactgccaggaacaacggccacccagacgacaggcccacgtccaaccccagcaagcaccacaggcccaaccaccccacagccaggacaacccacgaggcccacagccacagagaccactcaaacaagaacgactactgaatacacaacgccccaaaccccacacaccacacactccccgcctacggcggggagtcccgtcccttccacaggtcctgtcactgcaacatctttccatgccaccactacctatccaaccccatcacaccctgagaccacacttcccactcacgttccacctttctccacctccttggtgactccaagtactcacacagtcatcacccctacccacgcacagatggccacatctgcctccaaccactcagcgccaacaggtaccattcctccaccaacaacgctcaaggccacagggtccacccacacagccccaccaataacgccgaccaccagtgggaccagccaagcccacagctcattcagcacaaacaaaacacctacctcgctacattcacacacttcctccacacaccatcctgaagtcaccccaacttctactaccacgattactcccaaccccactagtacacgcaccagaacccctgtggcccacaccaactcagccaccagcagcaggccaccaccacccttcaccacacactccccacctacagggagcagtcccttctcttccacaggtcccatgacggcaacatccttcaagaccaccactacctatccaaccccatcacaccctcagaccacacttcccactcacgttccacctttctccacctctttggtgactccaagtactcacacagtcatcacccctacccatgcacagatggccacttctgcctccatccactcaatgccaacaggcacgattcctccaccgacaacgctcaaggccacagggtccacccacacagcgccaacaatgacgctgaccaccagcgggaccagccaagccctgagctcattaaacacagccaaaacctctacatccctacattcacacacttcctccacacaccatgctgaagccacctcaacttctaccaccaacatcacccccaaccccaccagtacaggaaccccaccaatgacagtgaccaccagtgggaccagccaatcccgaagctcatttagcacggccaaaacctctacatccctacattcacacacttcctccacacaccatcctgaagtcacctcaacttctaccaccagcatcacccccaaccacaccagtacaggcaccagaacccctgtggcccacaccacgtcggccaccagcagcaggctacccacacccttcaccacacactccccacctacagggaccactcccatctcttccacaggtcctgtcactgcaacatccttccagaccaccactacctatccaaccccatcacaccctcacaccacacttcccactcacgttccatctttctccacctccttggtgactccaagtactcacacggtcatcatccctacccacacacagatggccacttctgcctccatccactcaatgccaacaggcaccattcctccaccgaccacgatcaaggccacagggtccacccacacagccccaccaatgacaccgaccaccagtgggaccagccaatccccaagctcatttagcacggccaaaacttctacatccctaccttaccacacttcctcaacacaccatcctgaagtcaccccaacttctaccaccaacatcacccccaaacacaccagtacaggcaccagaacccctgtggcccacaccacctcggccagcagcagcaggctacccacacccttcaccacacactccccacctacagggagcagtcccttctcttccacaggtcctatgactgcaacatccttccagaccaccactacctatccaaccccatcacaccctcagaccacacttcccactcacgttccacctttctccacctccttggtgactccaagtactcacacagtcatcatcactacccacacacagatggccacttctgcctccatccactcaacgccaacaggcaccgttcctccaccaacaacgctcaaggccacagggtccacccacacagccccaccaatgacagtgaccaccagtgggaccagccaaacccacagctcattcagcacagctacagcctcttcttccttcatatcctcctcgtcttggctgcctcagaactctagctcaaggccaccgtcatcacctatcaccacacaactcccccacttgagttctgcaaccactcctgtttccacaactaatcagctgtcctcctcattttctcccagtccttctgccccctctactgtttcttcttatgtgccctcctcccactcctctccccagacttcatcgccttctgttggcacatcttcctctttcgtgtccgcccccgtgcactccacaaccctgagctcggggtcacactcctcattgtccactcatcccacgactgcatcagtgtctgcatctcctctttttccttcttctccagctgcctctactaccattagggccactctcccccacactatctcctctcctttcaccctctctgctctactccccatatccactgttaccgtgtctcccaccccatccagccacctagcctccagcaccattgcatttccgtccacgcccaggaccacggccagcacccacaccgcccctgccttctcctctcagtccaccacctcgcggtccacttctctcaccacccgagttcccacatcaggctttgtgtcactcacctcgggggtgacgggtatccccacctctccagtcaccaaccttaccaccaggcaccctggtcccaccttgtcgcctaccacacggttcctgaccagctccctcactgcccatggaagcacccctgcttctgccccggtatcttctctcgggacacctacgcccacctcacccggggtctgcagtgtgcgggagcagcaggaggagatcacgttcaaggggtgcatggcgaacgtgacggtaacccgctgtgagggcgcctgcatttccgctgccagcttcaacatcatcacccagcaggtggatgcccgctgcagctgctgccgccccctccactcctatgagcagcagctggagctgccctgccccgatcccagcacgcctggccggcggctcgtactcaccctgcaggtgttcagccactgcgtgtgcagctctgtggcctgtggagactagcagggtcgctgcctgctctcctggggctgaaggactgcagatgacagacaggaaaacacccaccagcccccttcccgcttgtgccagcagctgctttcctggtcaccaggcctggcccccaagtgccctgggccgtggctccctggggcaccggttggagaggggctgccaagcaggggctcagactaccacactcctgcagaccctgagccagcagagagggactgaggcggacagtggtcacggacctcccaggcacacagggcactcccgaccacccctgcccaccgtccaacacctcccagcccctgaacttggccccagccctgctgggcccagaaccctgcagatgaagccacagagcaggcgctcgaccagacccatcaggggcgaggagggcacggaaacctgtgccgagatgggggcaagaggcccaggcagccaccagcacagagaagaggagatccccagagtcagggagggcagagggtggcagcgagggcagggcagccgcccccgctcccagccaggcagaaggcccccaccagcaccacacccatccccagcagcctgtccttgggagagggcgtcacccggtcagagactccaaataaaccggttcttgtcaaggcaca

SEQ ID NO: 160649 - DNA, 7320 bp, Artificial Sequence
  derived and/or modified sequence
atggtgcagcggtggctgctgctgagctgctgcggcgccctgctgagcgctggcctagcgaacacttcttacacaagtcctggacttcaacggctgaaggactctcctcaaaccgcacccgataaaggacagtgttcaacctggggagccggccactttagtacttttgaccaccacgtgtatgactttagcggtacatgcaattacatcttcgccgccacctgcaaggatgcctttcctacattttccgtccaactgcgccgtggcccagacggctccataagtcggatcattgtcgagctcggcgcatcagtggtcaccgtttcagaggcaataatctctgtgaaggacataggagtgatatccttgccctacacttccaacgggttacagatcactccttttggccaaagcgtaagactggtcgccaaacagctcgagctcgaattagaagttgtgtggggccccgatagtcatctgatggttctcgtcgagcggaaatacatgggacagatgtgcggactgtgtggcaatttcgatggcaaggtaactaatgagtttgtctccgaggagggcaaattcttggaaccccacaagttcgcagcactacagaagctggacgatcctggagagatctgcacgttccaggatattcctagtacccatgtgagacaggcccagcacgcgcgaatttgcacccagctgttaacactcgtcgcacctgagtgttccgtgagtaaggagccttttgtgttatcctgccaggctgacgttgccgcagcaccacagccagggccccagaactcaagctgtgccaccctaagtgaatactcccgacagtgtagcatggttggacagcctgtacgcaggtggcgcagccctgggttgtgcagcgtcggacagtgcccggctaatcaagtataccaggagtgcggcagtgcttgcgtgaaaacgtgctctaacccgcaacattcttgcagttcgagctgcacttttggatgcttttgtcctgagggtaccgttctgaacgacctttctaacaatcacacttgtgtccccgtgacgcaatgtccttgtgtattgcacggagcaatgtatgccccgggtgaagtcacgattgctgcctgccagacctgtcgctgtactcttggacgatgggtctgcaccgagagaccctgtcctggtcactgctctctggagggcgggtcgtttgtgacgacatttgatgcacgtccctaccgctttcacggaacctgtacatacatcctgctccagtctccgcagctgccagaggatggcgccctgatggcagtatacgacaagtccggcgtctctcacagtgagacttcactagtggctgttgtgtacctgtctcgccaggacaaaatagtcatatcgcaagatgaggttgtaacaaacaacggcgaggccaaatggttaccttataagacccgaaatataactgtttttagacagacgtcaactcaccttcagatggccacaagttttggattggagttggttgtgcagttgaggcccatctttcaggcttacgttacagtgggcccacagttccggggacagactcgcggcttatgtggaaactttaacggtgacacgacggatgatttcaccacctctatgggaatcgccgaaggcacagcctcactcttcgtcgacagttggcgagccggcaattgccccgccgcccttgagagagagacggacccatgcagcatgagtcagctcaataaagtctgcgctgagactcattgctctatgctgcttcggacgggcactgtgttcgagagatgccacgcgaccgtaaaccccgccccattctacaagcgatgcgtgtaccaggcctgcaactacgaggagaccttcccccatatatgcgcagccctcggagattatgtgcacgcctgcagtctgagaggtgtgctgctgtggggatggcggagctccgtggataactgcactatcccgtgcacgggcaataccaccttttcatacaacagccaggcttgcgagcgaacttgtctatcccttagcgatcgggccacagagtgtcaccacagcgctgttcccgtcgacggctgcaactgcccagacggcacctatctgaatcagaaaggggagtgtgtgagaaaagcacagtgtccatgcattctcgaagggtacaaatttatcctcgccgagcagagtacagtcataaatggcataacttgccattgcatcaacggtcgactcagttgtcctcagcgcccgcagatgtttttggcctcttgtcaggcccccaagacgttcaagtcctgctcccaaagttcagagaacaagttcggtgctgcatgcgctccaacttgccagatgctagcaacaggcgttgcctgcgtccctacaaagtgtgaacccgggtgtgtgtgcgccgagggactgtatgagaatgcagacggacaatgcgtccctccggaagaatgtccctgcgagttttccggtgtgtcttatccaggaggggccgagctccacacagactgcagaacttgttcctgctccaggggacggtgggcctgtcagcagggcactcactgcccaagtacttgcaccttatacggagaaggccacgtgatcactttcgacgggcagcgatttgtgtttgatggaaactgtgagtacatcctggctactgacgtgtgcggagtcaatgatagccagcctacgtttaagatcctgactgagaatgttatttgcgggaattccggcgtcacctgttctcgggcgataaagatttttctgggcggtttgtctgtcgtgctggccgatcggaattatacagtcactggggaggaacctcacgtgcagttaggagtgacccctggagcactgtctctggtcgtcgacataagtattccgggtcgatataacctgacactgatttggaaccgccacatgaccatccttatccggatcgctcgggcatcccaagaccccctttgcggtctgtgtggaaatttcaacggaaacatgaaggacgactttgaaacccgcagcagatacgtggcctcgtccgagctcgagcttgttaatagttggaaagagtcacccttatgtggagatgtgtcctttgtcaccgatccatgtagcctgaacgccttcagacggagctgggccgagagaaaatgctctgtgataaacagtcagacatttgcgacctgtcactctaaggtatatcatctgccctactacgaggcctgcgtgagagacgcatgtgggtgcgattctggaggcgattgtgaatgtctgtgcgacgccgtggctgcatacgcacaagcgtgcctggataagggagtttgtgttgactggcgcactcctgccttctgccctatatactgcgggttctacaacacccacactcaggatgggcatggagagtatcagtatacccaagaagctaattgcacttggcactaccagccgtgcctgtgtccttcccagcctcaaagtgtgcctggtagcaatatcgaaggctgctataattgttcacaggatgaatactttgaccatgaagagggggtgtgcgtgccctgtatgccccccactaccccccagcctcctaccacccctcagctcccaactaccggcagtcgccctactcaggtttggcctatgactggtacttcgaccacaatcgggctgctatcctctacggggccctcccccagctcaaatcatacaccagcatctcctacacagactcctctgcttccagcaaccctgacatcctctaaacccactgcaagtagtggcgaacccccgcggcccacaaccgccgttaccccccaagcaacaagtggccttccccccacagctacgctgcgttccactgcaaccaagcctaccgtcacacaggccacaactagagctaccgcttctacagcgagtcccgccacgacctctacagcccagtccacgactcggacgactatgacactgcctactccagccacgtccggcacgagcccaaccctgccaaaaagcacaaaccaggagctgccaggaaccaccgctacacaaaccacgggcccccgacctacccctgcttcaacaacaggtccgaccactccccaacccggacagcctacccgccccacagcgaccgaaaccacccagacccgtactaccacagaatacactaccccccagaccccccatactacacactcaccgcccacggctggtagtcccgttccatcgactgggccagtgacggccaccagcttccatgctaccacaacttacccaaccccttctcatcccgagacaactctccccacacacgtcccacctttttccacatccttggtaactccctcaacacacacagtgataacacccactcatgcgcagatggccacttctgcatctaatcacagcgcaccaactgggactatccctccccccactacgctgaaagccacaggttcaacacatactgcccctcccattacacccactacatctggcacaagccaggcacactcttctttctccaccaacaagacacctacttcccttcattcccatacaagtagtacccaccatccagaggtcactccaaccagtacaactacaatcactcccaaccccacaagcactaggacccggacacctgtggctcataccaacagtgccacctcatctagacccccccccccgtttactacacattcacctcccaccggctcttcgccgttctcatctactgggccaatgacggctacttcgttcaaaactactacaacctatccaaccccatcccacccacagactacacttcccacccatgttcccccattttccactagtctcgtgactcccagtacacatacggtgattacacccacacacgcccagatggctacttctgcttcaatccattctatgcctaccggcacaatccccccccctacgacattaaaagcgactggtagcactcacaccgctcctaccatgacattaaccacgtccggtacatcgcaggccctctccagcctaaatacggctaagacttccacctcactccacagtcacacaagctcaacccaccacgcagaggccacatccacatcaacgacaaacataacgccgaatcccacctccaccggcaccccgccaatgaccgttacaacaagtgggacgtctcagagcaggtcctctttctcgactgcaaagacttcaacctccctgcattcccatacaagttcgacacaccatccggaggtgaccagcacatctacaactagtattacacccaaccacacatccaccggtacacgtacccccgtagcccatactaccagcgcaactagttcacgtctccccactccattcaccacccattcaccccccacaggaaccaccccaatctccagcaccgggccagtgaccgcaaccagcttccagacgacgacaacctaccctactcctagccaccctcacaccactctgccaactcatgtgccatccttcagcactagcctcgtgactccaagtacccacacagtcatcatcccgacccatactcagatggcaacgtcagctagcatccatagcatgcccacaggaacaataccccccccaacaaccattaaggcgaccgggtccacccataccgcacctccaatgacccccactacttcaggcacaagtcagagtccctcttcctttagtacggccaagaccagtacctcccttccctaccacacaagcagtacacatcatcctgaagtaactcccacctctactaccaatataactccgaaacacacgtctaccggaacgcgcacccctgtggctcacacaacctctgcatccagctcacgtttacctacgccgttcactacacattctccacccactgggagctccccttttagttccaccggccccatgacagctacctcattccagactactaccacatacccgacaccttcacaccctcaaacaactctcccaactcatgtgcccccattttccaccagtctcgtaaccccgagcacccatacggtcatcatcactacacacacccagatggcgacttcagcaagtattcacagcacgcccaccggaacagtcccaccacctaccactctgaaagccaccggatccacacatacggcccccccgatgacagtcactacatccggcaccagccagactcactcctcgtttagtacagcgacggcatcgtcaagctttataagctcctcaagctggctgcctcaaaattccagcagtcggcctccgtctagccccattacaacccagctacctcacttgtcgagtgcaaccacccctgtgtcaaccaccaatcagctgagttcttctttctctccctctcccagtgcaccaagcaccgtgagctcttacgtgcccagcagtcactcgagcccacagacgtccagcccaagcgtgggcaccagctcttctttcgtttccgcgcccgttcactcaacaaccttgtcatccgggagccattcatctctcagcacccacccgacgaccgcctctgtgtcagcatcccccttgtttcccagtagtccagccgctagcacaactattcgggccacactcccacacacaatttcctcacctttcaccctgtctgccctcctgcctataagtaccgtgaccgtctcacctactcccagctcacatctggcttcttctacaattgcctttcccagcacccctcgtacaacagcgtccacccacacagccccagcattttctagccagagcacgaccagcaggtccacttccctcaccacccgggttcctaccagcggtttcgtgtctttaacctccggcgtcaccggtattcctactagtcctgtgaccaacctcacaactcggcaccctgggcccactctatctcctacgactaggtttttaacttcctcgttgacggcccacggatccacacccgcatcagcacccgtcagttcgctcggaacaccaacccctacatcccccggagtgtgtagcgtaagagaacagcaagaggaaatcaccttcaagggctgcatggcgaacgttaccgtcacccgttgtgaaggcgcctgcataagcgccgccagcttcaacatcataacccagcaggtcgacgccaggtgctcttgttgtaggcctctccacagttatgagcagcagttggaactaccatgtccggacccaagcacccctggacggaggctggttctgacgttgcaggtgttcagccattgcgtgtgcagttctgtggcatgtggcgattag

SEQ ID NO: 160650 - DNA, 7319 bp, Artificial Sequence
  derived and/or modified sequence
atggtccagcggtggttactgctcagctgctgtggcgctctgctgtctgccggattggctaacacatcatataccagccccggtctgcagcgtttaaaggacagccctcagaccgcacctgacaaaggccaatgcagtacttggggtgccggacatttcagcacatttgatcatcatgtgtacgatttttccggcacctgcaactatatctttgccgcaacctgtaaggatgcgtttccgactttctcggttcagcttaggcgcggtcccgacggttccattagtaggatcattgtagagctgggcgcaagcgtggtgaccgtctccgaggctataatttccgtgaaagacattggagtgatttctttgccctacacatccaacggcctccagattacacctttcggccaaagcgtccggctggtggccaagcagctggaattggagcttgaggtcgtgtggggccctgatagccatctgatggtactcgtggaacgtaaatacatgggccagatgtgtggactttgtggcaactttgacgggaaggttacgaatgaattcgtgtccgaagaagggaaattcctcgagcctcataagttcgccgctctccagaaactcgatgaccccggagaaatctgcacatttcaggacatcccttctacacacgtcaggcaggcccagcacgcacgcatttgcactcaacttctgacgctcgtggcacctgaatgctctgtgagcaaggaaccattcgtccttagttgtcaagctgatgttgcggctgctcctcagccagggcctcaaaactccagttgcgccacgctttctgaatatagcagacaatgttctatggtgggccaacctgtgcgccgatggcgcagccccggactttgtagcgtcggtcagtgccctgctaaccaggtgtaccaagaatgtggtagtgcctgcgttaaaacgtgtagtaatccacaacattcttgttcttcgagctgcactttcgggtgcttctgtccagaaggtactgtgctgaatgacctgagtaacaatcacacttgtgtccctgtgactcaatgcccatgcgtgcttcatggggcaatgtacgccccaggtgaagtgactatcgcagcctgccaaacctgcagatgtactctgggcaggtgggtgtgtacagagcgtccttgtcccggtcattgttcgctggagggaggatcctttgtgacaacatttgatgctcgcccataccggttccacggaacatgtacatacatactcctacagtcgcctcaacttccagaagacggggctctgatggctgtgtacgacaaatcaggagtaagccatagcgaaacttcactggtcgccgttgtctatctgtctcgacaggacaagatcgtaatctcacaggatgaagtggtaacgaataatggtgaggccaagtggctcccgtacaagacaagaaacataaccgttttcagacagacaagcacgcatctccaaatggcgactagcttcgggctagaactggtcgtccaactcaggcctatatttcaggcttatgttacggtgggtccacaatttcggggacaaacccggggtttgtgcgggaattttaacggtgacaccactgatgactttaccaccagcatgggtatcgccgaaggaacggcgagtctgtttgtggactcctggcgggctgggaactgcccggctgcactagagagggagacagacccatgtagcatgagccaactgaataaggtctgcgcggaaacacattgcagcatgctgctcaggacgggtactgtttttgagaggtgtcacgcgacagtgaaccctgcccctttctataagagatgcgtttatcaagcgtgcaattacgaagagacattcccccacatatgtgccgcacttggagattatgtgcatgcttgctctttaaggggagtcctattgtggggatggaggtcctctgtggacaactgcaccatcccctgtacaggcaacaccaccttttcatacaactcacaagcttgtgagcgaacatgcctgagcctgtccgatcgtgctacggaatgtcatcacagcgccgttcccgttgacggttgcaactgcccagatggaacttatctgaaccagaagggcgaatgcgtgagaaaagcacaatgcccctgtatccttgaaggctacaaattcatcctggctgagcagagcactgtcatcaatggcatcacttgtcactgtatcaacggcaggctgagctgtccacagaggcctcagatgtttctggcttcatgccaagcaccaaaaacttttaaatcctgtagtcagtcttctgagaataagtttggtgccgcttgcgctccaacctgccagatgctcgctacgggggttgcgtgcgttcctacgaaatgcgagcctggatgcgtgtgcgcagagggcttgtacgaaaacgctgacggccaatgcgtgccacctgaggagtgtccttgtgagttcagtggggtttcctaccccggtggcgcagagctccataccgactgcaggacctgttcatgcagcagggggcgatgggcttgtcagcaagggacccactgtccatcaacctgtacactgtacggagaggggcacgttataacctttgacggccaacgattcgtctttgatggcaattgcgagtacatcctggctaccgacgtctgtggggtgaacgacagtcagcccacatttaaaattctcactgagaacgtgatctgtggtaattcaggagttacttgtagccgcgcaatcaagatcttccttggcggtttaagcgttgtgctggccgaccgtaattatacggtcaccggagaagagcctcatgtgcagctcggagtaacgccgggagcactttcactggttgtagacatttccatccctggtcgatataatctcacattgatctggaatcgtcacatgacaattctaatccggatcgctagagcgagccaagacccgctttgcggtctgtgcgggaactttaatgggaatatgaaggacgacttcgagacaaggtcccgatacgtcgccagctcagagctagagcttgttaatagctggaaggagtctccactctgtggagacgtttccttcgtgacagatccttgctcgcttaacgcctttagacgtagttgggctgaacgcaagtgtagcgtgatcaactctcagacattcgcaacctgtcacagcaaagtttaccatctgccttattatgaggcctgcgtgcgcgatgcgtgtggctgcgactctgggggtgactgcgaatgcctgtgcgacgcagttgctgcctacgctcaggcctgcttggacaagggagtttgtgtcgattggaggacaccggcattctgccccatctactgtggcttttacaacacccacacacaggacggacacggcgagtatcagtacacccaggaggcgaactgtacgtggcactaccagccatgcttgtgcccctcacagccgcagtccgttcctgggtctaacatcgaagggtgttacaattgttcgcaagacgaatacttcgaccatgaagaaggggtgtgcgtcccttgcatgcccccaacaacccctcagcctccaacgacaccgcagctaccaacaaccgggtcaaggccaactcaggtatggcccatgactgggacttcaaccacgattgggctgctctcatcgacaggacccagtccatcgtcgaaccatactcccgcttcccccacacaaactccgctgctccccgcaactctgacctcttctaagcctacagcgagtagtggagaaccccctaggcctaccacagctgttactccccaggcaacctcaggtctgccacctacagccaccctcagatcgacagctacgaagcccacagtgacccaggcaacaacgcgggctaccgcatccactgcatctcccgctaccactagcacagctcagtctacgactaggacaacaatgacactgccaactccggctaccagcggcacatccccaacattgccaaagagcacaaatcaagagctacctggcactacggctactcaaaccaccggtccgagaccaactcctgcgagtactactggtccaactacccctcaacctggccaaccaacaagacctaccgccacagagactacccagaccagaacaaccaccgagtatacaacaccccagacaccccacaccacacattcccctccaactgctgggagcccagtgccatctactggcccagtcactgctacctcattccatgctacaactacttacccaactccgagtcatcctgagacaaccctacctactcacgtgcctcctttctctacctctctggtgacacccagcactcataccgtgatcactcctacacacgcacaaatggccactagcgccagcaaccactcagcgcctaccgggactatcccaccaccaacgacactgaaagccacagggagcactcatactgcacctccaatcacgccgaccacatcggggacaagccaggctcactcctctttcagtacaaataagacaccaacatcattgcactcccatacctcatccacccatcaccctgaggtgactcccacaagcactacgacaataaccccaaaccccacttctacacgcacacggacacctgtcgcacacaccaactccgccacgtcttctagaccgccaccgccttttacaactcacagcccacccacagggagctcccctttttcaagtacaggccctatgacagccactagcttcaagacgaccaccacctatcccacccctagccatcctcagaccactctgcccacacacgtacccccattttctaccagcctagtgacaccaagtacacacacagtgattacacccacccacgctcagatggcgacttctgctagtatccacagtatgcccacaggcacgattcccccaccgacgacactgaaggcaacagggtcaacccacaccgcacctactatgacactaactacttcaggcacaagccaggctctatcgagcctgaacacggcgaagacgtcgacttcactccactcgcacacatctagcactcatcacgccgaggcaactagcacgagtacgacaaatataacgcctaacccaacttcaactgggactcctccaatgactgtcacaacatcaggcactagccagtcacggtccagcttcagtacggcgaagacgagcacaagtctccattctcacacttcatccacccaccaccccgaagttaccagtacatccacaacttcaattaccccaaaccacactagcacaggcacacggacaccagttgcccataccactagcgccaccagcagccggttacctactccctttaccacacattcaccacccaccggcacaacccctatcagctccacaggacccgtcaccgccacctctttccagactacaacaacataccccacacctagccacccgcacactaccttgcccacgcatgtcccatctttctccacctcgctcgtaaccccatccacccacaccgtcattataccaacacacacacagatggcgacctcggcctccatccactctatgcctacaggtacgatcccacctcccactacaattaaagcaacaggttctacacacactgcaccaccaatgacccccacaacctccggaacaagtcagagcccaagttccttcagtacggccaaaacgagcacctccttaccataccacacaagcagtacacaccatcctgaggtgacaccgacctctacaaccaatatcaccccaaaacatacgagtactgggacccgcacaccagtcgctcacaccacctccgcctcctcctctagactcccaactccgttcactacacactcccccccaaccggaagtagccccttcagctctactgggcctatgactgctacatcattccagacaacaacaacttacccgactccttcccaccctcagacaacccttcctacgcacgtccctccgtttagcacaagcctggtcaccccaagtacacacactgtgatcattactacccatacacagatggcaacttccgcctctatacactctactcccacaggtacagtgccaccacctaccacactaaaagcaactggttcaacacacaccgcccctcccatgactgtgaccacttccggaacatctcagacacacagcagcttctccaccgcgaccgccagctcttcctttatctctagtagctcgtggctcccacagaatagcagcagcagaccccctagctcacctattactactcagcttcctcatctgagttccgctaccacacccgtcagtaccaccaatcagttatcttcatctttctcacctagcccgagcgctccttcaactgtatccagctacgtgccatcctcacattcgagcccccagacgtcatccccttcagtgggaacatcctccagcttcgtatcagcccctgtccatagcaccactttatcatcgggctcccattcatcactatcaacccaccccaccacagccagcgtgtccgccagtcccctgtttccctctagtccagccgctagtactacgattagggctaccctgccccacacaatctcaagcccattcactctaagtgctctgctgccaataagcaccgtgaccgtcagccctactcctagttcccacctcgccagcagcacaatcgcttttcctagcactccccgtactacagcctcgacacacactgcaccagctttttcttctcagtctaccacctctagatcaacatcacttactaccagggtgccaacgagcggattcgttagcctgaccagtggggttaccggtataccaacctctccagttacaaatttaacaactcgccacccaggacccacactctccccaacaacacggtttcttacctcttcactaactgcccatgggtccactccagcctcggcccctgtgagctccctgggaacacctacccctactagtcccggagtgtgttccgtgcgagaacaacaagaagagatcacgttcaagggctgcatggctaacgtgacagtgacacgctgcgaaggggcttgtattagcgccgcaagctttaatatcataactcaacaggtggacgcgagatgctcctgttgcaggccactccattcatacgagcagcagctagaactgccctgtcctgatccctcaacaccaggtagaagactggtcttgactctccaagtgttcagtcattgcgtgtgctcatccgttgcttgcggtgatta

SEQ ID NO: 160651 - DNA, 7320 bp, Artificial Sequence
  derived and/or modified sequence
atggtgcagagatggctgctgctgagctgctgcggcgccctgctgagcgccggcctggccaacaccagctacaccagccccggcctgcagagactgaaggacagcccccagaccgcccccgacaagggccagtgcagcacctggggcgccggccacttcagcaccttcgaccaccacgtgtacgacttcagcggcacctgcaactacatcttcgccgccacctgcaaggacgccttccccaccttcagcgtgcagctgagaagaggccccgacggcagcatcagcagaatcatcgtggagctgggcgccagcgtggtgaccgtgagcgaggccatcatcagcgtgaaggacatcggcgtgatcagcctgccctacaccagcaacggcctgcagatcacccccttcggccagagcgtgagactggtggccaagcagctggagctggagctggaggtggtgtggggccccgacagccacctgatggtgctggtggagagaaagtacatgggccagatgtgcggcctgtgcggcaacttcgacggcaaggtgaccaacgagttcgtgagcgaggagggcaagttcctggagccccacaagttcgccgccctgcagaagctggacgaccccggcgagatctgcaccttccaggacatccccagcacccacgtgagacaggcccagcacgccagaatctgcacccagctgctgaccctggtggcccccgagtgcagcgtgagcaaggagcccttcgtgctgagctgccaggccgacgtggccgccgccccccagcccggcccccagaacagcagctgcgccaccctgagcgagtacagcagacagtgcagcatggtgggccagcccgtgagaagatggagaagccccggcctgtgcagcgtgggccagtgccccgccaaccaggtgtaccaggagtgcggcagcgcctgcgtgaagacctgcagcaacccccagcacagctgcagcagcagctgcaccttcggctgcttctgccccgagggcaccgtgctgaacgacctgagcaacaaccacacctgcgtgcccgtgacccagtgcccctgcgtgctgcacggcgccatgtacgcccccggcgaggtgaccatcgccgcctgccagacctgcagatgcaccctgggcagatgggtgtgcaccgagagaccctgccccggccactgcagcctggagggcggcagcttcgtgaccaccttcgacgccagaccctacagattccacggcacctgcacctacatcctgctgcagagcccccagctgcccgaggacggcgccctgatggccgtgtacgacaagagcggcgtgagccacagcgagaccagcctggtggccgtggtgtacctgagcagacaggacaagatcgtgatcagccaggacgaggtggtgaccaacaacggcgaggccaagtggctgccctacaagaccagaaacatcaccgtgttcagacagaccagcacccacctgcagatggccaccagcttcggcctggagctggtggtgcagctgagacccatcttccaggcctacgtgaccgtgggcccccagttcagaggccagaccagaggcctgtgcggcaacttcaacggcgacaccaccgacgacttcaccaccagcatgggcatcgccgagggcaccgccagcctgttcgtggacagctggagagccggcaactgccccgccgccctggagagagagaccgacccctgcagcatgagccagctgaacaaggtgtgcgccgagacccactgcagcatgctgctgagaaccggcaccgtgttcgagagatgccacgccaccgtgaaccccgcccccttctacaagagatgcgtgtaccaggcctgcaactacgaggagaccttcccccacatctgcgccgccctgggcgactacgtgcacgcctgcagcctgagaggcgtgctgctgtggggctggagaagcagcgtggacaactgcaccatcccctgcaccggcaacaccaccttcagctacaacagccaggcctgcgagagaacctgcctgagcctgagcgacagagccaccgagtgccaccacagcgccgtgcccgtggacggctgcaactgccccgacggcacctacctgaaccagaagggcgagtgcgtgagaaaggcccagtgcccctgcatcctggagggctacaagttcatcctggccgagcagagcaccgtgatcaacggcatcacctgccactgcatcaacggcagactgagctgcccccagagaccccagatgttcctggccagctgccaggcccccaagaccttcaagagctgcagccagagcagcgagaacaagttcggcgccgcctgcgcccccacctgccagatgctggccaccggcgtggcctgcgtgcccaccaagtgcgagcccggctgcgtgtgcgccgagggcctgtacgagaacgccgacggccagtgcgtgccccccgaggagtgcccctgcgagttcagcggcgtgagctaccccggcggcgccgagctgcacaccgactgcagaacctgcagctgcagcagaggcagatgggcctgccagcagggcacccactgccccagcacctgcaccctgtacggcgagggccacgtgatcaccttcgacggccagagattcgtgttcgacggcaactgcgagtacatcctggccaccgacgtgtgcggcgtgaacgacagccagcccaccttcaagatcctgaccgagaacgtgatctgcggcaacagcggcgtgacctgcagcagagccatcaagatcttcctgggcggcctgagcgtggtgctggccgacagaaactacaccgtgaccggcgaggagccccacgtgcagctgggcgtgacccccggcgccctgagcctggtggtggacatcagcatccccggcagatacaacctgaccctgatctggaacagacacatgaccatcctgatcagaatcgccagagccagccaggaccccctgtgcggcctgtgcggcaacttcaacggcaacatgaaggacgacttcgagaccagaagcagatacgtggccagcagcgagctggagctggtgaacagctggaaggagagccccctgtgcggcgacgtgagcttcgtgaccgacccctgcagcctgaacgccttcagaagaagctgggccgagagaaagtgcagcgtgatcaacagccagaccttcgccacctgccacagcaaggtgtaccacctgccctactacgaggcctgcgtgagagacgcctgcggctgcgacagcggcggcgactgcgagtgcctgtgcgacgccgtggccgcctacgcccaggcctgcctggacaagggcgtgtgcgtggactggagaacccccgccttctgccccatctactgcggcttctacaacacccacacccaggacggccacggcgagtaccagtacacccaggaggccaactgcacctggcactaccagccctgcctgtgccccagccagccccagagcgtgcccggcagcaacatcgagggctgctacaactgcagccaggacgagtacttcgaccacgaggagggcgtgtgcgtgccctgcatgccccccaccaccccccagccccccaccaccccccagctgcccaccaccggcagcagacccacccaggtgtggcccatgaccggcaccagcaccaccatcggcctgctgagcagcaccggccccagccccagcagcaaccacacccccgccagccccacccagacccccctgctgcccgccaccctgaccagcagcaagcccaccgccagcagcggcgagccccccagacccaccaccgccgtgaccccccaggccaccagcggcctgccccccaccgccaccctgagaagcaccgccaccaagcccaccgtgacccaggccaccaccagagccaccgccagcaccgccagccccgccaccaccagcaccgcccagagcaccaccagaaccaccatgaccctgcccacccccgccaccagcggcaccagccccaccctgcccaagagcaccaaccaggagctgcccggcaccaccgccacccagaccaccggccccagacccacccccgccagcaccaccggccccaccaccccccagcccggccagcccaccagacccaccgccaccgagaccacccagaccagaaccaccaccgagtacaccaccccccagaccccccacaccacccacagcccccccaccgccggcagccccgtgcccagcaccggccccgtgaccgccaccagcttccacgccaccaccacctaccccacccccagccaccccgagaccaccctgcccacccacgtgccccccttcagcaccagcctggtgacccccagcacccacaccgtgatcacccccacccacgcccagatggccaccagcgccagcaaccacagcgcccccaccggcaccatccccccccccaccaccctgaaggccaccggcagcacccacaccgccccccccatcacccccaccaccagcggcaccagccaggcccacagcagcttcagcaccaacaagacccccaccagcctgcacagccacaccagcagcacccaccaccccgaggtgacccccaccagcaccaccaccatcacccccaaccccaccagcaccagaaccagaacccccgtggcccacaccaacagcgccaccagcagcagaccccccccccccttcaccacccacagcccccccaccggcagcagccccttcagcagcaccggccccatgaccgccaccagcttcaagaccaccaccacctaccccacccccagccacccccagaccaccctgcccacccacgtgccccccttcagcaccagcctggtgacccccagcacccacaccgtgatcacccccacccacgcccagatggccaccagcgccagcatccacagcatgcccaccggcaccatccccccccccaccaccctgaaggccaccggcagcacccacaccgcccccaccatgaccctgaccaccagcggcaccagccaggccctgagcagcctgaacaccgccaagaccagcaccagcctgcacagccacaccagcagcacccaccacgccgaggccaccagcaccagcaccaccaacatcacccccaaccccaccagcaccggcaccccccccatgaccgtgaccaccagcggcaccagccagagcagaagcagcttcagcaccgccaagaccagcaccagcctgcacagccacaccagcagcacccaccaccccgaggtgaccagcaccagcaccaccagcatcacccccaaccacaccagcaccggcaccagaacccccgtggcccacaccaccagcgccaccagcagcagactgcccacccccttcaccacccacagcccccccaccggcaccacccccatcagcagcaccggccccgtgaccgccaccagcttccagaccaccaccacctaccccacccccagccacccccacaccaccctgcccacccacgtgcccagcttcagcaccagcctggtgacccccagcacccacaccgtgatcatccccacccacacccagatggccaccagcgccagcatccacagcatgcccaccggcaccatccccccccccaccaccatcaaggccaccggcagcacccacaccgccccccccatgacccccaccaccagcggcaccagccagagccccagcagcttcagcaccgccaagaccagcaccagcctgccctaccacaccagcagcacccaccaccccgaggtgacccccaccagcaccaccaacatcacccccaagcacaccagcaccggcaccagaacccccgtggcccacaccaccagcgccagcagcagcagactgcccacccccttcaccacccacagcccccccaccggcagcagccccttcagcagcaccggccccatgaccgccaccagcttccagaccaccaccacctaccccacccccagccacccccagaccaccctgcccacccacgtgccccccttcagcaccagcctggtgacccccagcacccacaccgtgatcatcaccacccacacccagatggccaccagcgccagcatccacagcacccccaccggcaccgtgcccccccccaccaccctgaaggccaccggcagcacccacaccgccccccccatgaccgtgaccaccagcggcaccagccagacccacagcagcttcagcaccgccaccgccagcagcagcttcatcagcagcagcagctggctgccccagaacagcagcagcagaccccccagcagccccatcaccacccagctgccccacctgagcagcgccaccacccccgtgagcaccaccaaccagctgagcagcagcttcagccccagccccagcgcccccagcaccgtgagcagctacgtgcccagcagccacagcagcccccagaccagcagccccagcgtgggcaccagcagcagcttcgtgagcgcccccgtgcacagcaccaccctgagcagcggcagccacagcagcctgagcacccaccccaccaccgccagcgtgagcgccagccccctgttccccagcagccccgccgccagcaccaccatcagagccaccctgccccacaccatcagcagccccttcaccctgagcgccctgctgcccatcagcaccgtgaccgtgagccccacccccagcagccacctggccagcagcaccatcgccttccccagcacccccagaaccaccgccagcacccacaccgcccccgccttcagcagccagagcaccaccagcagaagcaccagcctgaccaccagagtgcccaccagcggcttcgtgagcctgaccagcggcgtgaccggcatccccaccagccccgtgaccaacctgaccaccagacaccccggccccaccctgagccccaccaccagattcctgaccagcagcctgaccgcccacggcagcacccccgccagcgcccccgtgagcagcctgggcacccccacccccaccagccccggcgtgtgcagcgtgagagagcagcaggaggagatcaccttcaagggctgcatggccaacgtgaccgtgaccagatgcgagggcgcctgcatcagcgccgccagcttcaacatcatcacccagcaggtggacgccagatgcagctgctgcagacccctgcacagctacgagcagcagctggagctgccctgccccgaccccagcacccccggcagaagactggtgctgaccctgcaggtgttcagccactgcgtgtgcagcagcgtggcctgcggcgactag

SEQ ID NO: 160652 - protein, 228 aa, Artificial Sequence
  derived and/or modified sequence
MERVKMINVQRLLEAAEFLERRERECEHGYASSFPSMPSPRLQHSKPPRRLSRAQKHSSGSSNTSTANRSTHNELEKNRRAHLRLCLERLKVLIPLGPDCTRHTTLGLLNKAKAHIKKLEEAERKSQHQLENLEREQRFLKWRLEQLQGPQEMERIRMDSIGSTISSDRSDSEREEIEVDVESTEFSHGEVDNISTTSISDIDDHSSLPSIGSDEGYSSASVKLSFTS

SEQ ID NO: 160653 - protein, 218 aa, Artificial Sequence
  derived and/or modified sequence
MERVKMINVQRLLEAAEFLERRERECEHGYASSFPSMPSPRLQHSKPPRRLSRAQKHSSGSSNTSTANRRAHLRLCLERLKVLIPLGPDCTRHTTLGLLNKAKAHIKKLEEAERKSQHQLENLEREQRFLKWRLEQLQGPQEMERIRMDSIGSTISSDRSDSEREEIEVDVESTEFSHGEVDNISTTSISDIDDHSSLPSIGSDEGYSSASVKLSFTS

SEQ ID NO: 160654 - protein, 118 aa, Artificial Sequence
  derived and/or modified sequence
MPSPRLQHSKPPRRLSRAQKHSSGSSNTSTANRSTHNELEKNRRAHLRLCLERLKVLIPLGPDCTRHTTLGLLNKAKAHIKKLEEAERKSQHQLENLEREQRFLKWRLEQLQGPQEME

SEQ ID NO: 160655 - DNA, 3272 bp, Artificial Sequence
  derived and/or modified sequence
cacgcgcgggctgcccgcggcacggcgggcgcggctggcgcggctggggcggcaggggcggcggagagcgcgccgagccgcggccgagctggcccgcccgcccgtcgcacatgttccggaacggcgcccggccgtagccgcctgcggcgcctcctgtcggcccgagaagggagtgcggagaggcgccggtcgccacccgcggtgcccatggagcgggtgaagatgatcaacgtgcagcgtctgctggaggctgccgagtttttggagcgccgggagcgagagtgtgaacatggctacgcctcttcattcccgtccatgccgagcccccgactgcagcattcaaagcccccacggaggttgagccgggcacagaaacacagcagcgggagcagcaacaccagcactgccaacagatctacacacaatgagctggaaaagaatcgacgagctcatctgcgcctttgtttagaacgcttaaaagttctgattccactaggaccagactgcacccggcacacaacacttggtttgctcaacaaagccaaagcacacatcaagaaacttgaagaagctgaaagaaaaagccagcaccagctcgagaatttggaacgagaacagagatttttaaagtggcgactggaacagctgcagggtcctcaggagatggaacgaatacgaatggacagcattggatcaactatttcttcagatcgttctgattcagagcgagaggagattgaagtggatgttgaaagcacagagttctcccatggagaagtggacaatataagtaccaccagcatcagtgacattgatgaccacagcagcctgccgagtattgggagtgacgagggttactccagtgccagtgtcaaactttcattcacttcatagaacccagcatgacataacagtgcagggcaaaatattcactgggccaattcaatacaaacaatctcttaaattgggttcatgatgcagtctcctctttaaaacaaaacaaaacaaaacaaaactatacttgaacaaaagggtcagaggacctgtatttaagcaaatacttagcaaaaagtggggcagagcctcccaaggagaacaaatattcagaatattcatattggaaaaatcacaatttttaatggcagcagaaaacttgtgtgaaattttcttgatttgagttgattgagaagaggacattggagatgccatcctctttctcttttctagtttgctcatactacattgagtagacacatttaaggatggggttatgaacccttcctgagctttatggtcctaaaagcaaaataaaaactattcgaatgaaaagacaagaaaatcaggtattaatcttggatagctaataatgagctattaaaactcagcctgggacagtttatcatgaagcctgtggatgatcaatcctttattattattttttttttttgaaaaaagctcatttcatgctctgcaaaaggagagactcccatgaagccttttgaaagggatcatcatgcagctcaactttctgttggattccatgctaagcaagctaaccttatcctgcattgttagcactaggcacccagctgccacctctccatcctgctgcccttaggccacatgggagcagtccatgcatgacagcctctatcctacaaggcctatgagtatggattgggggggccaaaaggaaaaagctccatgtgcctctttgtctgcgtgggtcagaagagttgtgcacgcagattagcaggccaaggtctgagccacagcagcatttttatttcagattttgataactgtttatatgtgttgaaaaccaaaatgacatctttttaaagcttatccataaaaaaaaatagatgtcttttatagtggaaaaacacatggggaaaaaaatcatctattttgatgcagcatttgataatgataaaacacctcacacctcactctttatagtgcacaaaatgaatgaggtctgggctaggtagaaaaagggtcaatgctatttttgtttttagaatcattaccttttaccagcttttaaccatctgatatctatagtagacacactatcatagttaacatagtaagttcagcacttgtctcattttaatgtaaagatttgcttccattttcctacaggcagtctctctcttcctcacagtcccactgtgcaggtgctattgttactcttacgaatattttcagtaatgttattttcttctaagtgaaatttctagcctgcactttgatgtcatgtgttccctttgtctttcaaactccaaggttcccttgtggccctctcccttaccctgggaaggcctcttggagaccttacccctggctgtttggactttgtatactttaaataatttaactacccttaattacttaaaaaaaaaaaaaagctttatgattttcataacttattgctgattttaatggattgttaatttcagtcctgtagttttattttatgtttagatagggctgggcaaggaaaaagaaaataaagacaaccatatttagcagtgcagttgagttgtgtgttaatgttagactatccctttgtgagtgacactttaacagcattcactgcttctatatatagtgtaccatcttggtcatacattacgcctcaacatatacttgtgctcttcctttgcctccagaagaagtttttccttgattgtgctatgtttcagtggaagaaattctttgaagtagatgtgagtgaaaaactgcatgcctttagaagcccagtatcagaacttgctacgtttcaggtgctagggacttaatgaaaaacaggacaaaacaattcctttttgtggcccaggtaaattatttctggtttcacttataattactaatggctgagtcaagatgttgtctctgtgtttgcttactcttgatcaagtgtgagacagtttgaagactgtgctaccatacaaagtgaatgaagccagtgactaagcttctgtttgttttgttattctcatggccttcgcttgcattatttgggccttcattcagatgaacttgaggtgccattttgttgcatatgtacaggattatgggctggaaagcatttgttataaacctatagtgcacattttaactgccccctaaattacccttccctgggtttgttttccttggggtggtgtagattgtatgagtaagaagtattaattttttaaaagacaaatcaactttgaagacacaaaagttaattggaagaaataaaaactgtgaacgaagaa

SEQ ID NO: 160656 - DNA, 687 bp, Artificial Sequence
  derived and/or modified sequence
atggagcgagtgaagatgattaacgtccagagactcctggaggctgctgaattcctagaacgccgcgaacgcgaatgcgaacatgggtacgcctctagttttcccagcatgccaagcccccgcttgcaacacagtaagccaccacggaggttatctcgggcccagaagcatagctcaggaagctctaatactagcactgctaacaggtctacccataatgagctcgagaagaaccgccgcgcccacctgagactgtgtcttgaacgccttaaggtgctgatccctctagggcccgactgcacccggcacaccaccttgggcctacttaacaaggctaaggcccatatcaagaagctggaagaggccgagaggaagtcccaacatcagttggagaacctggaacgggaacaacgctttttgaaatggcgtctggaacaattgcagggaccccaagaaatggagaggatcaggatggacagcattgggagcacaatcagctccgaccgaagcgactctgaacgcgaggaaatagaagtagatgtggagagcacagagttcagccacggagaggtcgataacatttctactacctctattagtgatattgatgaccactcaagcctccccagtatcggctcagacgagggttattctagcgcctccgtcaagctcagctttaccagctag

SEQ ID NO: 160657 - DNA, 579 bp, Artificial Sequence
  derived and/or modified sequence
atgccaagccctcggctgcaacactctaaaccccctcgtaggctgtcgagggcccagaaacacagtagtgggtcttctaatactagcaccgctaacagaagcacacataatgagcttgaaaaaaaccggcgtgcccacctccgcctgtgtctggaaaggctgaaagtgctaatcccgttaggtcccgactgtacacgccacacgacactgggtctgctgaacaaagcaaaggcccatattaagaaattggaggaagccgagcggaagagccaacaccaactggaaaacctggaacgtgaacagcgattcctgaagtggaggctggaacagttacagggaccacaagagatggaacgaattaggatggactccatcggatcgacaatctcctctgataggagcgactcagagagggaggaaatcgaagttgatgtggagtccacggagttctcccatggggaggttgacaacattagcaccacctccatctcagatattgatgaccactcctctctcccatcgatcgggtcagatgagggctacagttctgcttccgtgaagttgtcctttacaagctag

SEQ ID NO: 160658 - DNA, 579 bp, Artificial Sequence
  derived and/or modified sequence
atgccttctccaaggctgcagcattctaaaccaccacgccgactatctagggctcagaaacattcaagcggatcatccaatacctccaccgctaatcggtcaactcataacgagctagagaagaacaggcgcgcgcatttgcgcctatgtctagagagattgaaggtgctgattccacttgggcctgactgtacacgtcatacaacccttggcctgctcaacaaagctaaggctcacataaagaaactggaagaggccgaacggaagtcccagcaccagctagaaaacctggaacgcgaacaacgattcctcaagtggaggttagagcaacttcaaggccctcaggaaatggaaagaatcaggatggattcaataggatcaaccataagtagcgatcgctcagacagtgagagagaagaaatcgaagtcgatgtcgagtctactgagttctctcacggagaggtcgataatatctcgacaacaagcatcagtgatattgatgatcacagctctctcccttcgatcgggagcgacgagggatactcctctgccagcgtgaaactgtcttttacctcatag

SEQ ID NO: 160659 - DNA, 579 bp, Artificial Sequence
  derived and/or modified sequence
atgccctcaccccgtctgcagcactccaaaccaccccgacggctctctcgggcccaaaagcactctagcgggtcaagtaacacatccacggcaaataggagcacccacaatgaactggaaaagaacaggcgggcgcatctacgcttgtgcctcgagcgcttgaaagtgcttattccattgggccccgattgcactaggcacaccactctgggtctgctgaataaggccaaggctcatattaaaaaacttgaggaggcagagcgtaagtctcagcatcagctcgagaatctggagagagaacagaggttcctgaaatggcgcttagaacagctccagggcccacaggaaatggagagaatcagaatggacagcatcggtagcactataagctcggaccggtctgatagcgaacgagaagagatagaggtggacgtagagtctaccgaattcagccacggcgaggtcgataacatttcaacgactagcattagcgatattgacgatcatagctccctgccgtccattggatcggatgagggttacagctcagcatccgtgaaactgtcattcacaagctag

SEQ ID NO: 160660 - DNA, 657 bp, Artificial Sequence
  derived and/or modified sequence
atggaacgggttaagatgatcaatgtgcaacggttactcgaggcagctgagtttttggaaagaagggagagggaatgtgagcatggatacgcttcaagctttccaagcatgccaagcccccgcctgcaacactccaagcctccacggcggctgtcacgggcgcaaaaacattcaagtgggagcagcaatacgtctaccgcgaatcgaagagctcacctgagattgtgcttggagcgactgaaggtcctaattcccttgggtcctgattgcacacgacataccactctaggcctacttaataaagctaaggctcatatcaagaaactggaggaagccgagcgcaagtctcaacaccagctcgagaacctggagcgcgaacagcggtttcttaagtggcgcctggaacagttgcagggtcctcaggaaatggaacggatccgaatggattccattggaagcactattagcagtgaccggagtgactccgagcgtgaagaaatcgaagtcgacgttgaaagcaccgagttctctcacggagaggtcgacaatatttctaccaccagcatctctgatatcgatgaccacagctctttgccaagcataggatctgatgagggatactccagcgcctctgtcaaactcagttttactagctag

SEQ ID NO: 160661 - DNA, 657 bp, Artificial Sequence
  derived and/or modified sequence
atggaacgggtcaagatgatcaatgtccagagactccttgaggccgctgaatttctggagaggcgcgaacgagagtgtgagcacggttatgcatcctccttcccgtctatgcctagtcctcgactgcagcactcgaaaccaccacgccgcttgtctagagcccagaagcattcctccggatcttcgaacactagcacagctaatagaagggctcatcttagattgtgccttgagagattgaaggtgctgattcccctgggtccggattgcacacgacacacgacactggggctacttaataaagctaaggcacatatcaagaagctggaagaagccgaaaggaagtcgcagcaccagctggagaatctagagcgggagcaaaggtttttgaaatggcggctcgagcagctccagggaccccaggagatggagcgaattaggatggattctatcggttccactatttctagcgataggtccgactctgagcgcgaagagatagaggtcgacgttgagtctacagagttctctcatggtgaagtcgataacatcagtacaaccagcatctcagatatcgacgatcatagttcccttccctccattggctccgacgagggatacagctccgccagcgtcaaactctcctttacgagctag

SEQ ID NO: 160662 - DNA, 357 bp, Artificial Sequence
  derived and/or modified sequence
atgcctagcccccgtcttcagcacagcaagcctccccggcgactgtcccgtgcccagaagcacagcagtggaagcagcaatacctccacggccaacaggtcaactcacaacgaactcgaaaaaaacaggagagctcacttgcgcctgtgcctggagcggctaaaggtgctgatcccgttgggccctgattgcaccagacacactaccctaggccttctcaacaaggccaaagcccacataaagaagttggaggaagcagaaaggaaaagccagcatcagcttgagaacctggaaagagagcagagattcctgaaatggcgattggagcagcttcaggggcctcaagaaatggaatag

SEQ ID NO: 160663 - DNA, 687 bp, Artificial Sequence
  derived and/or modified sequence
atggagcgggtgaagatgatcaacgtgcagaggctgctggaggccgctgagttcctggagcggcgggagagagaatgtgagcacggctacgccagcagcttccccagcatgcccagcccccggctgcagcacagcaagccaccccggcggctgagccgggcccagaagcacagcagcggcagcagcaacaccagcacagccaacagaagcacccacaatgagctggagaagaacagaagagcccacctgcggctgtgcctggagcggctgaaggtgctgatccccctgggccctgactgcaccaggcacaccaccctgggcctgctgaacaaggccaaggcccacatcaagaagctggaggaggccgagaggaagagccagcaccagctggagaacctggagcgggagcagcgcttcctgaagtggaggctggagcagctgcagggcccccaggagatggagcgcatccgcatggacagcatcggcagcaccatcagcagtgacagaagtgacagcgagcgggaggagattgaggtggatgtggagagcacagagttcagccacggggaggtggacaacatcagcaccaccagcatcagtgacattgatgaccacagcagcctgcccagcattggaagtgatgagggctacagcagcgcctctgtgaagctgtccttcaccagctag

SEQ ID NO: 160664 - DNA, 579 bp, Artificial Sequence
  derived and/or modified sequence
atgcccagcccccggctgcagcacagcaagccaccccggcggctgagccgggcccagaagcacagcagcggcagcagcaacaccagcacagccaacagaagcacccacaatgagctggagaagaacagaagagcccacctgcggctgtgcctggagcggctgaaggtgctgatccccctgggccctgactgcaccaggcacaccaccctgggcctgctgaacaaggccaaggcccacatcaagaagctggaggaggccgagaggaagagccagcaccagctggagaacctggagcgggagcagcgcttcctgaagtggaggctggagcagctgcagggcccccaggagatggagcgcatccgcatggacagcatcggcagcaccatcagcagtgacagaagtgacagcgagcgggaggagattgaggtggatgtggagagcacagagttcagccacggggaggtggacaacatcagcaccaccagcatcagtgacattgatgaccacagcagcctgcccagcattggaagtgatgagggctacagcagcgcctctgtgaagctgtccttcaccagctag

SEQ ID NO: 160665 - DNA, 657 bp, Artificial Sequence
  derived and/or modified sequence
atggagcgggtgaagatgatcaacgtgcagaggctgctggaggccgctgagttcctggagcggcgggagagagaatgtgagcacggctacgccagcagcttccccagcatgcccagcccccggctgcagcacagcaagccaccccggcggctgagccgggcccagaagcacagcagcggcagcagcaacaccagcacagccaacagaagagcccacctgcggctgtgcctggagcggctgaaggtgctgatccccctgggccctgactgcaccaggcacaccaccctgggcctgctgaacaaggccaaggcccacatcaagaagctggaggaggccgagaggaagagccagcaccagctggagaacctggagcgggagcagcgcttcctgaagtggaggctggagcagctgcagggcccccaggagatggagcgcatccgcatggacagcatcggcagcaccatcagcagtgacagaagtgacagcgagcgggaggagattgaggtggatgtggagagcacagagttcagccacggggaggtggacaacatcagcaccaccagcatcagtgacattgatgaccacagcagcctgcccagcattggaagtgatgagggctacagcagcgcctctgtgaagctgtccttcaccagctag

SEQ ID NO: 160666 - DNA, 357 bp, Artificial Sequence
  derived and/or modified sequence
atgcccagcccccggctgcagcacagcaagccaccccggcggctgagccgggcccagaagcacagcagcggcagcagcaacaccagcacagccaacagaagcacccacaatgagctggagaagaacagaagagcccacctgcggctgtgcctggagcggctgaaggtgctgatccccctgggccctgactgcaccaggcacaccaccctgggcctgctgaacaaggccaaggcccacatcaagaagctggaggaggccgagaggaagagccagcaccagctggagaacctggagcgggagcagcgcttcctgaagtggaggctggagcagctgcagggcccccaggagatggagtag

SEQ ID NO: 160667 - DNA, 2424 bp, Artificial Sequence
  derived and/or modified sequence
ggtaaacaaaccacgcgcgggctgcccgcggcacggcgggcgcggctggcgcggctggggcggcaggggcggcggagagcgcgccgagccgcggccgagctggcccgcccgcccgtcgcacatgttccggaacggcgcccggccgtagccgcctgcggcgcctcctgtcggcccgagaagggagtgcggagaggcgccggtcgccacccgcggtgcccatggagcgggtgaagatgatcaacgtgcagcgtctgctggaggctgccgagtttttggagcgccgggagcgagagtgtgaacatggctacgcctcttcattcccgtccatgccgagcccccgactgcagcattcaaagcccccacggaggttgagccgggcacagaaacacagcagcgggagcagcaacaccagcactgccaacagatctacacacaatgagctggaaaagaatcgacgagctcatctgcgcctttgtttagaacgcttaaaagttctgattccactaggaccagactgcacccggcacacaacacttggtttgctcaacaaagccaaagcacacatcaagaaacttgaagaagctgaaagaaaaagccagcaccagctcgagaatttggaacgagaacagagatttttaaagtggcgactggaacagctgcagggtcctcaggagatggaacgaatacgaatggacagcattggatcaactatttcttcagatcgttctgattcagagcgagaggagattgaagtggatgttgaaagcacagagttctcccatggagaagtggacaatataagtaccaccagcatcagtgacattgatgaccacagcagcctgccgagtattgggagtgacgagggttactccagtgccagtgtcaaactttcattcacttcatagaacccagcatgacataacagtgcagggcaaaatattcactgggccaattcaatacaaacaatctcttaaattgggttcatgatgcagtctcctctttaaaacaaaacaaaacaaaacaaaactatacttgaacaaaagggtcagaggacctgtatttaagcaaatacttagcaaaaagtggggcagagcctcccaaggagaacaaatattcagaatattcatattggaaaaatcacaatttttaatggcagcagaaaacttgtgtgaaattttcttgatttgagttgattgagaagaggacattggagatgccatcctctttctcttttctagtttgctcatactacattgagtagacacatttaaggatggggttatgaacccttcctgagctttatggtcctaaaagcaaaataaaaactattcgaatgaaaagacaagaaaatcaggtattaatcttggatagctaataatgagctattaaaactcagcctgggacagtttatcatgaagcctgtggatgatcaatcctttattattattttttttttttgaaaaaagctcatttcatgctctgcaaaaggagagactcccatgaagccttttgaaagggatcatcatgcagctcaactttctgttggattccatgctaagcaagctaaccttatcctgcattgttagcactaggcacccagctgccacctctccatcctgctgcccttaggccacatgggagcagtccatgcatgacagcctctatcctacaaggcctatgagtatggattgggggggccaaaaggaaaaagctccatgtgcctctttgtctgcgtgggtcagaagagttgtgcacgcagattagcaggccaaggtctgagccacagcagcatttttatttcagattttgataactgtttatatgtgttgaaaaccaaaatgacatctttttaaagcttatccataaaaaaaaatagatgtcttttatagtggaaaaacacatggggaaaaaaatcatctattttgatgcagcatttgataatgataaaacacctcacacctcactctttatagtgcacaaaatgaatgaggtctgggctaggtagaaaaagggtcaatgctatttttgtttttagaatcattaccttttaccagcttttaaccatctgatatctatagtagacacactatcatagttaacatagtaagttcagcacttgtctcattttaatgtaaagatttgcttccattttcctacaggcagtctctctcttcctcacagtcccactgtgcaggtgctattgttactcttacgaatattttcagtaatgttattttcttctaagtgaaatttctagcctgcactttgatgtcatgtgttccctttgtctttcaaactccaaggttcccttgtggccctctcccttaccctgggaaggcctcttggagaccttacccctggctgtttggactttgtatactttaaataatttaactacccttaattacttaaaaaaaaaaaaaa

SEQ ID NO: 160668 - DNA, 2188 bp, Artificial Sequence
  derived and/or modified sequence
catcgcccgaggcgtccgccctgcaaatctgccagcccccgagaggggtttggaaccttagcacccaagtctaagtcaacttcatagtgtgaacatggctacgcctcttcattcccgtccatgccgagcccccgactgcagcattcaaagcccccacggaggttgagccgggcacagaaacacagcagcgggagcagcaacaccagcactgccaacagacgagctcatctgcgcctttgtttagaacgcttaaaagttctgattccactaggaccagactgcacccggcacacaacacttggtttgctcaacaaagccaaagcacacatcaagaaacttgaagaagctgaaagaaaaagccagcaccagctcgagaatttggaacgagaacagagatttttaaagtggcgactggaacagctgcagggtcctcaggagatggaacgaatacgaatggacagcattggatcaactatttcttcagatcgttctgattcagagcgagaggagattgaagtggatgttgaaagcacagagttctcccatggagaagtggacaatataagtaccaccagcatcagtgacattgatgaccacagcagcctgccgagtattgggagtgacgagggttactccagtgccagtgtcaaactttcattcacttcatagaacccagcatgacataacagtgcagggcaaaatattcactgggccaattcaatacaaacaatctcttaaattgggttcatgatgcagtctcctctttaaaacaaaacaaaacaaaacaaaactatacttgaacaaaagggtcagaggacctgtatttaagcaaatacttagcaaaaagtggggcagagcctcccaaggagaacaaatattcagaatattcatattggaaaaatcacaatttttaatggcagcagaaaacttgtgtgaaattttcttgatttgagttgattgagaagaggacattggagatgccatcctctttctcttttctagtttgctcatactacattgagtagacacatttaaggatggggttatgaacccttcctgagctttatggtcctaaaagcaaaataaaaactattcgaatgaaaagacaagaaaatcaggtattaatcttggatagctaataatgagctattaaaactcagcctgggacagtttatcatgaagcctgtggatgatcaatcctttattattattttttttttttgaaaaaagctcatttcatgctctgcaaaaggagagactcccatgaagccttttgaaagggatcatcatgcagctcaactttctgttggattccatgctaagcaagctaaccttatcctgcattgttagcactaggcacccagctgccacctctccatcctgctgcccttaggccacatgggagcagtccatgcatgacagcctctatcctacaaggcctatgagtatggattgggggggccaaaaggaaaaagctccatgtgcctctttgtctgcgtgggtcagaagagttgtgcacgcagattagcaggccaaggtctgagccacagcagcatttttatttcagattttgataactgtttatatgtgttgaaaaccaaaatgacatctttttaaagcttatccataaaaaaaaatagatgtcttttatagtggaaaaacacatggggaaaaaaatcatctattttgatgcagcatttgataatgataaaacacctcacacctcactctttatagtgcacaaaatgaatgaggtctgggctaggtagaaaaagggtcaatgctatttttgtttttagaatcattaccttttaccagcttttaaccatctgatatctatagtagacacactatcatagttaacatagtaagttcagcacttgtctcattttaatgtaaagatttgcttccattttcctacaggcagtctctctcttcctcacagtcccactgtgcaggtgctattgttactcttacgaatattttcagtaatgttattttcttctaagtgaaatttctagcctgcactttgatgtcatgtgttccctttgtctttcaaactccaaggttcccttgtggccctctcccttaccctgggaaggcctcttggagaccttacccctggctgtttggactttgtatactttaaataatttaactacccttaattacttaaaaaaaaaaaaaa

SEQ ID NO: 160669 - DNA, 879 bp, Artificial Sequence
  derived and/or modified sequence
ccctttagcggtggcagcccaaggggctgtagagatggcgcagaaagaccaggaactcggagactgtggtgtcgagagagaaaatgtctttctaagacttgttcgaagtacacaaaaatattgggcttaaagagactctttagaacagagagagttgaaagtaaaggggaatttttgaggcaagcgaagtcaatgaggtgaatgagtgtgaacatggctacgcctcttcattcccgtccatgccgagcccccgactgcagcattcaaagcccccacggaggttgagccgggcacagaaacacagcagcgggagcagcaacaccagcactgccaacagatctacacacaatgagctggaaaagaatcgacgagctcatctgcgcctttgtttagaacgcttaaaagttctgattccactaggaccagactgcacccggcacacaacacttggtttgctcaacaaagccaaagcacacatcaagaaacttgaagaagctgaaagaaaaagccagcaccagctcgagaatttggaacgagaacagagatttttaaagtggcgactggaacagctgcagggtcctcaggagatggaacgaatacgaatggacagcattggatcaactatttcttcagatcgttctgattcagagcgagaggagattgaagtggatgttgaaagcacagagttctcccatggagaagtggacaatataagtaccaccagcatcagtgacattgatgaccacagcagcctgccgagtattgggagtgacgagggttactccagtgccagtgtcaaactttcattcacttcatagaacccagcatgacataacagtgcagggcaaaatattcactgggccaattcaatacaaacaa

SEQ ID NO: 160670 - DNA, 893 bp, Artificial Sequence
  derived and/or modified sequence
gcgcgcgtgcgtggggagagtgtgaacatggctacgcctcttcattcccgtccatgccgagcccccgactgcagcattcaaagcccccacggaggttgagccgggcacagaaacacagcagcgggagcagcaacaccagcactgccaacagatctacacacaatgagctggaaaagaatcgacgagctcatctgcgcctttgtttagaacgcttaaaagttctgattccactaggaccagactgcacccggcacacaacacttggtttgctcaacaaagccaaagcacacatcaagaaacttgaagaagctgaaagaaaaagccagcaccagctcgagaatttggaacgagaacagagatttttaaagtggcgactggaacagctgcagggtcctcaggagatggaacgaatacgaatggacagcattggatcaactatttcttcagatcgttctgattcagagcgagaggagattgaagtggatgttgaaagcacagagttctcccatggagaagtggacaatataagtaccaccagcatcagtgacattgatgaccacagcagcctgccgagtattgggagtgacgagggttactccagtgccagtgtcaaactttcattcacttcatagaacccagcatgacataacagtgcagggcaaaatattcactgggccaattcaatacaaacaatctcttaaattgggttcatgatgcagtctcctctttaaaacaaaacaaaacaaaacaaaactatacttgaacaaaagggtcagaggacctgtatttaagcaaatacttagcaaaaagtggggcagagcctcccaaggagaacaaatattcagaatattcatattggaaaaatcacaatttttaatggcagcagaaaactt

SEQ ID NO: 160671 - DNA, 774 bp, Artificial Sequence
  derived and/or modified sequence
gtgtgtgtgagggcagggagtgtgaacatggctacgcctcttcattcccgtccatgccgagcccccgactgcagcattcaaagcccccacggaggttgagccgggcacagaaacacagcagcgggagcagcaacaccagcactgccaacagatctacacacaatgagctggaaaagaatcgacgagctcatctgcgcctttgtttagaacgcttaaaagttctgattccactaggaccagactgcacccggcacacaacacttggtttgctcaacaaagccaaagcacacatcaagaaacttgaagaagctgaaagaaaaagccagcaccagctcgagaatttggaacgagaacagagatttttaaagtggcgactggaacagctgcagggtcctcaggagatggaacgaatacgaatggacagcattggatcaactatttcttcagatcgttctgattcagagcgagaggagattgaagtggatgttgaaagcacagagttctcccatggagaagtggacaatataagtaccaccagcatcagtgacattgatgaccacagcagcctgccgagtattgggagtgacgagggttactccagtgccagtgtcaaactttcattcacttcatagaacccagcatgacataacagtgcagggcaaaatattcactgggccaattcaatacaaacaatctcttaaattgggttcatgatgcagtctcctctttaaaacaaaacaaaacaaaacaaaactatacttgaacaaaagggtc

SEQ ID NO: 160672 - DNA, 1156 bp, Artificial Sequence
  derived and/or modified sequence
aaaccacgcgcgggctgcccgcggcacggcgggcgcggctggcgcggctgcggcgcctcctgtcggcccgagaagggagtgcggagaggcgccggtcgccacccgcggtgcccatggagcgggtgaagatgatcaacgtgcagcgtctgctggaggctgccgagtttttggagcgccgggagcgagagtgtgaacatggctacgcctcttcattcccgtccatgccgagcccccgactgcagcattcaaagcccccacggaggttgagccgggcacagaaacacagcagcgggagcagcaacaccagcactgccaacagacgagctcatctgcgcctttgtttagaacgcttaaaagttctgattccactaggaccagactgcacccggcacacaacacttggtttgctcaacaaagccaaagcacacatcaagaaacttgaagaagctgaaagaaaaagccagcaccagctcgagaatttggaacgagaacagagatttttaaagtggcgactggaacagctgcagggtcctcaggagatggaacgaatacgaatggacagcattggatcaactatttcttcagatcgttctgattcagagcgagaggagattgaagtggatgttgaaagcacagagttctcccatggagaagtggacaatataagtaccaccagcatcagtgacattgatgaccacagcagcctgccgagtattgggagtgacgagggttactccagtgccagtgtcaaactttcattcacttcatagaacccagcatgacataacagtgcagggcaaaatattcactgggccaattcaatacaaacaatctcttaaattgggttcatgatgcagtctcctctttaaaacaaaacaaaacaaaacaaaactatacttgaacaaaagggtcagaggacctgtatttaagcaaatacttagcaaaaagtggggcagagcctcccaaggagaacaaatattcagaatattcatattggaaaaatcacaatttttaatggcagcagaaaacttgtgtgaaattttcttgatttgagttgattgagaagaggacattggagatgccatcctctttctcttttctagtttgctcatactacattgagtagacacatttaaggatggggttatgaaccctt

SEQ ID NO: 160673 - DNA, 889 bp, Artificial Sequence
  derived and/or modified sequence
cggccgagctggcccgcccgcccgtcgcacatgttccggaacggcgcccggccgtagccgcctgcggcgcctcctgtcggcccgagaagggagtgcggagaggcgccggtcgccacccgcggtgcccatggagcgggtgaagatgatcaacgtgcagcgtctgctggaggctgccgagtttttggagcgccgggagcgagagtgtgaacatggctacgcctcttcattcccgtccatgccgagcccccgactgcagcattcaaagcccccacggaggttgagccgggcacagaaacacagcagcgggagcagcaacaccagcactgccaacagacgagctcatctgcgcctttgtttagaacgcttaaaagttctgattccactaggaccagactgcacccggcacacaacacttggtttgctcaacaaagccaaagcacacatcaagaaacttgaagaagctgaaagaaaaagccagcaccagctcgagaatttggaacgagaacagagatttttaaagtggcgactggaacagctgcagggtcctcaggagatggaacgaatacgaatggacagcattggatcaactatttcttcagatcgttctgattcagagcgagaggagattgaagtggatgttgaaagcacagagttctcccatggagaagtggacaatataagtaccaccagcatcagtgacattgatgaccacagcagcctgccgagtattgggagtgacgagggttactccagtgccagtgtcaaactttcattcacttcatagaacccagcatgacataacagtgcagggcaaaatattcactgggccaattcaatacaaacaatctcttaaattgggttcatgatgcagtctcctctttaaaacaaa

SEQ ID NO: 160674 - DNA, 634 bp, Artificial Sequence
  derived and/or modified sequence
gggtgctgggagataagaggaaggaggaacacggatgctggggggggtcaggggaagggacgaggccgggagaacactgagcgggggaaaaccggtggagaggggcctttgaatacctgcggggtgatgagatggggtccctttagcggtggcagcccaaggggctgtagagatggcgcagaaagaccaggaactcggagactgtggtgtcgagagagaaaatgtctttctaagacttgttcgaaagtgtgaacatggctacgcctcttcattcccgtccatgccgagcccccgactgcagcattcaaagcccccacggaggttgagccgggcacagaaacacagcagcgggagcagcaacaccagcactgccaacagatctacacacaatgagctggaaaagaatcgacgagctcatctgcgcctttgtttagaacgcttaaaagttctgattccactaggaccagactgcacccggcacacaacacttggtttgctcaacaaagccaaagcacacatcaagaaacttgaagaagctgaaagaaaaagccagcaccagctcgagaatttggaacgagaacagagatttttaaagtggcgactggaacagctgcagggtcctcaggagatggaa

SEQ ID NO: 160675 - DNA, 687 bp, Artificial Sequence
  derived and/or modified sequence
atggagcgggtgaagatgatcaacgtgcagcggctgctggaggccgctgagtttttggagaggcgggagcgggagtgtgagcacgggtacgcatcctcgttcccctcgatgccgagtcctcggctgcagcactcgaaacccccacgtcgcctgagccgtgcccagaaacattcaagcggctcctccaacacttcaaccgccaaccggtccacacataatgaattggaaaagaatcgtcgggcccatctgagactctgtttagaacgtttgaaagtgctcatcccccttggcccagattgcacaaggcacaccactctaggcctgctcaataaggctaaggcccacataaagaagcttgaggaagctgagcgaaaatctcaacaccagttggagaaccttgagcgcgagcagaggttcctaaagtggcgcctagagcagctgcaggggccacaggagatggaacgtattcggatggattccattggctcaacaatcagttcagaccgatccgactctgaaagagaagagattgaagtggacgtcgagtcaaccgaattttctcacggtgaagtggacaacattagtaccacctctattagtgacattgacgatcattcaagcctcccctctattgggagcgacgaagggtactcttctgcctctgtcaaactcagttttacatcttag

SEQ ID NO: 160676 - DNA, 579 bp, Artificial Sequence
  derived and/or modified sequence
atgcccagcccccggctgcagcacagcaagcccccccggcggctgtcccgagcacagaaacattcgtccggcagctccaatacctctaccgcaaaccgctccacacacaacgagttagagaagaaccgaagagcacacctaagattgtgtctagagagactgaaggtgctgatccctctcggtcctgactgtacccgacacactacacttggtctgcttaacaaagccaaggcacacatcaaaaaactcgaagaggcagaacgcaaaagtcaacatcagttagagaacttggaacgcgagcagagattcctaaagtggaggctggaacaattacagggcccccaggaaatggaaagaatcaggatggatagcataggtagcacgatatcctctgatcgctccgattcggaacgcgaggagatcgaagtggatgtggaatcaaccgaattctctcacggcgaagtcgataatatcagtacaaccagcatctccgatatcgatgatcactccagccttccaagtattggttccgatgaaggctacagcagcgcgtcggttaaactgtccttcacctcctag

SEQ ID NO: 160677 - DNA, 579 bp, Artificial Sequence
  derived and/or modified sequence
atgcccagcccccggctgcagcacagcaagcccccccggcggctgtcacgagcacagaagcatagttccggttcctccaacacctcaaccgccaaccgaagcactcataacgagctggagaaaaatcgccgtgcacacctgagactgtgtctggaacgtctcaaagtcctgattccactcggcccagactgtacaaggcacactacgctaggtttactgaacaaagctaaagctcacatcaagaaactggaagaagccgagagaaaaagtcaacaccagcttgaaaatctcgagagagagcagaggttcctgaagtggagacttgagcagcttcaggggccacaagagatggaacgaatacgcatggatagcattggatctacaatttcgtccgaccgcagcgacagtgaaagggaggagatcgaagttgacgttgagtccactgagttcagccacggagaagtagacaacataagcaccacttctatctccgatattgacgaccacagctccctgcccagcattgggagtgacgaggggtacagttccgcttctgttaagctgtctttcacatcatag

SEQ ID NO: 160678 - DNA, 579 bp, Artificial Sequence
  derived and/or modified sequence
atgcccagcccccggctgcagcacagcaagcccccccggcggctgtctagggcccagaaacatagcagcggctcctcaaacacatccaccgccaatcggtcgacccataatgagctcgagaaaaaccggcgtgctcacctgcgcctgtgtctggagagacttaaggttcttatcccgttgggtcctgactgtacccggcacaccaccttaggactgcttaacaaagccaaagcacacattaagaagctggaggaagcggagagaaagagtcagcatcaactcgaaaacctggaacgcgagcagcggttcctaaaatggcgtctcgaacagctccagggcccccaggaaatggaacggattcgaatggactccattgggtcaaccatttcgtccgatagatccgattcagagcgcgaggaaatcgaagtcgatgtggagtctaccgaattttctcacggggaggtagacaacatctcaaccacgagcatctcggacatcgacgaccatagtagtttaccgtccataggcagtgatgaaggatatagcagcgccagcgtaaaactatcttttacctcgtag

SEQ ID NO: 160679 - DNA, 657 bp, Artificial Sequence
  derived and/or modified sequence
atggagcgggtgaagatgatcaacgtgcagcggctgctggaggccgcagaattcctggaaagaagggaaagagagtgcgaacacgggtacgcctcctccttcccatcaatgccttcccctaggctgcagcattccaagccaccccggcgtctatccagggcacagaaacactctagtgggagctctaacactagcaccgcaaatcggcgcgcccacctcaggctctgccttgaacgactcaaggtgttgatcccactgggtcctgattgtacccggcataccaccctcggcctgctcaataaggccaaggcacacataaaaaagctcgaagaagccgaaagaaaatctcagcaccagctggaaaatctggaacgcgaacagcgcttcttaaaatggcggctggagcaactgcagggaccccaggaaatggagcggatacgcatggactccattggctctaccatttccagcgataggtcagatagtgaacgggaggagatcgaagtcgatgtggagagcactgagttctcccacggggaagtcgacaatattagtactacttcgatatccgacatagacgatcatagctccttgcccagcattggatccgatgagggttatagctccgccagcgttaaactgagcttcactagctag

SEQ ID NO: 160680 - DNA, 657 bp, Artificial Sequence
  derived and/or modified sequence
atggagcgggtgaagatgatcaacgtgcagcggctgctggaggccgctgagtttctggagagacgggaaagagagtgcgaacatggctatgcttcttcctttccctctatgccctccccgcgactgcaacacagcaaaccccctcgccgactgtcccgggctcagaaacattccagcggatcctccaatactagtaccgccaataggcgagcgcacctgaggctctgtctggagaggctgaaggtcctgattcccctgggccctgattgtactagacacaccacccttggactcctgaataaggcgaaggctcacatcaagaagctcgaagaagcagagcgtaagagtcaacatcagctggaaaatcttgagagggagcagcgatttttgaaatggagattggagcagttgcaggggccacaggagatggagcgaatacgtatggactccatcgggagcacaatcagcagcgataggtctgattccgaacgagaggagatcgaggtggatgtggaaagtactgagttctcccacggtgaagtcgataacatttctacgacaagcattagtgatattgatgatcactcatcccttccctctattggctctgacgagggatacagtagcgcaagcgtgaagttgagttttacctcctag

SEQ ID NO: 160681 - DNA, 357 bp, Artificial Sequence
  derived and/or modified sequence
atgcccagcccccggctgcagcacagcaagcccccccggcggctgtccagggcccagaaacactcaagtggctctagtaatacatctaccgctaatagaagcacacataatgagctcgagaagaaccgacgcgcacacttaaggctgtgcctggaacgactcaaggtgttgattcccctgggccctgactgcacaagacacactacgctcggtctgttgaacaaagctaaagcccatatcaagaaactggaagaggctgagcggaaatcccaacatcagcttgaaaatctcgagcgggaacagaggttccttaagtggagattggagcagctccagggacctcaggaaatggagtag

SEQ ID NO: 160682 - DNA, 687 bp, Artificial Sequence
  derived and/or modified sequence
atggagagagtgaagatgatcaatgtccagaggctgctcgaagcggcagagttcctggaacgcagagaaagagagtgtgagcacggttacgccagctcatttccttccatgcccagtccaaggttgcagcacagtaagccgccacggaggttatccagagcccaaaagcactcgtccggttccagtaacacatctaccgccaaccggagtacgcataacgagctggagaagaatcgacgtgcccaccttcgcctgtgcttagaacggttaaaagtcctcatccctttggggcctgactgcacgagacacaccactctaggactgctcaataaagctaaggcccatatcaaaaaacttgaggaggccgagaggaaatcccagcaccagctggaaaacctcgagcgcgagcaacggttcctgaagtggcgacttgagcagctgcaagggccacaagagatggagagaatccgcatggactccataggctccacaattagttctgatcgcagcgactctgagcgggaagagattgaagtggacgtggaatccactgaattctcccatggcgaggtggacaatattagcaccacttctatctctgacatcgacgaccactcctctttacctagtatcggttcagacgaaggatactcatctgcaagtgttaagctgtcatttacttcctag

SEQ ID NO: 160683 - DNA, 579 bp, Artificial Sequence
  derived and/or modified sequence
atgccgagtccgagactccaacactccaagcctccgcgaagattgtcacgcgctcagaagcattctagtgggtcttccaacacctcaaccgctaatcgctctacccataacgagctggagaagaacaggagagctcatctgagactgtgcttggagcgtctgaaagtacttattccgttgggccctgattgcacacgtcacactaccctgggtctgctcaacaaagccaaagcccacattaaaaagttggaggaggccgaacggaagtcccaacaccaactcgagaacctcgaacgggaacaaaggtttctgaagtggcgtttggagcagctgcaggggccacaagagatggagcgcatccgcatggattccatcgggtcgacgatctccagcgaccgttctgactccgagcgggaggaaatagaggtcgacgtggagtctacggagtttagccacggcgaggttgacaatatctctaccacgtctatttcagatattgacgatcatagttctcttccttcaatcggcagcgacgaggggtattcttctgcgtcagtgaagctgtcattcacgtcatag

SEQ ID NO: 160684 - DNA, 579 bp, Artificial Sequence
  derived and/or modified sequence
atgccatccccacgattgcagcacagcaaaccccctcggcgactgagtagggcacagaagcattcatccggatccagcaacaccagcacagcaaatcggtcgacacacaacgagctcgaaaagaacaggagggctcacctgagactgtgtctcgagcggctcaaagttcttatcccactcggacccgactgtacgcgccacaccactctaggcctgttaaacaaagctaaggcgcatattaagaagcttgaggaagccgaaaggaaaagccagcatcagcttgagaatctcgagagggagcaaaggttcttaaaatggcgcctagagcagcttcagggccctcaggagatggagcgcatccgcatggattctatcggcagcaccatcagttccgaccggagcgactcggagcgagaggaaatagaggtcgacgttgagtctactgaattctcccacggagaagttgacaatatctccactacgtctattagtgatatcgacgatcattctagcctgccctccattggatccgacgagggatattcctctgcttctgtgaaactgtcttttacttcttag

SEQ ID NO: 160685 - DNA, 579 bp, Artificial Sequence
  derived and/or modified sequence
atgccttctcctaggctgcaacacagcaagcctccgcgtaggctgagcagagcccagaaacatagcagtggcagttccaacacctccaccgccaatcgaagcacccacaacgaactggaaaagaatagacgcgctcacctgagactctgtctcgagcggctcaaggtcttgattccactcgggccagattgtaccagacatactactctcggattgctcaataaggcgaaggcacatatcaaaaagctggaggaagccgagagaaagtcacagcatcaactggagaacctggagagggagcagcggtttctgaaatggcgcctggaacagttgcaggggccacaggagatggaacgcattagaatggatagtatcggatcaaccatttccagtgaccgctcagacagtgaacgcgaggaaatagaagtggatgtggaatccaccgagttctctcacggggaagtggacaacatttcaacaacgtccatctccgatattgatgatcattcttctttgccctctattgggagcgatgaaggctactcaagcgccagcgtgaagttgtcatttacgagttag

SEQ ID NO: 160686 - DNA, 657 bp, Artificial Sequence
  derived and/or modified sequence
atggaaagggtgaaaatgatcaatgtccagcgattgctggaagctgctgagttccttgaaagacgcgagagagagtgcgaacacgggtatgcctcctcgttcccgtcgatgccttctcccaggctgcaacacagcaaacccccacggagactgagccgggctcagaagcactctagcggttcttcaaacacttctaccgcaaacaggagagcacatctgcgcttgtgtctggaaaggctgaaggtccttatccccctcggtcctgactgtacccgccatacaaccttgggcttactgaacaaagctaaagcccacataaagaagcttgaggaagctgagagaaagtcccagcaccagcttgaaaacctggagcgcgaacaaagattcttgaagtggaggctggagcagctgcagggaccgcaggaaatggagcggattcggatggactctataggatcaacaatttcatctgatagatctgacagcgaaagggaagaaattgaggtggatgtcgaatctacagagtttagtcacggagaggtggataatatctcaaccactagcatctccgacattgatgatcactcatccctgccgagtattggatccgacgagggttacagctccgcatcggtcaagctctcattcaccagttag

SEQ ID NO: 160687 - DNA, 657 bp, Artificial Sequence
  derived and/or modified sequence
atggagagggtgaagatgatcaacgtacaaagactgctggaggccgctgagtttctggagagacgcgagagagagtgtgaacatggatatgcctccagctttccctcaatgccctccccacggctacagcacagcaagccccctcgacgattgagcagagctcagaagcacagctcaggcagttctaatacatccaccgccaaccggagggcgcatctcagactgtgtctggagaggctgaaagtcctcatccccttgggcccagattgcacgcggcacaccaccctggggctgctgaacaaggcaaaagcacacatcaagaagttagaggaggcagagcgaaaaagtcagcaccagctagagaacctcgagagggagcagagatttctcaaatggcgcctggagcaattgcaaggtcctcaggaaatggagaggatcaggatggattctatcggatcaactatctcttcggatcgcagcgactctgaacgggaggagatagaggttgatgtggagagtactgagttttcacatggggaagtggataacatttctaccacatccatcagtgatatcgatgatcactctagcctgccatcgatcggcagcgatgaagggtactccagtgcctccgtgaaactgtccttcactagttag

SEQ ID NO: 160688 - DNA, 357 bp, Artificial Sequence
  derived and/or modified sequence
atgccaagtccaaggttgcaacatagtaaacctcctcggcgtctgtctcgagctcaaaaacactcgtccgggtcgtccaacaccagcactgctaatagatccacccataacgagttggagaaaaaccgtcgcgctcacctgcgcctctgcctggaacgcctgaaggtcttgattcccctcggacccgattgcactcgtcacactacactaggcctgcttaacaaggctaaagcacatatcaagaagttggaggaagccgaacgtaagagccaacatcaactcgagaatctcgagcgggagcaaagattcctgaaatggcggcttgagcaactgcaggggcctcaggagatggaatag

SEQ ID NO: 160689 - DNA, 687 bp, Artificial Sequence
  derived and/or modified sequence
atggagagagtgaagatgatcaacgtgcagagactgctggaggccgccgagttcctggagagaagagagagagagtgcgagcacggctacgccagcagcttccccagcatgcccagccccagactgcagcacagcaagccccccagaagactgagcagagcccagaagcacagcagcggcagcagcaacaccagcaccgccaacagaagcacccacaacgagctggagaagaacagaagagcccacctgagactgtgcctggagagactgaaggtgctgatccccctgggccccgactgcaccagacacaccaccctgggcctgctgaacaaggccaaggcccacatcaagaagctggaggaggccgagagaaagagccagcaccagctggagaacctggagagagagcagagattcctgaagtggagactggagcagctgcagggcccccaggagatggagagaatcagaatggacagcatcggcagcaccatcagcagcgacagaagcgacagcgagagagaggagatcgaggtggacgtggagagcaccgagttcagccacggcgaggtggacaacatcagcaccaccagcatcagcgacatcgacgaccacagcagcctgcccagcatcggcagcgacgagggctacagcagcgccagcgtgaagctgagcttcaccagctag

SEQ ID NO: 160690 - DNA, 579 bp, Artificial Sequence
  derived and/or modified sequence
atgcccagccccagactgcagcacagcaagccccccagaagactgagcagagcccagaagcacagcagcggcagcagcaacaccagcaccgccaacagaagcacccacaacgagctggagaagaacagaagagcccacctgagactgtgcctggagagactgaaggtgctgatccccctgggccccgactgcaccagacacaccaccctgggcctgctgaacaaggccaaggcccacatcaagaagctggaggaggccgagagaaagagccagcaccagctggagaacctggagagagagcagagattcctgaagtggagactggagcagctgcagggcccccaggagatggagagaatcagaatggacagcatcggcagcaccatcagcagcgacagaagcgacagcgagagagaggagatcgaggtggacgtggagagcaccgagttcagccacggcgaggtggacaacatcagcaccaccagcatcagcgacatcgacgaccacagcagcctgcccagcatcggcagcgacgagggctacagcagcgccagcgtgaagctgagcttcaccagctag

SEQ ID NO: 160691 - DNA, 657 bp, Artificial Sequence
  derived and/or modified sequence
atggagagagtgaagatgatcaacgtgcagagactgctggaggccgccgagttcctggagagaagagagagagagtgcgagcacggctacgccagcagcttccccagcatgcccagccccagactgcagcacagcaagccccccagaagactgagcagagcccagaagcacagcagcggcagcagcaacaccagcaccgccaacagaagagcccacctgagactgtgcctggagagactgaaggtgctgatccccctgggccccgactgcaccagacacaccaccctgggcctgctgaacaaggccaaggcccacatcaagaagctggaggaggccgagagaaagagccagcaccagctggagaacctggagagagagcagagattcctgaagtggagactggagcagctgcagggcccccaggagatggagagaatcagaatggacagcatcggcagcaccatcagcagcgacagaagcgacagcgagagagaggagatcgaggtggacgtggagagcaccgagttcagccacggcgaggtggacaacatcagcaccaccagcatcagcgacatcgacgaccacagcagcctgcccagcatcggcagcgacgagggctacagcagcgccagcgtgaagctgagcttcaccagctag

SEQ ID NO: 160692 - DNA, 357 bp, Artificial Sequence
  derived and/or modified sequence
atgcccagccccagactgcagcacagcaagccccccagaagactgagcagagcccagaagcacagcagcggcagcagcaacaccagcaccgccaacagaagcacccacaacgagctggagaagaacagaagagcccacctgagactgtgcctggagagactgaaggtgctgatccccctgggccccgactgcaccagacacaccaccctgggcctgctgaacaaggccaaggcccacatcaagaagctggaggaggccgagagaaagagccagcaccagctggagaacctggagagagagcagagattcctgaagtggagactggagcagctgcagggcccccaggagatggagtag

SEQ ID NO: 160693 - protein, 1939 aa, Artificial Sequence
  derived and/or modified sequence
MSSDSEMAIFGEAAPFLRKSERERIEAQNKPFDAKTSVFVVDPKESFVKATVQSREGGKVTAKTEAGATVTVKDDQVFPMNPPKYDKIEDMAMMTHLHEPAVLYNLKERYAAWMIYTYSGLFCVTVNPYKWLPVYNAEVVTAYRGKKRQEAPPHIFSISDNAYQFMLTDRENQSILITGESGAGKTVNTKRVIQYFATIAVTGEKKKEEVTSGKMQGTLEDQIISANPLLEAFGNAKTVRNDNSSRFGKFIRIHFGTTGKLASADIETYLLEKSRVTFQLKAERSYHIFYQIMSNKKPDLIEMLLITTNPYDYAFVSQGEITVPSIDDQEELMATDSAIEILGFTSDERVSIYKLTGAVMHYGNMKFKQKQREEQAEPDGTEVADKAAYLQNLNSADLLKALCYPRVKVGNEYVTKGQTVQQVYNAVGALAKAVYDKMFLWMVTRINQQLDTKQPRQYFIGVLDIAGFEIFDFNSLEQLCINFTNEKLQQFFNHHMFVLEQEEYKKEGIEWTFIDFGMDLAACIELIEKPMGIFSILEEECMFPKATDTSFKNKLYEQHLGKSNNFQKPKPAKGKPEAHFSLIHYAGTVDYNIAGWLDKNKDPLNETVVGLYQKSAMKTLALLFVGATGAEAEAGGGKKGGKKKGSSFQTVSALFRENLNKLMTNLRSTHPHFVRCIIPNETKTPGAMEHELVLHQLRCNGVLEGIRICRKGFPSRILYADFKQRYKVLNASAIPEGQFIDSKKASEKLLGSIDIDHTQYKFGHTKVFFKAGLLGLLEEMRDEKLAQLITRTQAMCRGFLARVEYQKMVERRESIFCIQYNVRAFMNVKHWPWMKLYFKIKPLLKSAETEKEMANMKEEFEKTKEELAKTEAKRKELEEKMVTLMQEKNDLQLQVQAEADSLADAEERCDQLIKTKIQLEAKIKEVTERAEDEEEINAELTAKKRKLEDECSELKKDIDDLELTLAKVEKEKHATENKVKNLTEEMAGLDETIAKLTKEKKALQEAHQQTLDDLQAEEDKVNTLTKAKIKLEQQVDDLEGSLEQEKKIRMDLERAKRKLEGDLKLAQESTMDIENDKQQLDEKLKKKEFEMSGLQSKIEDEQALGMQLQKKIKELQARIEELEEEIEAERASRAKAEKQRSDLSRELEEISERLEEAGGATSAQIEMNKKREAEFQKMRRDLEEATLQHEATAATLRKKHADSVAELGEQIDNLQRVKQKLEKEKSEMKMEIDDLASNMETVSKAKGNLEKMCRALEDQLSEIKTKEEEQQRLINDLTAQRARLQTESGEYSRQLDEKDTLVSQLSRGKQAFTQQIEELKRQLEEEIKAKSALAHALQSSRHDCDLLREQYEEEQEAKAELQRAMSKANSEVAQWRTKYETDAIQRTEELEEAKKKLAQRLQDAEEHVEAVNAKCASLEKTKQRLQNEVEDLMIDVERTNAACAALDKKQRNFDKILAEWKQKCEETHAELEASQKESRSLSTELFKIKNAYEESLDQLETLKRENKNLQQEISDLTEQIAEGGKRIHELEKIKKQVEQEKSELQAALEEAEASLEHEEGKILRIQLELNQVKSEVDRKIAEKDEEIDQMKRNHIRIVESMQSTLDAEIRSRNDAIRLKKKMEGDLNEMEIQLNHANRMAAEALRNYRNTQAILKDTQLHLDDALRSQEDLKEQLAMVERRANLLQAEIEELRATLEQTERSRKIAEQELLDASERVQLLHTQNTSLINTKKKLETDISQIQGEMEDIIQEARNAEEKAKKAITDAAMMAEELKKEQDTSAHLERMKKNLEQTVKDLQHRLDEAEQLALKGGKKQIQKLEARVRELEGEVESEQKRNVEAVKGLRKHERKVKELTYQTEEDRKNILRLQDLVDKLQAKVKSYKRQAEEAEEQSNVNLSKFRRIQHELEEAEERADIAESQVNKLRVKSREVHTKIISEE

SEQ ID NO: 160694 - protein, 627 aa, Artificial Sequence
  derived and/or modified sequence
MSSDSEMAIFGEAAPFLRKSERERIEAQNKPFDAKTSVFVVDPKESFVKATVQSREGGKVTAKTEAGATVTVKDDQVFPMNPPKYDKIEDMAMMTHLHEPAVLYNLKERYAAWMIYTYSGLFCVTVNPYKWLPVYNAEVVTAYRGKKRQEAPPHIFSISDNAYQFMLTDRENQSILITGESGAGKTVNTKRVIQYFATIAVTGEKKKEEVTSGKMQGTLEDQIISANPLLEAFGNAKTVRNDNSSRFGKFIRIHFGTTGKLASADIETYLLEKSRVTFQLKAERSYHIFYQIMSNKKPDLIEMLLITTNPYDYAFVSQGEITVPSIDDQEELMATDSAIEILGFTSDERVSIYKLTGAVMHYGNMKFKQKQREEQAEPDGTEVADKAAYLQNLNSADLLKALCYPRVKVGNEYVTKGQTVQQVYNAVGALAKAVYDKMFLWMVTRINQQLDTKQPRANSEVAQWRTKYETDAIQRTEELEEAKKKLAQRLQDAEEHVEAVNAKCASLEKTKQRLQNEVEDLMIDVERTNAACAALDKKQRNFDKILAEWKQKCEETHAELEASQKESRSLSTELFKIKNAYEESLDQLETLKRENKNLQQEISDLTEQIAEGGKRIHELEKIKKQVE

SEQ ID NO: 160695 - DNA, 1884 bp, Artificial Sequence
  derived and/or modified sequence
atgtcctctgacagcgagatggccatctttggtgaggctgccccctttttaaggaagagcgagagagagagaattgaagcacagaacaagccctttgacgccaaaacgagtgtgtttgtcgtagaccctaaagaatctttcgtgaaggctaccgtgcagagccgcgaaggcggtaaggtcacggcaaaaactgaagccggcgcaacggtgactgttaaagatgatcaggtttttccaatgaatccccccaagtacgacaaaatcgaggacatggcaatgatgactcatctgcacgaacccgcagtactttacaacctcaaggagaggtatgctgcatggatgatctacacttacagtgggcttttctgtgtgaccgtgaacccttataagtggctacctgtctacaacgcagaggtggtgaccgcgtatcgggggaaaaagagacaggaagcccctccccacatcttctccatcagcgacaatgcctaccagtttatgttgaccgacagagagaaccagtccatcctgatcacaggagaatctggggccggcaaaaccgttaatactaaaagggtgattcagtactttgccaccatcgctgtcaccggggaaaagaaaaaagaggaggtgaccagcggcaaaatgcagggaacactggaagatcaaattataagcgcaaatccccttctggaagccttcggcaacgccaaaaccgtacgaaatgacaattcctcaaggttcgggaagtttatcaggattcatttcggcactactggtaagctggcctccgcagacattgagacatacctgctggagaaaagccgggtgaccttccagctgaaagccgaacgaagctatcacatcttctatcagataatgtccaacaaaaagcctgatctgatcgaaatgttactgatcacaactaatccatacgattacgcctttgtctcccagggcgagatcaccgtcccctcaatcgatgaccaggaagaactgatggccaccgacagcgccatcgagatcctgggattcacaagtgacgagagagtttccatatacaagctcacaggagcagtaatgcactatggtaacatgaaattcaaacagaaacaacgagaggagcaagccgagcctgacggcaccgaagtcgccgacaaggcagcctatctgcagaacctcaattcagctgacctgctgaaagcactatgctatcctcgggtgaaagttgggaatgagtacgttaccaaaggtcagactgtccagcaggtttacaatgcagtgggcgcccttgctaaagccgtctatgacaagatgttcctttggatggtgactcgcataaaccagcaactagacacgaagcagccccgagccaactcagaggttgcccagtggcggaccaagtatgagacagatgcaatacaaaggactgaggagctggaggaagcgaaaaaaaagctggctcagcgcctgcaggacgccgaagagcacgttgaagcagtgaacgctaagtgcgctagtctggaaaaaactaagcagagacttcagaacgaagtggaagatctcatgatcgacgtggagaggacaaacgctgcttgcgcggctctggataaaaaacagagaaattttgataagattctagccgagtggaagcagaaatgcgaggaaacgcatgcggagttggaagcctctcagaaggagtctcggagcctttcgacggagctttttaaaatcaagaacgcatacgaagaatcccttgaccagctggaaaccctgaaacgagagaacaaaaatcttcaacaggagatctccgacttgaccgaacaaatagccgagggaggaaagcggatccacgaactagagaaaattaagaagcaggtcgagtag

SEQ ID NO: 160696 - DNA, 5820 bp, Artificial Sequence
  derived and/or modified sequence
atgtcttcagacagcgagatggccattttcggcgaggccgccccttttctgcgcaagtcggagagagaaagaattgaagcccaaaacaagccctttgacgccaagacatcagtcttcgtcgtcgatcctaaggagagttttgtcaaagctactgtgcaatcacgggaaggcgggaaagtcacggcaaaaacagaagctggagcaacagtcaccgttaaagatgaccaggtcttccccatgaacccgcctaagtacgataaaattgaggatatggccatgatgacccacctccacgagcctgctgtcctctacaatttaaaagaaaggtacgcagcctggatgatttatacctatagcggcttgttctgcgtgaccgtgaatccctacaaatggttgcctgtgtacaatgccgaagtggtcaccgcctacaggggcaaaaaaaggcaagaagcccctccccatatcttttctatctccgacaatgcataccagtttatgcttacagacagagaaaaccaatccattctgattaccggcgagtccggcgcagggaaaacggtaaacacaaaaagagtaatccaatactttgctacaattgcggtcactggggagaagaaaaaagaagaggtgacttctgggaagatgcaggggacactagaggatcagattatttctgctaacccccttctggaggcgttcggcaatgccaaaaccgttcgcaatgacaatagtagtcgcttcggcaaattcataagaatccatttcggtactacggggaagttagccagcgcagatatagagacatacttgctcgagaagagccgagtgacctttcaactgaaagccgaaaggagctaccatatcttctatcaaattatgagcaataagaaaccagaccttatagaaatgctgctgatcacaactaatccatatgattacgcgttcgttagccagggagaaattacggtgccgagtattgacgatcaggaagaattaatggcaactgactccgcaatagagattttgggatttaccagcgacgaacgcgtgtccatctataaattgaccggcgctgtgatgcactatggcaacatgaagtttaaacagaagcagcgggaggaacaggccgagccagatggcaccgaggtggcggacaaagccgcctacctgcagaacctgaattcagcagatctgttgaaggccctgtgctatcctcgcgttaaagtcgggaacgagtatgtcacgaagggccagacggttcagcaggtgtacaatgccgttggtgctctggctaaagctgtctacgataagatgttcctatggatggttacacggatcaaccagcaactcgacaccaagcagccacgccagtattttattggcgtgctggacatcgctggcttcgagattttcgattttaattccttagagcaactgtgcatcaacttcacaaatgaaaaactgcagcagttttttaatcatcacatgtttgtgctggaacaggaggaatacaagaaggagggtattgagtggaccttcatcgatttcgggatggacctagccgcatgcatcgaacttattgagaagccaatggggattttctccattctggaggaagaatgcatgttcccaaaggccaccgacacgtctttcaagaataagctatacgagcaacatctcggcaaaagcaacaacttccagaagccgaagcctgccaagggaaagccagaggctcacttctccctgatccactatgccgggaccgtggactacaacatagccgggtggttggacaagaataaagatcccctgaacgaaactgtggtgggcctttatcagaaaagtgccatgaaaaccctggccctacttttcgtgggcgccacaggtgctgaggcagaagccggcggggggaagaagggcggtaagaagaagggctcatcctttcagaccgtttcagcccttttcagagagaaccttaataagctgatgacgaatcttagatcgacccaccctcacttcgtgagatgtatcatacctaatgagaccaaaacacccggcgccatggaacacgaactggttctccatcagctgcggtgtaacggtgtgttggaggggatcaggatttgtcgaaaaggcttccccagcaggatactgtatgctgatttcaagcaaagatacaaagtgctcaacgcctctgctatccccgaagggcagtttattgactcaaagaaggcaagtgaaaagctcttaggctctattgatatagatcatacacagtacaagtttgggcacaccaaggtgttctttaaggcagggctcctgggtctgttagaagagatgagagatgagaagctcgcgcagcttattacgcgaacacaggcgatgtgccggggctttctagcccgagtagagtatcagaagatggtggagaggcgcgagagcatcttctgcatccagtacaacgtgcgagcctttatgaatgtgaaacattggccatggatgaagctatattttaaaatcaaacccctgctgaagtccgccgagacagaaaaggagatggccaacatgaaggaagaattcgagaaaaccaaagaggagctggcgaagactgaagccaagcgcaaagaactcgaggaaaaaatggtcaccttaatgcaagaaaagaatgatttgcagttacaagtccaggcagaggccgactctctggccgatgccgaggagcgctgcgatcaactgattaagaccaaaattcagttagaagcaaagattaaagaagtaacagagagggcagaggatgaagaggagatcaatgccgagctaacagccaagaagaggaagcttgaggacgagtgttccgagttgaaaaaagacattgacgacctcgagctgaccctggctaaagtggaaaaggaaaagcacgcgacagagaataaggtaaagaatctgaccgaagaaatggctggactggacgaaacaatagccaagctcactaaagaaaaaaaagcattacaggaggcccaccaacagactctggatgatttacaggcggaagaggataaggtgaacacgctcactaaagctaagatcaaattagagcagcaggtcgatgacttagagggaagcctggaacaagagaaaaaaatcaggatggacctggagagagctaagcgcaaactcgagggggacctgaaactcgcccaggaaagtactatggacattgaaaacgataagcagcagctcgacgagaaactgaagaaaaaagagttcgagatgagcggactgcagtcaaaaattgaagacgagcaggccctgggaatgcagctgcagaagaagataaaagagctgcaagccagaatcgaggaattggaggaagaaatcgaagccgaacgtgcaagcagggcgaaagctgaaaaacagagatcagatcttagccgggagctcgaggagatctcggagcgattggaagaggcgggcggcgcgacatccgctcagatcgagatgaacaagaagcgcgaggccgaattccagaagatgagaagagacttagaggaagccaccctgcagcacgaggccactgctgcgacgctgcggaagaaacatgccgacagcgtcgccgagttgggggaacagatcgacaatctgcaacgagtgaagcagaaactcgaaaaggaaaagtccgagatgaaaatggaaatagacgatctggcttccaatatggagactgtgagcaaggccaagggcaatctcgagaagatgtgtcgcgcgctggaagaccaactaagcgagatcaaaaccaaggaggaggagcaacaacgcctgatcaacgaccttactgcccagagagcccggctccagaccgagtcaggcgaatactctcgccagctcgacgaaaaagatacattggtttcccagttgagccgcggaaaacaggctttcacccagcagatcgaggagctaaagcgccagttggaagaagaaatcaaagccaagtcagctcttgcacacgctctccaatcaagtcgacatgattgtgacctgttgagggaacagtatgaggaggagcaggaggccaaggccgagctgcaaagggccatgagcaaggcaaacagtgaggtcgcacagtggaggactaagtatgagactgatgccatccagcggacggaagagctggaagaggcaaaaaagaagcttgcccagcgactccaagacgcagaagagcatgttgaagccgtaaatgctaagtgcgcgagtttagagaagacgaaacagcgcctgcagaatgaggtggaggatctgatgatcgacgtggaaagaacaaatgctgcatgcgcagcattagacaagaaacagcgtaacttcgataaaatcctcgcggaatggaaacagaagtgcgaggagacccacgcagaattggaagcttcgcagaaggaatcccggagcctgtccacagagctgtttaaaattaagaacgcatacgaagagtcactcgatcaattggagaccctgaagcgggagaataagaacttgcagcaagaaattagtgacctgacagagcagatcgctgaaggtggaaagcgtattcacgaactagagaagatcaagaagcaggtagagcaggaaaaaagtgaacttcaagccgctctggaggaggccgaagccagcctcgagcacgaagagggtaagatcctgaggatccaactggaactgaaccaagttaaaagcgaagtggacaggaagatagcagagaaggacgaagagattgatcagatgaagcgcaatcatatccggattgtcgagtcgatgcaatctacacttgacgcggagatccgctcacggaatgatgcgattaggttgaagaaaaaaatggagggggatctaaatgagatggaaatacagctgaaccacgctaacagaatggcagccgaggcgctgaggaactacaggaacacccaggcaatccttaaagatacacaacttcatctcgacgacgcactgcggtctcaggaagatcttaaggagcaactcgccatggtggagcgccgggcaaatttactgcaggccgagatagaagagctacgggccacgctcgagcagacagagagaagccgcaaaatcgccgaacaggagctcctggatgcaagcgaacgggtgcagctgttgcatacacaaaatacttcactgatcaataccaaaaaaaaacttgagacagacatatcacagatccagggcgagatggaagacattatccaggaggcaaggaacgcggaggaaaaggccaaaaaggcgatcaccgacgctgccatgatggccgaggagctgaaaaaggagcaggatacttctgctcacttggagcgcatgaagaaaaatctggaacagacagtcaaggacctgcagcacagactcgacgaggctgagcagctggctttaaaaggaggcaagaagcagatccagaaactggaagcgcgggttagagagctggagggagaagtggagtctgagcagaagaggaacgtcgaggctgtgaaagggctgcggaagcatgagcgaaaggtgaaagaacttacctaccagactgaagaggatcggaagaacattcttagactacaagacttggttgacaagctgcaggccaaagtgaagtcctacaagagacaagccgaagaggctgaggaacagagcaacgttaaccttagcaagttcagaaggatccaacacgaattagaagaggcggaagaacgggccgatattgcggagtctcaggtaaacaagttgagagtcaagagccgagaagttcataccaaaattatttcagaggagtag

SEQ ID NO: 160697 - DNA, 1884 bp, Artificial Sequence
  derived and/or modified sequence
atgagcagtgacagcgagatggccatctttggagaggccgcccccttcctgaggaagtctgagcgggagagaattgaggcccagaacaagccctttgatgccaagacctctgtgtttgtggtggaccccaaggagagctttgtgaaggccaccgtgcagagccgggagggcggcaaggtgacagccaagacagaggccggggccaccgtgacagtgaaggatgaccaggtgttccccatgaacccccccaagtatgacaagattgaggacatggccatgatgacccacctgcacgagcctgctgtgctgtacaacctgaaggagagatatgctgcctggatgatctacacctacagcggcctcttctgtgtgacagtgaacccctacaagtggctgcctgtgtacaatgctgaggtggtgacagcctaccggggcaagaagaggcaggaggccccaccccacatcttcagcatcagtgacaatgcctaccagttcatgctgacagaccgggagaaccagagcatcctgatcaccggggagagcggggccggcaagacagtgaacaccaagagggtcatccagtactttgccaccatcgctgtgactggagagaagaagaaggaggaggtgaccagcggcaagatgcagggcaccctggaggaccagatcatcagcgccaaccccctgctggaggcctttggaaatgccaagacagtgagaaatgacaacagcagcagatttgggaagttcatccgcatccacttcggcaccaccgggaagctggccagcgctgacatcgagacctacctgctggagaagagccgggtgaccttccagctgaaggccgagaggagctaccacatcttctaccagatcatgagcaacaagaagccagacctgattgagatgctgctgatcaccaccaacccctatgactatgcctttgtgtcccagggcgagatcaccgtgcccagcattgatgaccaggaggagctgatggccacagattctgccatcgagatcctgggcttcaccagtgatgagcgggtgtccatctacaagctgaccggggctgtgatgcactacggcaacatgaagttcaagcagaagcagcgggaggagcaggccgagccagatggaacagaggtggccgacaaggccgcctacctgcagaacctgaacagcgctgacctgctgaaggccctgtgctacccccgggtgaaggtgggcaatgaatatgtgaccaagggccagacagtgcagcaggtgtacaatgctgtgggcgccctggccaaggctgtgtatgacaagatgttcctgtggatggtgacccgcatcaaccagcagctggacaccaagcagccccgggccaacagcgaggtggcccagtggaggaccaagtatgaaacagatgccatccagaggacagaggagctggaggaggccaagaagaagctggcccagaggctgcaggatgctgaggagcacgtggaggccgtgaatgccaagtgtgccagcctggagaagaccaagcagaggctgcagaatgaggtggaggacctgatgattgatgtggagaggaccaatgctgcctgtgccgccctggacaagaagcagaggaactttgacaagatcctggccgagtggaagcagaagtgtgaggagacccacgccgagctggaggccagccagaaggagagccgcagcctgagcacagagctgttcaagatcaagaatgcctatgaggagagcctggaccagctggagaccctgaagcgggagaacaagaacctgcagcaggagatcagtgacctgacagagcagattgctgagggcggcaagagaattcatgagctggagaagatcaagaagcaggtggagtag

SEQ ID NO: 160698 - DNA, 5820 bp, Artificial Sequence
  derived and/or modified sequence
atgagcagtgacagcgagatggccatctttggagaggccgcccccttcctgaggaagtctgagcgggagagaattgaggcccagaacaagccctttgatgccaagacctctgtgtttgtggtggaccccaaggagagctttgtgaaggccaccgtgcagagccgggagggcggcaaggtgacagccaagacagaggccggggccaccgtgacagtgaaggatgaccaggtgttccccatgaacccccccaagtatgacaagattgaggacatggccatgatgacccacctgcacgagcctgctgtgctgtacaacctgaaggagagatatgctgcctggatgatctacacctacagcggcctcttctgtgtgacagtgaacccctacaagtggctgcctgtgtacaatgctgaggtggtgacagcctaccggggcaagaagaggcaggaggccccaccccacatcttcagcatcagtgacaatgcctaccagttcatgctgacagaccgggagaaccagagcatcctgatcaccggggagagcggggccggcaagacagtgaacaccaagagggtcatccagtactttgccaccatcgctgtgactggagagaagaagaaggaggaggtgaccagcggcaagatgcagggcaccctggaggaccagatcatcagcgccaaccccctgctggaggcctttggaaatgccaagacagtgagaaatgacaacagcagcagatttgggaagttcatccgcatccacttcggcaccaccgggaagctggccagcgctgacatcgagacctacctgctggagaagagccgggtgaccttccagctgaaggccgagaggagctaccacatcttctaccagatcatgagcaacaagaagccagacctgattgagatgctgctgatcaccaccaacccctatgactatgcctttgtgtcccagggcgagatcaccgtgcccagcattgatgaccaggaggagctgatggccacagattctgccatcgagatcctgggcttcaccagtgatgagcgggtgtccatctacaagctgaccggggctgtgatgcactacggcaacatgaagttcaagcagaagcagcgggaggagcaggccgagccagatggaacagaggtggccgacaaggccgcctacctgcagaacctgaacagcgctgacctgctgaaggccctgtgctacccccgggtgaaggtgggcaatgaatatgtgaccaagggccagacagtgcagcaggtgtacaatgctgtgggcgccctggccaaggctgtgtatgacaagatgttcctgtggatggtgacccgcatcaaccagcagctggacaccaagcagccccggcagtacttcatcggcgtgctggacattgctggctttgagatctttgacttcaacagcctggagcagctgtgcatcaacttcaccaatgagaagctgcagcagttcttcaaccaccacatgtttgtgctggagcaggaggagtacaagaaggagggcatcgagtggaccttcatcgactttggcatggacctggccgcctgcatcgagctgattgagaagcccatgggcatcttcagcatcctggaggaggagtgcatgttccccaaggccacagacaccagcttcaagaacaagctgtatgagcagcacctgggcaagagcaacaacttccagaagcccaagccagccaagggcaagccagaggcccacttcagcctcatccactacgccggcaccgtggactacaacattgctggctggctggacaagaacaaggaccccctgaatgaaacagtggtgggcctgtaccagaagagcgccatgaagaccctggccctgctgtttgtgggcgccaccggggctgaggccgaggccggcggcggcaagaagggcggcaagaagaagggcagcagcttccagacagtgtctgccctcttccgggagaacctgaacaagctgatgaccaacctgcggagcacccacccccactttgtgcgctgcatcatccccaatgagaccaagacccctggggccatggagcacgagctggtgctgcaccagctgcgctgcaatggagtgctggagggcatccgcatctgcaggaagggcttccccagccgcatcctgtatgctgacttcaagcagcgctacaaggtgctgaatgccagcgccatccctgagggccagttcatcgacagcaagaaggccagcgagaagctgctgggcagcattgatattgaccacacccagtacaagtttggccacaccaaggtgttcttcaaggccggcctgctgggcctgctggaggagatgagagatgagaagctggcccagctgatcaccaggacccaggccatgtgccggggcttcctggcccgggtggagtaccagaagatggtggagcggcgggagagcatcttctgcatccagtacaacgtgcgggccttcatgaatgtgaagcactggccctggatgaagctgtacttcaagatcaagcccctgctgaagtctgctgagacagagaaggagatggccaacatgaaggaggagtttgagaagaccaaggaggagctggccaagacagaggccaagaggaaggagctggaggagaagatggtgaccctgatgcaggagaagaatgacctgcagctgcaggtgcaggccgaggccgacagcctggctgatgctgaggagcgctgtgaccagctgatcaagaccaagatccagctggaggccaagatcaaggaggtgacagagcgggcagaagatgaggaggagatcaatgctgagctgacagccaagaagaggaagctggaggatgagtgcagcgagctgaagaaggacattgatgacctggagctgaccctggccaaggtggagaaggagaagcacgccacagagaacaaggtgaagaacctgacagaggagatggccggcctggatgagaccatcgccaagctgaccaaggagaagaaggccctgcaggaggcccaccagcagaccctggatgacctgcaggccgaggaggacaaggtgaacaccctgaccaaggccaagatcaagctggagcagcaggtggatgacctggagggcagcctggagcaggagaagaagatccgcatggacctggagcgggccaagaggaagctggagggggacctgaagctggcccaggagagcaccatggacattgaaaatgacaagcagcagctggatgagaagctgaagaagaaggagtttgagatgagcggcctgcagagcaagattgaagatgagcaggccctgggcatgcagctgcagaagaagatcaaggagctgcaggccagaattgaggagctggaggaggagattgaggccgagcgggccagccgggccaaggccgagaagcagaggagtgacctgagccgggagctggaggagatcagcgagcggctggaggaggccggcggggccaccagcgcccagatcgagatgaacaagaagcgggaggccgagttccagaagatgagaagagacctggaggaggccaccctgcagcacgaggccacagctgccaccctgaggaagaagcatgctgacagcgtggccgagctgggggagcagattgacaacctgcagagggtgaagcagaagctggagaaggagaagtctgagatgaagatggagattgatgacctggccagcaacatggagaccgtgtccaaggccaagggcaacctggagaagatgtgccgggccctggaggaccagctgtctgagatcaagaccaaggaggaggagcagcagaggctcatcaatgacctgacagcccagagggcccggctgcagacagagagcggggagtacagccggcagctggatgagaaggacaccctggtgtcccagctgagccggggcaagcaggccttcacccagcagatcgaggagctgaagaggcagctggaggaggagatcaaggccaagagcgccctggcccacgccctgcagagcagcagacatgactgtgacctgctgcgggagcagtatgaggaggagcaggaggccaaggccgagctgcagagggccatgagcaaggccaacagcgaggtggcccagtggaggaccaagtatgaaacagatgccatccagaggacagaggagctggaggaggccaagaagaagctggcccagaggctgcaggatgctgaggagcacgtggaggccgtgaatgccaagtgtgccagcctggagaagaccaagcagaggctgcagaatgaggtggaggacctgatgattgatgtggagaggaccaatgctgcctgtgccgccctggacaagaagcagaggaactttgacaagatcctggccgagtggaagcagaagtgtgaggagacccatgctgagctggaggccagccagaaggagagccgcagcctgagcacagagctgttcaagatcaagaatgcctatgaggagagcctggaccagctggagaccctgaagcgggagaacaagaacctgcagcaggagatcagtgacctgacagagcagattgctgagggcggcaagaggatccacgagctggagaagatcaagaagcaggtggagcaggagaagtctgagctgcaggccgccctggaggaggccgaggccagcctggagcacgaggagggcaagatcctgcgcatccagctggagctgaaccaggtgaagtctgaggtggacaggaagattgctgagaaggatgaggagattgaccagatgaagaggaaccacatcagaattgtggagagcatgcagagcaccctggatgctgagatccgcagcagaaatgatgccatccggctgaagaagaagatggagggggacctgaatgagatggagatccagctgaaccacgccaacaggatggctgctgaggccctgaggaactacagaaacacccaggccatcctgaaggacacccagctgcacctggatgatgccctgcggagccaggaggacctgaaggagcagctggccatggtggagcggcgggccaacctgctgcaggccgagattgaggagctgcgggccaccctggagcagacagagaggagcaggaagattgctgagcaggagctgctggatgccagcgagcgggtgcagctgctgcacacccagaacaccagcctcatcaacaccaagaagaagctggagacagacatcagccagatccagggcgagatggaggacatcatccaggaggccagaaatgctgaggagaaggccaagaaggccatcacagatgctgccatgatggccgaggagctgaagaaggagcaggacaccagcgcccacctggagaggatgaagaagaacctggagcagacagtgaaggacctgcagcaccggctggatgaggccgagcagctggccctgaagggcggcaagaagcagatccagaagctggaggcccgggtgcgggagctggagggggaggtggagagcgagcagaagagaaatgtggaggccgtgaagggcctgaggaagcatgagaggaaggtgaaggagctgacctaccagacagaggaggacaggaagaacatcctgcggctgcaggacctggtggacaagctgcaggccaaggtgaagagctacaagaggcaggccgaggaggccgaggagcagagcaatgtgaacctgagcaagttccgccgcatccagcacgagctggaggaggccgaggagagagctgacattgctgagagccaggtgaacaagctgcgggtgaagagccgggaggtgcacaccaagatcatcagcgaggagtag

SEQ ID NO: 160699 - DNA, 6024 bp, Artificial Sequence
  derived and/or modified sequence
tgtctctcctcataaagcttcaagttctgatccactttaaggtcgcatctctacgccagggtccttaactgggctaccatcaataacctgcagccatgagttccgactctgagatggccatttttggggaggctgctcctttcctccgaaagtctgaaagggagcgaattgaagcccagaacaagccttttgatgccaagacatcagtctttgtggtggaccctaaggagtcctttgtgaaagcaacagtgcagagcagggaaggggggaaggtgacagctaagaccgaagctggagctactgtaacagtgaaagatgaccaagtcttccccatgaaccctcccaaatatgacaagatcgaggacatggccatgatgactcatctacacgagcctgctgtgctgtacaacctcaaagagcgctacgcagcctggatgatctacacctactcaggcttgttctgtgtcactgtcaacccctacaagtggttgccagtgtataatgcagaggtggtgacagcctaccgaggcaaaaagcgccaggaggccccaccccacatcttctccatctctgacaatgcctatcagttcatgctgactgatcgggagaatcagtctatcttgatcaccggagaatctggcgcagggaagactgtgaacaccaagcgtgtcatccagtactttgcaacaattgcagttactggggagaagaagaaggaagaagttacttctggcaaaatgcaggggactctggaagatcaaatcatcagtgccaaccccctactggaggcctttggcaacgccaagaccgtgaggaatgacaactcctctcgctttggtaaattcatcaggatccacttcggtaccacagggaaactggcttctgctgatattgaaacatatcttctggagaagtctagagttactttccagctaaaggctgaaagaagctatcatattttttatcagatcatgtctaacaagaagccagatctaattgaaatgctcctgatcaccaccaacccatacgattatgccttcgtcagtcaaggggagatcacagtgcccagcattgatgaccaagaagagttgatggctacagatagtgccattgaaattctgggctttacttcagatgaaagagtgtccatctataagctcacaggggctgtgatgcattatgggaacatgaaattcaagcaaaagcagcgtgaggagcaagctgagccagatggcactgaagttgctgacaaggcagcctatctccaaaatctgaactctgcagatctgctcaaagccctctgctaccctagggtcaaggtcggcaatgagtatgtcaccaaaggtcaaactgtgcagcaggtgtacaatgcagtgggtgctctggccaaagctgtctacgataagatgttcttgtggatggtcacccgcatcaaccagcagctggacaccaagcagcccaggcagtacttcattggggtcttggacattgctggctttgagatctttgatttcaacagcctggagcagctgtgcatcaacttcaccaatgagaaactgcaacagtttttcaaccaccacatgttcgtgctggagcaggaggagtacaagaaggaaggcattgagtggacgttcattgactttgggatggacctggctgcctgcatcgagctcatcgagaagcctatgggcatcttctccatcctggaagaggagtgcatgttccccaaggcgacagacacctccttcaagaacaagctgtatgaacaacatcttggaaaatccaataacttccagaagcccaagcctgccaaaggcaagcctgaggcccacttctctttgattcactatgctggcaccgtggactacaacattgccggctggcttgacaagaacaaggaccccctgaatgagactgtggtggggctgtaccagaagtctgcaatgaagactctggctctcctctttgttggggcaacgggagcggaagcagaggctggcggtggaaagaaaggtggtaagaagaagggttcttctttccagactgtgtctgctctcttcagggagaatttgaataagctgatgaccaacttgaggagcactcacccccactttgtgcggtgcatcatccccaatgaaactaaaactcctggtgccatggagcatgagcttgtcctgcatcagctgaggtgtaacggtgtgctggaaggcatccgcatctgcaggaaaggcttcccaagcagaatcctttatgcagacttcaaacagagatacaaggtgttaaatgcaagtgctatccctgaaggacaattcatcgatagcaagaaggcttcagagaagctcctggggtccattgacattgaccacacccagtataaatttggtcacaccaaggtctttttcaaagctggtcttctggggctcctagaggagatgcgagatgagaagctggcccagctgattacccgaacccaggccatgtgcagagggttcttggcaagagtggagtaccagaaaatggtggaaagaagagagtccatcttctgcatccagtacaatgtccgtgccttcatgaatgtgaagcactggccctggatgaagctgtatttcaagatcaaacccctcctcaaaagtgcagagacagagaaggagatggccaacatgaaggaagaatttgagaaaaccaaagaagagctggctaagaccgaggcaaaaaggaaagagctggaagaaaaaatggttactctgatgcaagaaaaaaatgacttgcaactccaggttcaagctgaagctgacagcttggctgatgcagaggaaaggtgtgaccagctaatcaaaaccaaaatccagctagaagccaaaatcaaagaggtgactgagagagctgaggatgaggaagagatcaatgctgagctgacagccaagaagaggaaactggaggatgaatgttcagaactcaagaaagacattgatgaccttgagctgacactggccaaggttgagaaggagaaacatgccacagaaaacaaggtgaaaaacctcacagaagagatggcgggtctggatgaaaccattgctaagctgaccaaggagaagaaggctctccaggaggcccaccagcagaccctggatgacctgcaggcagaggaggacaaagtcaacaccctgaccaaagctaaaatcaaacttgaacaacaagtggatgatcttgaaggatctttggaacaagaaaagaaaatccggatggatctagaaagagcaaagagaaaactagagggagacctaaaattggctcaagaatccacaatggatatagaaaatgacaaacaacaacttgatgaaaagcttaaaaagaaagagtttgaaatgagcggtctgcaaagcaagattgaagatgaacaagcccttggtatgcagctgcagaagaaaatcaaggagttacaagcccgcattgaggagctggaggaggaaatcgaggcagagcgggcctcccgggccaaagcagagaagcagcgctctgatctctcccgggagctggaggagatcagcgagaggctggaagaagccggtggggccacctcagcccagattgagatgaacaagaagcgggaggctgagttccagaaaatgcgcagggacctggaggaggccaccctacagcatgaagccacggcggccaccctgaggaagaagcatgcagatagtgtggccgagcttggggagcagattgacaacctgcagcgagtgaagcagaagctggagaaggagaagagtgagatgaagatggagatcgatgaccttgctagtaacatggagactgtctccaaagccaagggaaaccttgaaaagatgtgccgcgctctagaagatcaactgagtgaaattaagaccaaggaagaggagcagcagcggctgatcaatgacctcacagcacagagagcgcgcctgcaaacagaatcaggtgaatattcacgccagctagatgaaaaggacacactagtttcacagctctcgaggggcaaacaagcctttacacaacagattgaggaactgaaaaggcaacttgaagaggagataaaggccaagagtgccctggcacatgccctgcagtcctcccgccatgactgtgacctgctgcgggaacagtatgaggaggagcaggaagccaaggccgagctacagagagcaatgtccaaggccaacagtgaggttgcccagtggaggaccaaatatgagacagatgccatccagcgcacagaggagctggaggaggccaagaagaagctggctcagcgtctgcaggatgctgaggaacatgtagaagctgtgaatgccaaatgtgcttcccttgagaagacgaagcagaggctccagaatgaagttgaggacctcatgattgatgttgagaggacaaatgctgcctgtgccgccctggacaaaaagcaaaggaactttgataagatcctggcagaatggaaacagaagtgtgaagaaactcatgctgaacttgaagcttctcaaaaggaatcccgctcactcagcacagaactatttaagattaagaatgcttatgaggaatctttagaccaacttgaaaccttgaaacgggaaaataagaatttgcaacaggagatttctgatctcactgaacagattgcagaaggaggaaagcgcatccatgaactggaaaaaataaagaagcaagttgagcaagaaaagtctgaacttcaggctgccttagaggaggcagaggcatctcttgaacatgaagagggaaagatcctgcgcatccagcttgagttgaaccaagtcaagtctgaggttgataggaaaattgctgaaaaagatgaggaaattgaccagatgaagagaaaccacattagaatcgtggagtccatgcagagcacactggatgctgagatcaggagcaggaatgatgccattaggctcaagaagaagatggagggagacctcaatgaaatggaaatccagctgaaccatgccaaccgcatggctgctgaggccctgaggaactataggaacacccaagccatcctcaaggatacccagctccacctggatgatgctctccggagccaggaggacctgaaggaacagctggctatggtggagcgcagagccaacctgctgcaggctgagatcgaggagctgcgggccactctggaacagacagagaggagcaggaaaatcgcagaacaggagctcctggatgccagtgagcgtgttcagctcctgcacacccagaacaccagcctgatcaacaccaagaagaagctggagacagacatttcccaaatccagggagagatggaagacatcatccaggaagcccgcaatgcagaagagaaggccaagaaggccatcactgatgctgccatgatggctgaggagctgaagaaggaacaggacaccagcgcccatctggagcggatgaagaagaacctggaacagacggtgaaggacctgcagcatcgtctggatgaggctgagcagctggccctgaagggtgggaagaagcagatccagaaactggaggccagggttcgtgaacttgaaggtgaagttgaaagtgaacagaagcgcaatgttgaagctgtcaagggtctacgcaaacatgagagaaaagtgaaggaactcacttaccaaactgaggaagaccgcaagaatattctcaggctccaggacctggtggacaaactgcaagcaaaggtgaaatcctacaagagacaagctgaagaagcggaggaacaatccaacgtcaacctctccaaattccgcaggatccagcacgagctggaggaggccgaggaacgggctgacattgctgagtcccaggtcaacaagctgagggtgaagagcagggaggttcacacaaaaatcataagtgaagagtaatttatctaactgctgaaaggtgaccaaagaaatgcacaaaatgtgaaaatctttgtcactccattttgtacttatgacttttggagataaaaaatttatctgccaaaaa

SEQ ID NO: 160700 - DNA, 3285 bp, Artificial Sequence
  derived and/or modified sequence
gtctctcctcataaagcttcaagttctgatccactttaaggtcgcatctctacgccagggtccttaactgggctaccatcaataacctgcagccatgagttccgactctgagatggccatttttggggaggctgctcctttcctccgaaagtctgaaagggagcgaattgaagcccagaacaagccttttgatgccaagacatcagtctttgtggtggaccctaaggagtcctttgtgaaagcaacagtgcagagcagggaaggggggaaggtgacagctaagaccgaagctggagctactgtaacagtgaaagatgaccaagtcttccccatgaaccctcccaaatatgacaagatcgaggacatggccatgatgactcatctacacgagcctgctgtgctgtacaacctcaaagagcgctacgcagcctggatgatctacacctactcaggcttgttctgtgtcactgtcaacccctacaagtggttgccagtgtataatgcagaggtggtgacagcctaccgaggcaaaaagcgccaggaggccccaccccacatcttctccatctctgacaatgcctatcagttcatgctgactgatcgggagaatcagtctatcttgatcaccggagaatctggcgcagggaagactgtgaacaccaagcgtgtcatccagtactttgcaacaattgcagttactggggagaagaagaaggaagaagttacttctggcaaaatgcaggggactctggaagatcaaatcatcagtgccaaccccctactggaggcctttggcaacgccaagaccgtgaggaatgacaactcctctcgctttggtaaattcatcaggatccacttcggtaccacagggaaactggcttctgctgatattgaaacatatcttctggagaagtctagagttactttccagctaaaggctgaaagaagctatcatattttttatcagatcatgtctaacaagaagccagatctaattgaaatgctcctgatcaccaccaacccatacgattatgccttcgtcagtcaaggggagatcacagtgcccagcattgatgaccaagaagagttgatggctacagatagtgccattgaaattctgggctttacttcagatgaaagagtgtccatctataagctcacaggggctgtgatgcattatgggaacatgaaattcaagcaaaagcagcgtgaggagcaagctgagccagatggcactgaagttgctgacaaggcagcctatctccaaaatctgaactctgcagatctgctcaaagccctctgctaccctagggtcaaggtcggcaatgagtatgtcaccaaaggtcaaactgtgcagcaggtgtacaatgcagtgggtgctctggccaaagctgtctacgataagatgttcttgtggatggtcacccgcatcaaccagcagctggacaccaagcagcccagggccaacagtgaggttgcccagtggaggaccaaatatgagacagatgccatccagcgcacagaggagctggaggaggccaagaagaagctggctcagcgtctgcaggatgctgaggaacatgtagaagctgtgaatgccaaatgtgcttcccttgagaagacgaagcagaggctccagaatgaagttgaggacctcatgattgatgttgagaggacaaatgctgcctgtgccgccctggacaaaaagcaaaggaactttgataagatcctggcagaatggaaacagaagtgtgaagaaactcatgctgaacttgaagcttctcaaaaggaatcccgctcactcagcacagaactatttaagattaagaatgcttatgaggaatctttagaccaacttgaaaccttgaaacgggaaaataagaatttgcaacaggagatttctgatctcactgaacagattgcagaaggaggaaagcgcatccatgaactggaaaaaataaagaagcaagttgagcaagaaaagtctgaacttcaggctgccttagaggaggcagaggcatctcttgaacatgaagagggaaagatcctgcgcatccagcttgagttgaaccaagtcaagtctgaggttgataggaaaattgctgaaaaagatgaggaaattgaccagatgaagagaaaccacattagaatcgtggagtccatgcagagcacactggatgctgagatcaggagcaggaatgatgccattaggctcaagaagaagatggagggagacctcaatgaaatggaaatccagctgaaccatgccaaccgcatggctgctgaggccctgaggaactataggaacacccaagccatcctcaaggatacccagctccacctggatgatgctctccggagccaggaggacctgaaggaacagctggctatggtggagcgcagagccaacctgctgcaggctgagatcgaggagctgcgggccactctggaacagacagagaggagcaggaaaatcgcagaacaggagctcctggatgccagtgagcgtgttcagctcctgcacacccagaacaccagcctgatcaacaccaagaagaagctggagacagacatttcccaaatccagggagagatggaagacatcatccaggaagcccgcaatgcagaagagaaggccaagaaggccatcactgatgctgccatgatggctgaggagctgaagaaggaacaggacaccagcgcccatctggagcggatgaagaagaacctggaacagacggtgaaggacctgcagcatcgtctggatgaggctgagcagctggccctgaagggtgggaagaagcagatccagaaactggaggccagggttcgtgaacttgaaggtgaagttgaaagtgaacagaagcgcaatgttgaagctgtcaagggtctacgcaaacatgagagaaaagtgaaggaactcacttaccaaactgaggaagaccgcaagaatattctcaggctccaggacctggtggacaaactgcaagcaaaggtgaaatcctacaagagacaagctgaagaagcggaggaacaatccaacgtcaacctctccaaattccgcaggatccagcacgagctggaggaggccgaggaacgggctgacattgctgagtcccaggtcaacaagctgagggtgaagagcagggaggttcacacaaaaatcataagtgaagagtaatttatctaactgctgaaaggtgaccaaagaaatgcacaaaatgtgaaaatctttgtcactccattttgtacttatgacttttggagataaaaaatttatctgcc

SEQ ID NO: 160701 - DNA, 1884 bp, Artificial Sequence
  derived and/or modified sequence
atgagcagcgacagcgagatggccatcttcggcgaggccgccccctttttaagaaagtcagaaagggagaggattgaggcccagaataaacccttcgatgcaaagacaagcgtgtttgtggtggatcctaaggagtcattcgtcaaagccactgtccagtctcgcgagggtggcaaagtgactgcaaagaccgaggctggcgcgactgtgacagtgaaggacgatcaggtgttccctatgaatcccccgaagtacgataagatcgaagatatggccatgatgacacatttgcacgaacccgctgtgttgtataacctcaaggagcggtatgccgcctggatgatctatacgtacagcgggctgttctgtgtgaccgtgaatccttataagtggctgcccgtgtataacgccgaggttgttaccgcatatcgcggcaaaaaacggcaggaagctcctccccacatattctctatcagcgacaacgcctatcagtttatgcttaccgaccgcgagaatcagtccatcctgatcaccggcgagagtggggcaggaaaaactgtcaatactaaaagggtgattcagtattttgcaacaatcgcggtcaccggcgaaaaaaaaaaggaggaggtcacctctggcaaaatgcagggcactctggaggaccagattatcagcgccaatcccctgctagaagctttcggaaacgcgaaaactgtgcggaacgataattcgtcccgattcggaaagtttattcgcattcactttggaactacgggaaagctggcctcagccgacatcgaaacctatttgcttgaaaaatcacgcgtgaccttccaattgaaagccgagcggtcatatcatatcttctatcagatcatgagcaacaaaaaacctgatctcatcgagatgttgcttatcacaactaatccctatgattacgcattcgtcagccagggagagatcacggtcccatctatagatgaccaggaggagcttatggccactgattctgccattgaaattttgggattcaccagcgacgaaagagtgtccatatataaactgaccggcgctgttatgcattacggtaatatgaagtttaaacagaagcagagagaagagcaggccgagccggatggcacagaagtggcggacaaagcggcttatctccagaacctcaatagcgccgatttgctgaaggcgttatgttacccgcgtgtcaaggtgggaaatgaatatgtgaccaaaggccagactgtgcaacaggtctacaacgccgtcggagccctggccaaagcagtgtatgataaaatgtttctatggatggtgactcggatcaaccagcagcttgataccaagcagccacgcgccaacagtgaggttgcgcagtggcggaccaaatacgagactgacgcgatccagcggacagaggagctggaggaggcaaaaaagaagcttgcccaaaggctccaagatgctgaagaacacgtggaggctgtcaatgccaagtgcgcatcactggagaagactaagcagaggctgcagaacgaagtggaagatctgatgatcgacgtggagcgcacgaacgccgcctgtgccgccctcgataaaaaacagcgcaactttgacaaaattctggcagagtggaagcaaaaatgtgaagagacccatgcggagctggaagcctcccagaaagagagcaggtctctgtcaactgaacttttcaaaatcaagaacgcgtatgaggagagcctggatcaactggagaccctgaaaagagaaaacaagaacttacagcaagagataagtgacttaaccgaacagatcgctgaggggggaaagagaatccacgaactggagaaaatcaagaagcaggtggagtag

SEQ ID NO: 160702 - DNA, 5820 bp, Artificial Sequence
  derived and/or modified sequence
atgagcagcgacagcgagatggccatcttcggcgaggccgccccctttcttcggaaaagtgagagggaacggatagaagctcaaaataaaccatttgacgctaaaactagcgtgttcgtggttgacccgaaggagtccttcgttaaggccacagtgcagtcccgggagggtggaaaggttacagccaaaacagaggccggagccacggtcaccgtgaaagacgatcaggtctttccgatgaacccacctaaatatgacaaaattgaggatatggccatgatgactcacttacacgaaccagccgttctgtataacttgaaagagcgctacgcagcctggatgatttacacttactccggactgttttgcgtgactgttaatccatacaaatggctgccagtgtacaacgccgaggtcgtcacagcgtacaggggaaagaagagacaggaagcaccaccgcacatattcagcatttccgacaacgcgtatcaatttatgctcacagatcgggagaaccagtccattttaataaccggggaaagcggcgccgggaagaccgtgaacactaaacgagtaattcagtatttcgctaccatcgccgtcacgggcgagaagaagaaggaggaggtgacctccggcaagatgcagggcaccctagaggaccagattatatccgcgaatcctctgttggaagcatttgggaacgcaaaaactgttcggaacgataatagcagccgattcgggaagttcatccgcattcactttggtaccaccggaaagctggccagtgctgacattgaaacctatctactcgaaaaaagtagggtgacattccagctcaaagccgagagatcataccacatcttctaccaaattatgtccaacaagaagccggacctgattgagatgctgctgatcaccacaaacccctacgactacgcttttgtgtcgcagggtgaaattaccgtacccagcatcgacgatcaggaggagctgatggccacagatagcgccatcgagatcctcggattcactagcgacgagcgggtaagcatctataaactgacaggagccgtcatgcactacgggaacatgaaattcaaacaaaagcaaagggaagaacaggccgaacctgacggcaccgaggtggccgacaaggcagcgtatcttcagaatctgaacagtgccgatctccttaaggccctgtgttatccccgggtgaaggtaggtaacgagtacgtcactaaagggcagacagtacagcaggtctataacgctgtcggagctctggccaaagcggtctacgataagatgttcttgtggatggtgactcggattaatcagcagctggacaccaagcagcccagacagtattttattggtgtgcttgatatcgctggttttgaaatctttgatttcaattcactggagcaactttgcattaactttaccaatgaaaagttgcagcagttctttaatcaccatatgttcgtgttggaacaggaagaatataaaaaggagggcattgaatggacttttattgattttgggatggatttggccgcatgcatcgaactgatcgaaaagcctatgggcatattttccatcctggaggaagaatgcatgttccctaaggcaactgacacctctttcaaaaacaaactgtatgagcaacacctgggcaagagtaataatttccagaagcccaagccagcaaaaggcaaaccagaagcccatttttcacttattcactacgctggaacggtcgactataacattgcaggttggctcgacaaaaacaaggacccccttaacgagactgtagtcggcctctaccagaagtctgctatgaagactctggcattattgttcgtgggagccaccggcgcggaagcagaggctggtggcgggaagaagggtggaaagaagaaaggaagcagttttcagactgtgtccgcactcttccgggaaaacctaaataaactgatgaccaatttacggtctacacatccacacttcgtgaggtgcatcatcccaaatgaaaccaagacccccggagctatggagcatgaactagttcttcatcagcttcgctgcaacggtgtactggaagggataaggatttgtcggaaaggattccccagtagaattctgtacgctgatttcaagcaacgttacaaagtgctcaacgcatccgcgattccagaaggccagttcatcgatagtaagaaggctagcgagaagctcctggggtcaatcgacatcgaccacacacaatacaaatttgggcacacaaaggttttttttaaggccggcctcctggggctgcttgaggagatgcgggatgagaagctcgcccaattgatcacgaggacccaggcgatgtgcagaggtttcttggcccgggtcgagtaccagaagatggtggagcgacgcgagtcgatcttttgcatccagtataacgtgcgggctttcatgaacgtgaagcactggccatggatgaaattatactttaaaatcaagccactccttaagagcgctgagacagagaaagaaatggctaatatgaaggaggagttcgagaaaactaaagaggaactggccaaaactgaggctaagagaaaggaattggaggagaaaatggttaccctgatgcaggagaagaatgatcttcagctccaggttcaggcagaagcagattccctggcagatgcagaagaacgctgcgatcagctgattaagacaaaaatccaactcgaagctaaaattaaagaagtgaccgaaagggctgaggacgaagaggagatcaacgcggaacttacggctaagaagcggaagcttgaagacgaatgttcagagttgaaaaaggacatcgacgatctggagttgaccttggctaaagtcgaaaaggaaaagcacgctacagagaacaaggtgaagaatctcacagaggaaatggcgggcctcgacgaaaccatcgccaagctcactaaggagaagaaagcgctccaggaggcacaccagcaaacacttgatgacctgcaagccgaagaagacaaagttaatacgctgaccaaagcgaagattaagctagaacagcaagtggatgatttggaagggagcctggaacaggaaaaaaagatccgaatggatcttgagcgggcaaagagaaaactggagggggacctcaaactggcccaagagtccaccatggacatagaaaacgacaagcaacagctcgacgagaaactaaagaagaaagaatttgaaatgagcggtcttcagtccaagattgaagatgaacaggccctcggcatgcaactgcagaagaagataaaagaactgcaggcccggattgaagagttggaggaggaaatagaggctgagcgggccagccgtgccaaagctgaaaaacagagatctgaccttagccgagagttagaggagattagcgagcgcctcgaagaagctggcggggctacgtccgcccagatagagatgaataagaagagagaagcggagttccagaaaatgaggagggatcttgaagaggccaccttgcagcatgaggccacagcagccactctgcgaaagaagcacgctgatagcgtcgctgagttgggtgaacagatcgacaatttacagcgtgtgaaacaaaaactcgaaaaggagaaatccgagatgaagatggaaattgatgacctggcctcaaacatggagaccgtctcaaaggccaagggcaacctggaaaaaatgtgcagagccttggaggaccagctcagcgaaatcaagaccaaggaggaagagcagcaacggcttatcaacgaccttactgctcaaagggctcggctgcagactgagagtggtgagtattctcgacagctagatgaaaaagacaccttagtatctcagctcagcagagggaaacaggcgtttacgcagcagatcgaggaattgaagcgtcaactagaggaagagatcaaggcgaaaagcgccctcgcacacgccctgcagtcttcgaggcacgactgtgacttgctgcgcgagcaatatgaggaggagcaggaggcgaaagccgagcttcagagagctatgtcaaaagcgaattcggaggtggcacagtggagaaccaaatacgagacggacgccattcagcgcaccgaggagctagaggaggccaagaaaaaactggcccagcgcttgcaggacgcagaagagcatgttgaagccgtaaacgccaagtgcgcctcactggagaagaccaaacaacgacttcaaaacgaggtggaggatcttatgattgacgttgaaagaaccaatgccgcttgtgctgctcttgacaagaagcagaggaactttgacaagattttagctgaatggaagcagaaatgtgaagagacacatgccgagctggaagcctcccagaaggagtcccgtagcttgtctaccgaactattcaagataaaaaacgcatacgaagagtccctggatcaactggaaacccttaagagggagaataaaaacttgcaacaagaaatatccgacctgacggaacagatagcagagggcggcaagaggatacatgaactggaaaaaattaagaagcaggttgaacaggaaaaaagtgagttgcaagcagccctggaagaggctgaggctagtctagaacatgaggaggggaaaattctgagaatccagctggaattgaaccaagtaaaaagcgaggtagaccgaaaaatcgctgagaaggacgaggagattgatcagatgaaacgtaatcatatcaggattgtcgagtccatgcagtccacactggacgctgagatcaggagccggaatgatgccataagactcaaaaagaagatggaaggtgatcttaacgaaatggagatacaactgaaccacgccaatcggatggccgccgaagccctccgaaattacagaaacacacaggcgatcctgaaggatacacaattgcatctggatgacgcccttcggtcccaggaggatttgaaggagcaactggccatggtcgagagacgagccaatctgttgcaggcagagatagaggaactccgtgcaacattggagcagacagagagaagtcgtaagattgccgagcaggagctgctcgatgcctcagaacgcgtgcagttattacacacacagaacacgagccttattaacactaagaagaagcttgaaaccgatattagccagatacaaggcgaaatggaggacatcattcaggaggcaaggaacgctgaggagaaggctaaaaaagcgattactgacgctgctatgatggctgaggaactgaaaaaggagcaggatacttccgcccatctagagaggatgaagaaaaaccttgagcaaaccgttaaggacctgcagcacaggctggatgaggcagaacagcttgcactcaagggcggtaagaaacaaatacagaagctggaggcccgagtgcgggagttggaaggagaagtcgaatcagagcaaaagcgcaacgtggaggccgtgaagggcttgagaaaacatgagcggaaggttaaagagctgacctaccaaacagaggaagaccgaaagaatatcctgcggctccaggacctggtggacaaactgcaggcaaaagttaagtcgtataaacgccaggcagaagaggcggaggaacagagcaacgtgaacttatcgaaattcaggagaatacagcacgagctggaagaggccgaggagcgcgcggatattgcagagtctcaggtgaataaattaagagtgaaatcccgggaggtgcacactaaaattatttccgaagagtag

SEQ ID NO: 160703 - DNA, 1884 bp, Artificial Sequence
  derived and/or modified sequence
atgtccagcgattctgagatggccatcttcggcgaggcggcaccctttctgcgcaagtcagagagggaacggattgaggctcagaacaagcccttcgacgccaagaccagtgttttcgtggtggatcccaaggagtctttcgttaaggcaacagtgcagtccagagagggaggaaaagttaccgctaaaaccgaggccggagcgaccgttaccgtcaaggatgatcaggtgttccctatgaatcctcccaaatatgataaaatcgaggacatggccatgatgacgcacttgcacgaacccgctgtgctgtataaccttaaggagagatacgccgcatggatgatctacacctatagcggcctattttgcgtaaccgtcaacccctacaagtggctccctgtctataatgctgaagtcgttacagcataccggggaaaaaagagacaggaggcccctccccatattttcagcatcagtgacaacgcttaccagtttatgttaaccgatcgggagaatcaatccatcctcataacaggcgagagtggcgctggcaaaaccgtcaacacaaaacgggtgatccagtacttcgccaccattgctgttactggcgaaaagaagaaagaagaggtgacatccggaaaaatgcagggcacccttgaggaccagattatctctgctaatccgctcctcgaggcgtttggcaacgctaaaacggtgcgcaatgataacagttctcggtttggaaagttcatccggatccactttggcacaactggtaagcttgcctccgccgacattgaaacatatctactggagaagagccgagtcacttttcagttgaaagccgaacgcagctaccacatcttttatcagatcatgagcaataaaaagccagacctcatagaaatgttactgataactaccaatccttacgactacgctttcgtcagccagggggagataactgttccatctatcgatgaccaagaagaacttatggccactgactccgccattgaaattctcgggttcacttccgacgagcgggtttccatttacaaactcactggggcagtgatgcactatgggaatatgaaattcaaacagaaacaacgagaggaacaagccgagcctgacgggacagaagtggccgataaggccgcttatctacagaacttgaacagcgcggatttgctcaaggccctctgttaccctcgagtgaaagttggaaatgaatacgtgaccaaaggacagacagtccagcaagtttacaacgcagtgggcgctctggccaaagccgtttacgacaaaatgtttctgtggatggtgacgcggataaatcagcagctggacaccaagcaaccccgtgccaatagcgaggtggctcagtggagaacgaagtacgagacagacgcaattcagcggactgaagagttggaggaggctaaaaaaaagctagcacagcggttacaggatgccgaagagcacgtggaggctgtgaacgcaaaatgtgcatccctggagaagactaagcagaggctacagaatgaggtagaagacctcatgattgatgtggagaggaccaatgcagcttgcgctgcattagataagaagcaacggaattttgacaagattctcgccgagtggaagcagaagtgtgaggaaacgcacgctgagctcgaggcttctcagaaagaatcccggtcgctgtctactgaattatttaagatcaaaaacgcatacgaagagtcattggatcagctggagactctcaagcgcgagaacaagaatctgcagcaggagatctcagacctgaccgagcagatcgcagagggcggaaagcgaattcacgaactcgagaagattaaaaagcaggtggagtag

SEQ ID NO: 160704 - DNA, 5820 bp, Artificial Sequence
  derived and/or modified sequence
atgagctcagactctgaaatggctatcttcggagaggcggcaccctttctgcggaagagcgagagagagcgaattgaggctcaaaacaaaccgttcgatgcaaaaacaagtgtattcgtggtggaccccaaggagtcttttgtaaaagccacagtccagtctagggaggggggtaaggtaactgcaaagaccgaggcgggagcaacagtgaccgtgaaggatgaccaggtgtttcccatgaacccacccaaatacgataagattgaagacatggctatgatgacccacttacatgaaccagccgtcttgtacaacctgaaggaacgttacgcagcttggatgatctatacttacagcgggctgttctgtgtgactgttaacccctataagtggctgcccgtttacaacgccgaagttgttaccgcctaccggggtaaaaagagacaagaggctccgcctcatatcttttcaatcagcgataacgcttaccagtttatgcttacagatcgggagaatcagtcgattctcattactggtgaatccggggcaggaaaaaccgtcaatactaagagggtgattcagtactttgccactattgcggttacaggggaaaaaaaaaaagaggaggtgaccagtgggaagatgcaaggaacactggaagaccagattatttcagcaaacccactcctcgaggcatttggaaatgcaaagacagtgcgtaatgacaactcctcaaggttcgggaagtttatccgaatacactttggaacgacgggcaagctggcttctgccgatatagagacttatctcctggaaaaaagcagggtcaccttccaattaaaggcagagcgctcatatcatatcttttaccaaattatgagtaataagaagcctgatcttatagagatgctgttgatcaccacgaacccatatgattatgcttttgtctcccaaggcgaaatcacagtacccagcatcgatgaccaggaggagctgatggcaacggattctgcaattgagattttaggtttcacttctgacgagcgggtttccatatacaagttaaccggcgctgtgatgcactacggtaatatgaaatttaagcagaagcaaagggaggaacaggcggagcctgatggcaccgaggttgcagacaaagccgcataccttcagaatctaaatagcgccgatctgttaaaagcgctctgctatccgagggtgaaagttgggaacgaatacgtcaccaaaggccaaacagttcaacaggtttataacgcagtcggagccctggcgaaggctgtatatgacaagatgtttctgtggatggttacccgtattaaccagcagttggatactaagcagcccaggcagtactttatcggcgtccttgacattgcagggtttgaaatcttcgattttaactctttagaacagctgtgcataaattttaccaatgaaaagctccagcagttctttaatcaccatatgttcgtgcttgagcaagaagagtacaagaaagaggggattgagtggacattcatcgacttcggcatggatctagcagcgtgcattgagctgattgagaaaccgatgggcatctttagcatcttggaagaagaatgcatgttcccaaaggccacagacacatcatttaaaaacaagctctatgagcagcacctaggaaagagcaacaacttccagaagcccaagccggcaaagggaaagccggaagcccatttcagcctgatccactatgcgggaacagttgactacaatatcgccggttggctcgacaaaaacaaagacccgctcaacgaaactgttgtcggactataccagaagtcagctatgaagactctcgccctgcttttcgtcggcgctactggagccgaggctgaggccggtggtgggaaaaaagggggaaagaagaagggttctagcttccagactgtctctgcactatttcgggaaaatttaaataaattaatgacaaacctgcgctccacgcatccgcattttgtaagatgtatcattcccaacgagaccaagacaccaggcgctatggaacacgagctggttctccaccagctgcggtgcaatggcgtgctggaaggtattcgaatctgccggaaggggtttccatcaaggattctttacgccgactttaagcagcgctataaggtgctaaacgcctccgctattccagagggccaattcatcgattcaaagaaggcatcagagaaactacttggctccatcgatattgaccacacccagtacaaatttggacacactaaagtcttctttaaggctggtctgttgggactgctggaggagatgcgcgacgagaaattagctcaactcattacccgcactcaggccatgtgcagaggatttttggcgcgagtggaatatcagaaaatggtggagcgcagagagagtatcttttgcatacagtataacgtgcgggctttcatgaacgtaaagcactggccttggatgaaactctactttaaaatcaagcctctgttaaagtcagcagagacagaaaaggagatggcaaatatgaaggaagagtttgagaagacaaaggaggaattggccaaaactgaagccaaaaggaaagaactcgaagaaaagatggtcaccttaatgcaagagaagaacgacctacagctccaggtgcaggctgaggctgactctctagccgatgctgaggaacggtgtgatcagctcatcaagactaaaatccagctggaggccaaaattaaggaggtgacagagcgtgcagaggacgaggaagaaatcaacgcagaactgactgctaaaaaacggaaactagaagacgaatgttcagaactgaaaaaggatatcgatgacctggagctcactctggccaaggttgaaaaagagaagcatgccactgaaaacaaagtgaaaaatcttactgaggagatggctggcctggacgagactatcgccaaattgaccaaggaaaaaaaagccctccaggaggctcaccagcagacactggatgacctccaggctgaggaagataaggtgaatactctgactaaggccaagatcaaattagaacaacaggttgacgatctcgaggggagcctcgaacaggagaaaaagatccggatggacttagaacgggctaagcgtaagctggaaggagacctgaaactcgcccaggagtccacgatggatattgaaaacgacaagcaacaactggatgagaagctgaaaaagaaggagttcgagatgtctggtcttcagtctaagatcgaggatgagcaggcgttgggaatgcagctgcaaaagaaaataaaggagctccaagccagaatcgaggaactcgaggaggaaattgaggcagaacgggcatcccgggctaaggccgaaaagcaaaggtcagatttatcgagggagctggaagagatttcagagaggttagaggaggctgggggagctacctccgctcagatcgagatgaacaaaaaacgcgaggcagaatttcagaaaatgcggagggatctagaggaggctacattgcagcatgaggccactgcggctacccttagaaagaaacacgcagattctgtggctgaactgggagaacaaatcgacaacctccagcgcgtcaaacaaaagctggagaaggaaaagtctgaaatgaagatggagattgatgacctcgccagcaatatggaaaccgtgtcaaaagcaaagggcaacctggaaaagatgtgccgggctcttgaggatcagttaagcgagattaagacgaaggaagaggagcagcagagattgatcaacgacctgactgcccaaagggccaggttacaaaccgagtcgggcgagtactctcggcaactggatgagaaggataccctggtctcgcagctgagtcggggaaagcaggcatttactcaacagattgaggagctgaagcgacagctggaagaggaaatcaaggcaaaaagtgctctggcacatgcattgcagagcagtagacacgattgcgatctgctgcgcgaacaatacgaagaagaacaggaagccaaagcagagttgcagagggccatgtccaaggcaaacagcgaggtagcacagtggcgcaccaagtatgaaactgatgctatacagagaaccgaggaattagaggaggcaaagaagaaactcgctcagcgacttcaagacgccgaggagcatgtggaagccgtgaatgctaagtgcgcaagtttggagaaaaccaagcagaggctacagaatgaggtcgaagatctcatgatcgatgttgaaaggacaaatgccgcttgcgctgcgctggataaaaaacaacggaacttcgacaagattttagccgagtggaaacaaaaatgtgaagagactcatgccgagctggaagcgagccagaaagaaagcaggtctcttagcaccgaattgttcaaaatcaaaaacgcctacgaggagtccttggaccagctcgagacactgaaaagggagaataagaatttgcagcaggaaatatcagacctgacagaacagatcgctgaaggtggaaagcgaattcatgaactggagaagataaagaagcaagtagagcaggagaagtccgagcttcaggcagccctggaggaggcagaggcgtccctggagcacgaggagggcaagatcctgcggatccagctcgagctgaaccaggtgaaatctgaggttgacagaaagatagccgagaaagacgaagaaatcgatcagatgaagagaaatcatatccgcatcgtcgagagcatgcagtccactctggatgcagagatcaggagccgaaatgacgccattcggctgaaaaagaagatggaaggggatcttaatgagatggagattcagctcaatcacgccaacaggatggcggctgaggcattgcgcaactacagaaatacacaagcaatcctcaaggatacccagcttcatctggatgatgctttgcgatcccaggaggacttaaaagagcaactggcgatggtcgaaagaagagccaatctcctccaagcggagatagaagaacttcgcgcaaccctggagcagacggagaggagccgtaagatcgccgagcaggagcttctggatgcatccgaacgcgttcagttgctgcatacacaaaataccagcctgatcaataccaaaaagaaacttgagacagacatatcccagatccaaggggaaatggaagacatcatccaggaagcgaggaacgcagaggaaaaggctaaaaaggccatcaccgatgccgctatgatggctgaagagctcaagaaagagcaggacacctcagcccatctcgaacgcatgaaaaagaacctcgaacagacagttaaggacctgcagcacagactggatgaagctgagcagctggctctcaagggcggaaagaagcaaattcagaagctcgaagccagagtcagagagctcgaaggggaggtcgaaagcgagcagaaacgaaacgtcgaagcggttaaaggtttaagaaaacacgagaggaaagtgaaagagctgacttaccaaaccgaagaggatagaaagaacattctgcgcttgcaggatttggtggacaagctccaggcaaaagtgaagagctataagagacaagccgaagaagccgaggaacagtccaacgtgaatctcagcaagttccgacgtattcagcacgagctggaggaggcggaagaacgcgcagacattgctgagtcacaggttaataagctgagagtcaagtcacgcgaggtgcataccaagataatttcagaggaatac

SEQ ID NO: 160705 - DNA, 1884 bp, Artificial Sequence
  derived and/or modified sequence
atgagcagcgacagcgagatggccatcttcggcgaggccgcccccttcctgagaaagagcgagagagagagaatcgaggcccagaacaagcccttcgacgccaagaccagcgtgttcgtggtggaccccaaggagagcttcgtgaaggccaccgtgcagagcagagagggcggcaaggtgaccgccaagaccgaggccggcgccaccgtgaccgtgaaggacgaccaggtgttccccatgaacccccccaagtacgacaagatcgaggacatggccatgatgacccacctgcacgagcccgccgtgctgtacaacctgaaggagagatacgccgcctggatgatctacacctacagcggcctgttctgcgtgaccgtgaacccctacaagtggctgcccgtgtacaacgccgaggtggtgaccgcctacagaggcaagaagagacaggaggcccccccccacatcttcagcatcagcgacaacgcctaccagttcatgctgaccgacagagagaaccagagcatcctgatcaccggcgagagcggcgccggcaagaccgtgaacaccaagagagtgatccagtacttcgccaccatcgccgtgaccggcgagaagaagaaggaggaggtgaccagcggcaagatgcagggcaccctggaggaccagatcatcagcgccaaccccctgctggaggccttcggcaacgccaagaccgtgagaaacgacaacagcagcagattcggcaagttcatcagaatccacttcggcaccaccggcaagctggccagcgccgacatcgagacctacctgctggagaagagcagagtgaccttccagctgaaggccgagagaagctaccacatcttctaccagatcatgagcaacaagaagcccgacctgatcgagatgctgctgatcaccaccaacccctacgactacgccttcgtgagccagggcgagatcaccgtgcccagcatcgacgaccaggaggagctgatggccaccgacagcgccatcgagatcctgggcttcaccagcgacgagagagtgagcatctacaagctgaccggcgccgtgatgcactacggcaacatgaagttcaagcagaagcagagagaggagcaggccgagcccgacggcaccgaggtggccgacaaggccgcctacctgcagaacctgaacagcgccgacctgctgaaggccctgtgctaccccagagtgaaggtgggcaacgagtacgtgaccaagggccagaccgtgcagcaggtgtacaacgccgtgggcgccctggccaaggccgtgtacgacaagatgttcctgtggatggtgaccagaatcaaccagcagctggacaccaagcagcccagagccaacagcgaggtggcccagtggagaaccaagtacgagaccgacgccatccagagaaccgaggagctggaggaggccaagaagaagctggcccagagactgcaggacgccgaggagcacgtggaggccgtgaacgccaagtgcgccagcctggagaagaccaagcagagactgcagaacgaggtggaggacctgatgatcgacgtggagagaaccaacgccgcctgcgccgccctggacaagaagcagagaaacttcgacaagatcctggccgagtggaagcagaagtgcgaggagacccacgccgagctggaggccagccagaaggagagcagaagcctgagcaccgagctgttcaagatcaagaacgcctacgaggagagcctggaccagctggagaccctgaagagagagaacaagaacctgcagcaggagatcagcgacctgaccgagcagatcgccgagggcggcaagagaatccacgagctggagaagatcaagaagcaggtggagtag

SEQ ID NO: 160706 - DNA, 5820 bp, Artificial Sequence
  derived and/or modified sequence
atgagcagcgacagcgagatggccatcttcggcgaggccgcccccttcctgagaaagagcgagagagagagaatcgaggcccagaacaagcccttcgacgccaagaccagcgtgttcgtggtggaccccaaggagagcttcgtgaaggccaccgtgcagagcagagagggcggcaaggtgaccgccaagaccgaggccggcgccaccgtgaccgtgaaggacgaccaggtgttccccatgaacccccccaagtacgacaagatcgaggacatggccatgatgacccacctgcacgagcccgccgtgctgtacaacctgaaggagagatacgccgcctggatgatctacacctacagcggcctgttctgcgtgaccgtgaacccctacaagtggctgcccgtgtacaacgccgaggtggtgaccgcctacagaggcaagaagagacaggaggcccccccccacatcttcagcatcagcgacaacgcctaccagttcatgctgaccgacagagagaaccagagcatcctgatcaccggcgagagcggcgccggcaagaccgtgaacaccaagagagtgatccagtacttcgccaccatcgccgtgaccggcgagaagaagaaggaggaggtgaccagcggcaagatgcagggcaccctggaggaccagatcatcagcgccaaccccctgctggaggccttcggcaacgccaagaccgtgagaaacgacaacagcagcagattcggcaagttcatcagaatccacttcggcaccaccggcaagctggccagcgccgacatcgagacctacctgctggagaagagcagagtgaccttccagctgaaggccgagagaagctaccacatcttctaccagatcatgagcaacaagaagcccgacctgatcgagatgctgctgatcaccaccaacccctacgactacgccttcgtgagccagggcgagatcaccgtgcccagcatcgacgaccaggaggagctgatggccaccgacagcgccatcgagatcctgggcttcaccagcgacgagagagtgagcatctacaagctgaccggcgccgtgatgcactacggcaacatgaagttcaagcagaagcagagagaggagcaggccgagcccgacggcaccgaggtggccgacaaggccgcctacctgcagaacctgaacagcgccgacctgctgaaggccctgtgctaccccagagtgaaggtgggcaacgagtacgtgaccaagggccagaccgtgcagcaggtgtacaacgccgtgggcgccctggccaaggccgtgtacgacaagatgttcctgtggatggtgaccagaatcaaccagcagctggacaccaagcagcccagacagtacttcatcggcgtgctggacatcgccggcttcgagatcttcgacttcaacagcctggagcagctgtgcatcaacttcaccaacgagaagctgcagcagttcttcaaccaccacatgttcgtgctggagcaggaggagtacaagaaggagggcatcgagtggaccttcatcgacttcggcatggacctggccgcctgcatcgagctgatcgagaagcccatgggcatcttcagcatcctggaggaggagtgcatgttccccaaggccaccgacaccagcttcaagaacaagctgtacgagcagcacctgggcaagagcaacaacttccagaagcccaagcccgccaagggcaagcccgaggcccacttcagcctgatccactacgccggcaccgtggactacaacatcgccggctggctggacaagaacaaggaccccctgaacgagaccgtggtgggcctgtaccagaagagcgccatgaagaccctggccctgctgttcgtgggcgccaccggcgccgaggccgaggccggcggcggcaagaagggcggcaagaagaagggcagcagcttccagaccgtgagcgccctgttcagagagaacctgaacaagctgatgaccaacctgagaagcacccacccccacttcgtgagatgcatcatccccaacgagaccaagacccccggcgccatggagcacgagctggtgctgcaccagctgagatgcaacggcgtgctggagggcatcagaatctgcagaaagggcttccccagcagaatcctgtacgccgacttcaagcagagatacaaggtgctgaacgccagcgccatccccgagggccagttcatcgacagcaagaaggccagcgagaagctgctgggcagcatcgacatcgaccacacccagtacaagttcggccacaccaaggtgttcttcaaggccggcctgctgggcctgctggaggagatgagagacgagaagctggcccagctgatcaccagaacccaggccatgtgcagaggcttcctggccagagtggagtaccagaagatggtggagagaagagagagcatcttctgcatccagtacaacgtgagagccttcatgaacgtgaagcactggccctggatgaagctgtacttcaagatcaagcccctgctgaagagcgccgagaccgagaaggagatggccaacatgaaggaggagttcgagaagaccaaggaggagctggccaagaccgaggccaagagaaaggagctggaggagaagatggtgaccctgatgcaggagaagaacgacctgcagctgcaggtgcaggccgaggccgacagcctggccgacgccgaggagagatgcgaccagctgatcaagaccaagatccagctggaggccaagatcaaggaggtgaccgagagagccgaggacgaggaggagatcaacgccgagctgaccgccaagaagagaaagctggaggacgagtgcagcgagctgaagaaggacatcgacgacctggagctgaccctggccaaggtggagaaggagaagcacgccaccgagaacaaggtgaagaacctgaccgaggagatggccggcctggacgagaccatcgccaagctgaccaaggagaagaaggccctgcaggaggcccaccagcagaccctggacgacctgcaggccgaggaggacaaggtgaacaccctgaccaaggccaagatcaagctggagcagcaggtggacgacctggagggcagcctggagcaggagaagaagatcagaatggacctggagagagccaagagaaagctggagggcgacctgaagctggcccaggagagcaccatggacatcgagaacgacaagcagcagctggacgagaagctgaagaagaaggagttcgagatgagcggcctgcagagcaagatcgaggacgagcaggccctgggcatgcagctgcagaagaagatcaaggagctgcaggccagaatcgaggagctggaggaggagatcgaggccgagagagccagcagagccaaggccgagaagcagagaagcgacctgagcagagagctggaggagatcagcgagagactggaggaggccggcggcgccaccagcgcccagatcgagatgaacaagaagagagaggccgagttccagaagatgagaagagacctggaggaggccaccctgcagcacgaggccaccgccgccaccctgagaaagaagcacgccgacagcgtggccgagctgggcgagcagatcgacaacctgcagagagtgaagcagaagctggagaaggagaagagcgagatgaagatggagatcgacgacctggccagcaacatggagaccgtgagcaaggccaagggcaacctggagaagatgtgcagagccctggaggaccagctgagcgagatcaagaccaaggaggaggagcagcagagactgatcaacgacctgaccgcccagagagccagactgcagaccgagagcggcgagtacagcagacagctggacgagaaggacaccctggtgagccagctgagcagaggcaagcaggccttcacccagcagatcgaggagctgaagagacagctggaggaggagatcaaggccaagagcgccctggcccacgccctgcagagcagcagacacgactgcgacctgctgagagagcagtacgaggaggagcaggaggccaaggccgagctgcagagagccatgagcaaggccaacagcgaggtggcccagtggagaaccaagtacgagaccgacgccatccagagaaccgaggagctggaggaggccaagaagaagctggcccagagactgcaggacgccgaggagcacgtggaggccgtgaacgccaagtgcgccagcctggagaagaccaagcagagactgcagaacgaggtggaggacctgatgatcgacgtggagagaaccaacgccgcctgcgccgccctggacaagaagcagagaaacttcgacaagatcctggccgagtggaagcagaagtgcgaggagacccacgccgagctggaggccagccagaaggagagcagaagcctgagcaccgagctgttcaagatcaagaacgcctacgaggagagcctggaccagctggagaccctgaagagagagaacaagaacctgcagcaggagatcagcgacctgaccgagcagatcgccgagggcggcaagagaatccacgagctggagaagatcaagaagcaggtggagcaggagaagagcgagctgcaggccgccctggaggaggccgaggccagcctggagcacgaggagggcaagatcctgagaatccagctggagctgaaccaggtgaagagcgaggtggacagaaagatcgccgagaaggacgaggagatcgaccagatgaagagaaaccacatcagaatcgtggagagcatgcagagcaccctggacgccgagatcagaagcagaaacgacgccatcagactgaagaagaagatggagggcgacctgaacgagatggagatccagctgaaccacgccaacagaatggccgccgaggccctgagaaactacagaaacacccaggccatcctgaaggacacccagctgcacctggacgacgccctgagaagccaggaggacctgaaggagcagctggccatggtggagagaagagccaacctgctgcaggccgagatcgaggagctgagagccaccctggagcagaccgagagaagcagaaagatcgccgagcaggagctgctggacgccagcgagagagtgcagctgctgcacacccagaacaccagcctgatcaacaccaagaagaagctggagaccgacatcagccagatccagggcgagatggaggacatcatccaggaggccagaaacgccgaggagaaggccaagaaggccatcaccgacgccgccatgatggccgaggagctgaagaaggagcaggacaccagcgcccacctggagagaatgaagaagaacctggagcagaccgtgaaggacctgcagcacagactggacgaggccgagcagctggccctgaagggcggcaagaagcagatccagaagctggaggccagagtgagagagctggagggcgaggtggagagcgagcagaagagaaacgtggaggccgtgaagggcctgagaaagcacgagagaaaggtgaaggagctgacctaccagaccgaggaggacagaaagaacatcctgagactgcaggacctggtggacaagctgcaggccaaggtgaagagctacaagagacaggccgaggaggccgaggagcagagcaacgtgaacctgagcaagttcagaagaatccagcacgagctggaggaggccgaggagagagccgacatcgccgagagccaggtgaacaagctgagagtgaagagcagagaggtgcacaccaagatcatcagcgaggagtag

SEQ ID NO: 160707 - protein, 1976 aa, Artificial Sequence
  derived and/or modified sequence
MAQRTGLEDPERYLFVDRAVIYNPATQADWTAKKLVWIPSERHGFEAASIKEERGDEVMVELAENGKKAMVNKDDIQKMNPPKFSKVEDMAELTCLNEASVLHNLKDRYYSGLIYTYSGLFCVVINPYKNLPIYSENIIEMYRGKKRHEMPPHIYAISESAYRCMLQDREDQSILCTGESGAGKTENTKKVIQYLAHVASSHKGRKDHNIPGELERQLLQANPILESFGNAKTVKNDNSSRFGKFIRINFDVTGYIVGANIETYLLEKSRAVRQAKDERTFHIFYQLLSGAGEHLKSDLLLEGFNNYRFLSNGYIPIPGQQDKDNFQETMEAMHIMGFSHEEILSMLKVVSSVLQFGNISFKKERNTDQASMPENTVAQKLCHLLGMNVMEFTRAILTPRIKVGRDYVQKAQTKEQADFAVEALAKATYERLFRWLVHRINKALDRTKRQGASFIGILDIAGFEIFELNSFEQLCINYTNEKLQQLFNHTMFILEQEEYQREGIEWNFIDFGLDLQPCIDLIERPANPPGVLALLDEECWFPKATDKTFVEKLVQEQGSHSKFQKPRQLKDKADFCIIHYAGKVDYKADEWLMKNMDPLNDNVATLLHQSSDRFVAELWKDVDRIVGLDQVTGMTETAFGSAYKTKKGMFRTVGQLYKESLTKLMATLRNTNPNFVRCIIPNHEKRAGKLDPHLVLDQLRCNGVLEGIRICRQGFPNRIVFQEFRQRYEILTPNAIPKGFMDGKQACERMIRALELDPNLYRIGQSKIFFRAGVLAHLEEERDLKITDIIIFFQAVCRGYLARKAFAKKQQQLSALKVLQRNCAAYLKLRHWQWWRVFTKVKPLLQVTRQEEELQAKDEELLKVKEKQTKVEGELEEMERKHQQLLEEKNILAEQLQAETELFAEAEEMRARLAAKKQELEEILHDLESRVEEEEERNQILQNEKKKMQAHIQDLEEQLDEEEGARQKLQLEKVTAEAKIKKMEEEILLLEDQNSKFIKEKKLMEDRIAECSSQLAEEEEKAKNLAKIRNKQEVMISDLEERLKKEEKTRQELEKAKRKLDGETTDLQDQIAELQAQIDELKLQLAKKEEELQGALARGDDETLHKNNALKVVRELQAQIAELQEDFESEKASRNKAEKQKRDLSEELEALKTELEDTLDTTAAQQELRTKREQEVAELKKALEEETKNHEAQIQDMRQRHATALEELSEQLEQAKRFKANLEKNKQGLETDNKELACEVKVLQQVKAESEHKRKKLDAQVQELHAKVSEGDRLRVELAEKASKLQNELDNVSTLLEEAEKKGIKFAKDAASLESQLQDTQELLQEETRQKLNLSSRIRQLEEEKNSLQEQQEEEEEARKNLEKQVLALQSQLADTKKKVDDDLGTIESLEEAKKKLLKDAEALSQRLEEKALAYDKLEKTKNRLQQELDDLTVDLDHQRQVASNLEKKQKKFDQLLAEEKSISARYAEERDRAEAEAREKETKALSLARALEEALEAKEEFERQNKQLRADMEDLMSSKDDVGKNVHELEKSKRALEQQVEEMRTQLEELEDELQATEDAKLRLEVNMQAMKAQFERDLQTRDEQNEEKKRLLIKQVRELEAELEDERKQRALAVASKKKMEIDLKDLEAQIEAANKARDEVIKQLRKLQAQMKDYQRELEEARASRDEIFAQSKESEKKLKSLEAEILQLQEELASSERARRHAEQERDELADEITNSASGKSALLDEKRRLEARIAQLEEELEEEQSNMELLNDRFRKTTLQVDTLNAELAAERSAAQKSDNARQQLERQNKELKAKLQELEGAVKSKFKATISALEAKIGQLEEQLEQEAKERAAANKLVRRTEKKLKEIFMQVEDERRHADQYKEQMEKANARMKQLKRQLEEAEEEATRANASRRKLQRELDDATEANEGLSREVSTLKNRLRRGGPISFSSSRSGRRQLHLEGASLELSDDDTESKTSDVNETQPPQSE

SEQ ID NO: 160708 - protein, 188 aa, Artificial Sequence
  derived and/or modified sequence
MAQRTGLEDPERYLFVDRAVIYNPATQADWTAKKLVWIPSERHGFEAASIKEERGDEVMVELAENGKKAMVNKDDIQKMNPPKFSKVEDMAELTCLNEASVLHNLKDRYYSGLIYTYSGLFCVVINPYKNLPIYSENIIEMYRGKKRHEMPPHIYAISESAYRCMLQDREDQSILCTGESGAGKTENT

SEQ ID NO: 160709 - DNA, 5931 bp, Artificial Sequence
  derived and/or modified sequence
atggcccagagaaccggcctggaggaccccgagagatacctgttcgtggacagagccgtgatctacaaccccgccacccaggccgactggaccgccaagaagctggtgtggatccccagcgagagacacggcttcgaggccgccagcatcaaggaggagagaggcgacgaggtgatggtggagctggccgagaacggcaagaaggccatggtgaacaaggacgacatccagaagatgaacccccccaagttcagcaaggtggaggacatggccgagctgacctgcctgaacgaggccagcgtgctgcacaacctgaaggacagatactacagcggcctgatctacacctacagcggcctgttctgcgtggtgatcaacccctacaagaacctgcccatctacagcgagaacatcatcgagatgtacagaggcaagaagagacacgagatgcccccccacatctacgccatcagcgagagcgcctacagatgcatgctgcaggacagagaggaccagagcatcctgtgcaccggcgagagcggcgccggcaagaccgagaacaccaagaaggtgatccagtacctggcccacgtggccagcagccacaagggcagaaaggaccacaacatccccggcgagctggagagacagctgctgcaggccaaccccatcctggagagcttcggcaacgccaagaccgtgaagaacgacaacagcagcagattcggcaagttcatcagaatcaacttcgacgtgaccggctacatcgtgggcgccaacatcgagacctacctgctggagaagagcagagccgtgagacaggccaaggacgagagaaccttccacatcttctaccagctgctgagcggcgccggcgagcacctgaagagcgacctgctgctggagggcttcaacaactacagattcctgagcaacggctacatccccatccccggccagcaggacaaggacaacttccaggagaccatggaggccatgcacatcatgggcttcagccacgaggagatcctgagcatgctgaaggtggtgagcagcgtgctgcagttcggcaacatcagcttcaagaaggagagaaacaccgaccaggccagcatgcccgagaacaccgtggcccagaagctgtgccacctgctgggcatgaacgtgatggagttcaccagagccatcctgacccccagaatcaaggtgggcagagactacgtgcagaaggcccagaccaaggagcaggccgacttcgccgtggaggccctggccaaggccacctacgagagactgttcagatggctggtgcacagaatcaacaaggccctggacagaaccaagagacagggcgccagcttcatcggcatcctggacatcgccggcttcgagatcttcgagctgaacagcttcgagcagctgtgcatcaactacaccaacgagaagctgcagcagctgttcaaccacaccatgttcatcctggagcaggaggagtaccagagagagggcatcgagtggaacttcatcgacttcggcctggacctgcagccctgcatcgacctgatcgagagacccgccaacccccccggcgtgctggccctgctggacgaggagtgctggttccccaaggccaccgacaagaccttcgtggagaagctggtgcaggagcagggcagccacagcaagttccagaagcccagacagctgaaggacaaggccgacttctgcatcatccactacgccggcaaggtggactacaaggccgacgagtggctgatgaagaacatggaccccctgaacgacaacgtggccaccctgctgcaccagagcagcgacagattcgtggccgagctgtggaaggacgtggacagaatcgtgggcctggaccaggtgaccggcatgaccgagaccgccttcggcagcgcctacaagaccaagaagggcatgttcagaaccgtgggccagctgtacaaggagagcctgaccaagctgatggccaccctgagaaacaccaaccccaacttcgtgagatgcatcatccccaaccacgagaagagagccggcaagctggacccccacctggtgctggaccagctgagatgcaacggcgtgctggagggcatcagaatctgcagacagggcttccccaacagaatcgtgttccaggagttcagacagagatacgagatcctgacccccaacgccatccccaagggcttcatggacggcaagcaggcctgcgagagaatgatcagagccctggagctggaccccaacctgtacagaatcggccagagcaagatcttcttcagagccggcgtgctggcccacctggaggaggagagagacctgaagatcaccgacatcatcatcttcttccaggccgtgtgcagaggctacctggccagaaaggccttcgccaagaagcagcagcagctgagcgccctgaaggtgctgcagagaaactgcgccgcctacctgaagctgagacactggcagtggtggagagtgttcaccaaggtgaagcccctgctgcaggtgaccagacaggaggaggagctgcaggccaaggacgaggagctgctgaaggtgaaggagaagcagaccaaggtggagggcgagctggaggagatggagagaaagcaccagcagctgctggaggagaagaacatcctggccgagcagctgcaggccgagaccgagctgttcgccgaggccgaggagatgagagccagactggccgccaagaagcaggagctggaggagatcctgcacgacctggagagcagagtggaggaggaggaggagagaaaccagatcctgcagaacgagaagaagaagatgcaggcccacatccaggacctggaggagcagctggacgaggaggagggcgccagacagaagctgcagctggagaaggtgaccgccgaggccaagatcaagaagatggaggaggagatcctgctgctggaggaccagaacagcaagttcatcaaggagaagaagctgatggaggacagaatcgccgagtgcagcagccagctggccgaggaggaggagaaggccaagaacctggccaagatcagaaacaagcaggaggtgatgatcagcgacctggaggagagactgaagaaggaggagaagaccagacaggagctggagaaggccaagagaaagctggacggcgagaccaccgacctgcaggaccagatcgccgagctgcaggcccagatcgacgagctgaagctgcagctggccaagaaggaggaggagctgcagggcgccctggccagaggcgacgacgagaccctgcacaagaacaacgccctgaaggtggtgagagagctgcaggcccagatcgccgagctgcaggaggacttcgagagcgagaaggccagcagaaacaaggccgagaagcagaagagagacctgagcgaggagctggaggccctgaagaccgagctggaggacaccctggacaccaccgccgcccagcaggagctgagaaccaagagagagcaggaggtggccgagctgaagaaggccctggaggaggagaccaagaaccacgaggcccagatccaggacatgagacagagacacgccaccgccctggaggagctgagcgagcagctggagcaggccaagagattcaaggccaacctggagaagaacaagcagggcctggagaccgacaacaaggagctggcctgcgaggtgaaggtgctgcagcaggtgaaggccgagagcgagcacaagagaaagaagctggacgcccaggtgcaggagctgcacgccaaggtgagcgagggcgacagactgagagtggagctggccgagaaggccagcaagctgcagaacgagctggacaacgtgagcaccctgctggaggaggccgagaagaagggcatcaagttcgccaaggacgccgccagcctggagagccagctgcaggacacccaggagctgctgcaggaggagaccagacagaagctgaacctgagcagcagaatcagacagctggaggaggagaagaacagcctgcaggagcagcaggaggaggaggaggaggccagaaagaacctggagaagcaggtgctggccctgcagagccagctggccgacaccaagaagaaggtggacgacgacctgggcaccatcgagagcctggaggaggccaagaagaagctgctgaaggacgccgaggccctgagccagagactggaggagaaggccctggcctacgacaagctggagaagaccaagaacagactgcagcaggagctggacgacctgaccgtggacctggaccaccagagacaggtggccagcaacctggagaagaagcagaagaagttcgaccagctgctggccgaggagaagagcatcagcgccagatacgccgaggagagagacagagccgaggccgaggccagagagaaggagaccaaggccctgagcctggccagagccctggaggaggccctggaggccaaggaggagttcgagagacagaacaagcagctgagagccgacatggaggacctgatgagcagcaaggacgacgtgggcaagaacgtgcacgagctggagaagagcaagagagccctggagcagcaggtggaggagatgagaacccagctggaggagctggaggacgagctgcaggccaccgaggacgccaagctgagactggaggtgaacatgcaggccatgaaggcccagttcgagagagacctgcagaccagagacgagcagaacgaggagaagaagagactgctgatcaagcaggtgagagagctggaggccgagctggaggacgagagaaagcagagagccctggccgtggccagcaagaagaagatggagatcgacctgaaggacctggaggcccagatcgaggccgccaacaaggccagagacgaggtgatcaagcagctgagaaagctgcaggcccagatgaaggactaccagagagagctggaggaggccagagccagcagagacgagatcttcgcccagagcaaggagagcgagaagaagctgaagagcctggaggccgagatcctgcagctgcaggaggagctggccagcagcgagagagccagaagacacgccgagcaggagagagacgagctggccgacgagatcaccaacagcgccagcggcaagagcgccctgctggacgagaagagaagactggaggccagaatcgcccagctggaggaggagctggaggaggagcagagcaacatggagctgctgaacgacagattcagaaagaccaccctgcaggtggacaccctgaacgccgagctggccgccgagagaagcgccgcccagaagagcgacaacgccagacagcagctggagagacagaacaaggagctgaaggccaagctgcaggagctggagggcgccgtgaagagcaagttcaaggccaccatcagcgccctggaggccaagatcggccagctggaggagcagctggagcaggaggccaaggagagagccgccgccaacaagctggtgagaagaaccgagaagaagctgaaggagatcttcatgcaggtggaggacgagagaagacacgccgaccagtacaaggagcagatggagaaggccaacgccagaatgaagcagctgaagagacagctggaggaggccgaggaggaggccaccagagccaacgccagcagaagaaagctgcagagagagctggacgacgccaccgaggccaacgagggcctgagcagagaggtgagcaccctgaagaacagactgagaagaggcggccccatcagcttcagcagcagcagaagcggcagaagacagctgcacctggagggcgccagcctggagctgagcgacgacgacaccgagagcaagaccagcgacgtgaacgagacccagcccccccagagcgagtag

SEQ ID NO: 160710 - DNA, 567 bp, Artificial Sequence
  derived and/or modified sequence
atggcccagagaaccggcctggaggaccccgagagatacctgttcgtggacagagccgtgatctacaaccccgccacccaggccgactggaccgccaagaagctggtgtggatccccagcgagagacacggcttcgaggccgccagcatcaaggaggagagaggcgacgaggtgatggtggagctggccgagaacggcaagaaggccatggtgaacaaggacgacatccagaagatgaacccccccaagttcagcaaggtggaggacatggccgagctgacctgcctgaacgaggccagcgtgctgcacaacctgaaggacagatactacagcggcctgatctacacctacagcggcctgttctgcgtggtgatcaacccctacaagaacctgcccatctacagcgagaacatcatcgagatgtacagaggcaagaagagacacgagatgcccccccacatctacgccatcagcgagagcgcctacagatgcatgctgcaggacagagaggaccagagcatcctgtgcaccggcgagagcggcgccggcaagaccgagaacacctag

SEQ ID NO: 160711 - DNA, 5931 bp, Artificial Sequence
  derived and/or modified sequence
atggcccagcgcacaggtctggaggatccggagaggtatctgtttgtcgaccgagctgtcatttataatccagccacgcaggcggattggacagctaagaaactggtctggatcccatctgaacgacatggattcgaagctgcctcaattaaagaggagagaggggatgaagtgatggtcgaactggcagagaacgggaaaaaggccatggtaaataaggacgatatacaaaaaatgaacccgcccaagttctctaaagttgaagatatggcggagctcacatgcctgaacgaggcttccgttctgcacaacctgaaggataggtactattcaggcctcatttatacgtactccggattattctgcgtcgtgattaacccgtacaaaaatctccccatatatagtgagaatattatcgaaatgtatcgcggcaagaaacggcatgagatgccgccacacatttatgccatatctgagtcagcttaccgctgcatgcttcaagacagagaagaccagagtatcctttgcacaggggagtctggagccgggaaaacagagaacactaagaaggtaatccagtacctcgctcacgttgcctcatcccacaaaggacgaaaagaccataatatcccgggtgaactggagcgccagttgcttcaagccaaccccatccttgaatccttcggtaacgccaagacagttaagaacgacaatagctcacggttcggaaagtttataagaattaattttgatgtgacagggtatattgtcggcgctaacatagaaacatacctcttggaaaagagccgagcagtccgccaggcaaaagatgaaaggaccttccatattttctatcaactgctgtccggagccggcgagcatctgaagagtgatctgctgctggaggggtttaacaattacaggtttctatctaacggatatatcccaattcccggacagcaggacaaagacaacttccaagaaacaatggaggcgatgcacattatgggcttttcccatgaagagattctgagcatgcttaaggtggtgtcaagcgttctgcaattcggcaacatctcttttaagaaagagagaaacacagaccaggcctctatgccagaaaacactgtggctcagaagctgtgccatctcctgggtatgaacgtcatggagttcacgcgagcaatcttgactccccgcataaaggtggggagggactatgtgcaaaaggcgcagactaaagagcaggcggattttgcagtggaggcattggccaaggcgacctatgagaggctctttaggtggctcgtccacagaattaacaaagcactagatcgaacaaagaggcaaggggcaagcttcatcggcatcctggacatcgccgggtttgagatttttgagctcaatagctttgagcagctgtgtataaactacacgaacgagaaactacagcagcttttcaaccacacaatgttcatactggagcaggaggagtatcagagagagggaattgaatggaactttatagacttcgggttagacctgcagccatgtattgatcttattgaacggcccgcgaatccaccaggggtcctggcccttctcgatgaagaatgttggtttcccaaagcaacagataaaactttcgtagagaagctggtgcaagagcaaggctcccacagtaagtttcagaagccgcggcagcttaaggataaagccgacttctgtatcatacactatgctgggaaagtcgactataaggcagatgagtggctgatgaagaatatggatcccttgaacgataacgtcgcaaccctcctgcatcaatcttctgaccgcttcgtcgccgaactgtggaaagacgtggaccggatcgtgggtctggatcaggtaaccggaatgacagagactgccttcggatctgcttacaagaccaaaaaaggcatgtttagaaccgtcggacagttgtacaaggaaagcctcacaaaactgatggccactctccgcaacactaaccccaactttgtgagatgcattattcctaaccacgaaaaacgggcaggaaaactggaccctcatctggtgcttgaccagctgcggtgtaacggggtgctggaaggcatccgtatctgtaggcagggctttcctaatcgcattgtttttcaggaatttcgacagaggtacgagatcctgacaccaaatgcaatccctaagggatttatggacggcaagcaagcatgtgaacgcatgatccgggcccttgagcttgaccccaacttataccggatcggacagagcaagatattttttagagccggtgtgctggcccatctggaggaggagcgcgacttaaaaatcacagacatcatcatctttttccaggctgtgtgccgtggctacctcgcacgtaaggccttcgccaagaaacagcaacagctgtccgctttgaaggttctccagagaaactgcgccgcctatctgaagcttaggcactggcagtggtggagagtgtttacgaaagtgaagcccctccttcaggtgacacggcaggaggaggagcttcaagccaaggacgaagagctgcttaaggttaaggagaaacagacaaaggtggaaggggagctggaagagatggagcgcaaacatcagcaacttctcgaagagaagaacattctggccgagcagctacaggcagagactgaactgtttgccgaggccgaagagatgagagcccggctggctgccaaaaaacaggagctggaggagatcctccacgatctggagtctagagtggaagaagaggaagagagaaaccagatccttcagaatgagaaaaagaagatgcaggcacacattcaggacctggaagagcagttagatgaagaggagggggcccgccaaaagctgcaactcgagaaggtgaccgccgaggctaagatcaaaaagatggaagaggaaattcttctcctcgaggaccaaaattccaaatttattaaagagaaaaagctgatggaagaccgtatagccgaatgttccagtcagctggcggaggaggaggagaaagctaaaaacttagccaagattcggaacaagcaagaagtgatgatttctgatctggaagaacgcttaaagaaggaagagaagacccgccaggagctcgaaaaggccaaaaggaagttagatggagaaaccacagacctgcaagaccagattgcagaacttcaagcgcagatcgatgaattgaaattgcagctggctaagaaagaggaggaactgcagggtgcactagcgaggggtgatgacgagaccctgcataagaacaatgcactcaaagtggtgcgtgaactccaggcccagatcgctgagcttcaggaggatttcgaatccgagaaagctagcaggaataaggccgaaaaacagaagcgcgatctcagcgaggagctggaggcactgaaaacggagcttgaggatactctagacacaacagcagctcagcaggaactgaggactaagagagaacaggaagtcgccgaattaaaaaaagcactggaggaagagactaaaaaccatgaagcacagattcaggatatgagacagaggcatgccactgctttggaagagttatccgaacaactggagcaggctaagcgcttcaaggcgaacctggagaagaataagcagggactggagactgataataaggaactcgcctgcgaggtcaaagtccttcagcaggttaaagccgagtccgaacataagcggaagaagctggacgctcaggtgcaagagttacacgctaaggtgtctgaaggggataggctgcgtgttgagctggcggagaaggccagcaaactgcagaacgaactcgataatgtgagcactttgttggaggaggccgaaaaaaaggggatcaagttcgccaaagacgcagcctccctggagtctcagctgcaggacacccaggaactgctgcaagaagagacacggcaaaaactgaacctgtcctcccggattcgtcagctggaggaagagaaaaactctttgcaggaacaacaagaagaagaggaggaagccagaaagaatctggagaagcaagttttggccctccagtcccagctggccgacaccaaaaaaaaggttgacgacgatttgggcactatagaatctttagaagaggccaagaaaaagctgctaaaggatgccgaggcacttagccagagactggaggaaaaggccttagcatacgacaagctggaaaaaaccaagaaccggctgcagcaagagttggacgacctgacagtagacttggatcaccagcggcaggttgcaagcaatctggagaagaagcagaagaagtttgaccagctcctggctgaggaaaagagcatttctgcgaggtatgctgaggagcgagaccgcgctgaagcagaagcacgagaaaaggaaactaaggccctgtccctggcccgagccctggaggaggcccttgaagctaaggaagagttcgagagacagaacaagcagcttcgggcagatatggaggatctgatgagttccaaggacgatgtcgggaaaaacgttcacgagcttgaaaagtctaaaagagccctggaacagcaggtggaggagatgaggacccagctagaagagcttgaggacgaactgcaggcaacggaagacgccaagttgaggctcgaagtgaacatgcaagctatgaaagctcagtttgaacgtgacctacagaccagggatgagcagaacgaggaaaagaaaaggctcctcatcaaacaggtcagagagcttgaagcagaactcgaagatgagaggaagcaaagagcgttggcggtggcaagcaagaagaagatggagatcgacctgaaagaccttgaagctcagatcgaggctgctaataaggccagagacgaggttataaagcagttgcgaaagctgcaggcccaaatgaaggactatcaacgggagttggaagaagcgagagctagccgggatgaaattttcgctcagagcaaggagagcgagaagaagctgaagagcctggaggccgaaatcctgcaactgcaggaagagctcgcctcaagcgagcgggctcggaggcatgcagagcaagagcgggacgagcttgccgatgagattaccaactcagctagtggcaagtcagctcttctggacgagaaacggcgcctcgaagcacggattgctcagctggaggaggaactggaagaagagcagtcaaacatggaactgctgaatgatcgctttagaaaaactactttacaggtggataccctgaacgccgaactcgccgcagaacgctcagctgctcagaaatctgataatgctcgacaacagctcgaacgccagaataaggagctcaaagcaaagctccaggaacttgagggcgccgtaaaaagcaagtttaaggccaccatttctgccttggaagcaaagatcggtcagctggaggaacagcttgaacaggaggccaaggagagagcagccgcaaacaagctggtaaggcgcactgaaaagaagcttaaggagattttcatgcaggttgaggatgaaagaaggcacgcagatcagtacaaggagcagatggaaaaagcaaacgccagaatgaagcagctcaagaggcaacttgaagaagccgaggaagaggccacccgcgcaaatgcaagccgccggaagctgcagcgggagcttgatgacgccactgaggctaacgaagggttgagccgcgaggtgtccacccttaaaaacagacttcggagggggggaccgatcagcttctctagtagccgaagtggccggaggcagttacacctagagggcgcatcgctggaattatccgacgatgacactgagagcaagacttcagatgttaacgaaacccagcctccacaaagcgaatag

SEQ ID NO: 160712 - DNA, 567 bp, Artificial Sequence
  derived and/or modified sequence
atggctcagaggacaggcttggaggaccctgaacgatatctcttcgttgatcgcgccgtcatctataatccagctacccaggcagattggactgctaagaaattggtgtggattccctcagaacgccacgggttcgaagccgcttccataaaggaagaacgtggtgacgaagtgatggtcgaactcgcagagaacgggaaaaaagctatggtgaacaaggacgatattcagaagatgaaccccccaaagttcagtaaagtggaagatatggctgagttgacatgtcttaacgaagcgtctgtcctgcataacctcaaggataggtactatagcggactaatctacacctactctggtcttttttgcgtggtgattaacccgtacaaaaacctgccaatctactctgaaaatattattgaaatgtaccggggcaagaagcgacacgagatgcctccacatatctacgcaatttcggagagcgcttaccggtgcatgctacaggatcgggaggaccagagcatcctctgtaccggtgaatcaggtgctggcaagactgagaacacatag

SEQ ID NO: 160713 - DNA, 5931 bp, Artificial Sequence
  derived and/or modified sequence
atggcccagaggacaggcctggaggaccctgagcgctacctgtttgtggacagagctgtgatctacaacccagccacccaggccgactggacagccaagaagctggtgtggatccccagcgagagacatggctttgaagctgccagcatcaaggaggagagaggagatgaggtgatggtggagctggccgagaatggcaagaaggccatggtgaacaaggatgacatccagaagatgaacccccccaagttcagcaaggtggaggacatggccgagctgacctgcctgaatgaggcctctgtgctgcacaacctgaaggaccgctactacagcggcctcatctacacctacagcggcctcttctgtgtggtgatcaacccctacaagaacctgcccatctacagcgagaacatcatcgagatgtaccggggcaagaagagacatgagatgccaccccacatctatgccatcagcgagagcgcctaccgctgcatgctgcaggaccgggaggaccagagcatcctgtgcacaggagagagcggggccggcaagacagagaacaccaagaaggtgatccagtacctggcccacgtggccagcagccacaagggcaggaaggaccacaacatccctggagagctggagcggcagctgctgcaggccaaccccatcctggagagctttggaaatgccaagacagtgaagaatgacaacagcagcagatttgggaagttcatccgcatcaactttgatgtgacaggctacatcgtgggcgccaacatcgagacctacctgctggagaagagcagagctgtgcggcaggccaaggatgagaggaccttccacatcttctaccagctgctgtctggagctggggagcacctgaagagtgacctgctgctggagggcttcaacaactaccgcttcctgagcaatggctacatccccatccctggccagcaggacaaggacaacttccaggagaccatggaggccatgcacatcatgggcttcagccatgaggagatcctgtccatgctgaaggtggtgtcctctgtgctgcagtttggaaacatctccttcaagaaggagaggaacacagaccaggcctccatgcctgagaacacagtggcccagaagctgtgccacctgctgggcatgaatgtgatggagttcacccgggccatcctgaccccccgcatcaaggtgggccgggactatgtgcagaaggcccagaccaaggagcaggccgactttgctgtggaggccctggccaaggccacctatgagcggctcttccgctggctggtgcaccgcatcaacaaggccctggacaggaccaagaggcagggcgccagcttcatcggcatcctggacattgctggctttgagatctttgagctgaacagctttgagcagctgtgcatcaactacaccaatgagaagctgcagcagctgttcaaccacaccatgttcatcctggagcaggaggagtaccagcgggagggcatcgagtggaacttcatcgactttggcctggacctgcagccctgcatcgacctgattgaaagacctgccaaccccccaggagtgctggccctgctggatgaggagtgctggttccccaaggccacagacaagacctttgtggagaagctggtgcaggagcagggcagccacagcaagttccagaagccccggcagctgaaggacaaggctgacttctgcatcatccactacgccggcaaggtggactacaaggcagatgagtggctgatgaagaacatggaccccctgaatgacaacgtggccaccctgctgcaccagagcagtgacagatttgtggccgagctgtggaaggatgtggacagaattgtgggcctggaccaggtgacaggcatgacagaaacagcctttggaagtgcctacaagaccaagaagggcatgttcagaacagtgggccagctgtacaaggagagcctgaccaagctgatggccaccctgaggaacaccaaccccaactttgtgcgctgcatcatccccaaccacgagaagagagctgggaagctggacccccacctggtgctggaccagctgcgctgcaatggagtgctggagggcatccgcatctgccggcagggcttccccaacagaattgtgttccaggagttccggcagagatatgagatcctgaccccaaatgccatccccaagggcttcatggatggcaagcaggcctgtgagaggatgatccgggccctggagctggaccccaacctgtacagaattggccagagcaagatcttcttccgggccggcgtgctggcccacctggaggaggagcgggacctgaagatcacagacatcatcatcttcttccaggccgtgtgccggggctacctggccaggaaggcctttgccaagaagcagcagcagctgagcgccctgaaggtgctgcagaggaactgtgccgcctacctgaagctgcggcactggcagtggtggagggtcttcaccaaggtgaagcccctgctgcaggtgacccggcaggaggaggagctgcaggccaaggatgaggagctgctgaaggtgaaggagaagcagaccaaggtggagggggagctggaggagatggagaggaagcaccagcagctgctggaggagaagaacatcctggccgagcagctgcaggccgagacagagctgtttgctgaggccgaggagatgagggcccggctggccgccaagaagcaggagctggaggagatcctgcatgacctggagagccgggtggaggaggaggaggagaggaaccagatcctgcagaatgagaagaagaagatgcaggcccacatccaggacctggaggagcagctggatgaggaggagggcgcccggcagaagctgcagctggagaaggtgacagctgaggccaagatcaagaagatggaggaggagatcctgctgctggaggaccagaacagcaagttcatcaaggagaagaagctgatggaggacagaattgctgagtgcagcagccagctggccgaggaggaggagaaggccaagaacctggccaagatccggaacaagcaggaggtgatgatcagtgacctggaggagcggctgaagaaggaggagaagacccggcaggagctggagaaggccaagaggaagctggatggagagaccacagacctgcaggaccagattgctgagctgcaggcccagattgatgagctgaagctgcagctggccaagaaggaggaggagctgcagggcgccctggcccggggagatgatgagaccctgcacaagaacaatgccctgaaggtggtgcgggagctgcaggcccagattgctgagctgcaggaggactttgaaagtgagaaggccagcaggaacaaggccgagaagcagaagagggacctgtctgaggagctggaggccctgaagacagagctggaggacaccctggacaccacagctgcccagcaggagctgcggaccaagcgggagcaggaggtggccgagctgaagaaggccctggaggaggagaccaagaaccacgaggcccagatccaggacatgaggcagagacatgccacagccctggaggagctgtctgagcagctggagcaggccaagcgcttcaaggccaacctggagaagaacaagcagggcctggagacagacaacaaggagctggcctgtgaggtgaaggtgctgcagcaggtgaaggccgagagcgagcacaagaggaagaagctggatgcccaggtgcaggagctgcacgccaaggtgtctgagggggaccggctgcgggtggagctggccgagaaggccagcaagctgcagaatgagctggacaacgtgtccaccctgctggaggaggccgagaagaagggcatcaagtttgccaaggatgctgccagcctggagagccagctgcaggacacccaggagctgctgcaggaggagacccggcagaagctgaacctgagcagccgcatccggcagctggaggaggagaagaacagcctgcaggagcagcaggaggaggaggaggaggccaggaagaacctggagaagcaggtgctggccctgcagagccagctggccgacaccaagaagaaggtggatgatgacctgggcaccatcgagagcctggaggaggccaagaagaagctgctgaaggatgctgaggccctgagccagaggctggaggagaaggccctggcctatgacaagctggagaagaccaagaaccggctgcagcaggagctggatgacctgactgtggacctggaccaccagaggcaggtggccagcaacctggagaagaagcagaagaagtttgaccagctgctggccgaggagaagagcatcagcgcccgctatgcagaggagcgggacagagctgaggccgaggcccgggagaaggagaccaaggccctgagcctggcccgggccctggaggaggccctggaggccaaggaggagtttgagcggcagaacaagcagctgcgggctgacatggaggacctgatgagcagcaaggatgatgtgggcaagaatgtgcatgagctggagaagagcaagagggccctggagcagcaggtggaggagatgaggacccagctggaggagctggaggatgagctgcaggccacagaagatgccaagctgcggctggaggtgaacatgcaggccatgaaggcccagtttgagcgggacctgcagaccagagatgagcagaatgaggagaagaagaggctgctgatcaagcaggtgcgggagctggaggccgagctggaggatgagaggaagcagagggccctggccgtggccagcaagaagaagatggagattgacctgaaggacctggaggcccagattgaagctgccaacaaggccagagatgaagtcatcaagcagctgaggaagctgcaggcccagatgaaggactaccagcgggagctggaggaggcccgggccagcagagatgagatctttgcccagagcaaggagagcgagaagaagctgaagagcctggaggccgagatcctgcagctgcaggaggagctggccagcagcgagcgggccaggagacatgctgagcaggagagagatgagctggctgatgagatcaccaacagcgccagcggcaagagcgccctgctggatgagaagaggcggctggaggcccgcatcgcccagctggaggaggagctggaggaggagcagagcaacatggagctgctgaatgaccgcttcaggaagaccaccctgcaggtggacaccctgaatgctgagctggccgctgagaggtctgctgcccagaagagtgacaatgcccggcagcagctggagcggcagaacaaggagctgaaggccaagctgcaggagctggagggcgctgtgaagagcaagttcaaggccaccatcagcgccctggaggccaagattggccagctggaggagcagctggagcaggaggccaaggagagagctgctgccaacaagctggtgagaagaacagagaagaagctgaaggagatcttcatgcaggtggaggatgagaggagacatgctgaccagtacaaggagcagatggagaaggccaatgccaggatgaagcagctgaagaggcagctggaggaggccgaggaggaggccacccgggccaatgccagcaggaggaagctgcagcgggagctggatgatgccacagaggccaatgaaggcctgagccgggaggtgtccaccctgaagaaccggctgcggcggggcggccccatctccttcagcagcagccgctctggaagacggcagctgcacctggagggcgccagcctggagctgagtgatgatgacacagagagcaagaccagtgatgtgaatgagacccagcccccccagagcgagtag

SEQ ID NO: 160714 - DNA, 567 bp, Artificial Sequence
  derived and/or modified sequence
atggcccagaggacaggcctggaggaccctgagcgctacctgtttgtggacagagctgtgatctacaacccagccacccaggccgactggacagccaagaagctggtgtggatccccagcgagagacatggctttgaagctgccagcatcaaggaggagagaggagatgaggtgatggtggagctggccgagaatggcaagaaggccatggtgaacaaggatgacatccagaagatgaacccccccaagttcagcaaggtggaggacatggccgagctgacctgcctgaatgaggcctctgtgctgcacaacctgaaggaccgctactacagcggcctcatctacacctacagcggcctcttctgtgtggtgatcaacccctacaagaacctgcccatctacagcgagaacatcatcgagatgtaccggggcaagaagagacatgagatgccaccccacatctatgccatcagcgagagcgcctaccgctgcatgctgcaggaccgggaggaccagagcatcctgtgcacaggagagagcggggccggcaagacagagaacacctag

SEQ ID NO: 160715 - DNA, 5931 bp, Artificial Sequence
  derived and/or modified sequence
atggcccagcggaccggcctggaggaccccgagcggtacctgttcgtagatagagccgtcatctataatcctgctacacaggccgactggactgccaaaaaacttgtctggatcccttccgagcgccacggcttcgaggccgcatccatcaaagaagagcgaggtgacgaggttatggtagagctcgctgagaacggcaagaaggccatggtgaataaggatgacattcagaagatgaaccccccaaaattcagcaaggttgaggacatggccgagctgacctgtttgaacgaggctagtgtactgcataacctgaaggaccgatactatagtggactaatttacacttatagcggtttattttgcgtggttataaatccttacaagaaccttcccatctacagcgaaaacattatcgagatgtatcggggaaaaaagcgccacgagatgccccctcatatttatgctatctccgaatcagcttatcggtgtatgctacaagatagagaggatcaatccattctgtgtacaggggagtcaggcgccgggaagactgagaataccaaaaaggttattcagtacctcgctcatgtggcttcatcacataaaggtagaaaagaccacaatattccaggggagctggaacgccagctgctgcaggcaaatccgatcctagaatcgttcggcaacgctaaaactgtgaaaaatgacaattcgagtagatttggcaagttcattcggatcaacttcgacgtcactgggtacattgttggggccaacatagaaacctatctgctcgagaagtccagggctgtccggcaggccaaggatgagcgaacattccatattttctatcagctactctcaggggcgggggagcacctgaagtcagacctgttgctggagggattcaataactaccgattcctgtctaacgggtacattcccatcccaggtcaacaggacaaggataactttcaggagacgatggaggctatgcatataatgggcttctctcacgaggaaatactctccatgctcaaggtggtcagtagcgtgttacagttcggcaatatcagcttcaagaaggaacgaaacaccgatcaagctagtatgccagagaataccgtggcacaaaagctgtgtcacctgctcgggatgaacgtcatggagtttacacgcgcaatcttaacaccacgcatcaaggtcggacgggactacgtgcagaaggcccagactaaggaacaggctgacttcgccgtggaggctctggctaaggcaacgtacgaaaggctgttcaggtggctggtgcatagaatcaataaagcgctcgacagaacaaagcggcagggagcatcgtttatcggcattctggatatagcaggtttcgaaatcttcgagctgaattctttcgagcagctatgtatcaattatacgaatgaaaagttgcagcaactcttcaaccacaccatgttcatcttagaacaggaagagtaccaaagagaagggatagaatggaatttcatcgactttggcttagatcttcagccttgcattgatctgatagagaggccagctaatcctccaggggtgctcgctctcctcgatgaagagtgttggtttcctaaagccactgataagacgttcgtggagaaacttgtgcaggaacagggctcccatagtaaattccagaagcctcgccagctcaaggacaaagcggacttctgcatcattcattacgccggaaaggtggactataaagcagacgagtggctgatgaaaaacatggacccattaaatgataatgtggccacgttgctccaccagtcaagtgatcggttcgttgccgagttatggaaggatgtggatcgcatagtaggtttggatcaggtaacaggcatgactgaaactgccttcggcagcgcttacaagactaagaagggcatgttccgcacggttggacagctgtataaagagtccctcaccaagttaatggcaacattacgtaacacaaatccgaactttgtgcggtgcatcatccccaatcatgaaaagcgtgctggtaaactggatcctcacttagtcttggaccagcttagatgtaacggggtgctcgagggtatccggatttgccgacagggctttcctaaccgcatcgtgttccaagaatttaggcagcgctacgaaattctcactccaaacgctatccccaaaggcttcatggatggcaagcaggcttgcgagcgaatgattcgagccctcgagctggaccccaacctgtaccgcattgggcagtctaagattttcttcagggccggagttttagctcacctggaggaggagcgcgacctgaagatcacagatatcattatcttcttccaggcagtatgccgcggttacctggcccgcaaagcgtttgctaaaaaacagcagcagttgagcgctttaaaagtgctacaacggaattgtgccgcctatttgaagcttagacattggcaatggtggagagtatttaccaaagttaaaccactcctgcaggtgacacggcaggaggaggagcttcaggctaaggatgaagagctgctcaaggtgaaggagaagcaaaccaaggtggaaggagaactcgaggaaatggagcggaagcatcagcagctgctggaggagaaaaacatcctggctgagcagttgcaggccgagacagaactatttgccgaggccgaagagatgcgggcccggctagccgcgaagaaacaggaactcgaggagatcttgcacgacctagagtccagggtagaggaagaggaagaacgcaaccagattctacagaacgagaaaaagaagatgcaggcccatatccaagatctcgaggagcaattagacgaagaagaaggagctaggcagaagttgcaactggaaaaagttactgctgaagccaagattaagaaaatggaagaagagatcctgctactggaggatcaaaatagcaagttcattaaagagaaaaaacttatggaagaccgcatagcagagtgctcctcccaactggcagaagaagaggagaaagctaaaaacctggctaagataagaaataagcaggaagtgatgatctccgatcttgaagagcggctaaagaaggaagagaagacaagacaagagctggagaaggctaagcgcaaattggatggcgaaacaacagacctgcaggaccagattgcagagctgcaggcccagatcgacgagttgaaattacagctcgccaagaaagaagaagaacttcagggcgctctggccagaggggacgacgagactcttcataagaataatgccctgaaagttgtccgggaactgcaggcacaaattgccgaactacaggaggatttcgagtcggaaaaggcatcacgaaacaaggccgaaaaacagaagagggacttatctgaggagctagaggctctcaagactgagctggaagacacgctggacacaactgccgctcagcaggagctccgcaccaagcgcgagcaggaggtggcggaacttaaaaaggccttggaagaggagaccaaaaatcacgaagcacagatccaggatatgagacagcgccacgccaccgcactggaagagctcagtgaacagcttgaacaggctaagcgattcaaggccaacctcgagaagaataagcaagggcttgagacggataataaagagctggcctgtgaagtcaaagtccttcaacaggttaaggcagagagcgaacacaaaagaaaaaagcttgacgctcaggtgcaggagttacacgctaaagtcagtgagggcgatcgtcttcgcgtcgaactagcagaaaaggcttcaaagttgcaaaatgagctagacaatgtaagtactctgctggaagaggccgagaaaaagggcattaaattcgccaaggatgccgcctctctggaaagtcagttgcaagatacacaggagctgctgcaggaagaaaccagacaaaaactgaacctttcaagcagaattcgacagcttgaagaggagaagaacagcctccaggagcagcaagaggaggaagaggaggcccggaagaacctggaaaaacaggtgcttgctctccagtcacagcttgccgatactaagaagaaagtggacgatgatctgggtacaatcgagtctctggaggaggcaaagaagaaactgctgaaggacgccgaggctctatcacagcggctggaagaaaaagccctggcatacgataaactcgagaagaccaaaaatcgcctacaacaggagttggatgacttaactgtcgaccttgatcatcaaaggcaagttgcaagcaacttggagaagaaacagaagaagttcgaccagctgttagctgaggaaaagtccatcagcgctaggtatgcagaagaacgtgacagggccgaggccgaagccagggagaaggagaccaaagcactgtcactggcccgcgcacttgaggaagccctcgaggccaaggaagagtttgagaggcagaataagcagcttcgtgccgacatggaggacctgatgtctagcaaggacgacgtggggaaaaatgtgcacgaactcgaaaagtcaaagcgtgcactggaacagcaggtcgaggaaatgcgtacacagctcgaggagctggaagacgagctccaagccaccgaggatgccaaactgagattagaggtgaatatgcaggccatgaaggcccaattcgagagggatctgcaaactcgggacgagcagaacgaagaaaagaagcggctgctgataaagcaggttcgggagctggaagccgagctcgaggatgagaggaaacagcgagccttggccgtggcatccaaaaagaagatggaaatcgatctcaaagatttagaggcccagatagaagccgcgaacaaggcgagagacgaagtgattaagcagctgaggaagctccaggcgcagatgaaagattaccagagggagctcgaggaagcgagagcttcccgggatgaaatatttgcacagtctaaggaatccgaaaagaagttgaagtcactagaagcggagatactccagttgcaagaggagctggcatcaagcgagagggcacgcagacatgcggaacaggagcgggacgagcttgctgacgagatcaccaacagtgcctctggaaaatcagcgttactcgacgagaagcgtaggctcgaggcacgaatagcacagttggaggaggagctcgaggaggagcaaagtaatatggagcttctaaatgacagatttaggaagactaccctgcaggtggataccctgaatgccgaattggccgccgagcgttctgcagctcagaaaagtgataacgcccgacaacagttggagagacagaataaggaactgaaggccaaattacaggagctggaaggagctgttaagtccaagttcaaggcaactataagcgctcttgaggccaagattggtcagttggaggagcaactcgagcaggaagctaaggagagagctgcggccaacaagttggtgcgcagaaccgaaaagaaattaaaagaaatttttatgcaagtggaagacgagaggcggcacgccgatcaatataaagaacagatggagaaggctaatgccagaatgaaacagcttaagcgccagctcgaagaggcagaagaggaagctacccgagccaatgcttccaggagaaaactgcaaagagaactggacgacgctacagaggctaatgaaggactttcacgagaggttagtaccctgaaaaatcgcttgcgcagaggaggcccaatttctttcagctctagccgctctggtaggcgtcagcttcatctggagggagcctctctcgaactgtctgacgacgatactgagagcaaaacaagcgatgttaacgagactcagcctcctcaaagtgaatag

SEQ ID NO: 160716 - DNA, 567 bp, Artificial Sequence
  derived and/or modified sequence
atggcccagcggaccggcctggaggaccccgagcggtacctgttcgtcgaccgcgccgtaatttacaaccccgctacccaggcagactggaccgcgaaaaaactggtttggatccccagtgagaggcacggctttgaggctgccagcattaaagaagagaggggggatgaagtaatggttgaactggcagagaacggtaaaaaggcgatggtaaataaggacgacatccagaagatgaaccccccgaagttctctaaagtagaggatatggcagaactcacctgtctgaatgaggctagtgtgctgcataacctgaaggatcggtactattctgggctaatttatacctattccgggctgttttgtgtggtcatcaacccttacaaaaatctgcccatctactctgagaacatcatcgaaatgtatcggggtaaaaagcgacacgagatgcccccccacatttacgccatcagtgagtctgcatatagatgtatgctgcaggaccgggaagatcagagcatcctgtgtacgggcgagtctggtgcaggtaagaccgaaaatacttag

SEQ ID NO: 160717 - DNA, 5930 bp, Artificial Sequence
  derived and/or modified sequence
atggcccagcgaacaggactggaggacccagaaagatatctcttcgtggatagggcagtgatttataatcccgcaacacaggccgactggaccgccaagaagctggtgtggatcccctctgagcgccatgggttcgaggccgcatcaattaaggaggagcgcggtgacgaggtgatggtggagctggcggagaatggaaagaaggctatggtcaataaggacgatatccagaaaatgaaccctccgaaattttccaaagtagaagacatggccgagctgacatgtctcaatgaggcatcggtgctccacaatctgaaagaccgatattatagcggattgatttacacttattcaggccttttctgcgtagtaatcaacccatacaaaaaccttcccatctattccgagaacatcattgaaatgtatcgcggtaagaaacgacatgaaatgccgccacacatatatgcaatatctgagtccgcttaccgttgtatgttgcaagatagggaagatcagtcaattctctgcactggcgagtctggagccggaaagacggagaacacgaagaaggtaatccaatatttggcacacgtggccagcagccacaaaggcagaaaagatcacaacatcccgggagagctggaaagacagctgctccaggctaaccccattctggagtcctttgggaacgctaaaaccgtgaagaacgataattcatcacggttcggcaagtttatccggatcaactttgacgtgaccggatatatcgttggcgctaatattgaaacctaccttctggaaaagtctagggccgttcgccaggctaaggacgaaaggacattccacatcttttaccaactgctcagtggggcaggtgaacacctgaagtccgacttgttgctagaggggtttaataactaccgatttctatccaatggctacattcccattcccggacagcaggataaggacaatttccaggagacaatggaagccatgcatatcatgggcttctctcacgaagaaattttgtcaatgcttaaggtggtttcatctgtcctccaattcggaaatatctcatttaaaaaagaacgcaatacagaccaggctagcatgccagagaatacagtagcacagaagctgtgtcatttgcttggcatgaacgttatggagttcactcgcgcaatacttaccccacgcattaaagttgggagagattacgtgcaaaaggcccagaccaaggagcaagcagatttcgccgtcgaggcactggcgaaagccacatacgaaaggttgtttcgatggctggtgcaccgaataaataaagccctggacaggaccaaacgccagggggcttcttttataggcattttggatatagctggttttgagattttcgaattgaatagtttcgagcagttgtgtataaactacacaaacgagaagttacagcagctctttaaccatacaatgtttatacttgagcaggaggagtatcaacgtgagggcattgagtggaactttatcgattttggcctggatctccagccctgtattgatctgattgagaggcccgctaatccccctggcgtcctcgccctgttggatgaagaatgttggttccctaaagcaaccgacaagacatttgtggaaaaactcgttcaggagcaaggatctcacagtaagtttcagaaacccaggcagctcaaggacaaggccgacttctgtatcattcactatgcaggtaaggtggactacaaggctgacgagtggctgatgaagaatatggacccgctgaacgacaacgtggccaccttgctacaccaatcctccgaccggttcgttgcagaactctggaaagacgttgaccgcattgtggggctcgatcaagtgactggtatgactgagaccgcattcgggtccgcttataaaacgaaaaaggggatgtttcggacggtgggccagctctacaaagagtcactgacgaagctgatggccacccttaggaacaccaaccctaactttgtgaggtgtatcattcccaatcacgaaaagagagccggaaagctggatccccacctggttctggatcagctccggtgtaatggcgttctggagggcattaggatatgtcgacaagggtttcctaaccgcattgttttccaggagtttaggcaaagatacgaaattctgactccgaatgctatacccaaaggattcatggatggcaaacaggcatgcgagcggatgattcgagccttggaacttgatccgaacctgtacaggattgggcagtcaaagatcttcttccgcgctggtgtgctcgcacatctggaggaggagcgcgacctgaaaatcacagacatcattatattcttccaggctgtgtgcagggggtatctggccaggaaagcatttgcaaagaagcaacagcagctgtctgccctgaaagtgctccagaggaactgcgcagcttatttgaaactaagacattggcagtggtggcgcgtgttcactaaggtgaaacccctcttacaagtcactagacaggaagaggagttgcaggccaaggatgaggaactcctcaaagtgaaagagaagcaaacaaaggtcgagggagagcttgaagagatggagaggaaacatcagcagctgcttgaagagaaaaacatactcgccgaacaacttcaggcggagacggagttgtttgccgaagccgaagagatgagagcccgtctggcagccaagaaacaggagctggaagaaattcttcatgacctcgagagcagagtggaggaggaagaggaacgaaatcagatcctccagaacgagaaaaaaaaaatgcaggcacacatacaagacctagaggagcagctggacgaagaagaaggagcacgccagaagctgcaattggagaaagtaacagcagaggccaaaatcaagaagatggaggaggagattctactgctggaagatcagaattctaagttcattaaggagaagaaactgatggaggatagaattgcagagtgcagtagccagctggctgaggaggaggagaaagctaagaacctggcaaaaattagaaacaaacaagaggtgatgatttccgatctggaagaaaggttaaaaaaagaagagaagaccaggcaagagttggaaaaagccaaaaggaaactcgacggagaaactaccgatttgcaggaccagatcgctgaactgcaggctcaaatcgacgaactgaagctccagctggctaaaaaagaggaagaactgcaaggagccctggcgaggggagacgacgagacgctacataaaaataacgccctgaaggtggtgcgggaattgcaggctcagattgcagagctgcaagaggatttcgagagcgagaaagccagcagaaataaggcagaaaagcagaagagggatctcagtgaagaactcgaggcgcttaagaccgagctggaggacacactggacacaaccgctgctcagcaggaactgcggaccaaacgcgagcaggaggtggctgagttaaagaaggccctagaggaagaaaccaagaaccacgaggcccaaattcaggacatgcggcaacgccacgcaaccgcactcgaggaactgagcgagcagttagaacaagccaaacgcttcaaggcaaatctagagaagaataaacaaggcctggaaactgacaataaggaactcgcatgcgaggtgaaggttctgcagcaggtgaaggctgagagtgaacacaagcgaaaaaagttggatgcccaggttcaggaattacatgctaaggtgtccgaaggagatagactcagggtggagctggctgagaaggcaagcaagttacagaatgaactggacaatgtgtctactcttttggaggaagccgagaagaagggcattaaatttgccaaggatgcggcatcattagagtcccagcttcaagatacccaggaattactgcaggaggaaactcgacaaaaactgaacctcagtagcagaatccgccaactcgaagaggaaaagaactcactgcaagaacagcaggaagaggaggaggaggcaagaaaaaatctcgagaaacaggtactggcactgcagtcccaattggccgataccaagaagaaagtggacgacgatctcgggacaatcgagagcctggaagaggctaagaagaagttactgaaggacgctgaggctctgagtcagcgcctggaggagaaagccctggcctacgataagctcgaaaagaccaaaaacaggttgcagcaagagctcgacgatctcacagtggatctcgaccaccagcggcaggtggctagtaaccttgaaaagaaacagaagaagtttgatcagctgttagccgaagaaaaatccatcagtgcccgatacgccgaagaaagggacagggctgaagccgaagccagagagaaagagacaaaggcactatctcttgctcgagccctagaagaggccctcgaagccaaagaggaattcgaacgccagaataagcagctgcgagccgacatggaagatctaatgtcttccaaagatgacgttggaaagaatgtgcacgaactggaaaaaagcaagcgggctctcgaacagcaggtggaagaaatgagaactcagttggaagagctggaggacgagctgcaggccaccgaagacgccaaactccgattggaagtgaacatgcaggccatgaaggctcaatttgagcgggatctgcaaacacgtgatgaacagaatgaggaaaaaaagagactgttgattaagcaggttagagagttggaagctgaactggaagatgagaggaagcagagggcactggccgtggcctcaaagaagaaaatggaaatcgacctgaaagacctggaggcacagatcgaggccgctaacaaagcgagagatgaggtgataaagcagttgcgcaagttgcaagctcagatgaaggactaccaacgcgagctcgaggaggccagggcaagtagggacgagattttcgcccaaagtaaagagagcgagaaaaagctcaaatccctggaggccgagattctgcagctacaagaagaactcgccagttcggaacgggcacgccgacacgctgagcaggaaagagacgagctagcggatgaaatcaccaactcagccagtggcaaatccgcgctgctggacgaaaagagacggctcgaagctcggatcgcacaactggaagaggagctggaggaagaacaatcgaatatggaactgctgaacgatcgcttccgtaagaccacacttcaagttgacacccttaatgctgaactggccgcagagagaagcgctgcccaaaagagtgataatgcaagacagcaacttgagcggcagaataaagagttgaaggctaagctgcaggagctggagggagccgtgaaatccaagttcaaggcaaccatcagcgccctggaggccaaaatcggccagctcgaagagcaattggaacaagaagctaaggagcgcgcagcagctaataagttggtgaggcgcacagagaagaaactgaaggaaatcttcatgcaggtggaggacgaaaggagacacgcagatcagtataaagaacagatggagaaagccaatgccagaatgaagcagctcaagcggcaactggaggaggccgaggaagaagcaacccgcgctaatgcctcccgacgtaagttgcagagagagcttgatgacgccacggaagctaacgagggcctgagtcgggaagtttctaccctgaagaaccggctgcgccgtggagggccaatcagtttctcgagttcaagaagcgggagacgtcagttacacctcgaaggcgcaagcttggagttgtctgatgacgatacagaatccaagaccagcgatgtgaacgagacgcagccacctcagagcgagta

SEQ ID NO: 160718 - DNA, 567 bp, Artificial Sequence
  derived and/or modified sequence
atggcgcaaaggactggcctagaggacccagagcgttacctctttgtggatagagcggtgatctacaaccccgcaacacaagcggactggacagcaaagaagctggtgtggatacctagtgagcgccacggattcgaggccgcatctatcaaagaggaacggggtgacgaggtgatggttgagttagcggagaatggcaaaaaagctatggtaaataaagacgacattcagaagatgaatcctccaaaattcagcaaggtggaggatatggcagagctgacctgccttaacgaggccagcgtcctccacaacctgaaggatcggtactattcggggctcatttacacgtattccgggctgttttgcgtggtgatcaacccatataagaacttaccaatctattccgagaacatcatcgaaatgtatcgtggtaaaaagcggcacgaaatgccacctcacatctacgccatttcagaatctgcctacagatgcatgctgcaggatcgtgaagaccagtctattctctgtacaggcgaaagtggagccggaaagacggaaaatacctag

SEQ ID NO: 160719 - protein, 487 aa, Artificial Sequence
  derived and/or modified sequence
MAAALPRTLGELQLYRILQKANLLSYFDAFIQQGGDDVQQLCEAGEEEFLEIMALVGMASKPLHVRRLQKALRDWVTNPGLFNQPLTSLPVSSIPIYKLPEGSPTWLGISCSSYERSSNAREPHLKIPKCAATTCVQSLGQGKSDVVGSLALQSVGESRLWQGHHATESEHSLSPADLGSPASPKESSEALDAAAALSVAECVERMAPTLPKSDLNEVKELLKTNKKLAKMIGHIFEMNDDDPHKEEEIRKYSAIYGRFDSKRKDGKHLTLHELTVNEAAAQLCVKDNALLTRRDELFALARQISREVTYKYTYRTTKSKCGERDELSPKRIKVEDGFPDFQDSVQTLFQQARAKSEELAALSSQQPEKVMAKQMEFLCNQAGYERLQHAERRLSAGLYRQSSEEHSPNGLTSDNSDGQGERPLNLRMPNLQNRQPHHFVVDGELSRLYPSEAKSHSSESLGILKDYPHSAFTLEKKVIKTEPEDSR

SEQ ID NO: 160720 - protein, 157 aa, Artificial Sequence
  derived and/or modified sequence
MAAALPRTLGELQLYRILQKANLLSYFDAFIQQGGDDVQQLCEAGEEEFLEIMALVGMASKPLHVRRLQKALRDWVTNPGLFNQPLTSLPVSSIPIYKLPEGSPTWLGISCSSYERSSNAREPHLKIPKCAATTCVQSLGQGKSDVVGSLALQSVGE

SEQ ID NO: 160721 - protein, 62 aa, Artificial Sequence
  derived and/or modified sequence
MAAALPRTLGELQLYRILQKANLLSYFDAFIQQGGDDVQQLCEAGEEEFLEIMALVGMASKP

SEQ ID NO: 160722 - protein, 152 aa, Artificial Sequence
  derived and/or modified sequence
MAAALPRTLGELQLYRILQKANLLSYFDAFIQQGGDDVQQLCEAGEEEFLEIMALVGMASKPLHVRRLQKALRDWVTNPGLFNQPLTSLPVSSIPIYKLPEGSPTWLGISCSSYERSSNAREPHLKIPKCAATTCVQSLGQGKSDVVGSLAL

SEQ ID NO: 160723 - DNA, 4499 bp, Artificial Sequence
  derived and/or modified sequence
gccgccgccgcggccaagcgagcgccgtcggggcgggtgggcgggaagaagcggcgggcccgaggtgggggggagcagagagagcgcgcccaccaccttcccttcccccctcgatgggagcgggggcgtcccggctcctgcagccgccagaggagggagagccgggggccgtcgcttcggagttggggctgagcagtcctcggggagagcgcgccaagaccgctgcagccgctggctgacggaaggagagttttacatggaagtggcttacagaaacttggcgctgaggtgcagggaagccagaaactctttgtgtctctaaggccgatgaggaatttggaaacacatgtgggacatacaagcgttggatatagaggactgagcagggggaggaacatttaagctgatggaagtggaagtggaagttgctgtacattggcagcaaggcctccgagttagcttttgaatgcagttaactggtttctcttaactgtggaattcattgaaaagtcagactccgagtggtcgttccaggatatcttgaaaagcccaggttaaacccatccagagtaatggctgcggccttacccaggaccctgggggagttgcagctgtatagaatattacaaaaagccaatctactttcttattttgatgcctttatccaacaaggtggtgatgatgtccagcaactctgtgaagcaggagaagaggagtttttggaaatcatggcactcgtgggcatggctagcaagccccttcatgttagaaggctgcagaaggctttgagagactgggtcacaaaccctgggcttttcaatcagccactgacttcccttcctgtcagtagcatacccatctataaattaccagagggatcaccaacatggctgggaatatcctgcagtagttatgaaaggagtagcaatgcccgggaacctcatttaaaaatccccaaatgtgctgccaccacctgtgtgcagagcttgggacaggggaagtcagatgtggttgggagcctagcactgcagagtgttggtgagtccagactctggcaaggccaccatgccactgagagcgagcacagcctctccccagcagacctgggctcccccgcgtccccaaaggagagcagtgaggcgctggatgctgctgctgcgctctctgtggctgagtgtgtggagcggatggcccccacactgccaaaaagtgacttgaatgaagtgaaagagctgctaaaaaccaacaagaagttggccaaaatgattggtcacatctttgagatgaacgatgatgatccacacaaagaggaggaaattcggaaatacagtgcaatatatggcagatttgactcaaagaggaaggatgggaaacatctcacacttcatgagctcactgttaatgaagcggctgctcaactctgtgtgaaggataatgccctgctgacaagaagagatgagctttttgccttggctcgacagatttctcgagaagtcacctataaatatacttacagaaccaccaagtcaaaatgtggagaaagagatgaattatccccaaagagaattaaagtggaggatgggtttccagatttccaggattctgtgcaaacactcttccagcaggctagagctaagagtgaagaacttgcagctcttagttcacagcagcctgaaaaggtgatggcaaagcagatggagttcctttgcaaccaagctggctatgagagactgcagcatgccgagaggaggttgtctgcagggctttacaggcagagctcagaagagcacagtcctaacggcttgacttccgataactcagatggacaaggagaaagacctttgaatctccgaatgcctaatttacagaacagacaaccccatcattttgtggtggatggggagctgagcagactttaccccagtgaggcaaagtcccactcatcagagagccttgggattttaaaagactaccctcattcagcttttaccttagaaaagaaagtcatcaaaacagagcctgaagattcaagatagctgtgatttctctcaccgttctctggaaatggcatcagatttaaggataatactccatcatagaaataagccttaataaccagtgttgcctcattcagctcaaacagatttcatagccaaagcaaaaggactggtacggtagtctgtggaaaccaggaagataaaacaacagccacaaaagagaaaatcaagagtgttgcaatctataacagtaatattgattcattcacattcctgtgttaagtcattttatatggaaaggcttacaaatcaatattgtaagcattcattatttaagaatgtacaatgtatttgtgtaatttatagaagtaaaatctagatgttgagacctgtttggtctaatagatgtggatacagtttattttacttgaaattttgttgtctactttgtgtgtttaacgtaaatatatgtcagagtttagaatctgcctgcagttgtgaaaaagaaagcttaagtgatgcagttattggcaagattgcaatgattatggaaaaatagaaagcgaatactcagtttaagccaaggaaaatattgtggatttaatatttgataaaactgattttgtttaacaggaaatttttagcattcagtcatataacatctggttatcaatgcacgtttacacaataaatacttgagtggaggaaagttaaaaagatgagcaatagagtagaaaatatatcttaaactagttgacctagattgtattaatagctacttaagatgtttcaaagataggaagctattgcttggacagagaacttgaaataagtggacccatgtataaaagctttgacttaaacattgatatttcagaatgtgttaaatagattaagacacagtaagttaaccctacatgttataaagatggcgactgttaacaaaggctgtaacagattaagtactattttatatccagaaagtcttctctatgtagagaagtcagagagactagatgctttcactagggaatgtcttcccacccagccatcacaaatgtggacaatcactgcatccacatctgtaggcatatttctatggaagtttaattgacagctatattcattatttattttacaatttcatttttctacacctttgagatttatgaatgcagttttttcttaaaatttattttaacttgacagtatgtttttagttcccccaatttaattaatggaccatgtgcatatatatgggagtgtgcttacatgttaataatttacttgcatacttatgagaatttcacattggaattcataatggtaaaacaacatacatctgccaatatacgttttttctgttggtttaagagaagataactgacagctttacctacttcctacagatgcatctaaacccagatattactgagaagagtgtattgactctgagtgtaagagagtatgtgtttttttgtttttagttctgctctagatcataattgtaaaaaatattaagtcataatctgttacactaaaatttgtcagccaaatgttagatgaaatgtctgcactgtagtctcagatcactgtcacgtatataaattgcttcttcattttaatttgtagaagtactttacagtaggaaacgccagtaaacaacttttatactgttaaaaggcttttttccccttcctaaatgttttaattgtaccatagtgttttgctcactgaagaagcttcttatggaccttgcaactttgttgctagcttgaggttgattattgtggttgtattgttcactgtgtgtagaaatagtatgagtacgatttcaatagactgttcagtttttaatattagccatagcactggttagtatatctcagtagtttcatgaaacgtttcctgtattctaatctattttgaaacattttgtttttttttaattgtgtcttacagtcaagtttgtagattttcataagccacaattttaaaagatgcagtaatcttccaacttccaatatttatccattcgttgtggacccacagattgcatctttaaattcataataagtttccttaactatcttatgtttctagtctttcaagcttagtgataaggtggaagcacaagaaaaatttcagtagaatacagtttttattttgtaaacactaatgtattaaacttgctatacattaaagcaaataatatatatttttatttgaattgtatatgtgaattggaagttataattagttgattttttcattttgttagaggtattttcactgaacaaggtcaattggttacctcagtattacagccaatatagtccaagggaccatttctccccgagtctcttacactttattgtgcgatgtccacgtttttgtgactcttcaagctgttggtgaggtgggacgaatgcacttgcttcctgtggcaataaagattttctgtgcctcacaaaaaaaaaaaaaaaaaaaaaaaaaaaaaaa

SEQ ID NO: 160724 - DNA, 1464 bp, Artificial Sequence
  derived and/or modified sequence
atggctgctgcactgccccgcacgctgggagagttacaactgtaccggatcctgcaaaaagccaacttgctgtcctattttgacgcttttattcagcaagggggcgatgatgtgcaacagctgtgcgaagccggcgaggaggagttcttagaaatcatggctttggtaggcatggccagcaagcctcttcacgtcagacgcctacagaaggccctgcgcgactgggtgaccaaccccggcctgttcaaccagcccctgactagcctccctgttagcagtatccccatttataagttgccagagggctctcccacatggttagggatttcttgctcatcatatgaaaggagttccaacgccagagagccacatctgaagattcccaaatgcgcggcaactacttgcgtacagtcacttggccaggggaagtctgacgtggtgggctcactggcgctgcaatcagtaggagagagcaggctgtggcaaggtcatcatgctaccgagtcggagcattctctgtcccccgccgatctagggagtcccgcctctcccaaggagagctccgaggcactcgacgcagctgctgccctcagtgtggccgaatgtgtcgagcgtatggcccccaccctgcccaaaagtgatttgaatgaggtgaaggaacttctgaaaacaaataaaaaacttgctaaaatgattgggcacatatttgaaatgaacgatgacgaccctcataaggaagaagaaatccgcaaatatagcgccatctacgggcgcttcgatagcaagcgaaaagacggaaagcaccttacgctgcatgagcttactgtcaatgaagccgcagctcagctgtgcgttaaagacaacgctctcttaactcgaagagacgagcttttcgcgttggcacgtcagatcagccgggaagttacatacaaatacacctaccgtaccactaaatcaaaatgtggcgaacgtgatgaactgagcccaaagcggatcaaggtggaggatggctttcccgactttcaggattcagtacagacactattccaacaggcacgcgctaaaagtgaggagcttgcagccctctcatcccaacagccagaaaaggttatggctaagcagatggaattcttgtgcaatcaggcggggtatgagaggctgcagcatgccgaaagacgcctgtccgccgggctgtaccgccagtcaagcgaggaacattcgccaaatggactgacttccgacaactcggatggacagggggaacgcccactgaaccttcgtatgccaaacctgcagaatcgccagccccatcacttcgtcgtcgacggcgagttgagtcgcctgtatccctcagaagcgaagtcccatagttctgagagcctgggcattctgaaagattatccccactcagccttcacactcgaaaagaaagtgattaagaccgaacccgaggatagtagatag

SEQ ID NO: 160725 - DNA, 1464 bp, Artificial Sequence
  derived and/or modified sequence
atggcagcagccctgccccgcactctaggtgagctgcaactgtatcggattctgcaaaaggcaaatttgttgagttatttcgacgccttcatacagcagggcggggacgatgtacagcagctttgtgaggccggcgaggaagagtttttagaaatcatggctctggttggcatggcctctaagccactacacgtcaggaggctgcagaaagccctgcgagattgggtgactaatccaggcctgttcaatcaacccctgacctcacttcctgtgagtagcattcctatctacaaactgccagagggtagccccacctggctgggaatttcctgttcttcatatgagcggtcaagtaacgcaagggagccgcatctgaaaattccaaaatgcgctgccaccacttgtgtacagtcgttaggccaagggaagagcgacgtggtaggatcacttgccctccagtctgtgggcgagtccaggctgtggcagggtcaccatgccacagagtcagaacattcactttcacccgccgacctaggatcacccgcttctccaaaggagtcttccgaggcactggacgctgccgccgccctttccgtcgctgagtgcgtggagaggatggctcccactctacctaagtcggatctgaatgaggtgaaggaactgctgaagaccaataagaagctggcgaaaatgatcggccacatcttcgagatgaacgatgatgatccgcataaggaggaagagatcagaaaatacagtgccatttatggcagatttgactccaaacgcaaagacggtaagcatttaacactacatgaattgactgtgaacgaggctgcggcccagctgtgcgtgaaggacaatgccctgctgacacgtcgcgatgagctgttcgccctggccaggcagatctcacgcgaagttacgtacaaatacacctacaggaccactaaatcaaagtgcggtgaacgggatgagctctctcccaagcgtataaaggttgaggacggattccctgacttccaggattctgtccagactttgtttcagcaggccagggccaaatccgaggagctggccgctttaagcagccaacagccggagaaggttatggctaaacaaatggagtttctgtgtaaccaggctggctacgaaaggctgcagcacgcagagcgtcgcctgagtgcgggcctgtaccgccagtccagtgaagagcattcccctaacggcctcacatctgataattctgacgggcaaggcgaacgccccctgaacctgcggatgcccaatctgcaaaaccgtcagcctcatcactttgtcgtggatggggaactaagtcggttatatccaagcgaagctaaatcacacagttcagaatccttggggatcctcaaagattacccacacagcgcattcacgctggagaagaaagtgattaaaaccgaaccggaagacagtaggtag

SEQ ID NO: 160726 - DNA, 1464 bp, Artificial Sequence
  derived and/or modified sequence
atggctgctgccctgcccaggaccctgggggagctgcagctgtaccgcatcctgcagaaggccaacctgctgagctactttgatgccttcatccagcagggcggagatgatgtgcagcagctgtgtgaggccggggaggaggagttcctggagatcatggccctggtgggcatggccagcaagcccctgcacgtgcggcggctgcagaaggccctgcgggactgggtgaccaaccctggcctcttcaaccagcccctgaccagcctgcctgtgagcagcatccccatctacaagctgcctgagggcagccccacctggctgggcatcagctgcagcagctatgaaagaagcagcaatgcccgggagccccacctgaagatccccaagtgtgccgccaccacctgtgtgcagagcctgggccagggcaagagtgatgtggtgggcagcctggccctgcagagcgtgggggagagccggctgtggcagggccaccacgccacagaaagtgagcacagcctgagccctgctgacctgggcagccctgccagccccaaggagagcagcgaggccctggatgctgctgctgccctgtctgtggctgaatgtgtggagaggatggcccccaccctgcccaagagtgacctgaatgaggtgaaggagctgctgaagaccaacaagaagctggccaagatgattggccacatctttgagatgaatgatgatgacccccacaaggaggaggagatcaggaagtacagcgccatctacggccgctttgacagcaagaggaaggatggcaagcacctgaccctgcacgagctgactgtgaatgaagctgctgcccagctgtgtgtgaaggacaatgccctgctgaccaggagagatgagctgtttgccctggcccggcagatcagccgggaggtgacctacaagtacacctaccgcaccaccaagagcaaatgtggggagagagatgagctgagccccaagaggatcaaggtggaggatggcttcccagacttccaggacagcgtgcagaccctcttccagcaggcccgggccaagtctgaggagctggccgccctgagcagccagcagcctgagaaggtgatggccaagcagatggagttcctgtgcaaccaggccggctatgaaaggctgcagcacgccgagcggcggctgtctgctggcctgtaccggcagagcagcgaggagcacagccccaacggcctgaccagtgacaacagtgatggccagggcgagcggcccctgaacctgaggatgcccaacctgcagaaccggcagccccaccactttgtggtggatggagagctgagccggctgtaccccagcgaggccaagagccacagcagcgagagcctgggcatcctgaaggactacccccacagcgccttcaccctggagaagaaggtgatcaagacagagcctgaggacagcaggtag

SEQ ID NO: 160727 - DNA, 1464 bp, Artificial Sequence
  derived and/or modified sequence
atggccgccgccctgccccggaccctgggcgagctgcagctgtaccgcattctgcagaaggctaacttgctttcatatttcgatgcgtttatacagcagggcggcgatgatgtgcaacagttgtgtgaagccggagaggaagaattcctcgagattatggcgttggtcggaatggcaagtaaacctttgcatgtacggaggctgcagaaggcccttagagattgggtgacaaacccaggactgtttaaccaacctttgacgagtctccccgttagctcaattccaatttataagttacctgagggctctcccacctggctgggcattagctgttcctcatatgagaggtcttctaacgcccgcgagccccatctcaaaatcccgaaatgcgcagcgacaacttgtgtgcagagtctggggcagggaaagtctgacgtggttggaagcctcgcccttcagtccgtcggagagtccaggctttggcagggacaccatgccacagagtccgagcatagcctgagtccagccgacctgggctctcccgcatccccgaaagagtcctcagaggccctcgatgccgctgcagccctgagcgtcgcagagtgtgtggagcgcatggcaccaacgctgcccaagagcgatttaaatgaagtgaaggaactccttaagacaaataaaaagctggcaaaaatgatcgggcacatcttcgaaatgaatgacgacgacccccacaaggaagaggagatacggaagtacagtgccatatatggacggttcgacagcaaaagaaaggatggtaagcatttgactttgcacgagctcaccgttaatgaggcagctgcacagttgtgtgtaaaagacaacgctctcttgacaaggagggacgagctgttcgccctggctagacagatctcccgagaagtcacgtacaaatacacgtatcgcaccactaagagcaagtgcggggaacgggatgaactcagccctaagcgaattaaagtcgaagacggttttcccgacttccaggactcagtgcagactctgttccaacaggcaagggctaagtccgaggagctggccgccctaagctcacagcaacccgagaaagtgatggcaaaacagatggagtttctgtgtaatcaggctggctatgagcgtttgcagcacgcagagcgcaggctttcggccggactgtatagacagtcatcagaggaacattcgcccaacgggctgacgtcagataactcggatggtcagggggaacggccactcaatctgcggatgcctaacctgcagaacagacaaccccatcactttgtagttgatggggaactttctcggctgtacccctccgaggccaaatcccactcatccgagtccctggggatcttgaaagactaccctcattccgccttcactttggagaaaaaagtcatcaaaacagagccagaggattctcgttag

SEQ ID NO: 160728 - DNA, 1464 bp, Artificial Sequence
  derived and/or modified sequence
atggccgccgccctgccccggaccctgggcgagctgcagctgtacaggattttgcaaaaggccaacctgctctcttattttgacgccttcatccagcagggtggggacgacgtgcagcaactttgcgaggcaggcgaagaagagtttctcgagattatggcactggtgggaatggcttcgaagcccctgcacgttcgtaggctgcagaaggctctgagagactgggtcacaaaccccggattgtttaatcagcctcttacgagtcttccagtcagctctattccgatttacaaactgcccgaaggaagccccacatggcttggaatatcatgctcaagctacgagcggtcctcaaatgctcgggagccccatttaaagatccctaagtgcgctgcgacaacatgcgtccagagccttggacagggtaagagcgacgttgtgggttctctggcgttacaatccgttggtgagtcgcgactgtggcagggacaccacgctaccgaaagtgagcatagtctgtccccggcagaccttggcagtcccgcaagcccaaaggagtcttccgaggcgctggatgcagcagctgctctgtcggtagccgagtgtgtagagcggatggcacctactctgccaaaaagcgatctgaacgaagtcaaggagctgctgaagaccaacaaaaaactggcgaagatgatcggtcatatctttgaaatgaatgacgatgatccccataaggaggaagagattaggaaatattcagcaatctatggacggtttgactcaaagcggaaggatggtaagcacctcacattgcacgagctgaccgtgaatgaagccgctgcacagttgtgcgtgaaagataatgccctcctgacaaggagagacgagctgttcgcactcgcacgccagatttcgagggaagtgacttacaaatacacatatcggaccactaaatccaaatgtggagaacgggatgagctgtcacccaagcgcattaaagtcgaggacggatttcccgattttcaggactcagtgcagaccctgttccagcaggctcgggctaaatcggaggagctggccgcactgagctcacagcagccggaaaaggtaatggccaagcaaatggagtttctgtgcaaccaggctggttatgaaaggttgcagcacgccgagagacggcttagcgcgggactgtataggcagtcttcagaggagcacagtcccaacggcctgacgtccgacaatagcgatggccagggcgaacggccccttaatctgaggatgcctaacctacagaaccgacaaccccatcacttcgtggtggacggcgaactatccaggttgtacccatccgaagcgaagtcccactctagcgagtccctaggtatccttaaggactacccccatagcgcgtttacactcgagaagaaagtcattaaaaccgaacctgaggattcacggtag

SEQ ID NO: 160729 - DNA, 4358 bp, Artificial Sequence
  derived and/or modified sequence
cgatgggagcgggggcgtcccggctcctgcagccgccagaggagggagagccgggggccgtcgcttcggagttggggctgagcagtcctcggggagagcgcgccaagaccgctgcagccgctggctgacggaaggagagttttacatggaagtggcttacagaaacttggcgctgaggtgcagggaagccagaaactctttgtgtctctaaggccgatgaggaatttggaaacacatgtgggacatacaagcgttggatatagaggactgagcagggggaggaacatttaagctgatggaagtggaagtggaagttgctgtacattggcagcaaggcctccgagttagcttttgaatgcagttaactggtttctcttaactgtggaattcattgaaaagtcagactccgagtggtcgttccaggatatcttgaaaagcccaggttaaacccatccagagtaatggctgcggccttacccaggaccctgggggagttgcagctgtatagaatattacaaaaagccaatctactttcttattttgatgcctttatccaacaaggtggtgatgatgtccagcaactctgtgaagcaggagaagaggagtttttggaaatcatggcactcgtgggcatggctagcaagccccttcatgttagaaggctgcagaaggctttgagagactgggtcacaaaccctgggcttttcaatcagccactgacttcccttcctgtcagtagcatacccatctataaattaccagagggatcaccaacatggctgggaatatcctgcagtagttatgaaaggagtagcaatgcccgggaacctcatttaaaaatccccaaatgtgctgccaccacctgtgtgcagagcttgggacaggggaagtcagatgtggttgggagcctagcactgcagagtgttggtgagtccagactctggcaaggccaccatgccactgagagcgagcacagcctctccccagcagacctgggctcccccgcgtccccaaaggagagcagtgaggcgctggatgctgctgctgcgctctctgtggctgagtgtgtggagcggatggcccccacactgccaaaaagtgacttgaatgaagtgaaagagctgctaaaaaccaacaagaagttggccaaaatgattggtcacatctttgagatgaacgatgatgatccacacaaagaggaggaaattcggaaatacagtgcaatatatggcagatttgactcaaagaggaaggatgggaaacatctcacacttcatgagctcactgttaatgaagcggctgctcaactctgtgtgaaggataatgccctgctgacaagaagagatgagctttttgccttggctcgacagatttctcgagaagtcacctataaatatacttacagaaccaccaagtcaaaatgtggagaaagagatgaattatccccaaagagaattaaagtggaggatgggtttccagatttccaggattctgtgcaaacactcttccagcaggctagagctaagagtgaagaacttgcagctcttagttcacagcagcctgaaaaggtgatggcaaagcagatggagttcctttgcaaccaagctggctatgagagactgcagcatgccgagaggaggttgtctgcagggctttacaggcagagctcagaagagcacagtcctaacggcttgacttccgataactcagatggacaaggagaaagacctttgaatctccgaatgcctaatttacagaacagacaaccccatcattttgtggtggatggggagctgagcagactttaccccagtgaggcaaagtcccactcatcagagagccttgggattttaaaagactaccctcattcagcttttaccttagaaaagaaagtcatcaaaacagagcctgaagattcaagatagctgtgatttctctcaccgttctctggaaatggcatcagatttaaggataatactccatcatagaaataagccttaataaccagtgttgcctcattcagctcaaacagatttcatagccaaagcaaaaggactggtacggtagtctgtggaaaccaggaagataaaacaacagccacaaaagagaaaatcaagagtgttgcaatctataacagtaatattgattcattcacattcctgtgttaagtcattttatatggaaaggcttacaaatcaatattgtaagcattcattatttaagaatgtacaatgtatttgtgtaatttatagaagtaaaatctagatgttgagacctgtttggtctaatagatgtggatacagtttattttacttgaaattttgttgtctactttgtgtgtttaacgtaaatatatgtcagagtttagaatctgcctgcagttgtgaaaaagaaagcttaagtgatgcagttattggcaagattgcaatgattatggaaaaatagaaagcgaatactcagtttaagccaaggaaaatattgtggatttaatatttgataaaactgattttgtttaacaggaaatttttagcattcagtcatataacatctggttatcaatgcacgtttacacaataaatacttgagtggaggaaagttaaaaagatgagcaatagagtagaaaatatatcttaaactagttgacctagattgtattaatagctacttaagatgtttcaaagataggaagctattgcttggacagagaacttgaaataagtggacccatgtataaaagctttgacttaaacattgatatttcagaatgtgttaaatagattaagacacagtaagttaaccctacatgttataaagatggcgactgttaacaaaggctgtaacagattaagtactattttatatccagaaagtcttctctatgtagagaagtcagagagactagatgctttcactagggaatgtcttcccacccagccatcacaaatgtggacaatcactgcatccacatctgtaggcatatttctatggaagtttaattgacagctatattcattatttattttacaatttcatttttctacacctttgagatttatgaatgcagttttttcttaaaatttattttaacttgacagtatgtttttagttcccccaatttaattaatggaccatgtgcatatatatgggagtgtgcttacatgttaataatttacttgcatacttatgagaatttcacattggaattcataatggtaaaacaacatacatctgccaatatacgttttttctgttggtttaagagaagataactgacagctttacctacttcctacagatgcatctaaacccagatattactgagaagagtgtattgactctgagtgtaagagagtatgtgtttttttgtttttagttctgctctagatcataattgtaaaaaatattaagtcataatctgttacactaaaatttgtcagccaaatgttagatgaaatgtctgcactgtagtctcagatcactgtcacgtatataaattgcttcttcattttaatttgtagaagtactttacagtaggaaacgccagtaaacaacttttatactgttaaaaggcttttttccccttcctaaatgttttaattgtaccatagtgttttgctcactgaagaagcttcttatggaccttgcaactttgttgctagcttgaggttgattattgtggttgtattgttcactgtgtgtagaaatagtatgagtacgatttcaatagactgttcagtttttaatattagccatagcactggttagtatatctcagtagtttcatgaaacgtttcctgtattctaatctattttgaaacattttgtttttttttaattgtgtcttacagtcaagtttgtagattttcataagccacaattttaaaagatgcagtaatcttccaacttccaatatttatccattcgttgtggacccacagattgcatctttaaattcataataagtttccttaactatcttatgtttctagtctttcaagcttagtgataaggtggaagcacaagaaaaatttcagtagaatacagtttttattttgtaaacactaatgtattaaacttgctatacattaaagcaaataatatatatttttatttgaattgtatatgtgaattggaagttataattagttgattttttcattttgttagaggtattttcactgaacaaggtcaattggttacctcagtattacagccaatatagtccaagggaccatttctccccgagtctcttacactttattgtgcgatgtccacgtttttgtgactcttcaagctgttggtgaggtgggacgaatgcacttgcttcctgtggcaataaagattttctgtgcctcaca

SEQ ID NO: 160730 - DNA, 2360 bp, Artificial Sequence
  derived and/or modified sequence
aggcgctgccgccgccgccgccgcccgcgcgccgcagcctggaggagccgccgccgccgccgcggccaagcgagcgccgtcggggcgggtgggcgggaagaagcggcgggcccgaggtgggggggagcagagagagcgcgcccaccaccttcccttcccccctcgatgggagcgggggcgtcccggctcctgcagccgccagaggagggagagccgggggccgtcgcttcggagttggggctgagcagtcctcggggagagcgcgccaagaccgctgcagccgctggctgagttaaacccatccagagtaatggctgcggccttacccaggaccctgggggagttgcagctgtatagaatattacaaaaagccaatctactttcttattttgatgcctttatccaacaaggtggtgatgatgtccagcaactctgtgaagcaggagaagaggagtttttggaaatcatggcactcgtgggcatggctagcaagccccttcatgttagaaggctgcagaaggctttgagagactgggtcacaaaccctgggcttttcaatcagccactgacttcccttcctgtcagtagcatacccatctataaattaccagagggatcaccaacatggctgggaatatcctgcagtagttatgaaaggagtagcaatgcccgggaacctcatttaaaaatccccaaatgtgctgccaccacctgtgtgcagagcttgggacaggggaagtcagatgtggttgggagcctagcactgcagagtgttggtgagtccagactctggcaaggccaccatgccactgagagcgagcacagcctctccccagcagacctgggctcccccgcgtccccaaaggagagcagtgaggcgctggatgctgctgctgcgctctctgtggctgagtgtgtggagcggatggcccccacactgccaaaaagtgacttgaatgaagtgaaagagctgctaaaaaccaacaagaagttggccaaaatgattggtcacatctttgagatgaacgatgatgatccacacaaagaggaggaaattcggaaatacagtgcaatatatggcagatttgactcaaagaggaaggatgggaaacatctcacacttcatgagctcactgttaatgaagcggctgctcaactctgtgtgaaggataatgccctgctgacaagaagagatgagctttttgccttggctcgacagatttctcgagaagtcacctataaatatacttacagaaccaccaagtcaaaatgtggagaaagagatgaattatccccaaagagaattaaagtggaggatgggtttccagatttccaggattctgtgcaaacactcttccagcaggctagagctaagagtgaagaacttgcagctcttagttcacagcagcctgaaaaggtgatggcaaagcagatggagttcctttgcaaccaagctggctatgagagactgcagcatgccgagaggaggttgtctgcagggctttacaggcagagctcagaagagcacagtcctaacggcttgacttccgataactcagatggacaaggagaaagacctttgaatctccgaatgcctaatttacagaacagacaaccccatcattttgtggtggatggggagctgagcagactttaccccagtgaggcaaagtcccactcatcagagagccttgggattttaaaagactaccctcattcagcttttaccttagaaaagaaagtcatcaaaacagagcctgaagattcaagatagctgtgatttctctcaccgttctctggaaatggcatcagatttaaggataatactccatcatagaaataagccttaataaccagtgttgcctcattcagctcaaacagatttcatagccaaagcaaaaggactggtacggtagtctgtggaaaccaggaagataaaacaacagccacaaaagagaaaatcaagagtgttgcaatctataacagtaatattgattcattcacattcctgtgttaagtcattttatatggaaaggcttacaaatcaatattgtaagcattcattatttaagaatgtacaatgtatttgtgtaatttatagaagtaaaatctagatgttgagacctgtttggtctaatagatgtggatacagtttattttacttgaaattttgttgtctactttgtgtgtttaacgtaaatatatgtcagagtttagaatctgcctgcagttgtgaaaaagaaagcttaagtgatgcagttattggcaagattgcaatgattatggaaaaatagaaagcgaatactcagtttaagccaaggaaaatattgtggatttaatatttgataaaactgattttg

SEQ ID NO: 160731 - DNA, 1464 bp, Artificial Sequence
  derived and/or modified sequence
atggctgccgcactgccaaggactttgggcgagttgcagctgtatcgcatcctgcaaaaagctaacctcctaagctatttcgacgccttcatccagcagggcggtgatgacgtgcagcaactctgtgaggccggtgaagaggaatttctcgagattatggcgcttgtggggatggcctctaagcccctgcacgtgcggcgtctgcaaaaggccctgcgcgactgggtgaccaatcccggactgtttaatcagcccctaacatccctaccagtctcttctatcccgatctataagctgcctgaaggctctcccacttggctgggaatttcttgctcctcctacgagcgctcctcaaatgcacgcgaaccacatctcaaaattcccaaatgtgctgctactacgtgcgtgcagtctctggggcaaggcaagagtgatgttgtggggagtctcgcactacagtcagtgggggaaagccgactgtggcagggtcaccatgcaacagagtcagagcatagcctctcccccgcagatttgggatctccagcatcacctaaagaatcctcagaggctttggacgcagccgcagccctctccgttgccgaatgtgtggaaagaatggctccaaccctccctaagtcggatctgaacgaggtgaaagagctgcttaagactaacaagaagctcgcgaagatgatcggccatatcttcgagatgaacgacgacgatccacataaggaagaggaaattcggaagtactccgctatctacggcagattcgactctaagcggaaggacgggaagcacttgaccctgcatgagttgacggtgaacgaggccgcagcgcagttgtgcgtgaaggataatgcgcttctgacgagacgtgacgagttgtttgcccttgctaggcagatctcaagggaggttacctacaaatacacatacagaactacgaagtcgaagtgcggggagagggacgagctgtcgcccaaacgcattaaagtggaggacgggttcccagatttccaggacagtgtgcagactcttttccaacaggctagagcaaaatccgaagagctcgctgcactaagcagccagcaaccggagaaagtgatggccaaacagatggaattcttgtgcaaccaagcaggatatgagcgcttacagcacgctgagcgaagactgagtgctgggctctaccgacagtcttctgaggaacatagcccaaatggactgacctcagataatagcgatggtcagggcgagaggcctctaaacctgcggatgcctaacctccagaaccggcagcctcaccatttcgtcgtcgatggtgaactgagcagactataccctagcgaagccaaaagtcattctagcgagagtttgggaattctgaaggactacccacacagcgcttttacgttagaaaaaaaggttattaaaaccgaaccggaggactcaaggtag

SEQ ID NO: 160732 - DNA, 1464 bp, Artificial Sequence
  derived and/or modified sequence
atggctgccgcattacctcgaacactgggcgagctacaactgtacagaattctccagaaggccaacctgctatcctatttcgatgccttcatccagcagggcggagacgacgtgcaacagctttgcgaggccggagaagaagaattcttggagatcatggctctggtcggcatggcatcaaagccacttcacgtacggcgactccagaaggccctgagggattgggtcaccaacccaggactatttaaccagcctcttacctccctgccagtgagttctattccgatctacaaacttccagaaggctctcccacctggctcggaatcagctgtagttcctatgagaggagttccaacgccagagaaccgcatttaaagatccccaagtgcgccgctaccacgtgcgtccaaagcctgggtcagggcaagagcgacgtcgtgggctctctggcattgcagagcgtcggcgaaagtagactctggcaagggcaccacgctactgaaagtgaacacagtctctcgccggctgacttgggcagtcccgcttctcctaaagaatcgtctgaggcattagacgccgctgccgcactaagtgttgcggaatgcgttgagagaatggcgccaactttacccaaatctgatctcaacgaagttaaggaacttcttaagactaacaaaaagttagccaaaatgattggccatatctttgagatgaatgatgacgacccacacaaggaggaagagatcaggaagtactcagcaatttatggcagatttgatagcaagaggaaggacggtaagcacctcaccctacacgaacttaccgtgaatgaagccgctgcccagctgtgcgtgaaggacaatgcccttttaactcgcagggacgaactgttcgcactagcgcgacaaatttcccgcgaagtgacgtacaaatatacctaccgaactacgaagagcaaatgcggcgagagggatgagctctcccctaagcgcatcaaggtcgaagatggttttcctgatttccaggacagcgtgcagaccctgtttcagcaggcgcgtgcgaagtcagaagagctggcagccctgagctcacagcagccagaaaaagtgatggccaaacaaatggaatttctctgcaatcaggccggatacgagaggttgcaacacgccgagcggaggctgtccgcgggactgtaccggcagtccagtgaggagcacagtccaaatgggctgacatcagacaattcggacggccaaggggaaagacctctgaacctgcgcatgcccaacctgcagaatagacaaccgcatcacttcgtggtcgatggagaactgtccagactttatccttccgaagccaagagtcattcctctgaaagtttgggaattctgaaggattatccacacagcgccttcacacttgagaaaaaggtgatcaagacagagccagaagatagcaggtag

SEQ ID NO: 160733 - DNA, 1464 bp, Artificial Sequence
  derived and/or modified sequence
atggccgccgccctgcccagaaccctgggcgagctgcagctgtacagaatcctgcagaaggccaacctgctgagctacttcgacgccttcatccagcagggcggcgacgacgtgcagcagctgtgcgaggccggcgaggaggagttcctggagatcatggccctggtgggcatggccagcaagcccctgcacgtgagaagactgcagaaggccctgagagactgggtgaccaaccccggcctgttcaaccagcccctgaccagcctgcccgtgagcagcatccccatctacaagctgcccgagggcagccccacctggctgggcatcagctgcagcagctacgagagaagcagcaacgccagagagccccacctgaagatccccaagtgcgccgccaccacctgcgtgcagagcctgggccagggcaagagcgacgtggtgggcagcctggccctgcagagcgtgggcgagagcagactgtggcagggccaccacgccaccgagagcgagcacagcctgagccccgccgacctgggcagccccgccagccccaaggagagcagcgaggccctggacgccgccgccgccctgagcgtggccgagtgcgtggagagaatggcccccaccctgcccaagagcgacctgaacgaggtgaaggagctgctgaagaccaacaagaagctggccaagatgatcggccacatcttcgagatgaacgacgacgacccccacaaggaggaggagatcagaaagtacagcgccatctacggcagattcgacagcaagagaaaggacggcaagcacctgaccctgcacgagctgaccgtgaacgaggccgccgcccagctgtgcgtgaaggacaacgccctgctgaccagaagagacgagctgttcgccctggccagacagatcagcagagaggtgacctacaagtacacctacagaaccaccaagagcaagtgcggcgagagagacgagctgagccccaagagaatcaaggtggaggacggcttccccgacttccaggacagcgtgcagaccctgttccagcaggccagagccaagagcgaggagctggccgccctgagcagccagcagcccgagaaggtgatggccaagcagatggagttcctgtgcaaccaggccggctacgagagactgcagcacgccgagagaagactgagcgccggcctgtacagacagagcagcgaggagcacagccccaacggcctgaccagcgacaacagcgacggccagggcgagagacccctgaacctgagaatgcccaacctgcagaacagacagccccaccacttcgtggtggacggcgagctgagcagactgtaccccagcgaggccaagagccacagcagcgagagcctgggcatcctgaaggactacccccacagcgccttcaccctggagaagaaggtgatcaagaccgagcccgaggacagcagatag

SEQ ID NO: 160734 - protein, 525 aa, Artificial Sequence
  derived and/or modified sequence
MHRAPSPTAEQPPGGGDSARRTLQPRLKPSARAMALPRTLGELQLYRVLQRANLLSYYETFIQQGGDDVQQLCEAGEEEFLEIMALVGMATKPLHVRRLQKALREWATNPGLFSQPVPAVPVSSIPLFKISETAGTRKGSMSNGHGSPGEKAGSARSFSPKSPLELGEKLSPLPGGPGAGDPRIWPGRSTPESDVGAGGEEEAGSPPFSPPAGGGVPEGTGAGGLAAGGTGGGPDRLEPEMVRMVVESVERIFRSFPRGDAGEVTSLLKLNKKLARSVGHIFEMDDNDSQKEEEIRKYSIIYGRFDSKRREGKQLSLHELTINEAAAQFCMRDNTLLLRRVELFSLSRQVARESTYLSSLKGSRLHPEELGGPPLKKLKQEVGEQSHPEIQQPPPGPESYVPPYRPSLEEDSASLSGESLDGHLQAVGSCPRLTPPPADLPLALPAHGLWSRHILQQTLMDEGLRLARLVSHDRVGRLSPCVPAKPPLAEFEEGLLDRCPAPGPHPALVEGRRSSVKVEAEASRQ

SEQ ID NO: 160735 - DNA, 2725 bp, Artificial Sequence
  derived and/or modified sequence
ctctcccagtctctaagccgcggcgtctccgcggccgagaggccccagcgcccgcctccccggcccccgcccccacccccgcccccggctctgcccacgccctccgcccgccagcccggcagccagcgcagctccgggcctcgctccctgtgcgtcctgcgggggcggaggcgcggagaggcggcaagcgcagccggggagggtgggggggcagaggcacagacagaggcgcggaggctcggagagagaagacgtggagggagggacagagcctggacagcggtggacacggcatcgtgcgcggggaagagggcagcacgcagcaggcgccgagcgccgggcaccgagaagggcagcccgggtgatctccggccgtccatgcacagagcgccttcccccacagccgagcagccgccgggcggaggggacagcgcccgccggaccctgcagcccagactcaagcccagtgcccgagccatggcactgcctcggacgctgggggagctgcagctgtaccgggtcctgcagcgcgccaacctcctttcctactatgagaccttcatccagcagggaggggacgacgtgcagcagctgtgtgaggcgggtgaggaggagtttctggagatcatggcacttgtgggcatggccaccaagcccctccatgtccggcgcctgcagaaggcactgagagagtgggccaccaatccagggctcttcagtcaaccagtgcctgctgttcccgtctccagcatcccgctcttcaagatctctgagactgcgggtacccggaaagggagcatgagcaatgggcatggcagcccaggggaaaaggcaggcagtgcccgcagttttagccccaagagcccccttgaacttggagagaagctatcaccactgcctgggggacctggggcaggggacccccggatctggccaggccggagcactccagagtcggacgttggggcaggaggagaagaggaggctggctcgccccccttctccccccctgcagggggaggagtccctgaggggactggggctggggggctggcagcaggtgggactgggggtggtccagaccgactggagccagagatggtacgcatggtggtggaaagtgtggagaggatcttccggagcttcccaaggggggatgctggggaggtcacatccctgctaaagctgaataagaagctggcacggagcgttgggcacatctttgagatggatgataatgacagccagaaggaagaggagatccgcaaatacagcatcatctatggccgtttcgactctaagcggcgggagggcaagcagctcagcctgcacgagctcaccatcaacgaggctgctgcccagttctgcatgagggacaacacgctcttattacggagagtggagctcttctctttgtcccgccaagtagcccgagagagcacctacttgtcctccttgaagggctccaggcttcaccctgaagaactgggaggccctccactgaagaagctgaaacaagaggttggagaacagagtcaccctgaaatccagcagcctcccccaggccctgagtcctatgtacccccataccgccccagcctggaggaggacagcgccagcctgtctggggagagtctggatggacatttgcaggctgtggggtcatgtccaaggctgacgccgccccctgctgacctgcctctggcattgccagcccatgggctatggagccgacacatcctgcagcagacactgatggacgaggggctgcggctcgcccgcctcgtctcccacgaccgcgtgggccgcctcagcccctgtgtgcctgcgaagccacctctcgcagagttcgaggaagggctgctggacagatgtcctgccccaggaccccatcccgcgctggtggagggtcgcaggagcagcgtgaaagtggaggctgaggccagccggcagtgagggttggactggtgtcttcagacccaggacctcagacttctggctcacacagacccccacgctctccatccccggaatctagtcacaaccctggatccttcctctgcccttctcctgcctccccacctgctccatgggcataagactgtggggcttcaagcaataacaagcagaggcctggagagaggacacaaggagggtgcgtggtgccctcacccctgcccagagcgagggggcaaggactctgcctccagggcatctggggttttcccctccctcacacaacacactcccattctctttaggtttgcaccagtggtgtgagcagttggactcagtttggacaagggggaaagggggacttccctgggaaggtccagctaaaagtggcaacatttgcccccagaattgggggcctgggaacactggacctgctccttctcccctctccttccccgtttttgtgcttctggtttgtttctttaattaatttaacaagtgctgcagtttgccctcccattcccatctatcccccaagtcctttgcaatttcttccctgccctacataggggcggtgggtgtgggatcccttcactggccccctcgggaggcctgggttggactcagggtctcctccagctgggggctggaccgcagcacctatctgagcagttagagcgtctttcttttcagattgtgtacagtagattatttattttgttattttggaataaaatttattttatggcttaggaaaaaaaaaaaaaaa

SEQ ID NO: 160736 - DNA, 1578 bp, Artificial Sequence
  derived and/or modified sequence
atgcacagggcgccctcccccacagccgagcagcctcccggcggcggtgactctgcaaggagaaccctgcagccacgattgaagccctctgctcgcgctatggccctgcctcgtaccctcggcgagctccagctctatcgcgtcctgcagagggctaatctgctctcgtactacgaaacctttattcagcaagggggggatgatgtgcagcaactgtgtgaggccggagaagaggagtttctggaaatcatggccctggttgggatggctacaaaaccgctgcacgtgcgtaggctgcagaaggccctgagagagtgggccactaatccaggcctattcagccagccagttccggctgtgcctgtctcttctattccgctgttcaagatttccgaaaccgctggaactaggaagggctccatgtccaacggtcacggctcacctggcgaaaaggctgggagcgcccggagttttagcccaaaatcccctctggaactgggggagaaactctcccccttgcccggcggcccgggagctggtgatccaaggatttggccaggtcggtccaccccagagtctgacgtgggtgcgggaggcgaggaggaggcagggtctccccccttctcgccacccgccggcggtggcgtcccggaggggacaggcgccggaggtctcgccgccggcggcacaggtggtgggcctgatagactggaaccggagatggtgagaatggtggtcgaaagcgtagaaagaatttttcgcagctttccccgcggagacgctggtgaagtgactagcctacttaaactcaataaaaagctggcaagatctgtagggcatatttttgaaatggatgataatgattctcaaaaggaagaagaaattcgcaaatatagcatcatatatggcaggtttgattccaaacgcagagagggcaaacagctgtcactgcacgagctaaccattaatgaagccgccgctcagttttgcatgagggacaacactcttctcctgaggcgagtagaactgttttctctgtcccgacaagtagctagagagtccacttacctgtctagcctgaaaggatctcgactacaccccgaagaactgggcggtcccccactgaaaaagttgaagcaggaagtgggagagcagtcccatcctgaaattcagcaacctcctcccggccccgagagctatgtgcccccgtacagaccaagtctggaggaagacagtgcatcattaagtggggaaagtctggatgggcacctgcaagccgtaggaagctgtccgcgcttaaccccaccacccgccgacctgcccctagcactgcccgctcatggtctgtggtcccgccatatcttacagcagaccctgatggacgagggcctccgactggcccggcttgtcagccatgatcgggtgggccgactgtccccctgtgtgccagcaaagccgccactcgcagagttcgaggaagggcttcttgatcgctgccctgcacccgggccacatcccgccttggtcgaggggcgcaggagtagcgtgaaagtcgaggccgaggcaagccgacaatag

SEQ ID NO: 160737 - DNA, 1578 bp, Artificial Sequence
  derived and/or modified sequence
atgcaccgggcccccagccccacagctgagcagcccccaggcggcggggacagcgcccggaggaccctgcagccccggctgaagcccagcgcccgggccatggccctgcccaggaccctgggggagctgcagctgtacagagtgctgcagagggccaacctgctgagctactatgagaccttcatccagcagggcggagatgatgtgcagcagctgtgtgaggccggggaggaggagttcctggagatcatggccctggtgggcatggccaccaagcccctgcacgtgcggcggctgcagaaggccctgcgggagtgggccaccaaccctggcctcttcagccagcctgtgcctgctgtgcctgtgagcagcatccccctcttcaagatcagcgagacagctggcaccaggaagggctccatgagcaatggacatggcagccctggagagaaggccggcagcgcccgctccttcagccccaagagccccctggagctgggggagaagctgagccccctgcccggcggccctggagctggggacccccgcatctggccaggccgcagcaccccagagagtgatgtgggcgccggcggggaggaggaggccggcagcccccccttcagccccccagctgggggcggcgtgcctgagggcaccggggccggcggcctggccgccggcggcaccggcggcggccctgaccggctggagcctgagatggtgaggatggtggtggagagcgtggagcgcatcttccgctccttccccagaggagatgctggggaggtgaccagcctgctgaagctgaacaagaagctggcccggtctgtgggccacatctttgagatggatgacaatgacagccagaaggaggaggagatcaggaagtacagcatcatctacggccgctttgacagcaagagaagagagggcaagcagctgagcctgcacgagctgaccatcaatgaagctgctgcccagttctgcatgagggacaacaccctgctgctgcggcgggtggagctgttcagcctgagccggcaggtggcccgggagagcacctacctgagcagcctgaagggcagccggctgcaccctgaggagctgggcggcccccccctgaagaagctgaagcaggaggtgggggagcagagccaccctgagatccagcagcccccacctggccctgagagctatgtgcccccctaccggcccagcctggaggaggacagcgccagcctgagcggggagagcctggatggccacctgcaggccgtgggcagctgcccccggctgaccccacctcctgctgacctgcccctggccctgcctgcccacggcctgtggagccgccacatcctgcagcagaccctgatggatgagggcctgcggctggcccggctggtgtcccatgacagagtgggccgcctgagcccctgtgtgcctgccaagccacccctggccgagtttgaggagggcctgctggaccgctgcccagcccctggcccccacccagccctggtggagggccgccgcagctctgtgaaggtggaggccgaggccagccggcagtag

SEQ ID NO: 160738 - DNA, 1578 bp, Artificial Sequence
  derived and/or modified sequence
atgcaccgggcccccagccccaccgccgagcagccccccggcggcggtgattcagctaggcgcacactccagccacgtctgaagccaagcgctcgcgccatggcccttcctaggactctgggtgaattgcagctttaccgggtgctccagcgagccaatctactatcttactacgaaacttttatccaacagggtggcgacgacgtgcagcagttatgcgaggcgggtgaagaagagttcttggagattatggcgctggtagggatggcaaccaagcctcttcacgtccggcgtttgcagaaagcattaagagaatgggccactaatcctggacttttcagccagcccgtccctgctgttcccgtgtctagtataccattatttaaaatatccgagactgccgggacgagaaagggctctatgtctaacggacacggtagcccaggtgagaaggccggcagcgctcggtctttctcacctaaatcccctctcgaattaggggaaaaactgtccccactgcctggcggccctggtgcgggagacccccgaatctggcccggacggtcaactcctgaatcagacgtgggagcgggaggggaagaggaagccggtagccctcccttcagccctcctgccggggggggcgtgccggaaggaacaggagccggtggattagcggccggcgggaccgggggaggcccagaccgcttagaacccgagatggtgcgcatggtggtagaatcagttgagcgtatttttcgaagcttcccacggggagacgcaggcgaggtgacttcactactcaagcttaacaaaaaactcgcacggagcgtgggtcacattttcgagatggacgataatgactctcaaaaggaagaggaaatacgtaaatacagtatcatttacggtcggttcgactccaaacgccgggaaggaaagcagctgagtctacatgagctgactattaacgaagcagcggcacaattctgtatgcgagacaatactctcctcctgcgccgagttgaactgtttagcttatctagacaggttgccagggaaagcacttatctgtcttctctgaagggttccagactgcatccagaggagctgggggggccgcccctgaaaaagctgaaacaagaggtcggggaacagtcccacccagagatacagcagccacctccaggtcccgaatcgtacgtgccgccttacagaccttccctcgaagaggactcagcctccctgtccggcgagagccttgatggccatctgcaggctgtgggttcttgcccacggttgaccccaccacccgctgacctgccattggcactacccgcccacggactgtggtcaaggcacatcttgcagcagacattgatggatgaagggctgcgtctcgcacgcctggtctcacacgaccgggtaggaagactatcaccttgtgttccagccaaacctccactcgccgaattcgaggaggggctacttgatcggtgtcctgctcccgggccccatcccgccctggtggaaggaaggcgatccagtgtgaaggtggaggccgaagcctcacgacagtag

SEQ ID NO: 160739 - DNA, 2711 bp, Artificial Sequence
  derived and/or modified sequence
ctctcccagtctctaagccgcggcgtctccgcggccgagaggccccagcgcccgcctccccggcccccgcccccacccccgcccccggctctgcccacgccctccgcccgccagcccggcagccagcgcagctccgggcctcgctccctgtgcgtcctgcgggggcggaggcgcggagaggcggcaagcgcagccggggagggtgggggggcagaggcacagacagaggcgcggaggctcggagagagaagacgtggagggagggacagagcctggacagcggtggacacggcatcgtgcgcggggaagagggcagcacgcagcaggcgccgagcgccgggcaccgagaagggcagcccgggtgatctccggccgtccatgcacagagcgccttcccccacagccgagcagccgccgggcggaggggacagcgcccgccggaccctgcagcccagactcaagcccagtgcccgagccatggcactgcctcggacgctgggggagctgcagctgtaccgggtcctgcagcgcgccaacctcctttcctactatgagaccttcatccagcagggaggggacgacgtgcagcagctgtgtgaggcgggtgaggaggagtttctggagatcatggcacttgtgggcatggccaccaagcccctccatgtccggcgcctgcagaaggcactgagagagtgggccaccaatccagggctcttcagtcaaccagtgcctgctgttcccgtctccagcatcccgctcttcaagatctctgagactgcgggtacccggaaagggagcatgagcaatgggcatggcagcccaggggaaaaggcaggcagtgcccgcagttttagccccaagagcccccttgaacttggagagaagctatcaccactgcctgggggacctggggcaggggacccccggatctggccaggccggagcactccagagtcggacgttggggcaggaggagaagaggaggctggctcgccccccttctccccccctgcagggggaggagtccctgaggggactggggctggggggctggcagcaggtgggactgggggtggtccagaccgactggagccagagatggtacgcatggtggtggaaagtgtggagaggatcttccggagcttcccaaggggggatgctggggaggtcacatccctgctaaagctgaataagaagctggcacggagcgttgggcacatctttgagatggatgataatgacagccagaaggaagaggagatccgcaaatacagcatcatctatggccgtttcgactctaagcggcgggagggcaagcagctcagcctgcacgagctcaccatcaacgaggctgctgcccagttctgcatgagggacaacacgctcttattacggagagtggagctcttctctttgtcccgccaagtagcccgagagagcacctacttgtcctccttgaagggctccaggcttcaccctgaagaactgggaggccctccactgaagaagctgaaacaagaggttggagaacagagtcaccctgaaatccagcagcctcccccaggccctgagtcctatgtacccccataccgccccagcctggaggaggacagcgccagcctgtctggggagagtctggatggacatttgcaggctgtggggtcatgtccaaggctgacgccgccccctgctgacctgcctctggcattgccagcccatgggctatggagccgacacatcctgcagcagacactgatggacgaggggctgcggctcgcccgcctcgtctcccacgaccgcgtgggccgcctcagcccctgtgtgcctgcgaagccacctctcgcagagttcgaggaagggctgctggacagatgtcctgccccaggaccccatcccgcgctggtggagggtcgcaggagcagcgtgaaagtggaggctgaggccagccggcagtgagggttggactggtgtcttcagacccaggacctcagacttctggctcacacagacccccacgctctccatccccggaatctagtcacaaccctggatccttcctctgcccttctcctgcctccccacctgctccatgggcataagactgtggggcttcaagcaataacaagcagaggcctggagagaggacacaaggagggtgcgtggtgccctcacccctgcccagagcgagggggcaaggactctgcctccagggcatctggggttttcccctccctcacacaacacactcccattctctttaggtttgcaccagtggtgtgagcagttggactcagtttggacaagggggaaagggggacttccctgggaaggtccagctaaaagtggcaacatttgcccccagaattgggggcctgggaacactggacctgctccttctcccctctccttccccgtttttgtgcttctggtttgtttctttaattaatttaacaagtgctgcagtttgccctcccattcccatctatcccccaagtcctttgcaatttcttccctgccctacataggggcggtgggtgtgggatcccttcactggccccctcgggaggcctgggttggactcagggtctcctccagctgggggctggaccgcagcacctatctgagcagttagagcgtctttcttttcagattgtgtacagtagattatttattttgttattttggaataaaatttattttatggcttagga

SEQ ID NO: 160740 - DNA, 2363 bp, Artificial Sequence
  derived and/or modified sequence
gaggcacagacagaggcgcggaggctcggagagagaagacgtggagggagggacagagcctggacagcggtggacacggcatcgtgcgcggggaagagggcagcacgcagcaggcgccgagcgccgggcaccgagaagggcagcccgggtgatctccggccgtccatgcacagagcgccttcccccacagccgagcagccgccgggcggaggggacagcgcccgccggaccctgcagcccagactcaagcccagtgcccgagccatggcactgcctcggacgctgggggagctgcagctgtaccgggtcctgcagcgcgccaacctcctttcctactatgagaccttcatccagcagggaggggacgacgtgcagcagctgtgtgaggcgggtgaggaggagtttctggagatcatggcacttgtgggcatggccaccaagcccctccatgtccggcgcctgcagaaggcactgagagagtgggccaccaatccagggctcttcagtcaaccagtgcctgctgttcccgtctccagcatcccgctcttcaagatctctgagactgcgggtacccggaaagggagcatgagcaatgggcatggcagcccaggggaaaaggcaggcagtgcccgcagttttagccccaagagcccccttgaacttggagagaagctatcaccactgcctgggggacctggggcaggggacccccggatctggccaggccggagcactccagagtcggacgttggggcaggaggagaagaggaggctggctcgccccccttctccccccctgcagggggaggagtccctgaggggactggggctggggggctggcagcaggtgggactgggggtggtccagaccgactggagccagagatggtacgcatggtggtggaaagtgtggagaggatcttccggagcttcccaaggggggatgctggggaggtcacatccctgctaaagctgaataagaagctggcacggagcgttgggcacatctttgagatggatgataatgacagccagaaggaagaggagatccgcaaatacagcatcatctatggccgtttcgactctaagcggcgggagggcaagcagctcagcctgcacgaggcttcaccctgaagaactgggaggccctccactgaagaagctgaaacaagaggttggagaacagagtcaccctgaaatccagcagcctcccccaggccctgagtcctatgtacccccataccgccccagcctggaggaggacagcgccagcctgtctggggagagtctggatggacatttgcaggctgtggggtcatgtccaaggctgacgccgccccctgctgacctgcctctggcattgccagcccatgggctatggagccgacacatcctgcagcagacactgatggacgaggggctgcggctcgcccgcctcgtctcccacgaccgcgtgggccgcctcagcccctgtgtgcctgcgaagccacctctcgcagagttcgaggaagggctgctggacagatgtcctgccccaggaccccatcccgcgctggtggagggtcgcaggagcagcgtgaaagtggaggctgaggccagccggcagtgagggttggactggtgtcttcagacccaggacctcagacttctggctcacacagacccccacgctctccatccccggaatctagtcacaaccctggatccttcctctgcccttctcctgcctccccacctgctccatgggcataagactgtggggcttcaagcaataacaagcagaggcctggagagaggacacaaggagggtgcgtggtgccctcacccctgcccagagcgagggggcaaggactctgcctccagggcatctggggttttcccctccctcacacaacacactcccattctctttaggtttgcaccagtggtgtgagcagttggactcagtttggacaagggggaaagggggacttccctgggaaggtccagctaaaagtggcaacatttgcccccagaattgggggcctgggaacactggacctgctccttctcccctctccttccccgtttttgtgcttctggtttgtttctttaattaatttaacaagtgctgcagtttgccctcccattcccatctatcccccaagtcctttgcaatttcttccctgccctacataggggcggtgggtgtgggatcccttcactggccccctcgggaggcctgggttggactcagggtctcctccagctgggggctggaccgcagcacctatctgagcagttagagcgtctttcttttcagattgtgtacagtagattatttattttgttattttggaataaaatttattttatggcttagg

SEQ ID NO: 160741 - DNA, 1578 bp, Artificial Sequence
  derived and/or modified sequence
atgcaccgggctcctagtcccaccgccgaacagccgccaggtggtggagacagcgctcggaggacgctgcagccacgactgaaacctagcgctcgagccatggccctgcctagaactctcggagaactgcaactgtaccgcgtacttcagcgggctaatctgctttcctactacgaaacttttatccaacagggtggagatgacgtccaacagctctgtgaagcaggagaggaggaatttttggagattatggcattggttggcatggccacgaaacccttacatgtgagacggctgcagaaggcacttagggaatgggccacaaatcctgggctgttttctcagcctgttcccgcagtcccagtgtcatccataccactgttcaaaatttctgagaccgccggtaccaggaagggtagtatgagcaacggacacggtagtccaggcgaaaaggctggcagcgcacggtcttttagccctaaatccccccttgagctgggcgagaaactgagccctttacctgggggtccaggcgctggggaccccagaatctggcctggacggtcaacccccgaatctgacgtaggtgctgggggagaggaagaagcgggaagtccacccttttctccacctgccggaggaggagtgcctgaagggacgggagcaggagggctcgccgctggcggtacgggaggcggaccagaccgtcttgagcctgaaatggtccgaatggtggtggagagcgtagagcgcatcttcaggtcctttcccaggggcgacgctggggaggtcacctctctgctaaaactgaacaagaaactggcaagatctgtgggccatatattcgagatggatgataacgatagtcaaaaggaagaggagatccggaaatattcaatcatatacggcagattcgattctaaaaggagggaaggcaagcaattgagccttcacgaactgacaatcaacgaggctgccgctcagttctgcatgcgcgacaatacactcttattgaggcgcgttgagttgttcagcctgtcaagacaagtggccagggagtctacttacctgtcctctcttaagggatcccgcctgcaccctgaggagttgggcggtccccctctaaagaagcttaagcaagaagtcggggagcaaagtcaccctgagattcagcaacctcccccaggtcctgagtcctacgtacccccttatcgcccttcactggaggaggattccgcctctctgtcaggagagtccttagatggacacctccaggcagttggctcatgcccaagactcaccccgccaccagcagatctgcccctcgcgttacctgcgcacggtctgtggtcacggcatatcctccagcagactctcatggatgaggggttgcgacttgcacgtctggtatctcatgaccgggtgggcagattgtccccctgcgttcccgctaagcctccactggcagagtttgaggagggcctgttggaccgctgtcccgcacccggaccacatcccgctctcgtcgaaggcagacgctcctctgttaaggtggaggctgaggcctcacggcaatag

SEQ ID NO: 160742 - DNA, 1578 bp, Artificial Sequence
  derived and/or modified sequence
atgcacagagcccccagccccaccgccgagcagccccccggcggcggcgacagcgccagaagaaccctgcagcccagactgaagcccagcgccagagccatggccctgcccagaaccctgggcgagctgcagctgtacagagtgctgcagagagccaacctgctgagctactacgagaccttcatccagcagggcggcgacgacgtgcagcagctgtgcgaggccggcgaggaggagttcctggagatcatggccctggtgggcatggccaccaagcccctgcacgtgagaagactgcagaaggccctgagagagtgggccaccaaccccggcctgttcagccagcccgtgcccgccgtgcccgtgagcagcatccccctgttcaagatcagcgagaccgccggcaccagaaagggcagcatgagcaacggccacggcagccccggcgagaaggccggcagcgccagaagcttcagccccaagagccccctggagctgggcgagaagctgagccccctgcccggcggccccggcgccggcgaccccagaatctggcccggcagaagcacccccgagagcgacgtgggcgccggcggcgaggaggaggccggcagcccccccttcagcccccccgccggcggcggcgtgcccgagggcaccggcgccggcggcctggccgccggcggcaccggcggcggccccgacagactggagcccgagatggtgagaatggtggtggagagcgtggagagaatcttcagaagcttccccagaggcgacgccggcgaggtgaccagcctgctgaagctgaacaagaagctggccagaagcgtgggccacatcttcgagatggacgacaacgacagccagaaggaggaggagatcagaaagtacagcatcatctacggcagattcgacagcaagagaagagagggcaagcagctgagcctgcacgagctgaccatcaacgaggccgccgcccagttctgcatgagagacaacaccctgctgctgagaagagtggagctgttcagcctgagcagacaggtggccagagagagcacctacctgagcagcctgaagggcagcagactgcaccccgaggagctgggcggcccccccctgaagaagctgaagcaggaggtgggcgagcagagccaccccgagatccagcagcccccccccggccccgagagctacgtgcccccctacagacccagcctggaggaggacagcgccagcctgagcggcgagagcctggacggccacctgcaggccgtgggcagctgccccagactgacccccccccccgccgacctgcccctggccctgcccgcccacggcctgtggagcagacacatcctgcagcagaccctgatggacgagggcctgagactggccagactggtgagccacgacagagtgggcagactgagcccctgcgtgcccgccaagccccccctggccgagttcgaggagggcctgctggacagatgccccgcccccggcccccaccccgccctggtggagggcagaagaagcagcgtgaaggtggaggccgaggccagcagacagtag

SEQ ID NO: 160743 - protein, 730 aa, Artificial Sequence
  derived and/or modified sequence
MAAGVEAAAEVAATEIKMEEESGAPGVPSGNGAPGPKGEGERPAQNEKRKEKNIKRGGNRFEPYANPTKRYRAFITNIPFDVKWQSLKDLVKEKVGEVTYVELLMDAEGKSRGCAVVEFKMEESMKKAAEVLNKHSLSGRPLKVKEDPDGEHARRAMQKVMATTGGMGMGPGGPGMITIPPSILNNPNIPNEIIHALQAGRLGSTVFVANLDYKVGWKKLKEVFSMAGVVVRADILEDKDGKSRGIGTVTFEQSIEAVQAISMFNGQLLFDRPMHVKMDERALPKGDFFPPERPQQLPHGLGGIGMGLGPGGQPIDANHLNKGIGMGNIGPAGMGMEGIGFGINKMGGMEGPFGGGMENMGRFGSGMNMGRINEILSNALKRGEIIAKQGGGGGGGSVPGIERMGPGIDRLGGAGMERMGAGLGHGMDRVGSEIERMGLVMDRMGSVERMGSGIERMGPLGLDHMASSIERMGQTMERIGSGVERMGAGMGFGLERMAAPIDRVGQTIERMGSGVERMGPAIERMGLSMERMVPAGMGAGLERMGPVMDRMATGLERMGANNLERMGLERMGANSLERMGLERMGANSLERMGPAMGPALGAGIERMGLAMGGGGGASFDRAIEMERGNFGGSFAGSFGGAGGHAPGVARKACQIFVRNLPFDFTWKMLKDKFNECGHVLYADIKMENGKSKGCGVVKFESPEVAERACRMMNGMKLSGREIDVRIDRNA

SEQ ID NO: 160744 - protein, 287 aa, Artificial Sequence
  derived and/or modified sequence
MGSVERMGSGIERMGPLGLDHMASSIERMGQTMERIGSGVERMGAGMGFGLERMAAPIDRVGQTIERMGSGVERMGPAIERMGLSMERMVPAGMGAGLERMGPVMDRMATGLERMGANNLERMGLERMGANSLERMGLERMGANSLERMGPAMGPALGAGIERMGLAMGGGGGASFDRAIEMERGNFGGSFAGSFGGAGGHAPGVARKACQIFVRNLPFDFTWKMLKDKFNECGHVLYADIKMENGKSKGCGVVKFESPEVAERACRMMNGMKLSGREIDVRIDRNA

SEQ ID NO: 160745 - DNA, 2193 bp, Artificial Sequence
  derived and/or modified sequence
atggccgccggcgtggaggccgccgccgaggtggccgccaccgagatcaagatggaggaggagagcggcgcccccggcgtgcccagcggcaacggcgcccccggccccaagggcgagggcgagagacccgcccagaacgagaagagaaaggagaagaacatcaagagaggcggcaacagattcgagccctacgccaaccccaccaagagatacagagccttcatcaccaacatccccttcgacgtgaagtggcagagcctgaaggacctggtgaaggagaaggtgggcgaggtgacctacgtggagctgctgatggacgccgagggcaagagcagaggctgcgccgtggtggagttcaagatggaggagagcatgaagaaggccgccgaggtgctgaacaagcacagcctgagcggcagacccctgaaggtgaaggaggaccccgacggcgagcacgccagaagagccatgcagaaggtgatggccaccaccggcggcatgggcatgggccccggcggccccggcatgatcaccatcccccccagcatcctgaacaaccccaacatccccaacgagatcatccacgccctgcaggccggcagactgggcagcaccgtgttcgtggccaacctggactacaaggtgggctggaagaagctgaaggaggtgttcagcatggccggcgtggtggtgagagccgacatcctggaggacaaggacggcaagagcagaggcatcggcaccgtgaccttcgagcagagcatcgaggccgtgcaggccatcagcatgttcaacggccagctgctgttcgacagacccatgcacgtgaagatggacgagagagccctgcccaagggcgacttcttcccccccgagagaccccagcagctgccccacggcctgggcggcatcggcatgggcctgggccccggcggccagcccatcgacgccaaccacctgaacaagggcatcggcatgggcaacatcggccccgccggcatgggcatggagggcatcggcttcggcatcaacaagatgggcggcatggagggccccttcggcggcggcatggagaacatgggcagattcggcagcggcatgaacatgggcagaatcaacgagatcctgagcaacgccctgaagagaggcgagatcatcgccaagcagggcggcggcggcggcggcggcagcgtgcccggcatcgagagaatgggccccggcatcgacagactgggcggcgccggcatggagagaatgggcgccggcctgggccacggcatggacagagtgggcagcgagatcgagagaatgggcctggtgatggacagaatgggcagcgtggagagaatgggcagcggcatcgagagaatgggccccctgggcctggaccacatggccagcagcatcgagagaatgggccagaccatggagagaatcggcagcggcgtggagagaatgggcgccggcatgggcttcggcctggagagaatggccgcccccatcgacagagtgggccagaccatcgagagaatgggcagcggcgtggagagaatgggccccgccatcgagagaatgggcctgagcatggagagaatggtgcccgccggcatgggcgccggcctggagagaatgggccccgtgatggacagaatggccaccggcctggagagaatgggcgccaacaacctggagagaatgggcctggagagaatgggcgccaacagcctggagagaatgggcctggagagaatgggcgccaacagcctggagagaatgggccccgccatgggccccgccctgggcgccggcatcgagagaatgggcctggccatgggcggcggcggcggcgccagcttcgacagagccatcgagatggagagaggcaacttcggcggcagcttcgccggcagcttcggcggcgccggcggccacgcccccggcgtggccagaaaggcctgccagatcttcgtgagaaacctgcccttcgacttcacctggaagatgctgaaggacaagttcaacgagtgcggccacgtgctgtacgccgacatcaagatggagaacggcaagagcaagggctgcggcgtggtgaagttcgagagccccgaggtggccgagagagcctgcagaatgatgaacggcatgaagctgagcggcagagagatcgacgtgagaatcgacagaaacgcctag

SEQ ID NO: 160746 - DNA, 2193 bp, Artificial Sequence
  derived and/or modified sequence
atggcagctggggtggaagctgctgctgaagtagccgccacagagattaagatggaggaagaatctggggctccaggagtgccgagcggaaacggggccccgggaccgaaaggcgagggcgaacggcccgcccaaaatgagaagcgcaaggagaagaacatcaagaggggtgggaacagattcgagccctatgccaacccgacaaagcgttacagagcgttcatcaccaatattcccttcgatgtgaaatggcagagtcttaaggaccttgttaaagaaaaagtgggtgaggtgacatatgtcgagttattgatggacgctgagggcaagtctcgtggatgtgccgttgtggagttcaagatggaagagagcatgaaaaaggccgccgaagtgttgaacaaacattcattaagcggccggcccctaaaagtaaaagaagaccctgacggagagcatgctcgaagagcaatgcagaaggtcatggcaactactggagggatggggatggggccgggcggtcccggcatgatcactatccccccaagcatcttgaacaatcctaatattcctaatgagattatccacgctcttcaggctggtagactgggctccacagtcttcgttgcaaacttagattataaggtgggttggaagaaactcaaggaagtgttcagtatggctggtgtggtggtgcgtgccgatatcctcgaagataaagacggcaagagtagaggcatcggaacagtgaccttcgaacaatcaattgaggcagtccaagcaatctctatgttcaatgggcagctactctttgacaggcctatgcacgtgaagatggacgagagagctctccctaaaggagatttctttccacctgaacgccctcaacagctacctcatgggctagggggcataggcatggggctggggcctggagggcagccgatcgatgcaaatcacctcaacaaggggatcggcatggggaatattgggccggctggtatgggaatggaagggatcggctttggtatcaacaagatgggaggcatggaggggccttttggcggcgggatggagaacatggggaggttcggttccggtatgaacatggggagaatcaacgaaattctatccaacgcccttaagcgcggggaaattattgcgaagcaggggggcggagggggcggagggtccgtgcctggcattgaacgcatgggccctggcatcgaccgtctgggaggagccggcatggagcgcatgggagcggggctggggcacgggatggacagagtgggcagtgagatcgaaagaatgggacttgtgatggaccggatgggcagtgtcgagagaatgggaagcgggatcgagagaatgggtccactggggcttgaccatatggcaagcagcattgagagaatggggcaaaccatggaaagaataggatccggagtagagcggatgggcgccggtatgggcttcggactcgagcgcatggccgccccaatagatcgagtcgggcagactattgaaaggatgggaagtggagtggagcgcatgggccccgctatcgaaaggatgggcctcagcatggaacggatggttccagccggaatgggcgctggccttgaacgaatgggacccgttatggaccgtatggccacaggcttggaaaggatgggcgccaataatctagagagaatggggctggaacgcatgggggcaaattcgcttgagcggatggggctggaacgcatgggtgcaaacagccttgaacgaatgggccccgctatggggccagcccttggagcaggcatcgagcgcatgggattggccatgggcgggggtggtggcgcttcctttgatcgggccatcgagatggagcggggcaacttcgggggcagtttcgccggttcctttggcggcgctggcggccacgctccgggtgtcgccagaaaggcatgtcagatctttgtgcggaatctgccattcgattttacatggaaaatgttaaaagataagtttaacgagtgtggacacgtgctgtacgcggatatcaaaatggaaaacggtaaatctaaaggctgtggcgtggtaaagttcgagtcaccagaggtggccgagcgggcctgccggatgatgaacggaatgaagctctcaggacgcgagatcgatgttagaatagatcggaatgcctag

SEQ ID NO: 160747 - DNA, 2572 bp, Artificial Sequence
  derived and/or modified sequence
cgcgccgggaacagccagtcggtgcctaacgcgagtgtatctcgagagagaagcgatcaacagctgccggtctgcgcctgcgcgcggcgggggcgtggcccggggcgagtggggccaaggaggcagccgggagcggcgggcgcaggtgttactggttgcgtcgggtcacgtgggcgcgcaggcgcagcgcggtgcagcccgttcgctcacacaaagcccagacgcggagaaaatggcggcaggggtcgaagcggcggcggaggtggcggcgacggagatcaaaatggaggaagagagcggcgcgcccggcgtgccgagcggcaacggggctccgggccctaagggtgaaggagaacgacctgctcagaatgagaagaggaaggagaaaaacataaaaagaggaggcaatcgctttgagccatatgccaatccaactaaaagatacagagccttcattacaaacataccttttgatgtgaaatggcagtcacttaaagacctggttaaagaaaaagttggtgaggtaacatacgtggagctcttaatggacgctgaaggaaagtcaaggggatgtgctgttgttgaattcaagatggaagagagcatgaaaaaagctgcggaagtcctaaacaagcatagtctgagcggaagaccactgaaagtcaaagaagatcctgatggtgaacatgccaggagagcaatgcaaaaggtgatggctacgactggtgggatgggtatgggaccaggtggcccaggaatgattactatcccacccagtatcctaaataatcccaacatcccaaatgagattatccatgcattacaggctggaagacttggaagcacagtatttgtagcaaatctggattataaagttggctggaagaaactgaaggaagtatttagtatggctggtgtggtggtccgagcagacattcttgaagataaagatggaaaaagtcgtggaataggcactgttacttttgaacagtccattgaagctgtgcaagctatatctatgttcaatggccagctgctatttgatagaccaatgcacgtcaagatggatgagagggccttaccaaaaggagatttcttccctcctgagcgtccacaacaacttccccatggccttggtggtattggcatggggttaggaccaggagggcaacccattgatgccaatcacctgaataaaggcatcggaatgggaaacataggtcccgcaggaatgggaatggaaggcataggatttggaataaataaaatgggaggaatggaggggccctttggtggtggtatggaaaacatgggtcgatttggatctgggatgaacatgggcaggataaatgaaatcctaagtaatgcactgaagagaggagagatcattgcaaagcagggaggaggtggaggtggaggaagcgtccctgggatcgagaggatgggtcctggcattgaccgcctcgggggtgccggcatggagcgcatgggcgcgggcctgggccacggcatggatcgcgtgggctccgagatcgagcgcatgggcctggtcatggaccgcatgggctccgtggagcgcatgggctccggcattgagcgcatgggcccgctgggcctcgaccacatggcctccagcattgagcgcatgggccagaccatggagcgcattggctctggcgtggagcgcatgggtgccggcatgggcttcggccttgagcgcatggccgctcccatcgaccgtgtgggccagaccattgagcgcatgggctctggcgtggagcgcatgggccctgccatcgagcgcatgggcctgagcatggagcgcatggtgcccgcaggtatgggagctggcctggagcgcatgggccccgtgatggatcgcatggccaccggcctggagcgcatgggcgccaacaatctggagcggatgggcctggagcgcatgggcgccaacagcctcgagcgcatgggcctggagcgcatgggtgccaacagcctcgagcgcatgggccctgccatgggcccggccctgggcgctggcattgagcgcatgggcctggccatgggtggcggtggcggtgccagctttgaccgtgccatcgagatggagcgtggcaacttcggaggaagcttcgcaggttcctttggtggagctggaggccatgctcctggggtggccaggaaggcctgccagatatttgtgagaaatctgccattcgatttcacatggaagatgctaaaggacaaattcaacgagtgcggccacgtgctgtacgccgacatcaagatggagaatgggaagtccaaggggtgtggcgtggttaagttcgagtcgccagaggtggccgagagagcctgccggatgatgaatggcatgaagctgagtggccgagagattgacgttcgaattgatagaaacgcttaagcagttgccttttttaaacatcgatacgagacctctgaatttgtattttttcttgttaaccattttaatttgttggctggatgtataaagatgtttaaaaaattcagttgctttttggggtaatttgaattacttttttaatgactg

SEQ ID NO: 160748 - DNA, 2193 bp, Artificial Sequence
  derived and/or modified sequence
atggctgctggggtggaggccgctgctgaggtggccgccacagagatcaagatggaggaggagagcggggcccctggggtgcccagcggaaatggagcccctggccccaagggggagggggagaggcctgcccagaatgagaagaggaaggagaagaacatcaagagaggaggcaacagatttgagccctatgccaaccccaccaagcgctaccgggccttcatcaccaacatcccctttgatgtgaagtggcagagcctgaaggacctggtgaaggagaaggtgggggaggtgacctacgtggagctgctgatggatgctgagggcaagagccggggctgtgctgtggtggagttcaagatggaggagagcatgaagaaggctgctgaggtgctgaacaagcacagcctgagcggccggcccctgaaggtgaaggaggaccctgatggagagcacgcccggcgggccatgcagaaggtgatggccaccaccggcggcatgggcatgggccctgggggccctggcatgatcaccatcccccccagcatcctgaacaaccccaacatccccaatgagatcatccacgccctgcaggccggccgcctgggcagcacagtgtttgtggccaacctggactacaaggtgggctggaagaagctgaaggaggtgttctccatggccggcgtggtggtgcgggctgacatcctggaggacaaggatggcaagagccggggcatcggcaccgtgacctttgagcagagcattgaagctgtgcaggccatctccatgtttaatggccagctgctgtttgaccggcccatgcacgtgaagatggatgagcgggccctgcccaagggggacttcttccccccagagcggccccagcagctgccccacggcctgggcggcatcggcatgggcctgggccctgggggccagcccattgatgccaaccacctgaacaagggcatcggcatgggcaacatcggccctgctggcatgggcatggagggcattggatttggcatcaacaagatgggcggcatggagggcccctttggaggcggcatggagaacatgggccgctttggaagtggcatgaacatgggccgcatcaatgagatcctgagcaatgccctgaagagaggagagatcatcgccaagcagggcggcggcggcggcggcggctctgtgcccggcattgaaagaatgggccctggcatcgaccggctgggcggggccggcatggagaggatgggcgccggcctgggccacggcatggacagagtgggcagcgagattgaaagaatgggcctggtgatggacaggatgggctctgtggagaggatgggcagcggcatcgagaggatgggccccctgggcctggaccacatggccagcagcattgaaagaatgggccagaccatggagagaattggcagcggcgtggagaggatgggcgccggcatgggcttcggcctggagaggatggccgcccccatcgacagagtgggccagaccatcgagaggatgggcagcggcgtggagaggatgggccctgccatcgagaggatgggcctgtccatggagaggatggtgcctgctggcatgggcgccggcctggagaggatgggccctgtgatggacaggatggccaccggcctggagaggatgggcgccaacaacctggagaggatgggcctggagaggatgggcgccaacagcctggagaggatgggcctggagaggatgggcgccaacagcctggagaggatgggccctgccatgggccctgccctgggcgccggcatcgagaggatgggcctggccatgggcggcggcggcggggccagctttgaccgggccatcgagatggagcggggcaactttggaggcagctttgctggcagctttggaggagctgggggccacgcccctggggtggccaggaaggcctgccagatctttgtgaggaacctgccctttgacttcacctggaagatgctgaaggacaagttcaatgaatgtggccacgtgctgtatgctgacatcaagatggagaatggcaagagcaagggctgcggcgtggtgaagtttgagagccctgaggtggccgagcgggcctgcaggatgatgaatggcatgaagctgagcggccgggagattgatgtgagaattgacagaaatgcctag

SEQ ID NO: 160749 - DNA, 2193 bp, Artificial Sequence
  derived and/or modified sequence
atggccgccggcgtggaggccgccgccgaggtggccgccaccgagatcaaaatggaggaggaaagtggcgcaccgggagttccctcaggcaatggcgcacccggcccaaagggagagggcgaaagacccgctcaaaacgaaaagcggaaggagaagaatattaaacggggtgggaatagattcgaaccttacgccaatccaaccaaacgataccgcgcatttattactaatatccccttcgatgtgaagtggcagtctctgaaggacctcgttaaagagaaggtaggcgaagttacctatgtggagctgctgatggatgcagaagggaagtctcgggggtgtgcagtggtggaattcaagatggaggagtcaatgaaaaaggcagcagaagtcttaaacaaacactcactgtcaggacggcccctgaaggtaaaggaggatccggatggggagcatgcgcggagggcaatgcagaaggttatggctacaactggcggaatggggatgggaccaggcggccctgggatgatcaccatcccacccagcatccttaataatcccaatattcctaacgagataatccacgctctacaggcagggaggttaggcagtaccgtgttcgtcgccaatttggactacaaggtcggatggaaaaaactgaaagaagttttcagtatggctggtgtcgtggtccgcgcggatatcctggaagacaaagatggcaagtcacgaggaattggcacagtgacattcgaacaatctatcgaggcggtgcaagcaatctcaatgttcaacggccagcttcttttcgaccgaccaatgcatgtgaaaatggacgaaagggctttaccaaagggcgatttctttcccccagagaggccgcaacagctgccccacggcttgggcggaattggtatgggcctgggtcctggaggtcagccaattgatgccaatcacctcaataagggaatagggatgggtaatatcgggcctgctggtatggggatggagggtattgggttcggcattaacaagatggggggcatggagggacccttcgggggaggaatggaaaacatgggacgcttcggcagcggaatgaatatggggagaattaacgagattctgtcgaacgcgttgaagcggggagaaattattgcaaagcagggggggggtgggggaggagggagcgttccaggtattgagaggatggggcccggcattgacaggctcggcggagcaggcatggaaagaatgggagctggactaggccatgggatggatcgggtaggctccgagatcgaacgtatgggcctggtaatggataggatggggagcgtggagcgaatgggcagtgggattgaaaggatgggcccactgggtctggatcatatggcttctagcatcgagcgcatgggccagactatggagcgtattgggagcggtgtcgaacgcatgggagcgggtatggggttcggactggaacgaatggcagccccgattgacagagtaggtcagaccatcgagaggatgggtagtggagttgaacggatgggccctgccatcgaacgcatgggactgtctatggaacggatggtgccggcggggatgggggcaggactcgaacggatgggcccggtcatggataggatggcgacaggcttggaaaggatgggcgctaataacctggagcggatgggcctggaacggatgggggcaaactctttagagagaatggggctggagcgaatgggagcgaactctcttgaaaggatgggaccagctatgggacctgcactgggcgcaggcatcgagaggatgggccttgcaatgggggggggcggcggcgcatcctttgaccgagctattgaaatggagagagggaactttgggggctcattcgccggtagctttgggggagctggggggcacgctcctggtgtggcccggaaggcatgccagattttcgttagaaatctgccttttgatttcacgtggaagatgctgaaggataagttcaatgagtgcgggcatgtgctgtacgccgacattaaaatggagaatggaaagtcaaagggatgcggtgtggtgaagtttgaaagtccggaggtggcagagagggcctgtcgaatgatgaatggaatgaagctgtcagggagagaaattgacgtacgcattgaccgcaacgcctag

SEQ ID NO: 160750 - DNA, 2193 bp, Artificial Sequence
  derived and/or modified sequence
atggctgcaggagtggaagcagcagcggaagtcgcagccacagaaattaaaatggaagaggagtctggcgctcccggtgtcccctccggcaatggcgctcctggaccaaaaggagaaggtgaaagaccggcacaaaatgaaaaaagaaaagagaaaaatatcaaaaggggaggtaaccggtttgaaccttatgccaatccaaccaagaggtaccgcgcatttataaccaacattccgtttgatgtgaagtggcaatcattgaaagacctcgtgaaggagaaggtaggcgaggtgacttacgttgaactgctgatggacgctgagggcaaatcgcgagggtgtgccgttgtcgagtttaaaatggaagagtccatgaaaaaagctgcagaggttttgaataaacactcgctatctggcaggccgctcaaggtgaaagaggatccagatggagaacacgccaggcgtgcgatgcagaaagtgatggccaccactgggggtatgggtatgggccctggcggacccggaatgatcactatccctccgagcatcctaaacaatccaaacatcccgaacgagatcatccacgccctgcaggctgggagactaggaagtaccgtatttgtggccaatcttgattacaaggttggatggaagaaactgaaagaggtttttagtatggcaggggtagtggtgagggccgatattctcgaagataaagacggcaagagccggggtatcggcacagtgaccttcgaacagagcatcgaggccgttcaagccatttctatgttcaacggacaactgttgtttgatcgtccaatgcacgtcaaaatggacgagagagcgctgccaaagggggatttttttccgccagagcgtcctcagcagctaccgcatggacttggagggattgggatgggcttgggccctggaggtcaacctatcgacgccaatcatttaaataaggggattgggatggggaatatcgggcctgctgggatggggatggaagggatcggctttggaattaataagatgggcggaatggagggacctttcggagggggaatggaaaatatgggcagattcggaagtgggatgaatatgggcagaatcaatgaaattctgagcaatgccctcaagaggggggagattattgcgaagcagggaggaggcggagggggtggcagcgtccctggcattgagagaatgggaccaggcattgatagactgggcggagctggtatggagaggatgggggctggattaggacacggtatggaccgcgtcggatcagaaatcgaaagaatgggactggtcatggacaggatgggaagtgtcgaaagaatgggcagtggtatcgagcgaatgggaccgctcggattagaccacatggcgagctccatcgagcgcatgggacaaaccatggagcggatcggtagtggtgtggaaaggatgggagcaggcatggggttcggattggaaagaatggcagcccctatcgaccgggttggtcagacaattgagagaatgggaagcggagtcgagaggatgggcccagccatcgaacgtatgggcctcagcatggaaagaatggtccccgcaggtatgggcgctggattggagaggatggggccagtcatggatcgcatggctaccggcttggaacgcatgggtgctaataacctggaaaggatgggcctggaacggatgggcgcaaactcgctcgaaagaatgggtctagaacgtatgggggctaatagcctggaacgaatggggcctgcaatgggtccagctttaggcgctggcatagagaggatggggctggctatgggtgggggtggcggagcctctttcgatagagccatcgagatggagcgaggcaacttcgggggaagtttcgcaggctccttcggcggtgccggagggcatgctcctggagtcgcacgtaaagcctgccagatattcgtgaggaatttgcccttcgactttacttggaagatgcttaaagataaatttaacgagtgtgggcacgtgctctatgcagatataaaaatggagaacgggaagagcaaaggctgtggtgttgtaaaattcgagagtcccgaggtggcggagcgcgcatgccgaatgatgaacggtatgaagctttctggaagagagattgacgtacggatagacaggaatgcatag

SEQ ID NO: 160751 - DNA, 72 bp, Artificial Sequence
  derived and/or modified sequence
aagttcagccagcccgaggtggccgagggcatgagcagacagaacctgggcctgaagctgagaggcagatag

SEQ ID NO: 160752 - DNA, 72 bp, Artificial Sequence
  derived and/or modified sequence
aaattctcccagcctgaggtggcagagggcatgagtcgccaaaatctgggactgaaactcagagggcgatag

SEQ ID NO: 160753 - DNA, 72 bp, Artificial Sequence
  derived and/or modified sequence
aagttcagccagcctgaggtggccgagggcatgagccggcagaacctgggcctgaagctgcggggccgctag

SEQ ID NO: 160754 - DNA, 69 bp, Artificial Sequence
  derived and/or modified sequence
aagttctcccagcctgaggtagctgaggggatgtccaggcagaacttgggcctgaaactcagggggagg

SEQ ID NO: 160755 - DNA, 72 bp, Artificial Sequence
  derived and/or modified sequence
aaattctcccagccagaggtcgcggaagggatgtcccgacagaatctcgggctaaagttgagagggcgatag

SEQ ID NO: 160756 - protein, 375 aa, Artificial Sequence
  derived and/or modified sequence
MADHSFSDGVPSDSVEAAKNASNTEKLTDQVMQNPRVLAALQERLDNVPHTPSSYIETLPKAVKRRINALKQLQVRCAHIEAKFYEEVHDLERKYAALYQPLFDKRREFITGDVEPTDAESEWHSENEEEEKLAGDMKSKVVVTEKAAATAEEPDPKGIPEFWFTIFRNVDMLSELVQEYDEPILKHLQDIKVKFSDPGQPMSFVLEFHFEPNDYFTNSVLTKTYKMKSEPDKADPFSFEGPEIVDCDGCTIDWKKGKNVTVKTIKKKQKHKGRGTVRTITKQVPNESFFNFFNPLKASGDGESLDEDSEFTLASDFEIGHFFRERIVPRAVLYFTGEAIEDDDNFEEGEEGEEEELEGDEEGEDEDDAEINPKV

SEQ ID NO: 160757 - protein, 386 aa, Artificial Sequence
  derived and/or modified sequence
MADHSFSDGVPSDSVEAAKNASNTEKLTDQVMQNPRVLAALQERLDNVPHTPSSYIETLPKAVKRRINALKQLQVRCAHIEAKFYEEVHDLERKYAALYQPLFDKRREFITGDVEPTDAESEWHSENEEEEKLAGDMKSKVVVTEKAAATAEEPDPKGIPEFWFTIFRNVDMLSELVQEYDEPILKHLQDIKVKFSDPGQPMSFVLEFHFEPNDYFTNSVLTKTYKMKSEPDKADPFSFEGPEIVDCDGCTIDWKKGKNVTVKTIKKKQKHKGRGTVRTITKQVPNESFFNFFNPLKGKGQSKSKDEDSEFTLASDFEIGHFFRERIVPRAVLYFTGEAIEDDDNFEEGEEGEEEELEGDEEGEDEDDAEINPKKEPSQPAECKQQ

SEQ ID NO: 160758 - protein, 178 aa, Artificial Sequence
  derived and/or modified sequence
MADHSFSDGVPSDSVEAAKNASNTEKLTDQVMQNPRVLAALQERLDNVPHTPSSYIETLPKAVKRRINALKQLQVRCAHIEAKFYEEVHDLERKYAALYQPLFDKRREFITGDVEPTDAESEWHSENEEEEKLAGDMKSKVVVTEKAAATAEEPDPKGIPEFWFTIFRNVDMLSELVQ

SEQ ID NO: 160759 - protein, 386 aa, Artificial Sequence
  derived and/or modified sequence
MADHSFSDGVPSDSVEAAKNASNTEKLTDQVMQNPRVLAALQERLDNVPHTPSSYIETLPKAVKRRINALKQLQVRCAHIEAKFYEEVHDLERKYAALYQPLFDKRREFITGDVEPTDAESEWHSENEEEEKLAGDMKSKVVVTEKAAATAEEPDPKGIPEFWFTIFRNVDMLSELVQEYDEPILKHLQDIKVKFSDPGQPMSFVLEFHFEPNDYFTNSVLTKTYKMKSEPDKADPFSFEGPEIVDCDGCTIDWKKGKNVTVKTIKKKQKHKGRGTVRTITKQVPNESFFNFFNPLKASGDGESLDEDSEFTLASDFEIGHFFRERIVPRAVLYFTGEAIEDDDNFEEGEEGEEEELEGDEEGEDEDDAEINPKKEPSQPAECKQQ

SEQ ID NO: 160760 - protein, 128 aa, Artificial Sequence
  derived and/or modified sequence
MADHSFSDGVPSDSVEAAKNASNTEKLTDQVMQNPRVLAALQERLDNVPHTPSSYIETLPKAVKRRINALKQLQVRCAHIEAKFYEEVHDLERKYAALYQPLFDKRREFITGDVEPTDAESEWHSENE

SEQ ID NO: 160761 - protein, 140 aa, Artificial Sequence
  derived and/or modified sequence
MADHSFSDGVPSDSVEAAKNASNTEKLTDQVMQNPRVLAALQERLDNVPHTPSSYIETLPKAVKRRINALKQLQVRCAHIEAKFYEEVHDLERKYAALYQPLFDKRREFITGDVEPTDAESEWHSENEEEEKLAGDMKSK

SEQ ID NO: 160762 - protein, 133 aa, Artificial Sequence
  derived and/or modified sequence
MADHSFSDGVPSDSVEAAKNASNTEKLTDQVMQNPRVLAALQERLDNVPHTPSSYIETLPKAVKRRINALKQLQVRCAHIEAKFYEEVHDLERKYAALYQPLFDKRREFITGDVEPTDAESEWHSENEEEEKL

SEQ ID NO: 160763 - protein, 107 aa, Artificial Sequence
  derived and/or modified sequence
MADHSFSDGVPSDSVEAAKNASNTEKLTDQVMQNPRVLAALQERLDNVPHTPSSYIETLPKAVKRRINALKQLQVRCAHIEAKFYEEVHDLERKYAALYQPLFDKRR

SEQ ID NO: 160764 - protein, 78 aa, Artificial Sequence
  derived and/or modified sequence
MADHSFSDGVPSDSVEAAKNASNTEKLTDQVMQNPRVLAALQERLDNVPHTPSSYIETLPKAVKRRINALKQLQVRCA

SEQ ID NO: 160765 - DNA, 1128 bp, Artificial Sequence
  derived and/or modified sequence
atggccgaccactccttttccgacggtgttccgagcgacagtgttgaagctgcaaaaaatgcctcgaacactgaaaaactgactgatcaggtgatgcagaacccacgggttttagccgccctgcaagaaaggcttgacaatgtgccccacaccccatcaagctacattgagacacttcccaaagcagttaagagacgcattaatgcactgaagcagctgcaggtaaggtgcgcccacatcgaggcgaaattttatgaagaggtccacgatctggaaaggaagtacgccgcactgtatcaacccctctttgacaagcgaagagaattcattaccggtgatgttgagcctacggacgctgaatccgagtggcattccgagaatgaggaagaagagaagctggccggcgacatgaagtcaaaagtggtggtgactgaaaaagccgcggccactgcagaggaacccgacccaaaaggcattcccgagttctggtttacaatatttcgaaacgtggacatgctttctgaattggttcaggagtatgacgagccgatcctgaaacatctgcaggacataaaagtgaagttctcagaccccggtcagcccatgagttttgtgctagaatttcatttcgagcctaacgactacttcaccaacagtgttctgacaaagacctacaaaatgaaatcagagcctgataaagccgacccattttcattcgagggcccagaaattgtggattgcgatggatgtaccatcgattggaaaaagggcaagaatgtgaccgtaaagaccatcaagaaaaagcagaagcataagggtcgtggcacagtgaggacaatcaccaagcaagttccgaatgagtccttcttcaacttcttcaaccccctcaaggcttcaggggatggagagagcctagacgaggacagtgaattcacccttgcttccgacttcgagatcggccacttcttccgcgaacgcatagtgcctagggctgtgctctacttcaccggagaagccatcgaggatgatgataactttgaagagggtgaggaaggcgaagaggaggaattggagggggacgaggaaggggaggacgaggatgatgcggagataaatcccaaagtgtag

SEQ ID NO: 160766 - DNA, 1161 bp, Artificial Sequence
  derived and/or modified sequence
atggcagatcacagtttttctgatggcgtgccttcagactcagtggaggccgccaaaaacgcgtcaaacactgaaaagctaacagaccaggtgatgcagaatccaagggtcttagcagctttgcaggaacgactagataacgttccccatacccccagtagctacattgagactcttcctaaagctgtcaaaaggagaattaacgcgttaaagcaactgcaagtaagatgtgcccatattgaggcgaagttctacgaggaggtacatgatctggagcgcaagtatgccgccctctaccagcctctgtttgataagcgtagagaatttatcaccggagacgttgagcctactgacgccgaaagcgagtggcactcagaaaacgaggaggaagagaagttggccggggatatgaagtccaaggtggtggtgaccgagaaagcagccgcaaccgccgaagagcccgatcctaagggcatcccggagttctggttcacaatcttccgcaacgtagacatgttgagcgagctggtgcaggagtacgacgagccgattctcaagcacctgcaggacattaaggtgaaattcagcgatccaggccagcctatgtcttttgtgctcgagtttcacttcgaaccaaatgattacttcaccaattccgtcttgacaaaaacatacaagatgaaatctgagccggataaggcagatccgttcagctttgaggggccagagattgtggattgcgatggttgtacaattgattggaaaaagggcaaaaacgtgactgtgaagaccataaaaaaaaagcagaaacataaaggccgcggcaccgtgcgaactattaccaaacaagtgccaaacgaaagtttctttaacttttttaaccccctgaaggggaaagggcagtcgaagtcgaaggatgaagattccgaatttacactggccagtgactttgaaataggccatttcttcagagagagaatcgtgccgcgtgccgttctctatttcacaggtgaagccatcgaagacgacgacaatttcgaagaaggcgaggaaggcgaagaagaagagctggaaggcgatgaggagggggaagacgaggatgatgctgagataaaccctaagaaagagccatcgcagccggcggaatgcaagcaacagtag

SEQ ID NO: 160767 - DNA, 537 bp, Artificial Sequence
  derived and/or modified sequence
atggctgaccactccttttccgatggtgtacccagtgacagtgttgaagccgcgaagaatgcatctaataccgaaaaacttactgatcaggtcatgcaaaatccaagagtactcgctgctctgcaagagaggctcgacaatgtgccacatacaccatcgtcctacattgagaccctgccgaaggccgtcaaacgcagaattaacgccctgaaacagctacaagtccgatgtgcacacatcgaagctaaattttacgaagaggttcacgatctggaacggaagtacgccgccctgtatcagcctctgtttgacaagcggagagagtttataacgggtgatgtggaacccaccgatgcagaatcagagtggcattctgagaatgaagaagaagagaagcttgcaggcgacatgaaatccaaagtcgtggtcacagaaaaagctgccgctaccgcggaagaacccgatcccaagggaatccccgagttctggtttacgatattcaggaatgttgatatgctcagcgaactggttcaatag

SEQ ID NO: 160768 - DNA, 1161 bp, Artificial Sequence
  derived and/or modified sequence
atggccgatcacagttttagcgacggggtccctagcgacagcgtggaagcagcaaagaacgcttcaaacactgaaaaactgacagaccaagtgatgcagaatccacgtgttctggctgcactccaggaaaggctggataacgtcccccatacacctagctcctatatcgagaccctccccaaggccgtgaagcgacggatcaatgctctgaagcagttgcaagtccgctgtgcccacatcgaggccaaattctacgaggaggttcacgacctggaacgaaaatacgcagccctttaccagcccctatttgataaaagacgcgaattcatcacaggtgatgtggagcccaccgacgccgagtccgaatggcatagtgagaatgaagaagaagaaaagctggcgggcgatatgaaaagcaaagtggttgtgaccgagaaagcggccgcgaccgccgaggaaccagacccaaagggcattcctgaattctggtttactatcttccgcaatgtagatatgctcagcgagctggtgcaagagtacgatgagcccatccttaagcacctacaggatatcaaagttaaattctccgatcccggacagccaatgagctttgtcctggaatttcacttcgagccaaacgattatttcactaatagcgttctgacaaagacctacaagatgaaaagcgagcccgataaggccgatccattttcgtttgaaggccccgaaatcgtagactgcgatgggtgcaccatagattggaagaagggcaagaacgttacagtaaagaccattaaaaagaagcagaagcacaagggcaggggtactgtccgcactatcacaaagcaggtgccaaacgagtccttttttaactttttcaacccattgaaagcctcgggagatggggagagcctagacgaagacagtgagttcaccctggcctctgacttcgaaatcggtcatttctttcgggaaaggattgttccacgtgccgtactgtatttcaccggagaggcaatcgaagacgatgataacttcgaggagggagaagagggtgaggaggaagagctcgaaggcgacgaagaaggggaggacgaagacgacgccgaaatcaaccctaaaaaagagccttcccagcctgccgaatgtaagcagcagtag

SEQ ID NO: 160769 - DNA, 387 bp, Artificial Sequence
  derived and/or modified sequence
atggcggaccacagtttttcagacggagtgccctcagactcagtggaagctgctaagaatgctagtaacaccgagaaactgacagaccaggtgatgcagaatcctagggtgctggccgcactacaagagaggctagataatgtgccccatacaccttcttcatatatcgaaaccctcccaaaggcagtcaagagacggataaatgcgctcaagcagcttcaagtaagatgcgcccacatcgaagccaagttctatgaggaagtgcacgacttagaaagaaagtatgctgctctttatcaaccactgtttgacaaacgacgcgagttcattactggagatgtggaacctactgacgctgagagcgagtggcattcagagaatgagtag

SEQ ID NO: 160770 - DNA, 423 bp, Artificial Sequence
  derived and/or modified sequence
atggccgaccatagctttagcgatggcgtgccttctgattctgtggaggccgccaaaaacgcgagtaacacagaaaaattaacagaccaggtgatgcagaatcccagagttctggctgctctacaagaacggctagacaacgtgccacacactccttcctcctacatcgaaacactccccaaggccgtgaaacggcgcatcaacgccctgaagcaactccaagtgagatgtgcccatattgaagcaaaattctacgaggaggttcacgacctagagcgaaagtatgccgccctttatcagcccctgttcgataaacgccgcgaattcatcacaggagatgtggaacctaccgatgctgaatccgaatggcactccgagaacgaagaggaagagaaactggccggagatatgaagtcaaaatag

SEQ ID NO: 160771 - DNA, 402 bp, Artificial Sequence
  derived and/or modified sequence
atggcagatcatagctttagtgatggcgtcccatccgacagtgtggaggctgcaaaaaacgccagcaacactgagaaattaacggaccaggtgatgcagaatcctcgagtcctcgcagcactgcaagaaaggctggacaatgtacctcatacgccctcttcgtatatcgaaactctacccaaggccgtgaaacgtcgtattaatgccctaaagcagctccaggttcggtgtgcgcatattgaagcaaaattttacgaggaggtgcacgacttagaacgcaaatatgcagccctgtaccaaccactgttcgataaacggcgggagtttatcacaggtgatgttgaacctactgacgctgagagcgaatggcactccgagaacgaggaagaggagaaactatag

SEQ ID NO: 160772 - DNA, 324 bp, Artificial Sequence
  derived and/or modified sequence
atggctgatcactcctttagtgacggcgtcccaagtgattctgttgaagctgcaaagaatgcgagcaacaccgagaagttgactgatcaagtgatgcagaatccacgcgtgctggctgcccttcaagaacgtcttgataatgtgccacacaccccatcgtcttatatcgagacactgcctaaggctgtgaagcggcggatcaatgccctgaaacaactgcaagttcggtgcgcacatatcgaggcgaagttctacgaggaggtgcatgatctggagagaaaatacgctgccctataccaaccactgttcgataagagacgttag

SEQ ID NO: 160773 - DNA, 237 bp, Artificial Sequence
  derived and/or modified sequence
atggctgaccattcctttagcgatggtgttccatctgactcagttgaggctgctaagaatgcaagcaacaccgagaaactgaccgaccaagtgatgcaaaacccacgggtattagccgcgttgcaagaacggctggataacgtgccccatacacctagtagttacattgaaaccttaccgaaggctgttaagagacgaattaatgcactgaaacagctgcaagtcagatgtgcttag

SEQ ID NO: 160774 - DNA, 1128 bp, Artificial Sequence
  derived and/or modified sequence
atggctgaccacagcttcagtgatggagtgcccagcgacagcgtggaggccgccaagaatgccagcaacacagagaagctgacagaccaggtgatgcagaacccccgggtgctggccgccctgcaggagcggctggacaacgtgccccacacccccagcagctacatcgagaccctgcccaaggctgtgaagaggcgcatcaatgccctgaagcagctgcaggtgcgctgtgcccacatcgaggccaagttctatgaggaggtgcatgacctggagaggaaatatgctgccctgtaccagcccctgtttgacaagaggcgggagttcatcactggagatgtggagcccacagatgctgagagcgagtggcacagtgaaaatgaggaggaggagaagctggccggggacatgaagagcaaggtggtggtgacagagaaggccgccgccacagctgaggagccagaccccaagggcatccctgagttctggttcaccatcttcagaaatgtggacatgctgtctgagctggtgcaggagtatgatgagcccatcctgaagcacctgcaggacatcaaggtgaagttcagtgaccccggccagcccatgagctttgtgctggagttccactttgagcccaatgactacttcaccaacagcgtgctgaccaagacctacaagatgaagtctgagccagacaaggctgaccccttctcctttgagggccctgagatcgtggactgtgatggctgcaccatcgactggaagaagggcaagaatgtgacagtgaagaccatcaagaagaagcagaagcacaagggccggggcaccgtgaggaccatcaccaagcaggtgcccaatgaaagcttcttcaacttcttcaaccccctgaaggccagcggagatggagagagcctggatgaagattctgagttcaccctggccagtgactttgaaattggccacttcttccgggagagaattgtgcccagggctgtgctgtacttcaccggggaggccattgaagatgatgacaactttgaggagggggaggagggggaggaggaggagctggagggagatgaggagggggaggatgaagatgatgctgagatcaaccccaaggtgtag

SEQ ID NO: 160775 - DNA, 1161 bp, Artificial Sequence
  derived and/or modified sequence
atggctgaccacagcttcagtgatggagtgcccagcgacagcgtggaggccgccaagaatgccagcaacacagagaagctgacagaccaggtgatgcagaacccccgggtgctggccgccctgcaggagcggctggacaacgtgccccacacccccagcagctacatcgagaccctgcccaaggctgtgaagaggcgcatcaatgccctgaagcagctgcaggtgcgctgtgcccacatcgaggccaagttctatgaggaggtgcatgacctggagaggaaatatgctgccctgtaccagcccctgtttgacaagaggcgggagttcatcactggagatgtggagcccacagatgctgagagcgagtggcacagtgaaaatgaggaggaggagaagctggccggggacatgaagagcaaggtggtggtgacagagaaggccgccgccacagctgaggagccagaccccaagggcatccctgagttctggttcaccatcttcagaaatgtggacatgctgtctgagctggtgcaggagtatgatgagcccatcctgaagcacctgcaggacatcaaggtgaagttcagtgaccccggccagcccatgagctttgtgctggagttccactttgagcccaatgactacttcaccaacagcgtgctgaccaagacctacaagatgaagtctgagccagacaaggctgaccccttctcctttgagggccctgagatcgtggactgtgatggctgcaccatcgactggaagaagggcaagaatgtgacagtgaagaccatcaagaagaagcagaagcacaagggccggggcaccgtgaggaccatcaccaagcaggtgcccaatgaaagcttcttcaacttcttcaaccccctgaagggcaagggccagagcaagagcaaggatgaagattctgagttcaccctggccagtgactttgaaattggccacttcttccgggagagaattgtgcccagggctgtgctgtacttcaccggggaggccattgaagatgatgacaactttgaggagggggaggagggggaggaggaggagctggagggagatgaggagggggaggatgaagatgatgctgagatcaaccccaagaaggagcccagccagcctgctgagtgcaagcagcagtag

SEQ ID NO: 160776 - DNA, 537 bp, Artificial Sequence
  derived and/or modified sequence
atggctgaccacagcttcagtgatggagtgcccagcgacagcgtggaggccgccaagaatgccagcaacacagagaagctgacagaccaggtgatgcagaacccccgggtgctggccgccctgcaggagcggctggacaacgtgccccacacccccagcagctacatcgagaccctgcccaaggctgtgaagaggcgcatcaatgccctgaagcagctgcaggtgcgctgtgcccacatcgaggccaagttctatgaggaggtgcatgacctggagaggaaatatgctgccctgtaccagcccctgtttgacaagaggcgggagttcatcactggagatgtggagcccacagatgctgagagcgagtggcacagtgaaaatgaggaggaggagaagctggccggggacatgaagagcaaggtggtggtgacagagaaggccgccgccacagctgaggagccagaccccaagggcatccctgagttctggttcaccatcttcagaaatgtggacatgctgtctgagctggtgcagtag

SEQ ID NO: 160777 - DNA, 1161 bp, Artificial Sequence
  derived and/or modified sequence
atggctgaccacagcttcagtgatggagtgcccagcgacagcgtggaggccgccaagaatgccagcaacacagagaagctgacagaccaggtgatgcagaacccccgggtgctggccgccctgcaggagcggctggacaacgtgccccacacccccagcagctacatcgagaccctgcccaaggctgtgaagaggcgcatcaatgccctgaagcagctgcaggtgcgctgtgcccacatcgaggccaagttctatgaggaggtgcatgacctggagaggaaatatgctgccctgtaccagcccctgtttgacaagaggcgggagttcatcactggagatgtggagcccacagatgctgagagcgagtggcacagtgaaaatgaggaggaggagaagctggccggggacatgaagagcaaggtggtggtgacagagaaggccgccgccacagctgaggagccagaccccaagggcatccctgagttctggttcaccatcttcagaaatgtggacatgctgtctgagctggtgcaggagtatgatgagcccatcctgaagcacctgcaggacatcaaggtgaagttcagtgaccccggccagcccatgagctttgtgctggagttccactttgagcccaatgactacttcaccaacagcgtgctgaccaagacctacaagatgaagtctgagccagacaaggctgaccccttctcctttgagggccctgagatcgtggactgtgatggctgcaccatcgactggaagaagggcaagaatgtgacagtgaagaccatcaagaagaagcagaagcacaagggccggggcaccgtgaggaccatcaccaagcaggtgcccaatgaaagcttcttcaacttcttcaaccccctgaaggccagcggagatggagagagcctggatgaagattctgagttcaccctggccagtgactttgaaattggccacttcttccgggagagaattgtgcccagggctgtgctgtacttcaccggggaggccattgaagatgatgacaactttgaggagggggaggagggggaggaggaggagctggagggagatgaggagggggaggatgaagatgatgctgagatcaaccccaagaaggagcccagccagcctgctgagtgcaagcagcagtag

SEQ ID NO: 160778 - DNA, 387 bp, Artificial Sequence
  derived and/or modified sequence
atggctgaccacagcttcagtgatggagtgcccagcgacagcgtggaggccgccaagaatgccagcaacacagagaagctgacagaccaggtgatgcagaacccccgggtgctggccgccctgcaggagcggctggacaacgtgccccacacccccagcagctacatcgagaccctgcccaaggctgtgaagaggcgcatcaatgccctgaagcagctgcaggtgcgctgtgcccacatcgaggccaagttctatgaggaggtgcatgacctggagaggaaatatgctgccctgtaccagcccctgtttgacaagaggcgggagttcatcactggagatgtggagcccacagatgctgagagcgagtggcacagtgaaaatgaatag

SEQ ID NO: 160779 - DNA, 423 bp, Artificial Sequence
  derived and/or modified sequence
atggctgaccacagcttcagtgatggagtgcccagcgacagcgtggaggccgccaagaatgccagcaacacagagaagctgacagaccaggtgatgcagaacccccgggtgctggccgccctgcaggagcggctggacaacgtgccccacacccccagcagctacatcgagaccctgcccaaggctgtgaagaggcgcatcaatgccctgaagcagctgcaggtgcgctgtgcccacatcgaggccaagttctatgaggaggtgcatgacctggagaggaaatatgctgccctgtaccagcccctgtttgacaagaggcgggagttcatcactggagatgtggagcccacagatgctgagagcgagtggcacagtgaaaatgaggaggaggagaagctggccggggacatgaagagcaagtag

SEQ ID NO: 160780 - DNA, 402 bp, Artificial Sequence
  derived and/or modified sequence
atggctgaccacagcttcagtgatggagtgcccagcgacagcgtggaggccgccaagaatgccagcaacacagagaagctgacagaccaggtgatgcagaacccccgggtgctggccgccctgcaggagcggctggacaacgtgccccacacccccagcagctacatcgagaccctgcccaaggctgtgaagaggcgcatcaatgccctgaagcagctgcaggtgcgctgtgcccacatcgaggccaagttctatgaggaggtgcatgacctggagaggaaatatgctgccctgtaccagcccctgtttgacaagaggcgggagttcatcactggagatgtggagcccacagatgctgagagcgagtggcacagtgaaaatgaggaggaggagaagctgtag

SEQ ID NO: 160781 - DNA, 324 bp, Artificial Sequence
  derived and/or modified sequence
atggctgaccacagcttcagtgatggagtgcccagcgacagcgtggaggccgccaagaatgccagcaacacagagaagctgacagaccaggtgatgcagaacccccgggtgctggccgccctgcaggagcggctggacaacgtgccccacacccccagcagctacatcgagaccctgcccaaggctgtgaagaggcgcatcaatgccctgaagcagctgcaggtgcgctgtgcccacatcgaggccaagttctatgaggaggtgcatgacctggagaggaaatatgctgccctgtaccagcccctgtttgacaagagaagatag

SEQ ID NO: 160782 - DNA, 237 bp, Artificial Sequence
  derived and/or modified sequence
atggctgaccacagcttcagtgatggagtgcccagcgacagcgtggaggccgccaagaatgccagcaacacagagaagctgacagaccaggtgatgcagaacccccgggtgctggccgccctgcaggagcggctggacaacgtgccccacacccccagcagctacatcgagaccctgcccaaggctgtgaagaggcgcatcaatgccctgaagcagctgcaggtgcgctgtgcctag

SEQ ID NO: 160783 - DNA, 1128 bp, Artificial Sequence
  derived and/or modified sequence
atggccgaccacagcttcagcgacggcgtgcccagcgacagcgtggaagctgcaaagaatgcatccaacacagaaaaactgacagaccaagttatgcagaacccgagggtgctcgccgctttacaagagcgcttggataacgttcctcatactccttcatcgtatatcgaaaccctgccaaaggcagtgaaaagacggattaatgccctgaagcaactacaagtcagatgcgctcacatcgaggccaagttctacgaggaagttcatgacttggaacgtaagtacgccgcactttatcagccactcttcgataaacgaagggagtttattacaggagatgtagagccaacagatgcagaatcagagtggcacagcgaaaatgaggaggaggaaaaactggctggggatatgaagtcaaaagtcgtggttacagaaaaggcagccgccaccgccgaagagcctgatcctaaagggataccagagttctggttcaccatctttcggaatgtggatatgctcagtgagctcgtccaggagtatgacgaaccgatcctaaagcaccttcaggacataaaggtgaaattctcggaccctggacagcccatgtctttcgtgcttgaatttcacttcgagcccaacgactattttactaatagcgtactgacaaaaacctataagatgaaatcagaacccgacaaagcagaccctttctcctttgagggacctgagattgtcgattgcgacgggtgtactattgattggaagaagggaaagaacgttacagtgaaaacgatcaaaaagaaacagaaacataagggacgcggcaccgtacgtaccattaccaagcaggtgcccaacgaaagtttcttcaatttctttaatcccctgaaagccagcggggatggcgagagtctcgacgaggactccgagttcactctcgcttccgactttgagattgggcatttctttcgcgaacggatcgttccacgagccgtgctgtatttcaccggcgaagcaattgaagatgacgacaacttcgaagaaggcgaggagggggaggaggaagaactggagggcgacgaagaaggggaagatgaagacgatgccgagatcaaccccaaggtatag

SEQ ID NO: 160784 - DNA, 1161 bp, Artificial Sequence
  derived and/or modified sequence
atggccgaccacagcttcagcgacggcgtgcccagcgacagcgtggaagcggctaagaacgcttctaacactgagaagttgacagaccaggtgatgcagaacccccgagtgctggcagctctacaggaacggctggataacgttccccacaccccctcctcctatattgagaccctgcccaaagcagtcaagcgtcgaattaatgcactcaaacaattgcaggtgaggtgtgcccacattgaggcgaaattttatgaagaggtgcatgatctggaacggaaatatgcagcgttgtatcagcctcttttcgacaaacggcgcgaattcattacaggcgacgttgagccaacagacgcggagagcgagtggcatagcgaaaacgaggaggaggaaaagttagccggggatatgaaaagcaaggtagtggtcacagagaaggctgcagccaccgctgaagaacctgatccaaaaggaatccccgaattttggtttaccatttttcgcaatgttgacatgctgtccgaactggtgcaagagtatgatgaacccatcttgaagcacctgcaggacattaaagtgaaatttagcgaccccggacagccaatgagttttgtgttagaattccacttcgagccgaatgattacttcacaaattcagttcttacaaagacctacaaaatgaaaagcgaacctgataaggcagatcctttttcttttgagggaccagagatcgtggactgtgacgggtgcacaattgactggaagaaggggaagaacgtcaccgtgaagactattaagaagaaacaaaagcataaagggcgagggactgttcgtacgattaccaagcaagtgcccaacgagagctttttcaacttctttaacccactgaagggcaaaggtcagtcaaagagcaaagatgaagactccgagtttactcttgcctccgactttgagattgggcatttcttcagagagcggatcgtaccacgagccgttttatacttcacgggcgaagcaattgaggatgatgataattttgaagaaggagaggaaggcgaagaggaggagctggagggggacgaggagggagaagacgaagacgacgctgagattaatcccaagaaagagccctctcaaccagccgaatgcaagcagcagtag

SEQ ID NO: 160785 - DNA, 537 bp, Artificial Sequence
  derived and/or modified sequence
atggccgaccacagcttcagcgacggcgtgcccagcgacagcgtggaagcagcaaagaatgcctccaatacagaaaagttgacagaccaggtaatgcagaatccccgggtgcttgcagccctccaggagcgcctggataacgttcctcatacaccaagctcttacatcgaaacgctaccaaaggcggtcaaacggcggatcaacgctctgaagcaactgcaggtcaggtgcgcccacattgaagcaaagttctatgaggaagtccatgacctcgaacgcaagtacgctgccctctatcagccactgttcgataaacgccgcgagttcatcactggggacgtggagcccacagatgccgaatctgagtggcactcagagaatgaagaagaggaaaaactggcaggagacatgaagagcaaagtagtcgtgaccgaaaaagcagctgctactgccgaggagccggaccctaaaggaatcccagagttttggttcaccatctttaggaacgtcgatatgctgtctgagctggtgcagtag

SEQ ID NO: 160786 - DNA, 1161 bp, Artificial Sequence
  derived and/or modified sequence
atggccgaccacagcttcagcgacggcgtgcccagcgacagcgtggaagcggcgaagaacgccagtaatacagagaaacttaccgatcaagttatgcagaatcctcgagtactggcagccctgcaagagaggctagataacgtgccccatactcccagtagctacatcgagacactgcccaaggccgtgaaacgcaggataaacgctttaaagcagttgcaggtacgctgcgcacacattgaagcaaaattttacgaagaggtccatgacctggagcgcaagtacgctgccctataccagcctctttttgataaaaggcgcgagtttatcaccggggatgtggagcctaccgacgccgaatcagagtggcattctgaaaacgaagaagaagaaaagctggcaggggacatgaaatccaaggtcgtagtaacagagaaggcagccgccactgccgaagaacccgacccgaagggtatcccagagttttggttcacgattttccgaaatgtggacatgctgtcagaactcgtgcaggagtacgatgagccaatactgaagcacctccaggacatcaaagtgaaattcagtgaccccggccagcctatgtcttttgtgctggaattccatttcgagcctaacgactactttacaaacagcgtgctcactaagacttacaaaatgaagagcgagcctgataaggccgacccattctcattcgagggccccgagattgtggattgtgacgggtgcaccattgattggaaaaaaggcaagaacgtgactgtcaaaaccatcaagaagaaacagaagcataaaggccgaggaacggtaaggaccattaccaaacaagtgcccaatgagtcattctttaattttttcaaccccttgaaggccagtggcgatggggagtctctcgacgaagacagtgagttcactctggccagcgatttcgagattggacacttctttagagaaaggattgtgccacgcgccgtcctgtacttcacgggggaggccatcgaggacgacgataatttcgaagagggggaggaaggcgaggaggaagagctagagggtgatgaagagggcgaggacgaagatgatgcggagattaatcccaagaaggagccctcacagcccgcagaatgtaaacaacaatag

SEQ ID NO: 160787 - DNA, 387 bp, Artificial Sequence
  derived and/or modified sequence
atggccgaccacagcttcagcgacggcgtgcccagcgacagcgtggaagcggccaaaaatgctagtaatactgagaaactgaccgaccaggtgatgcagaaccctagagtgttggcggcactgcaagagcgcctggacaatgtccctcacaccccgtcttcctatatcgaaaccttacctaaggctgtgaagagacgcattaatgcgctcaagcagctccaagtcaggtgcgcccatatagaggctaaattttacgaagaagtccacgatctggaacggaaatatgctgctctgtatcagcctttgttcgacaaacggcgtgagttcattaccggagatgtggaaccaacagacgccgaatccgaatggcattcagagaatgagtag

SEQ ID NO: 160788 - DNA, 423 bp, Artificial Sequence
  derived and/or modified sequence
atggccgaccacagcttcagcgacggcgtgcccagcgacagcgtggaagccgctaaaaatgcctctaataccgaaaagctgactgatcaggtgatgcagaatccaagagtgctggctgcgcttcaggagagacttgacaatgttcctcacacgccaagcagttacattgagactctcccaaaggcagtgaaaagacgaattaatgctctgaaacagctacaggttcgctgcgcccacatcgaggcaaaattctatgaagaggtgcacgacttagaaagaaaatatgcggcactgtaccagcccctctttgacaaacgtcgcgagtttataactggagatgtggaacctaccgatgcagagtcagaatggcacagcgaaaatgaggaggaagagaaattggccggggacatgaaatctaaatag

SEQ ID NO: 160789 - DNA, 402 bp, Artificial Sequence
  derived and/or modified sequence
atggccgaccacagcttcagcgacggcgtgcccagcgacagcgtggaagccgctaagaacgcgtcaaacaccgagaaactaaccgatcaggtaatgcagaatccccgtgtcctggctgcactgcaggaaagactggataatgtgcctcacacaccttcgagctatatagagaccttgcccaaggcagtcaagaggagaatcaacgccctgaaacagctgcaagtgcgatgcgcgcacatcgaggctaagttctatgaggaagttcacgacctggaacgcaagtacgctgctctttaccaacctctgttcgacaagcggcgagaattcatcaccggagatgtggaaccaactgatgccgagtccgaatggcacagtgaaaacgaggaagaggaaaagctgtag

SEQ ID NO: 160790 - DNA, 324 bp, Artificial Sequence
  derived and/or modified sequence
atggccgaccacagcttcagcgacggcgtgcccagcgacagcgtggaagctgccaaaaacgcctctaatactgaaaaattaaccgatcaggtaatgcagaacccaagagtactcgccgcactccaggaaaggctggataacgtcccgcatacaccctcatcctacatcgagactctgccaaaagccgtaaaaaggaggatcaatgctctgaagcagctgcaggtccgctgcgcacatatcgaagccaaattttacgaggaagtgcacgaccttgagagaaaatacgctgccctctaccaaccactctttgacaaacggagatag

SEQ ID NO: 160791 - DNA, 237 bp, Artificial Sequence
  derived and/or modified sequence
atggccgaccacagcttcagcgacggcgtgcccagcgacagcgtggaagcagctaagaatgccagtaatacagaaaagctgacagatcaagtcatgcagaaccctcgtgtcctggccgccttacaggaaagactagacaacgtccctcacaccccaagctcttacattgagacccttcccaaggccgtcaaacggaggattaatgccctgaagcaacttcaggttcggtgtgcatag

SEQ ID NO: 160792 - DNA, 2511 bp, Artificial Sequence
  derived and/or modified sequence
cttgctcgcggagagaggagctaggagcctcggccaatgggagccggcgttgttggaggccacggcggcgcagccccaaagcgagcgaagctagggtcgccgccactgccgcaggaggcgtgaggggataaaaacattcagatggcagatcacagtttttcagatggggttccttcagattccgtggaagctgctaaaaatgcaagtaacacagaaaagctcacagatcaggtgatgcagaatcctcgagttctggcagctttacaggagcgacttgacaatgtccctcacaccccttccagctacatcgaaactttacctaaagcagtaaaaagaagaattaatgcattgaaacaacttcaggtgagatgtgctcacatagaagccaagttctatgaagaggtacatgacttggaaagaaagtatgcagcgctataccagcctctctttgacaagagaagagaatttatcaccggcgatgttgaaccaacagatgcggaatcggaatggcacagtgaaaatgaagaggaagagaaattggctggagacatgaaaagtaaagtagtcgtcacagaaaaagcagcggcaacggctgaagagccagatcccaaaggaattccagagttctggtttaccatcttcagaaatgtggacatgctgagtgaattagtccaggaatatgatgaaccaatcttgaaacacctgcaggatattaaagtgaaattttctgaccctggacagcctatgtcttttgtgttagagttccactttgaacccaacgactactttaccaactcagtcctgacaaaaacctacaagatgaaatcagaaccagataaggctgatcccttttcctttgaaggtcctgagattgtggactgtgacgggtgtactattgactggaagaaaggaaagaatgttactgtcaaaaccatcaagaaaaagcagaagcataagggtcgaggcactgttagaacaattacgaaacaagtacccaatgagtcctttttcaacttcttcaatccattgaaagcatccggggatggagaatcactggatgaagattctgaattcacattagcctctgattttgaaattggacactttttccgtgagcggatagtcccgcgggctgtgctgtacttcactggggaggccatagaagatgatgacaattttgaagaaggtgaagaaggagaagaggaggaattagaaggtgacgaggagggagaagacgaggatgatgcggaaattaaccccaaggtgtaatttttgtctgttaatcattcatacgtttctagaaggaacccagccagccggcggaatgcaagcagcagtaggaagcggaggcgggtgcctggcagaccggctgtcgggactccaggcctgtgggcggggcctcggtccttgccgcagcacaatcccgtggacagagcttactccatctaactcgttttcaagtgcatgattttcactttcacttttcctttttccttattattttgcttaacttgtacagtggcaactgaaatgcatttcagaaataggaggtttcgtccagcaccctctgcagccttggtgcctgtagctctggacttccctgggcctttccctgtgggagggccctgtagaccacatcagggtggggtgggggtcacttggcaaaaagggccgaggtctggtgatgtggttcccaggatctggaacctctcccacccctcctgcagttggactgaattcttccctttcatccgaagaaacccacttgctgtttccagccgctgaatctgctgagtgtgcagcctgcatcacctgctgtatgccgatcatctcagaaagggctgtgtagagtagggccctgttctccttaggatgttgcttcttgatttttttttttttttaggggtgggtcagggttgtgacacaccagcccaggtgagagctgctgcgggtcacctcatatttatttatcccttcttgcctgtgaggactgcggcttttcgctgtggctcgtccttaacgtttctgaaccaccttggtgccctgagcaggaagatgtgccacttcctagcaggcgcaaggcctgtgcggaagaaacgccgctccctgccaccagggctgaagatgcgagcccgtcctcatgacgcaggcgccaccctgctgccggagccgggcttcggcagtcttctccactgagggactgggctgggaagtcctgcgtttcagtggagcgtatgagcgtcaagtcctgctttctcagtagccccattgcggggccccaccattcatcctgtctgaaggtcctgggtttggtgtgaccgcttggcggctggtgggtggggttttcaagtgggtgacggcgctctccggcagccggggatggccgtgtccgcactgaccaggcctgtggagagtgctcggcctaaccttagaacacatttgtaactgaatacagtgttttcaatttgtacagaatagttagaatattctattaaagtggtgaaacattga

SEQ ID NO: 160793 - DNA, 2479 bp, Artificial Sequence
  derived and/or modified sequence
cttgctcgcggagagaggagctaggagcctcggccaatgggagccggcgttgttggaggccacggcggcgcagccccaaagcgagcgaagctagggtcgccgccactgccgcaggaggcgtgaggggataaaaacattcagatggcagatcacagtttttcagatggggttccttcagattccgtggaagctgctaaaaatgcaagtaacacagaaaagctcacagatcaggtgatgcagaatcctcgagttctggcagctttacaggagcgacttgacaatgtccctcacaccccttccagctacatcgaaactttacctaaagcagtaaaaagaagaattaatgcattgaaacaacttcaggtgagatgtgctcacatagaagccaagttctatgaagaggtacatgacttggaaagaaagtatgcagcgctataccagcctctctttgacaagagaagagaatttatcaccggcgatgttgaaccaacagatgcggaatcggaatggcacagtgaaaatgaagaggaagagaaattggctggagacatgaaaagtaaagtagtcgtcacagaaaaagcagcggcaacggctgaagagccagatcccaaaggaattccagagttctggtttaccatcttcagaaatgtggacatgctgagtgaattagtccaggaatatgatgaaccaatcttgaaacacctgcaggatattaaagtgaaattttctgaccctggacagcctatgtcttttgtgttagagttccactttgaacccaacgactactttaccaactcagtcctgacaaaaacctacaagatgaaatcagaaccagataaggctgatcccttttcctttgaaggtcctgagattgtggactgtgacgggtgtactattgactggaagaaaggaaagaatgttactgtcaaaaccatcaagaaaaagcagaagcataagggtcgaggcactgttagaacaattacgaaacaagtacccaatgagtcctttttcaacttcttcaatccattgaaaggcaaggggcagagtaaatcaaaagatgaagattctgaattcacattagcctctgattttgaaattggacactttttccgtgagcggatagtcccgcgggctgtgctgtacttcactggggaggccatagaagatgatgacaattttgaagaaggtgaagaaggagaagaggaggaattagaaggtgacgaggagggagaagacgaggatgatgcggaaattaaccccaagaaggaacccagccagccggcggaatgcaagcagcagtaggaagcggaggcgggtgcctggcagaccggctgtcgggactccaggcctgtgggcggggcctcggtccttgccgcagcacaatcccgtggacagagcttactccatctaactcgttttcaagtgcatgattttcactttcacttttcctttttccttattattttgcttaacttgtacagtggcaactgaaatgcatttcagaaataggaggtttcgtccagcaccctctgcagccttggtgcctgtagctctggacttccctgggcctttccctgtgggagggccctgtagaccacatcagggtggggtgggggtcacttggcaaaaagggccgaggtctggtgatgtggttcccaggatctggaacctctcccacccctcctgcagttggactgaattcttccctttcatccgaagaaacccacttgctgtttccagccgctgaatctgctgagtgtgcagcctgcatcacctgctgtatgccgatcatctcagaaagggctgtgtagagtagggccctgttctccttaggatgttgcttcttgatttttttttttttttaggggtgggtcagggttgtgacacaccagcccaggtgagagctgctgcgggtcacctcatatttatttatcccttcttgcctgtgaggactgcggcttttcgctgtggctcgtccttaacgtttctgaaccaccttggtgccctgagcaggaagatgtgccacttcctagcaggcgcaaggcctgtgcggaagaaacgccgctccctgccaccagggctgaagatgcgagcccgtcctcatgacgcaggcgccaccctgctgccggagccgggcttcggcagtcttctccactgagggactgggctgggaagtcctgcgtttcagtggagcgtatgagcgtcaagtcctgctttctcagtagccccattgcggggccccaccattcatcctgtctgaaggtcctgggtttggtgtgaccgcttggcggctggtgggtggggttttcaagtgggtgacggcgctctccggcagccggggatggccgtgtccgcactgaccaggcctgtggagagtgctcggcctaaccttagaacacatttgtaactgaatacagtgttttcaatttgtacagaatagttagaatattctattaaagtggtgaaacattgagtcagc

SEQ ID NO: 160794 - DNA, 860 bp, Artificial Sequence
  derived and/or modified sequence
ggtcggggcaggcagcggcggccgcggcggggcctggggcttggggcctggagcccgggcctggggcgctggcgggaggcccctcccaactcccggcgcgcctcgcccggctgcccgcctcactgaaggtcaaggcgctttgttctgcgccgcgggcggcctcctgggcggcggccccttggaggaggcgaagacggcgagaggcggcggccgctcaaatctcccgctagcccagcccgccccgcgtgcgggggctgtggcggttacacggccgggcgcgccggagcgttcaggcttcccgtttttaaggggataaaaacattcagatggcagatcacagtttttcagatggggttccttcagattccgtggaagctgctaaaaatgcaagtaacacagaaaagctcacagatcaggtgatgcagaatcctcgagttctggcagctttacaggagcgacttgacaatgtccctcacaccccttccagctacatcgaaactttacctaaagcagtaaaaagaagaattaatgcattgaaacaacttcaggtgagatgtgctcacatagaagccaagttctatgaagaggtacatgacttggaaagaaagtatgcagcgctataccagcctctctttgacaagagaagagaatttatcaccggcgatgttgaaccaacagatgcggaatcggaatggcacagtgaaaatgaagaggaagagaaattggctggagacatgaaaagtaaagtagtcgtcacagaaaaagcagcggcaacggctgaagagccagatcccaaaggaattccagagttctggtttaccatcttcagaaatgtggacatgctgagtgaattagtccag

SEQ ID NO: 160795 - DNA, 1941 bp, Artificial Sequence
  derived and/or modified sequence
cttgctcgcggagagaggagctaggagcctcggccaatgggagccggcgttgttggaggccacggcggcgcagccccaaagcgagcgaagctagggtcgccgccactgccgcaggaggcgtgagggaaaagtgttttaggcttccagagtagaaatctgatattacttcgtttgattcttcgaccactatggtgataggaagtagctgatctctgcaggaaactgctgttacctggcctcagctgaatttttgtgggacctcctgaggggataaaaacattcagatggcagatcacagtttttcagatggggttccttcagattccgtggaagctgctaaaaatgcaagtaacacagaaaagctcacagatcaggtgatgcagaatcctcgagttctggcagctttacaggagcgacttgacaatgtccctcacaccccttccagctacatcgaaactttacctaaagcagtaaaaagaagaattaatgcattgaaacaacttcaggtgagatgtgctcacatagaagccaagttctatgaagaggtacatgacttggaaagaaagtatgcagcgctataccagcctctctttgacaagagaagagaatttatcaccggcgatgttgaaccaacagatgcggaatcggaatggcacagtgaaaatgaagaggaagagaaattggctggagacatgaaaagtaaagtagtcgtcacagaaaaagcagcggcaacggctgaagagccagatcccaaaggaattccagagttctggtttaccatcttcagaaatgtggacatgctgagtgaattagtccaggaatatgatgaaccaatcttgaaacacctgcaggatattaaagtgaaattttctgaccctggacagcctatgtcttttgtgttagagttccactttgaacccaacgactactttaccaactcagtcctgacaaaaacctacaagatgaaatcagaaccagataaggctgatcccttttcctttgaaggtcctgagattgtggactgtgacgggtgtactattgactggaagaaaggaaagaatgttactgtcaaaaccatcaagaaaaagcagaagcataagggtcgaggcactgttagaacaattacgaaacaagtacccaatgagtcctttttcaacttcttcaatccattgaaagcatccggggatggagaatcactggatgaagattctgaattcacattagcctctgattttgaaattggacactttttccgtgagcggatagtcccgcgggctgtgctgtacttcactggggaggccatagaagatgatgacaattttgaagaaggtgaagaaggagaagaggaggaattagaaggtgacgaggagggagaagacgaggatgatgcggaaattaaccccaagaaggaacccagccagccggcggaatgcaagcagcagtaggaagcggaggcgggtgcctggcagaccggctgtcgggactccaggcctgtgggcggggcctcggtccttgccgcagcacaatcccgtggacagagcttactccatctaactcgttttcaagtgcatgattttcactttcacttttcctttttccttattattttgcttaacttgtacagtggcaactgaaatgcatttcagaaataggaggtttcgtccagcaccctctgcagccttggtgcctgtagctctggacttccctgggcctttccctgtgggagggccctgtagaccacatcagggtggggtgggggtcacttggcaaaaagggccgaggtctggtgatgtggttcccaggatctggaacctctcccacccctcctgcagttggactgaattcttccctttcatccgaagaaacccacttgctgtttccagccgctgaatctgctgagtgtgcagcctgcatcacctgctgtatgccgatcatctcaga

SEQ ID NO: 160796 - DNA, 535 bp, Artificial Sequence
  derived and/or modified sequence
aggcgtgaggtgcggagacacgggtgctgggccggctggagtgcagtggcttgatcttggctcacggcaacctctgcctcctgtattcaagcgattctcctgcctcagcctcccgagtagctgggattacaggggataaaaacattcagatggcagatcacagtttttcagatggggttccttcagattccgtggaagctgctaaaaatgcaagtaacacagaaaagctcacagatcaggtgatgcagaatcctcgagttctggcagctttacaggagcgacttgacaatgtccctcacaccccttccagctacatcgaaactttacctaaagcagtaaaaagaagaattaatgcattgaaacaacttcaggtgagatgtgctcacatagaagccaagttctatgaagaggtacatgacttggaaagaaagtatgcagcgctataccagcctctctttgacaagagaagagaatttatcaccggcgatgttgaaccaacagatgcggaatcggaatggcacagtgaaaatgaaga

SEQ ID NO: 160797 - DNA, 587 bp, Artificial Sequence
  derived and/or modified sequence
gtgaggtgcggagacacgggtgctgggccggaagtagctgatctctgcaggaaactgctgttacctggcctcagctgaatttttgtgggacctcctgagggcttggcaccgcagaagtctctgaagagacagtctgctgctgtttggaggggataaaaacattcagatggcagatcacagtttttcagatggggttccttcagattccgtggaagctgctaaaaatgcaagtaacacagaaaagctcacagatcaggtgatgcagaatcctcgagttctggcagctttacaggagcgacttgacaatgtccctcacaccccttccagctacatcgaaactttacctaaagcagtaaaaagaagaattaatgcattgaaacaacttcaggtgagatgtgctcacatagaagccaagttctatgaagaggtacatgacttggaaagaaagtatgcagcgctataccagcctctctttgacaagagaagagaatttatcaccggcgatgttgaaccaacagatgcggaatcggaatggcacagtgaaaatgaagaggaagagaaattggctggagacatgaaaagtaaag

SEQ ID NO: 160798 - DNA, 625 bp, Artificial Sequence
  derived and/or modified sequence
aaagtgttttaggcttccagagtagaaatctgatattacttcgtttgattcttcgaccactatggtgataggaagtagctgatctctgcaggaaactgctgttacctggcctcagctgaatttttgtgggacctcctgagagacgaggtttccccatgttgcccaggctggtctgaaactcctgagcttcaggtgatctgtgataggggggataaaaacattcagatggcagatcacagtttttcagatggggttccttcagattccgtggaagctgctaaaaatgcaagtaacacagaaaagctcacagatcaggtgatgcagaatcctcgagttctggcagctttacaggagcgacttgacaatgtccctcacaccccttccagctacatcgaaactttacctaaagcagtaaaaagaagaattaatgcattgaaacaacttcaggtgagatgtgctcacatagaagccaagttctatgaagaggtacatgacttggaaagaaagtatgcagcgctataccagcctctctttgacaagagaagagaatttatcaccggcgatgttgaaccaacagatgcggaatcggaatggcacagtgaaaatgaagaggaagagaaattgg

SEQ ID NO: 160799 - DNA, 572 bp, Artificial Sequence
  derived and/or modified sequence
cgtgaggtgcggagacacgggtgctgggccggtttacggggtgaaaatagacttttaaaaattctcttaccttagaaatatacaaatatgtagattaggttgttggaccttaaaggaagtagctgatctctgcaggaaactgctgttacctggcctcagctgaatttttgtgggacctcctgagggcttggcaccgcagaagtctctgaagagacagtctgctgctgtttggaggggataaaaacattcagatggcagatcacagtttttcagatggggttccttcagattccgtggaagctgctaaaaatgcaagtaacacagaaaagctcacagatcaggtgatgcagaatcctcgagttctggcagctttacaggagcgacttgacaatgtccctcacaccccttccagctacatcgaaactttacctaaagcagtaaaaagaagaattaatgcattgaaacaacttcaggtgagatgtgctcacatagaagccaagttctatgaagaggtacatgacttggaaagaaagtatgcagcgctataccagcctctctttgacaagagaaga

SEQ ID NO: 160800 - DNA, 544 bp, Artificial Sequence
  derived and/or modified sequence
gtgaggtgcggagacacgggtgctgggccgggaaaagtgttttaggcttccagagtagaaatctgatattacttcgtttgattcttcgaccactatggtgataggaagtagctgatctctgcaggaaactgctgttacctggcctcagctgaatttttgtgggacctcctgagggcttggcaccgcagaagtctctgaagagacagtctgctgctgtttggagagacgaggtttccccatgttgcccaggctggtctgaaactcctgagcttcaggtgatctgtgataggggggataaaaacattcagatggcagatcacagtttttcagatggggttccttcagattccgtggaagctgctaaaaatgcaagtaacacagaaaagctcacagatcaggtgatgcagaatcctcgagttctggcagctttacaggagcgacttgacaatgtccctcacaccccttccagctacatcgaaactttacctaaagcagtaaaaagaagaattaatgcattgaaacaacttcaggtgagatgtgctca

SEQ ID NO: 160801 - DNA, 1128 bp, Artificial Sequence
  derived and/or modified sequence
atggccgaccacagtttcagtgatggcgtgcccagtgattccgtcgaggccgctaaaaatgcatccaacaccgagaagctcaccgaccaagtgatgcagaatcccagagtccttgccgcactgcaagagagactggataatgtgcctcatactcccagcagctacatagagactcttccaaaagcagtgaaacgtcggattaatgcactgaagcaattgcaagtgaggtgcgcacacatcgaagcgaagttttacgaggaggtacacgatctcgagcgaaaatacgcagccttatatcagcccctattcgataaacgaagggagtttatcaccggcgacgtggaaccaacagacgccgagtctgaatggcactctgaaaacgaggaggaggagaagctggccggagatatgaagagtaaagtggtggtcaccgaaaaagcggcagcgacagccgaagagccagacccaaaaggtatacctgaattttggtttacaatttttcggaacgtggatatgctgagcgaactcgtccaggaatatgatgaacccattcttaaacaccttcaagatatcaaggttaagttcagcgacccaggacagcccatgtcttttgtgttagaatttcactttgagcccaacgactattttacaaatagtgtgcttacaaagacttataaaatgaagtctgagcccgacaaggccgaccccttttctttcgaaggacctgagatcgttgactgtgatggctgcactattgactggaaaaaaggaaaaaacgtgactgtgaagaccatcaagaaaaaacagaagcacaaagggcgagggacagtgaggaccatcactaagcaggtacctaacgaatctttttttaacttttttaatcccctcaaggctagtggagacggggagtccctggatgaagactcagaattcacacttgcctctgacttcgagattgggcacttttttcgggaacggatcgtgcctagggccgtcttatatttcacaggagaagctatcgaagatgacgacaattttgaggagggcgaggaaggagaagaagaggagctggagggggatgaagagggggaagacgaagacgacgcggagatcaacccaaaggtctag

SEQ ID NO: 160802 - DNA, 1161 bp, Artificial Sequence
  derived and/or modified sequence
atggctgaccacagctttagtgacggagtgcccagcgatagcgtcgaagccgctaagaatgcctccaatactgagaaacttaccgatcaggtgatgcaaaaccctcgagtgttagcagcattacaggagcgactcgacaacgtgccgcatacaccttcgagctatatcgagaccctccctaaagcggttaagcgtaggattaatgccctgaagcagcttcaggtgcgctgtgcccatatagaagcaaaattttatgaagaggtgcacgacctggagaggaagtacgcagcactctaccaacccctcttcgacaaaagaagagaatttatcaccggagacgtcgaacctactgacgcagaaagcgagtggcactcagagaacgaggaggaggagaagctcgctggggatatgaaatccaaggtggttgtaactgagaaagccgctgctactgccgaagaaccagatcctaagggaatcccggagttttggttcactattttccgcaacgtagatatgcttagcgagctggtccaagagtacgatgaaccaatcctgaaacacttacaagacatcaaggtgaagttttccgacccaggtcagcctatgtcctttgttttggaatttcattttgaacccaacgattacttcacaaatagtgtcctcacgaagacatacaagatgaagagtgagcccgacaaagctgacccattttcttttgagggtccggagattgtcgattgcgatgggtgcaccatcgactggaagaaaggcaagaacgtgaccgtcaaaaccatcaaaaaaaagcaaaagcataaaggacgtggcaccgtccggacaataaccaagcaggtgcctaatgaatctttctttaactttttcaacccccttaaaggtaagggccagtccaaatctaaagacgaagatagtgagtttacccttgcaagcgattttgagatcggacacttttttagggaaagaatcgtgccacgcgctgtgctgtacttcaccggcgaggctattgaggacgatgacaactttgaagaaggagaggagggcgaggaggaagagcttgaaggggacgaggaaggcgaggacgaggacgacgctgaaattaacccaaagaaggagccttcacaaccagccgaatgtaagcaacagtag

SEQ ID NO: 160803 - DNA, 537 bp, Artificial Sequence
  derived and/or modified sequence
atggccgatcacagcttttccgacggcgtcccctcagactccgtggaagctgctaagaatgcctccaacaccgagaagctgaccgaccaggtcatgcaaaatcccagagtattagcggcactgcaggagagactggacaatgttccacacacaccttcctcatacattgagacactacctaaggccgtaaaacgacgcatcaatgccctgaagcaacttcaggtgagatgtgcacatattgaggcaaagttctatgaggaagtacacgatctggagagaaaatacgctgcgctctaccagccccttttcgataagcgcagggagttcattacaggggacgtagagccaactgacgcggagagcgagtggcactccgagaatgaggaggaagagaaattggcgggagacatgaaatctaaagttgtggtcacggaaaaggccgctgcgaccgccgaggagcccgatccaaaaggtattccagagttctggtttactattttcaggaacgtcgatatgctgagcgagctggtgcagtag

SEQ ID NO: 160804 - DNA, 1161 bp, Artificial Sequence
  derived and/or modified sequence
atggccgaccactccttctctgacggggttcccagcgactctgttgaggcagctaagaatgccagtaatactgagaagttgacggaccaggtgatgcagaacccccgtgtgctggcagcgttacaggagaggttagacaatgtgcctcatactccatctagctacatcgagaccctgcccaaggctgtgaagagaaggattaatgcgctaaagcagctgcaggttcggtgtgcccatattgaagctaaattctacgaagaggtacacgatttggagcgcaagtatgcggctctgtaccaacccctgttcgataagcggagagagttcatcaccggagacgtggagccaacggatgccgagtcagagtggcattccgaaaatgaggaggaagaaaaactcgcgggagacatgaagagcaaggtggttgtcaccgagaaggcggcagcgactgccgaggaacctgatccaaaggggattcctgagttttggtttaccatatttcgcaacgtggatatgctgagcgaactggtgcaggaatacgatgagccaattctgaagcacttacaggacattaaggtgaaattcagtgatcccggacagccaatgtcctttgttcttgagtttcactttgagccaaatgattattttacaaatagcgtgcttacaaagacttacaagatgaagagcgagccagataaagcagaccctttcagcttcgagggccctgaaatcgtggactgcgacggttgcactatcgattggaagaaaggcaagaacgtgaccgtaaaaaccataaagaagaaacagaaacataaggggaggggaactgtgcgaacgattaccaagcaagtgccaaatgagagcttctttaatttctttaaccccctcaaagccagcggggatggagaaagcctcgacgaagattctgaattcactctggcatcggattttgaaatcggccatttcttccgtgaacggatcgtacctcgcgcagtcctttattttacaggagaagctatcgaggacgacgacaattttgaagaaggtgaggaaggcgaggaagaggaactggaaggggatgaggaaggagaagacgaagatgacgcagaaattaatcctaagaaagaaccctcacaacccgcagagtgcaagcagcaatag

SEQ ID NO: 160805 - DNA, 387 bp, Artificial Sequence
  derived and/or modified sequence
atggccgaccacagtttctccgatggggttccatcagattccgtggaagcagctaagaacgcatccaatacagaaaagcttacagatcaggtcatgcagaatccacgagtgttggccgctctccaggaacggcttgacaacgtaccgcacacaccctccagttacatcgaaactctgccaaaagccgtcaagaggaggattaacgcactaaaacagcttcaggtcaggtgtgctcacatcgaggccaagttctacgaagaagtgcatgacttggaaagaaaatacgccgctctgtaccagcccttatttgacaagcggcgtgagtttatcaccggcgatgtggagcccacagacgccgaaagcgagtggcactctgagaatgaatag

SEQ ID NO: 160806 - DNA, 423 bp, Artificial Sequence
  derived and/or modified sequence
atggccgaccatagtttttcggatggtgttccatccgacagcgtggaagccgcaaagaacgcatcaaacactgaaaagttaacggaccaggtgatgcagaacccccgtgttctggccgctctgcaggagagactggacaacgttccccacacaccaagctcctatatcgaaacactccctaaagccgtgaagcgccgaatcaatgccctgaagcagctgcaggtccgatgcgcccatatagaggctaagttctacgaggaggttcacgacctcgaaaggaagtatgctgcactataccagccactttttgacaagcggagagagttcataaccggcgacgtggaacctaccgatgccgagtccgaatggcacagcgaaaatgaggaagaggagaagttggccggagatatgaaaagcaagtag

SEQ ID NO: 160807 - DNA, 402 bp, Artificial Sequence
  derived and/or modified sequence
atggcggaccactccttttccgatggagtcccttccgatagcgtggaggccgcaaaaaacgcctctaataccgagaagctgaccgaccaagtcatgcagaatcccagggtcctggctgccctgcaggagcggctggacaacgttccccacaccccctccagttacatcgaaaccctgccaaaggcggttaaacggagaataaacgctctaaaacagctgcaggtgcgttgcgcccacattgaggccaaattctacgaggaagtgcacgacctggaaagaaaatacgcagccctgtaccaacccctgtttgacaaacgcagagagtttattactggcgacgtggaacctacagatgcagagtcggaatggcactcagaaaacgaggaggaggagaagctgtag

SEQ ID NO: 160808 - DNA, 324 bp, Artificial Sequence
  derived and/or modified sequence
atggcggaccacagttttagcgacggggtaccctccgattctgttgaggctgctaagaatgcctctaataccgaaaagctcactgaccaggtaatgcagaacccacgggtccttgcggctcttcaggagcggttagataacgtgcctcacacaccctcctcctatatcgagacactacctaaggccgtcaagcgccgtattaacgccctgaagcaactgcaagtgcgctgtgcccatatagaagccaaattctatgaggaagttcatgacctggaaaggaaatacgccgctctgtatcaaccgctgttcgacaaacgacggtag

SEQ ID NO: 160809 - DNA, 237 bp, Artificial Sequence
  derived and/or modified sequence
atggctgaccactctttcagcgacggagtacccagtgatagcgtagaggcggctaaaaatgccagtaacacagaaaaattgaccgaccaagtgatgcagaatccacgcgtcttagctgccctccaggagcggctcgacaacgtaccccatactccatcttcctacattgagacgttgccaaaggccgtcaagcgacggattaatgccctgaagcagcttcaggtgaggtgcgcatag

SEQ ID NO: 160810 - DNA, 1128 bp, Artificial Sequence
  derived and/or modified sequence
atggccgaccacagcttcagcgacggcgtgcccagcgacagcgtggaggccgccaagaacgccagcaacaccgagaagctgaccgaccaggtgatgcagaaccccagagtgctggccgccctgcaggagagactggacaacgtgccccacacccccagcagctacatcgagaccctgcccaaggccgtgaagagaagaatcaacgccctgaagcagctgcaggtgagatgcgcccacatcgaggccaagttctacgaggaggtgcacgacctggagagaaagtacgccgccctgtaccagcccctgttcgacaagagaagagagttcatcaccggcgacgtggagcccaccgacgccgagagcgagtggcacagcgagaacgaggaggaggagaagctggccggcgacatgaagagcaaggtggtggtgaccgagaaggccgccgccaccgccgaggagcccgaccccaagggcatccccgagttctggttcaccatcttcagaaacgtggacatgctgagcgagctggtgcaggagtacgacgagcccatcctgaagcacctgcaggacatcaaggtgaagttcagcgaccccggccagcccatgagcttcgtgctggagttccacttcgagcccaacgactacttcaccaacagcgtgctgaccaagacctacaagatgaagagcgagcccgacaaggccgaccccttcagcttcgagggccccgagatcgtggactgcgacggctgcaccatcgactggaagaagggcaagaacgtgaccgtgaagaccatcaagaagaagcagaagcacaagggcagaggcaccgtgagaaccatcaccaagcaggtgcccaacgagagcttcttcaacttcttcaaccccctgaaggccagcggcgacggcgagagcctggacgaggacagcgagttcaccctggccagcgacttcgagatcggccacttcttcagagagagaatcgtgcccagagccgtgctgtacttcaccggcgaggccatcgaggacgacgacaacttcgaggagggcgaggagggcgaggaggaggagctggagggcgacgaggagggcgaggacgaggacgacgccgagatcaaccccaaggtgtag

SEQ ID NO: 160811 - DNA, 1161 bp, Artificial Sequence
  derived and/or modified sequence
atggccgaccacagcttcagcgacggcgtgcccagcgacagcgtggaggccgccaagaacgccagcaacaccgagaagctgaccgaccaggtgatgcagaaccccagagtgctggccgccctgcaggagagactggacaacgtgccccacacccccagcagctacatcgagaccctgcccaaggccgtgaagagaagaatcaacgccctgaagcagctgcaggtgagatgcgcccacatcgaggccaagttctacgaggaggtgcacgacctggagagaaagtacgccgccctgtaccagcccctgttcgacaagagaagagagttcatcaccggcgacgtggagcccaccgacgccgagagcgagtggcacagcgagaacgaggaggaggagaagctggccggcgacatgaagagcaaggtggtggtgaccgagaaggccgccgccaccgccgaggagcccgaccccaagggcatccccgagttctggttcaccatcttcagaaacgtggacatgctgagcgagctggtgcaggagtacgacgagcccatcctgaagcacctgcaggacatcaaggtgaagttcagcgaccccggccagcccatgagcttcgtgctggagttccacttcgagcccaacgactacttcaccaacagcgtgctgaccaagacctacaagatgaagagcgagcccgacaaggccgaccccttcagcttcgagggccccgagatcgtggactgcgacggctgcaccatcgactggaagaagggcaagaacgtgaccgtgaagaccatcaagaagaagcagaagcacaagggcagaggcaccgtgagaaccatcaccaagcaggtgcccaacgagagcttcttcaacttcttcaaccccctgaagggcaagggccagagcaagagcaaggacgaggacagcgagttcaccctggccagcgacttcgagatcggccacttcttcagagagagaatcgtgcccagagccgtgctgtacttcaccggcgaggccatcgaggacgacgacaacttcgaggagggcgaggagggcgaggaggaggagctggagggcgacgaggagggcgaggacgaggacgacgccgagatcaaccccaagaaggagcccagccagcccgccgagtgcaagcagcagtag

SEQ ID NO: 160812 - DNA, 537 bp, Artificial Sequence
  derived and/or modified sequence
atggccgaccacagcttcagcgacggcgtgcccagcgacagcgtggaggccgccaagaacgccagcaacaccgagaagctgaccgaccaggtgatgcagaaccccagagtgctggccgccctgcaggagagactggacaacgtgccccacacccccagcagctacatcgagaccctgcccaaggccgtgaagagaagaatcaacgccctgaagcagctgcaggtgagatgcgcccacatcgaggccaagttctacgaggaggtgcacgacctggagagaaagtacgccgccctgtaccagcccctgttcgacaagagaagagagttcatcaccggcgacgtggagcccaccgacgccgagagcgagtggcacagcgagaacgaggaggaggagaagctggccggcgacatgaagagcaaggtggtggtgaccgagaaggccgccgccaccgccgaggagcccgaccccaagggcatccccgagttctggttcaccatcttcagaaacgtggacatgctgagcgagctggtgcagtag

SEQ ID NO: 160813 - DNA, 1161 bp, Artificial Sequence
  derived and/or modified sequence
atggccgaccacagcttcagcgacggcgtgcccagcgacagcgtggaggccgccaagaacgccagcaacaccgagaagctgaccgaccaggtgatgcagaaccccagagtgctggccgccctgcaggagagactggacaacgtgccccacacccccagcagctacatcgagaccctgcccaaggccgtgaagagaagaatcaacgccctgaagcagctgcaggtgagatgcgcccacatcgaggccaagttctacgaggaggtgcacgacctggagagaaagtacgccgccctgtaccagcccctgttcgacaagagaagagagttcatcaccggcgacgtggagcccaccgacgccgagagcgagtggcacagcgagaacgaggaggaggagaagctggccggcgacatgaagagcaaggtggtggtgaccgagaaggccgccgccaccgccgaggagcccgaccccaagggcatccccgagttctggttcaccatcttcagaaacgtggacatgctgagcgagctggtgcaggagtacgacgagcccatcctgaagcacctgcaggacatcaaggtgaagttcagcgaccccggccagcccatgagcttcgtgctggagttccacttcgagcccaacgactacttcaccaacagcgtgctgaccaagacctacaagatgaagagcgagcccgacaaggccgaccccttcagcttcgagggccccgagatcgtggactgcgacggctgcaccatcgactggaagaagggcaagaacgtgaccgtgaagaccatcaagaagaagcagaagcacaagggcagaggcaccgtgagaaccatcaccaagcaggtgcccaacgagagcttcttcaacttcttcaaccccctgaaggccagcggcgacggcgagagcctggacgaggacagcgagttcaccctggccagcgacttcgagatcggccacttcttcagagagagaatcgtgcccagagccgtgctgtacttcaccggcgaggccatcgaggacgacgacaacttcgaggagggcgaggagggcgaggaggaggagctggagggcgacgaggagggcgaggacgaggacgacgccgagatcaaccccaagaaggagcccagccagcccgccgagtgcaagcagcagtag

SEQ ID NO: 160814 - DNA, 387 bp, Artificial Sequence
  derived and/or modified sequence
atggccgaccacagcttcagcgacggcgtgcccagcgacagcgtggaggccgccaagaacgccagcaacaccgagaagctgaccgaccaggtgatgcagaaccccagagtgctggccgccctgcaggagagactggacaacgtgccccacacccccagcagctacatcgagaccctgcccaaggccgtgaagagaagaatcaacgccctgaagcagctgcaggtgagatgcgcccacatcgaggccaagttctacgaggaggtgcacgacctggagagaaagtacgccgccctgtaccagcccctgttcgacaagagaagagagttcatcaccggcgacgtggagcccaccgacgccgagagcgagtggcacagcgagaacgagtag

SEQ ID NO: 160815 - DNA, 423 bp, Artificial Sequence
  derived and/or modified sequence
atggccgaccacagcttcagcgacggcgtgcccagcgacagcgtggaggccgccaagaacgccagcaacaccgagaagctgaccgaccaggtgatgcagaaccccagagtgctggccgccctgcaggagagactggacaacgtgccccacacccccagcagctacatcgagaccctgcccaaggccgtgaagagaagaatcaacgccctgaagcagctgcaggtgagatgcgcccacatcgaggccaagttctacgaggaggtgcacgacctggagagaaagtacgccgccctgtaccagcccctgttcgacaagagaagagagttcatcaccggcgacgtggagcccaccgacgccgagagcgagtggcacagcgagaacgaggaggaggagaagctggccggcgacatgaagagcaagtag

SEQ ID NO: 160816 - DNA, 402 bp, Artificial Sequence
  derived and/or modified sequence
atggccgaccacagcttcagcgacggcgtgcccagcgacagcgtggaggccgccaagaacgccagcaacaccgagaagctgaccgaccaggtgatgcagaaccccagagtgctggccgccctgcaggagagactggacaacgtgccccacacccccagcagctacatcgagaccctgcccaaggccgtgaagagaagaatcaacgccctgaagcagctgcaggtgagatgcgcccacatcgaggccaagttctacgaggaggtgcacgacctggagagaaagtacgccgccctgtaccagcccctgttcgacaagagaagagagttcatcaccggcgacgtggagcccaccgacgccgagagcgagtggcacagcgagaacgaggaggaggagaagctgtag

SEQ ID NO: 160817 - DNA, 324 bp, Artificial Sequence
  derived and/or modified sequence
atggccgaccacagcttcagcgacggcgtgcccagcgacagcgtggaggccgccaagaacgccagcaacaccgagaagctgaccgaccaggtgatgcagaaccccagagtgctggccgccctgcaggagagactggacaacgtgccccacacccccagcagctacatcgagaccctgcccaaggccgtgaagagaagaatcaacgccctgaagcagctgcaggtgagatgcgcccacatcgaggccaagttctacgaggaggtgcacgacctggagagaaagtacgccgccctgtaccagcccctgttcgacaagagaagatag

SEQ ID NO: 160818 - DNA, 237 bp, Artificial Sequence
  derived and/or modified sequence
atggccgaccacagcttcagcgacggcgtgcccagcgacagcgtggaggccgccaagaacgccagcaacaccgagaagctgaccgaccaggtgatgcagaaccccagagtgctggccgccctgcaggagagactggacaacgtgccccacacccccagcagctacatcgagaccctgcccaaggccgtgaagagaagaatcaacgccctgaagcagctgcaggtgagatgcgcctag

SEQ ID NO: 160819 - protein, 491 aa, Artificial Sequence
  derived and/or modified sequence
MSLVAYASSDESEPDEAEPEPEEEEAVAPTSGPALGGLFASLPAPKGPALLPPPPQMLAPAFPPPLLLPPPTGDPRLQPPPPLPFGLGGFPPPPGVSPAEAAGVGEGLGLGLPSPRGPGLNLPPPIGGAGPPLGLPKPKKRKEPVKIAAPELHKGDSDSEEDEPTKKKTILQGSSEGTGLSALLPQPKNLTVKETNRLLLPHAFSRKPSDGSPDTKPSRLASKTKTSSLAPVVGTTTTTPSPSAIKAAAKSAALQVTKQITQEEDDSDEEVAPENFFSLPEKAEPPGVEPYPYPIPTVPEELPPGTEPEPAFQDDAANAPLEFKMAAGSSGAPWMPKPGDDYSYNQFSTYGDANAAGAYYQDYYSGGYYPAQDPALVPPQEIAPDASFIDDEAFKRLQGKRNRGREEINFVEIKGDDQLSGAQQWMTKSLTEEKTMKSFSKKKGEQPTGQQRRKHQITYLIHQAKERELELKNTWSENKLSRRQTQAKYGF

SEQ ID NO: 160820 - DNA, 1476 bp, Artificial Sequence
  derived and/or modified sequence
atgtcactggtggcttacgcgagttctgacgaaagtgagcctgatgaggccgagcccgaaccagaagaggaggaggcggtggcacccacctctggtcctgcactgggcgggctcttcgcctcactccccgctccaaagggaccagccctccttcctcctcctcctcagatgctagcccctgcctttccgcctccattgctgctcccaccgccaacaggcgatcctaggctgcagccgcctccaccactacctttcgggctgggggggtttccccccccaccaggtgttagccccgcggaagcagctggagttggcgaaggcctgggcctaggactgcccagcccccgagggccaggtctgaacctaccaccccccatcggtggtgctggacctcctctcggtctcccaaagccaaaaaaaagaaaagagcccgtgaagatagccgcccctgagttgcacaaaggggacagtgatagcgaggaggacgagcctacaaaaaaaaagactatcctccagggtagttcagagggcacgggcctttctgccttgctccctcaacctaaaaatttgactgtcaaggagaccaatcggctcctactgccccacgccttttcccggaaaccctcggacggatcccctgacaccaaaccaagccggctggcctccaaaacgaaaaccagtagtctagctcccgtggtaggtacaaccacgactaccccttctccgagtgcaatcaaggccgcagcaaaatctgccgccctgcaggtgacaaagcaaatcactcaagaggaggacgacagcgacgaagaagtagctcccgaaaacttcttctctctgcccgagaaggccgaacctccgggtgtcgaaccctatccttacccaatccctactgtccctgaagagctccctcccggcacggagcctgaacctgcctttcaggatgatgccgccaatgcccccctagagttcaagatggcagctgggagttccggagctccatggatgcccaagcccggtgatgattacagttacaatcagttctcaacttacggagacgccaatgccgcaggggcttactatcaagactattatagcggcggctactaccccgctcaggaccccgcgctcgttccccctcaggaaattgcccccgacgctagctttattgacgacgaagccttcaaaagattacaggggaaaagaaacaggggtagggaggaaattaatttcgtagaaatcaaaggagacgatcagcttagcggtgcccagcagtggatgaccaagtctttaaccgaggagaagaccatgaaatccttcagtaagaagaagggagaacaacccactggacagcagcgacggaagcaccagatcacctacctgattcaccaagctaaggagagagagctcgagctgaaaaacacgtggagcgaaaataagttgtcgcgccggcagacacaggctaagtacggattctag

SEQ ID NO: 160821 - DNA, 1476 bp, Artificial Sequence
  derived and/or modified sequence
atgagcctggtggcctatgccagcagtgatgagagcgagccagatgaagctgagcctgagcctgaggaggaggaggccgtggcccccaccagcggccctgccctgggcggcctgtttgccagcctgcctgcccccaagggccctgccctgctgcccccaccaccccagatgctggccccagccttccccccacccctgctgctgcccccacccaccggggacccccggctgcagcccccaccacccctgcccttcggcctgggcggcttccccccacctcctggggtgtccccagctgaggccgccggcgtgggggagggcctgggcctgggcctgcccagcccccggggccctggcctgaacctgcccccacccatcggcggggccggcccccccctgggcctgcccaagcccaagaagaggaaggagcctgtgaagattgctgcccctgagctgcacaagggggacagcgacagtgaagaagatgagcccaccaagaagaagaccatcctgcagggcagcagcgagggcaccggcctgagcgccctgctgccccagcccaagaacctgactgtgaaggagaccaaccggctgctgctgccccacgccttcagcaggaagcccagtgatggcagcccagacaccaagcccagccggctggccagcaagaccaagaccagcagcctggcccctgtggtgggcaccaccaccaccacccccagccccagcgccatcaaggccgccgccaagtctgctgccctgcaggtgaccaagcagatcacccaggaggaggatgacagtgatgaggaggtggcccctgagaacttcttcagcctgcctgagaaggccgagcccccaggagtggagccctacccctaccccatccccaccgtgcctgaggagctgcccccaggcacagagcctgagcccgccttccaggatgatgctgccaatgcccccctggagttcaagatggctgctggcagcagcggggccccctggatgcccaagccaggagatgactacagctacaaccagttcagcacctatggagatgccaatgctgctggggcctactaccaggactactacagcggcggctactacccagcccaggaccctgccctggtgcccccccaggagatcgccccagatgccagcttcattgatgatgaggccttcaagaggctgcagggcaagaggaacagaggccgggaggagatcaactttgtggagatcaagggagatgaccagctgagcggggcccagcagtggatgaccaagagcctgacagaggagaagaccatgaagagcttcagcaagaagaagggggagcagcccaccggccagcagaggaggaagcaccagatcacctacctgatccaccaggccaaggagcgggagctggagctgaagaacacctggagcgagaacaagctgagccggcggcagacccaggccaagtatggcttctag

SEQ ID NO: 160822 - DNA, 1476 bp, Artificial Sequence
  derived and/or modified sequence
atgagcctggtggcctacgccagcagcgacgagagcgagcccgacgaagctgagcccgagccagaggaggaagaggcagtcgcacctacttccgggccagcgctcggaggcctgttcgcctccctccctgctccaaaagggccagctctgctgccccctcctccacaaatgctcgctcccgcctttcccccccctcttctactgccccctccaacaggcgatcccaggctgcagcctccgcctcctctgccattcggcttgggcggttttcctccccctcccggagtgagccccgcggaggcggccggagtgggtgagggcctcggtttaggcctgcccagtccccggggtcccggcttgaatctccccccgcccatcggtggtgctggcccccctctggggcttcccaaaccaaagaaacggaaggagccagtgaaaattgccgcgccggagctgcacaaaggcgactccgactccgaggaagacgagccaactaagaagaagacgatactgcaggggagtagtgagggcactggtctctctgccctcttgccacagccaaagaatctgacagttaaagagacaaatcgactgctcctgcctcatgcattcagtcgcaagccctccgatgggagcccagacacaaagcctagtcgactggcttctaagaccaagacaagctcgctggcccctgtggtcgggaccaccaccaccactccttccccatccgcgataaaagccgccgccaagtcagccgctctgcaggttaccaagcaaattacacaggaggaagacgattcagacgaagaggtcgcccccgaaaacttcttttctctgcccgagaaggctgaaccgcccggagtggagccatacccatacccaataccaacagtgcccgaggagctacccccagggaccgagcctgagcctgcatttcaagacgacgcagccaatgctccactggagttcaagatggccgctggctcgtccggagcgccttggatgccaaagccaggcgacgattatagctacaaccaattcagcacctatggggatgctaatgccgccggcgcctactaccaggactactatagcgggggctattatccagcacaagatccagcccttgttcccccccaggagatcgctccagatgcctcatttatagatgatgaggcattcaaacgtctccagggcaaacgaaataggggaagagaggaaattaattttgttgaaatcaaaggggatgatcagttgagtggtgcccaacagtggatgaccaaaagccttacggaagagaagacaatgaaaagcttttctaaaaaaaagggcgaacagcctaccggccagcagaggcggaaacatcagatcacttatttgatccatcaagccaaggaaagggagctggagcttaaaaacacctggtcagagaacaaattgagtcgccggcagacccaagctaagtacgggttctag

SEQ ID NO: 160823 - DNA, 2103 bp, Artificial Sequence
  derived and/or modified sequence
attggtgaggcaaggaggaggcggagtgactcggcggccattagctgtgtgtagttgcccgggactaggagcttaagtgaagaggtacgccttgttcggtggaaatcagccgtagccatgagtttctgccggggctagccctagagtacggagcaggcggacttttcggttccccgccccgccaggtggcggggcctactaggcctccgggcatccccggtctcaagtaggcctcatctgccggcaagggcgcccgaaacgcgggaggcgccatgtcgctggttgcttacgccagcagcgatgagagcgagccggatgaggctgagcccgagccggaggaagaggaggcggtggctcctacatctgggcccgctttagggggcttgttcgcttctctccctgcgcccaagggtccggccttgctgcctccgccccctcagatgctggcgccagcctttcccccgccgctgttgcttcccccacccaccggagaccccaggcttcagcctcctccccccttgcccttcggcctgggaggcttccccccacctccaggcgtgagcccggctgaagcggcgggagttggggagggactgggattggggttgccctcgccccgaggccctggcctcaatctgccccctccaattggcggtgccggtcccccgctggggcttcccaagccaaagaagaggaaagagcccgtgaagatcgcggcgccggagttgcataagggagattcagattctgaggaagatgaacccacaaagaagaaaactatccttcagggatccagtgaggggactggtttgtctgccttgcttccccaacctaaaaacctgactgtgaaagagactaacaggttgctcctgccccatgccttctcccgcaaaccctcggatggctcccctgatactaagccctccagactggcttctaagaccaagacttcctctcttgcccctgttgtgggcaccacaaccaccactccgtcgccctctgctatcaaggctgctgccaagagtgctgccctgcaggtgacaaagcagatcacgcaggaagaagacgacagtgatgaggaagtagcccccgaaaactttttctccctccctgaaaaggctgagccacctggagttgagccatacccttaccccatccccactgtccctgaagagctgcctccaggcacggaaccagagccggctttccaggacgatgcagccaatgccccccttgaattcaagatggcagcaggttcaagtggggccccttggatgcctaagcctggggacgactacagctacaatcagttttccacatatggcgatgccaatgccgctggtgcttattatcaggattattacagtggtggctactatcctgcacaggacccggccctggtccccccccaggaaattgccccagatgcctccttcatcgatgacgaagcatttaagcggctgcagggcaagaggaaccgagggagagaagaaatcaactttgtggagatcaaaggtgatgaccagctcagtggggcccagcaatggatgactaagtcattgacagaagagaaaaccatgaagtcattcagcaaaaagaaaggtgagcagccaacaggccagcagcggcggaaacaccagatcacatatcttattcatcaggccaaggagcgggagctggaactgaagaacacctggtcagagaacaagctcagccgccgtcagacccaagccaaatatggattctagggctctggaactgattgctcccaggatctcctgccagcccagctggcctggcccccagcttcacctctgggaccccagctgctctaagcccaggatctctttccccaaggacccagccctcgcctctgcgagaatgaacatatttgatagatttttcttaacaagttagaaaattcagctcctttctgtcctggagctagcaaagacttgtgtgatgcctccgaaggggctctgagttctggggtgggagttttgctctctgtcaggtgtgataaaatgttgaaccctccccaccaccacttttttttttttaaaccagggatgtctgttgaaataaaacattcagtctgacaaa

SEQ ID NO: 160824 - DNA, 1476 bp, Artificial Sequence
  derived and/or modified sequence
atgagccttgtcgcttacgcttcctcagatgaatcagagcctgatgaggccgaaccagagccggaagaagaggaagcggtcgcacctacgagcggcccagctcttggtgggctgtttgctagtctgcccgctcctaagggtcctgcccttctgccacctcccccacagatgttggccccagccttcccaccgcctttattactgccaccaccaacaggcgacccaaggctgcagcccccaccaccactcccatttggacttggcggatttccccctccgccaggggtgagcccagccgaggccgctggggttggcgaaggactcgggctagggttaccctctccacggggacctgggctgaatctccctcctcccataggaggagcaggcccacccttgggccttccaaaacccaaaaagcgtaaggagcccgttaagatcgcagcgccagaattgcacaaaggcgatagcgattccgaggaagatgaaccaacgaagaaaaagaccattctgcaagggtcgagtgaggggactggcttgagcgcattgctaccacagcccaagaatctgactgtcaaggagacaaacagactgcttttaccccatgcctttagcaggaaacccagcgacgggagtcctgatacaaagccatcaaggctcgcatctaaaactaagacatcctctctggcccctgtggtcggcaccacaaccaccacaccctcgcccagtgccattaaggcagcagcaaagtcggccgcactgcaagtgactaaacagattacgcaagaggaggatgatagcgacgaggaggtggcacccgagaatttcttctctctgcccgagaaagccgaaccccctggtgtagagccgtacccctatcctattcccacagttcccgaggagctccccccaggcacagagcctgagcctgcgttccaggacgacgcagcaaatgctcccctggaatttaagatggctgcagggtcaagtggcgcaccatggatgccaaagcccggtgacgattacagctataaccagttttctacttatggcgacgccaacgccgctggcgcttattaccaagattattattccgggggttattacccagcccaggacccagcacttgtgccaccccaggagatcgcaccagatgcttctttcatcgacgatgaggctttcaagagacttcagggaaagcgtaacaggggaagggaggagatcaacttcgtggagattaaaggtgatgaccagttaagcggcgcacagcagtggatgacgaaaagcctcaccgaggaaaaaaccatgaagtccttctccaagaagaagggggaacagcctaccggacaacaacggaggaagcaccagatcacctacctcatacaccaggcaaaagaaagggaactggagctcaagaatacctggagcgagaacaaactgagccggcgtcagacacaggcaaagtatggcttttag

SEQ ID NO: 160825 - DNA, 1476 bp, Artificial Sequence
  derived and/or modified sequence
atgagcctggtggcctacgccagcagcgacgagagcgagcccgacgaggccgagcccgagcccgaggaggaggaggccgtggcccccaccagcggccccgccctgggcggcctgttcgccagcctgcccgcccccaagggccccgccctgctgcccccccccccccagatgctggcccccgccttccccccccccctgctgctgcccccccccaccggcgaccccagactgcagccccccccccccctgcccttcggcctgggcggcttcccccccccccccggcgtgagccccgccgaggccgccggcgtgggcgagggcctgggcctgggcctgcccagccccagaggccccggcctgaacctgcccccccccatcggcggcgccggcccccccctgggcctgcccaagcccaagaagagaaaggagcccgtgaagatcgccgcccccgagctgcacaagggcgacagcgacagcgaggaggacgagcccaccaagaagaagaccatcctgcagggcagcagcgagggcaccggcctgagcgccctgctgccccagcccaagaacctgaccgtgaaggagaccaacagactgctgctgccccacgccttcagcagaaagcccagcgacggcagccccgacaccaagcccagcagactggccagcaagaccaagaccagcagcctggcccccgtggtgggcaccaccaccaccacccccagccccagcgccatcaaggccgccgccaagagcgccgccctgcaggtgaccaagcagatcacccaggaggaggacgacagcgacgaggaggtggcccccgagaacttcttcagcctgcccgagaaggccgagccccccggcgtggagccctacccctaccccatccccaccgtgcccgaggagctgccccccggcaccgagcccgagcccgccttccaggacgacgccgccaacgcccccctggagttcaagatggccgccggcagcagcggcgccccctggatgcccaagcccggcgacgactacagctacaaccagttcagcacctacggcgacgccaacgccgccggcgcctactaccaggactactacagcggcggctactaccccgcccaggaccccgccctggtgcccccccaggagatcgcccccgacgccagcttcatcgacgacgaggccttcaagagactgcagggcaagagaaacagaggcagagaggagatcaacttcgtggagatcaagggcgacgaccagctgagcggcgcccagcagtggatgaccaagagcctgaccgaggagaagaccatgaagagcttcagcaagaagaagggcgagcagcccaccggccagcagagaagaaagcaccagatcacctacctgatccaccaggccaaggagagagagctggagctgaagaacacctggagcgagaacaagctgagcagaagacagacccaggccaagtacggcttctag

SEQ ID NO: 160826 - protein, 451 aa, Artificial Sequence
  derived and/or modified sequence
MVSRDQAHLGPKYVGLWDFKSRTDEELSFRAGDVFHVARKEEQWWWATLLDEAGGAVAQGYVPHNYLAERETVESEPWFFGCISRSEAVRRLQAEGNATGAFLIRVSEKPSADYVLSVRDTQAVRHYKIWRRAGGRLHLNEAVSFLSLPELVNYHRAQSLSHGLRLAAPCRKHEPEPLPHWDDWERPREEFTLCRKLGSGYFGEVFEGLWKDRVQVAIKVISRDNLLHQQMLQSEIQAMKKLRHKHILALYAVVSVGDPVYIITELMAKGSLLELLRDSDEKVLPVSELLDIAWQVAEGMCYLESQNYIHRDLAARNILVGENTLCKVGDFGLARLIKEDVYLSHDHNIPYKWTAPEALSRGHYSTKSDVWSFGILLHEMFSRGQVPYPGMSNHEAFLRVDAGYRMPCPLECPPSVHKLMLTCWCRDPEQRPCFKALRERLSSFTSYENPT

SEQ ID NO: 160827 - protein, 350 aa, Artificial Sequence
  derived and/or modified sequence
MCPTTTWPRGRRWSRNLRDTQAVRHYKIWRRAGGRLHLNEAVSFLSLPELVNYHRAQSLSHGLRLAAPCRKHEPEPLPHWDDWERPREEFTLCRKLGSGYFGEVFEGLWKDRVQVAIKVISRDNLLHQQMLQSEIQAMKKLRHKHILALYAVVSVGDPVYIITELMAKGSLLELLRDSDEKVLPVSELLDIAWQVAEGMCYLESQNYIHRDLAARNILVGENTLCKVGDFGLARLIKEDVYLSHDHNIPYKWTAPEALSRGHYSTKSDVWSFGILLHEMFSRGQVPYPGMSNHEAFLRVDAGYRMPCPLECPPSVHKLMLTCWCRDPEQRPCFKALRERLSSFTSYENPT

SEQ ID NO: 160828 - DNA, 1053 bp, Artificial Sequence
  derived and/or modified sequence
atgtgccccaccaccacctggcccagaggcagaagatggagcagaaacctgagagacacccaggccgtgagacactacaagatctggagaagagccggcggcagactgcacctgaacgaggccgtgagcttcctgagcctgcccgagctggtgaactaccacagagcccagagcctgagccacggcctgagactggccgccccctgcagaaagcacgagcccgagcccctgccccactgggacgactgggagagacccagagaggagttcaccctgtgcagaaagctgggcagcggctacttcggcgaggtgttcgagggcctgtggaaggacagagtgcaggtggccatcaaggtgatcagcagagacaacctgctgcaccagcagatgctgcagagcgagatccaggccatgaagaagctgagacacaagcacatcctggccctgtacgccgtggtgagcgtgggcgaccccgtgtacatcatcaccgagctgatggccaagggcagcctgctggagctgctgagagacagcgacgagaaggtgctgcccgtgagcgagctgctggacatcgcctggcaggtggccgagggcatgtgctacctggagagccagaactacatccacagagacctggccgccagaaacatcctggtgggcgagaacaccctgtgcaaggtgggcgacttcggcctggccagactgatcaaggaggacgtgtacctgagccacgaccacaacatcccctacaagtggaccgcccccgaggccctgagcagaggccactacagcaccaagagcgacgtgtggagcttcggcatcctgctgcacgagatgttcagcagaggccaggtgccctaccccggcatgagcaaccacgaggccttcctgagagtggacgccggctacagaatgccctgccccctggagtgcccccccagcgtgcacaagctgatgctgacctgctggtgcagagaccccgagcagagaccctgcttcaaggccctgagagagagactgagcagcttcaccagctacgagaaccccacctag

SEQ ID NO: 160829 - DNA, 1053 bp, Artificial Sequence
  derived and/or modified sequence
atgtgtcccactaccacttggccacgcgggcgccgatggtctcgaaatctgcgcgatactcaggcagtgcgccactataagatctggcgcagggcaggcgggcggctgcacctcaatgaagccgtctcattcctttccctgccggagctagtaaactaccacagggctcagagtctgtcccacggcctacgtctggccgccccgtgcaggaaacatgagcccgagcccctgccacactgggacgattgggagagacctcgtgaggagtttacgctctgtaggaaactgggatctggttatttcggcgaggtgtttgagggcctgtggaaagacagggtgcaagttgccatcaaggttatcagccgggataatttactgcaccaacaaatgttacaatcagaaatccaagctatgaagaagctgcggcacaagcacatcctagccttgtacgcagtcgtgtctgtgggagaccccgtttatatcatcaccgagctcatggctaaggggagcctgctcgaactgctccgggattcagatgaaaaagtcctgcccgtgtcggaactgctagatatagcttggcaggtcgcggaggggatgtgctatctcgagtcacagaactatatacatcgcgacttggccgctaggaatatcctggtgggagaaaacaccttatgtaaggtgggcgactttgggttagctcggctgataaaagaggacgtgtacctgtcccacgaccacaatatcccctacaagtggacagcccctgaagctttaagccggggccactactcgacaaaatctgatgtctggtcctttgggatattactccatgagatgttttcgcgtggccaggtaccgtatccggggatgtctaatcatgaagcttttctccgagtggacgcaggatacagaatgccatgtcctctagaatgccccccgtctgtgcacaagctcatgctgacgtgctggtgtcgagatccggagcaacggccgtgtttcaaagcgctgcgcgagcgcttgtcatcttttacctcgtacgaaaatcctacctag

SEQ ID NO: 160830 - DNA, 2495 bp, Artificial Sequence
  derived and/or modified sequence
cctggtcctgccgctgcgcccgcccgccatggtgtcccgggaccaggctcacctgggccccaagtatgtgggcctctgggacttcaagtcccggacggacgaggagctgagcttccgcgcgggggacgtcttccacgtggccaggaaggaggagcagtggtggtgggccacgctgctggacgaggcgggtggggccgtggcccagggctatgtgccccacaactacctggccgagagggagacggtggagtcggaaccgtggttctttggctgcatctcccgctcggaagctgtgcgtcggctgcaggccgagggcaacgccacgggcgccttcctgatcagggtcagcgagaagccgagtgccgactacgtcctgtcggtgcgggacacgcaggctgtgcggcactacaagatctggcggcgtgccgggggccggctgcacctgaacgaggcggtgtccttcctcagcctgcccgagcttgtgaactaccacagggcccagagcctgtcccacggcctgcggctggccgcgccctgccggaagcacgagcctgagcccctgccccattgggatgactgggagaggccgagggaggagttcacgctctgcaggaagctggggtccggctactttggggaggtcttcgaggggctctggaaagaccgggtccaggtggccattaaggtgatttctcgagacaacctcctgcaccagcagatgctgcagtcggagatccaggccatgaagaagctgcggcacaaacacatcctggcgctgtacgccgtggtgtccgtgggggaccccgtgtacatcatcacggagctcatggccaagggcagcctgctggagctgctccgcgactctgatgagaaagtcctgcccgtttcggagctgctggacatcgcctggcaggtggctgagggcatgtgttacctggagtcgcagaattacatccaccgggacctggccgccaggaacatcctcgtcggggaaaacaccctctgcaaagttggggacttcgggttagccaggcttatcaaggaggacgtctacctctcccatgaccacaatatcccctacaagtggacggcccctgaagcgctctcccgaggccattactccaccaaatccgacgtctggtcctttgggattctcctgcatgagatgttcagcaggggtcaggtgccctacccaggcatgtccaaccatgaggccttcctgagggtggacgccggctaccgcatgccctgccctctggagtgcccgcccagcgtgcacaagctgatgctgacatgctggtgcagggaccccgagcagagaccctgcttcaaggccctgcgggagaggctctccagcttcaccagctacgagaacccgacctgagctgctgtggagcgggcatggccgggccctgctgaggaggggcctgggcagagggcctggacctgggatcaaggcccacgcgcttccctggggtttactgaggtgatgggtgcaggaaaggttcacaaatgtggagtgtctgcgtccaatacacgcgtgtgctcctctccttactccatcgtgtgtgccttgggtctcagctgctgacacgcagcctgctctggagcctgcagatgagatccgggagactgacacgaagccagcagaggtcagaggggactctgaccacagcccgctctctggctgtctgtctgcagtgcccggctgagggtgggaggcaaacacgccttgttcctgctcttcccagttcagcttggtgggagaaagtcattcgcgtggctcgggacgctcatgtaaatttggttttggtgctcaagggttctttcctcccaggggcaggtgtttctttcctgtttgtcttgtgtcttgagagcttggccttatgaccagtgagaactctctccctggtctctgccagcccaagcatcactgcccgaggcgccagctcagtttcaccgtccacgtccacaaggggcttttcccaccttcacctttgtcgctgggtcagtgctggaaagcgcccctcactcctgcgctgacaagggcccttctctactgtctgtggggtggttccgggctgggggggctgcctcctttgcacctgattttgaaggtgtctctttcatccatggttaagtcataaaaagcttattggttttggttttgactcacctgaaagtttttttggtttaaaagaagaataggcggggcacggtggctcatgcctgtaatcccagcactttgggaggctgaggcaggtggatcacgaggtcaggagatcgacaccatcctggctaacacggtgaaaccccgtctctactaaaaaatacaaaaaattagctgggtgtggtggtgggggtgggcgcctgtagtcccagctacgtgggaggctgaggcagcagactggtgtgaacccgggaggtggagcttgcagtgagccgagatcgcgccactgcactccagcctgggcgacagagcgagactccatctc

SEQ ID NO: 160831 - DNA, 1053 bp, Artificial Sequence
  derived and/or modified sequence
atgtgccccaccaccacctggccccggggccgccgctggagcaggaacctgcgggacacccaggccgtgcgccactacaagatctggaggcgggccggcggccgcctgcacctgaatgaagctgtgtccttcctgagcctgcctgagctggtgaactaccaccgggcccagagcctgagccacggcctgcggctggccgccccctgcaggaagcatgagcctgagcccctgccccactgggatgactgggagcggccccgggaggagttcaccctgtgcaggaagctgggcagcggctactttggagaggtgtttgagggcctgtggaaggacagagtgcaggtggccatcaaggtgatcagccgggacaacctgctgcaccagcagatgctgcagagcgagatccaggccatgaagaagctgcggcacaagcacatcctggccctgtatgctgtggtgtctgtgggggaccctgtgtacatcatcacagagctgatggccaagggcagcctgctggagctgctgcgggacagtgatgagaaggtgctgcctgtgtctgagctgctggacatcgcctggcaggtggccgagggcatgtgctacctggagagccagaactacatccaccgggacctggccgccaggaacatcctggtgggggagaacaccctgtgcaaggtgggggactttggcctggcccggctcatcaaggaggatgtgtacctgagccatgaccacaacatcccctacaagtggacagcccctgaggccctgagccggggccactacagcaccaagagtgatgtgtggagctttggcatcctgctgcacgagatgttcagccggggccaggtgccctacccaggcatgagcaaccacgaggccttcctgcgggtggatgctggctacaggatgccctgccccctggagtgcccccccagcgtgcacaagctgatgctgacctgctggtgccgggaccctgagcagaggccctgcttcaaggccctgcgggagcggctgagcagcttcaccagctatgagaaccccacctag

SEQ ID NO: 160832 - DNA, 1053 bp, Artificial Sequence
  derived and/or modified sequence
atgtgccccaccaccacctggccccggggccggcggtggagccggaacctgagagatactcaggcagtgcgccattataaaatctggcgccgcgccggcggccgtctgcacctgaacgaagctgtgtctttcctgtcactccctgagcttgtaaattatcatagagcacagtctctcagccatggcctaagactagcggccccgtgcagaaaacatgaacccgaacctctgccgcattgggacgattgggagagaccgagagaggagttcacactctgtcgaaagttaggctctgggtatttcggtgaagtattcgaggggctgtggaaggacagggttcaagtagcaatcaaagtaatttcacgcgacaaccttctgcaccaacagatgctccaatctgagatccaggccatgaagaagcttcggcataagcatattcttgccctgtacgctgtagtaagtgtgggggatcccgtgtatattattactgaacttatggcaaagggctctctgctggaattactgagagactccgacgagaaagtgctccccgtgagcgaacttcttgatattgcatggcaggtggccgagggaatgtgttatctggagtcgcaaaattatattcacagggatctcgccgcccgcaacatactagtgggcgagaatacactgtgtaaagtgggagacttcggcctggctcggcttatcaaagaagatgtatatctctctcatgatcataacatcccttacaaatggacagctcctgaagcattatctcgcggtcactacagcacaaaaagcgacgtctggtccttcggcatcctgttgcacgaaatgttctcgcggggtcaggtgccataccctggcatgagcaaccacgaggcctttttgagagtggacgccgggtaccgaatgccgtgtcccctcgaatgcccgccaagcgtgcacaagctgatgctgacatgttggtgtcgcgaccctgaacaaagaccttgtttcaaggccctccgagaaagattaagctcttttacatcttacgagaaccccacctag

SEQ ID NO: 160833 - DNA, 1053 bp, Artificial Sequence
  derived and/or modified sequence
atgtgcccaaccacgacttggcctagagggcgtcgttggagccggaacctgcgtgacacccaggccgttcgtcattacaaaatttggagacgagctggagggaggctccatctgaacgaggcagtctcattcctttccctgccagaactcgtgaattatcaccgcgctcagtccttaagccatgggctgagacttgcagcaccctgccgtaagcacgaacctgagcccctgccacattgggacgactgggagcgaccccgagaggagttcacactctgccgaaaactgggatcaggctacttcggggaagtgtttgagggtctgtggaaagatagggttcaggtggctataaaggttattagcagagacaacttgttgcatcagcagatgctccagtccgaaatccaggcaatgaagaagctgcggcacaagcatattcttgcactgtacgccgtggtctctgtcggcgacccagtatacattatcacagaactgatggccaaaggatcactgcttgagcttcttcgcgattccgacgaaaaggtactgcctgtgtccgaattattggatattgcgtggcaagtggccgagggaatgtgttacctggaaagccagaactacatccatcgggacttggctgccagaaatattctcgtcggagagaacaccctgtgtaaagtgggggattttggtctggctagattgataaaagaagatgtgtacctgagccacgatcacaatatcccatacaagtggacagcacccgaggccctctcaagggggcactactccaccaaatcagacgtgtggtcattcggtattctgcttcacgagatgttcagccgcggacaggtcccctatccagggatgagtaaccacgaggcctttctacgagtggatgccggttatagaatgccctgccccctcgagtgtcctcctagtgtgcacaaactgatgcttacctgctggtgtagggatcctgaacaacggccatgcttcaaagctctgcgcgagcgccttagcagcttcactagctatgagaaccctacgtag

SEQ ID NO: 160834 - DNA, 1481 bp, Artificial Sequence
  derived and/or modified sequence
agctctgggtgctccagctgggccacagcctggtcctgccgctgcgcccgcccgccatggtgtcccgggaccaggctcacctgggccccaagtatgtgggcctctgggacttcaagtcccggacggacgaggagctgagcttccgcgcgggggacgtcttccacgtggccaggaaggaggagcagtggtggtgggccacgctgctggacgaggcgggtggggccgtggcccagggctatgtgccccacaactacctggccgagagggagacggtggagtcggaacctgcgggacacgcaggctgtgcggcactacaagatctggcggcgtgccgggggccggctgcacctgaacgaggcggtgtccttcctcagcctgcccgagcttgtgaactaccacagggcccagagcctgtcccacggcctgcggctggccgcgccctgccggaagcacgagcctgagcccctgccccattgggatgactgggagaggccgagggaggagttcacgctctgcaggaagctggggtccggctactttggggaggtcttcgaggggctctggaaagaccgggtccaggtggccattaaggtgatttctcgagacaacctcctgcaccagcagatgctgcagtcggagatccaggccatgaagaagctgcggcacaaacacatcctggcgctgtacgccgtggtgtccgtgggggaccccgtgtacatcatcacggagctcatggccaagggcagcctgctggagctgctccgcgactctgatgagaaagtcctgcccgtttcggagctgctggacatcgcctggcaggtggctgagggcatgtgttacctggagtcgcagaattacatccaccgggacctggccgccaggaacatcctcgtcggggaaaacaccctctgcaaagttggggacttcgggttagccaggcttatcaaggaggacgtctacctctcccatgaccacaatatcccctacaagtggacggcccctgaagcgctctcccgaggccattactccaccaaatccgacgtctggtcctttgggattctcctgcatgagatgttcagcaggggtcaggtgccctacccaggcatgtccaaccatgaggccttcctgagggtggacgccggctaccgcatgccctgccctctggagtgcccgcccagcgtgcacaagctgatgctgacatgctggtgcagggaccccgagcagagaccctgcttcaaggccctgcgggagaggctctccagcttcaccagctacgagaacccgacctgagctgctgtggagcgggcatggccgggccctgctgaggaggggcctgggcagagggcctggacctgggatcaaggcccacgcgcttccctggggtttactgaggtgatgggtgcaggaaaggttcacaaatgtggagtgtctgcgtccaatacacgcgtgtgctcctctccttactccatcgtgtgtgcctt

SEQ ID NO: 160835 - DNA, 1356 bp, Artificial Sequence
  derived and/or modified sequence
atggtgagcagagaccaggcccacctgggccccaagtacgtgggcctgtgggacttcaagagcagaaccgacgaggagctgagcttcagagccggcgacgtgttccacgtggccagaaaggaggagcagtggtggtgggccaccctgctggacgaggccggcggcgccgtggcccagggctacgtgccccacaactacctggccgagagagagaccgtggagagcgagccctggttcttcggctgcatcagcagaagcgaggccgtgagaagactgcaggccgagggcaacgccaccggcgccttcctgatcagagtgagcgagaagcccagcgccgactacgtgctgagcgtgagagacacccaggccgtgagacactacaagatctggagaagagccggcggcagactgcacctgaacgaggccgtgagcttcctgagcctgcccgagctggtgaactaccacagagcccagagcctgagccacggcctgagactggccgccccctgcagaaagcacgagcccgagcccctgccccactgggacgactgggagagacccagagaggagttcaccctgtgcagaaagctgggcagcggctacttcggcgaggtgttcgagggcctgtggaaggacagagtgcaggtggccatcaaggtgatcagcagagacaacctgctgcaccagcagatgctgcagagcgagatccaggccatgaagaagctgagacacaagcacatcctggccctgtacgccgtggtgagcgtgggcgaccccgtgtacatcatcaccgagctgatggccaagggcagcctgctggagctgctgagagacagcgacgagaaggtgctgcccgtgagcgagctgctggacatcgcctggcaggtggccgagggcatgtgctacctggagagccagaactacatccacagagacctggccgccagaaacatcctggtgggcgagaacaccctgtgcaaggtgggcgacttcggcctggccagactgatcaaggaggacgtgtacctgagccacgaccacaacatcccctacaagtggaccgcccccgaggccctgagcagaggccactacagcaccaagagcgacgtgtggagcttcggcatcctgctgcacgagatgttcagcagaggccaggtgccctaccccggcatgagcaaccacgaggccttcctgagagtggacgccggctacagaatgccctgccccctggagtgcccccccagcgtgcacaagctgatgctgacctgctggtgcagagaccccgagcagagaccctgcttcaaggccctgagagagagactgagcagcttcaccagctacgagaaccccacctag

SEQ ID NO: 160836 - DNA, 1356 bp, Artificial Sequence
  derived and/or modified sequence
atggtgagcagagaccaggcccatctgggccctaaatacgttggactttgggattttaagtcacgtacagatgaagagctttcattccgagcgggggatgtattccacgtggcccgcaaggaggaacagtggtggtgggcaactctcctagatgaagcggggggagctgtcgcacagggctacgtcccgcacaattacctggccgagagagagaccgtggagagcgaaccgtggttttttggatgcatcagtaggagtgaagctgtaagacggctccaggccgaggggaacgctaccggggccttcctgatcagggtaagcgaaaaaccctcagcagactatgtactttcagttcgcgatactcaagccgtgcggcactacaaaatttggaggagggccggcggcagacttcatctgaatgaggctgttagctttctatcacttcctgagctggtaaattatcaccgcgcccagtctctgagccacgggcttcgcctggccgctccgtgcagaaaacatgaaccagaaccgctcccccactgggacgattgggaacgtccaagggaagaattcaccctgtgtcgaaaactgggaagtgggtattttggagaggtgtttgaaggtctctggaaagatcgcgtccaggtagccattaaagtgatctcccgagataatttgctgcatcagcagatgctgcagtccgagatccaggcaatgaagaagctgagacataaacatatactagccctgtatgcagttgtgagtgttggggatcctgtatatatcatcaccgagttgatggccaaggggtcactgttggaactcttaagggattctgacgagaaggtcctcccagtgagtgagctgctggatatcgcatggcaggtggcagaaggcatgtgctatctagagtcacagaactacattcaccgcgacctggcagctcggaatatactcgtgggtgagaacacgctctgcaaggtcggggatttcggactggcccggttgatcaaggaagatgtgtatttgagccatgatcacaacattccctataagtggaccgccccggaggctctgtccaggggccactattccacgaagagtgacgtatggtcgtttgggatcctgctgcatgagatgttttctcgcggtcaggtcccttacccagggatgagtaatcatgaagcatttctgcgcgtggacgccggctacaggatgccctgtcccctggaatgtcccccctccgttcacaagctgatgctaacctgttggtgccgcgatccagaacagcgaccctgttttaaggctttacgggaaagattatcttcatttacgagctacgagaaccctacttag

SEQ ID NO: 160837 - DNA, 1356 bp, Artificial Sequence
  derived and/or modified sequence
atggtgtcccgggaccaggcccacctgggccccaagtatgtgggcctgtgggacttcaagagcaggacagatgaggagctgtccttccgggctggagatgtgttccacgtggccaggaaggaggagcagtggtggtgggccaccctgctggatgaagctggaggagctgtggcccagggctacgtgccccacaactacctggccgagcgggagaccgtggagagcgagccctggttcttcggctgcatcagccgctctgaggccgtgcggcggctgcaggccgagggcaatgccactggagccttcctgatccgggtgtctgagaagcccagcgctgactatgtgctgtctgtgcgggacacccaggccgtgcgccactacaagatctggaggagagctgggggccgcctgcacctgaatgaggccgtgtccttcctgagcctgcctgagctggtgaactaccaccgggcccagagcctgagccacggcctgcggctggccgccccctgcaggaagcatgagcctgagcccctgccccactgggatgactgggagcggccccgggaggagttcaccctgtgcaggaagctgggcagcggctactttggagaggtgtttgagggcctgtggaaggacagagtgcaggtggccatcaaggtgatcagccgggacaacctgctgcaccagcagatgctgcagagcgagatccaggccatgaagaagctgcggcacaagcacatcctggccctgtatgctgtggtgtctgtgggggaccctgtgtacatcatcacagagctgatggccaagggcagcctgctggagctgctgcgggacagtgatgagaaggtgctgcctgtgtctgagctgctggacatcgcctggcaggtggccgagggcatgtgctacctggagagccagaactacatccaccgggacctggccgccaggaacatcctggtgggggagaacaccctgtgcaaggtgggggactttggcctggcccggctcatcaaggaggatgtgtacctgagccatgaccacaacatcccctacaagtggacagcccctgaggccctgagccggggccactacagcaccaagagtgatgtgtggagctttggcatcctgctgcacgagatgttcagccggggccaggtgccctacccaggcatgagcaaccacgaggccttcctgcgggtggatgctggctacaggatgccctgccccctggagtgccccccatctgtgcacaagctgatgctgacctgctggtgccgggaccctgagcagaggccctgcttcaaggccctgcgggagcggctgagcagcttcaccagctatgagaaccccacctag

SEQ ID NO: 160838 - DNA, 1356 bp, Artificial Sequence
  derived and/or modified sequence
atggtgagccgggaccaggcccacctgggccccaagtacgtgggcctgtgggactttaaaagcagaacagacgaggaactgagctttcgggctggcgacgtgtttcacgtggcccggaaagaggagcagtggtggtgggctaccctgctggatgaggctggcggtgccgtggcacaaggatatgttccccataattacctcgccgaaagggagaccgttgagtctgaaccctggttctttgggtgcatatccagatctgaagcggtgagacgcctgcaagccgagggcaatgccaccggagcctttctgattcgagtaagtgagaaacccagcgcagactacgttctgagtgtccgagatacacaagccgtgcgccactacaagatctggcggcgggcaggcggtcgtcttcatctgaatgaagctgtgtctttcctgagcctacctgagttagtgaattaccacagagcgcagagtctcagtcatggcttaaggcttgcagccccctgtaggaaacacgaacccgagcctctcccccattgggacgattgggaacgtccaagggaggagttcaccctctgcaggaagctgggatccggatacttcggcgaagtgtttgagggattgtggaaagacagagtccaggtggctattaaggtgattagccgcgacaacctgctacatcagcagatgttacagtccgagatacaggccatgaagaaactacggcacaaacacatactggcactctacgccgttgtgtcagtcggagaccccgtctacatcatcaccgaactcatggccaaaggctctctgctggaactgctgagggactcagacgaaaaggtgctccccgtcagcgaactgttggatatcgcctggcaagttgccgaaggcatgtgttacctggagagccagaattacattcaccgggatctggcagcccgcaacattctggttggcgagaacacactttgtaaagtcggagatttcggtttggctagactgataaaagaggacgtgtacctgagccacgatcacaacatcccatacaagtggacagcaccagaagcactgagtaggggacactattctacaaagtccgatgtgtggtctttcggaattctacttcatgagatgttttccagggggcaagtgccatatcctggcatgtccaatcatgaggcgtttttgagggtggatgccggctaccggatgccgtgtccactggaatgtcctccatcagtccacaagctgatgttgacctgctggtgccgagatcccgagcagagaccctgctttaaagcccttcgagagaggctatccagtttcacctcatacgaaaaccctacctag

SEQ ID NO: 160839 - DNA, 1356 bp, Artificial Sequence
  derived and/or modified sequence
atggtctcccgggaccaggctcacctgggtccgaagtacgtgggactctgggatttcaaatctcgcacagatgaggaactctcttttagggctggagacgtgttccacgtggctcgtaaggaagaacaatggtggtgggcaaccctgctagacgaggcgggaggggcagtcgcgcagggatacgtccctcataactacctggccgaaagggagactgtagagtcagaaccctggttcttcggctgcatttcccgatctgaggccgttagacggttacaggcagagggcaatgccaccggagcctttctgattcgggtgtccgagaaaccctccgcagattacgtcctttccgtgagggatacccaggccgtccgccactacaagatttggagaagagccggtgggaggcttcatctcaacgaggctgtcagtttcctgagcctccccgagttagtgaactaccacagggctcagtctttgagccatggcctgcgcttggccgctccatgccggaaacatgagcctgaacccttgccacattgggatgactgggagcggccacgcgaagagttcactttatgtagaaagctgggaagtggctactttggagaggtctttgagggtctgtggaaagaccgggtacaagtagccattaaggtgatttctagggataatttactccatcagcagatgctccaaagcgaaatccaggcaatgaagaagctccgccacaagcacatcttagcgctgtacgctgtagtgagcgtgggcgaccctgtctacatcattacggaattaatggctaagggctccctcctagaattgcttcgggacagtgacgagaaggtgttgcccgtgtcagagctgctcgacatcgcatggcaggttgcagagggaatgtgctacttagaatctcaaaattatattcaccgggatctagctgcaaggaacatcctggtgggtgagaatacactgtgtaaagtaggagatttcgggctggctcgcctgatcaaagaagacgtgtatctgtcccatgatcataatattccttacaaatggaccgcgcctgaagctctgagccggggacattatagcacaaaatccgatgtatggtctttcggaatcttactgcatgaaatgttcagtcgcggacaggtgccctaccctggtatgagcaaccacgaggcattcctcagagtggacgctggctatcgtatgccatgccccctcgagtgtcctcctagtgtgcacaagctgatgctcacttgttggtgtagagaccccgagcaaaggccatgtttcaaggccctgagagagagattatctagctttaccagctacgagaatccaacttag

SEQ ID NO: 160840 - protein, 685 aa, Artificial Sequence [sequence omitted]

SEQ ID NO: 160841 - protein, 329 aa, Artificial Sequence
  derived and/or modified sequence
MQLEVDKMGTKLGELLVSRITVEEGEESSRSSTAVRRHPTITLDLQVRRIRPGENRDRDSIANRTRSRVGLAENTVTIESNSGGFRRTISRLERSGIRTYVSTITVPLRRISENELVEPSSVALRSILRQIMTGFGELSSLMEADSESELQRNGQHLPDMHSELSNLGTDNNRSQHREGSSQDRQAQGDSTEMHGENETTQPHTRNSDSRGGRQLRNPNNLVETGTLPILRLAHFFLLNESDDDDRIRGLTKEQIDNLSTRHYEHNSIDSELGKICSVCISDYVTGNKLRQLPCMHEFHIHCIDRWLSENCTCPICRQPVLGSNIANNG

SEQ ID NO: 160842 - DNA, 2058 bp, Artificial Sequence
  derived and/or modified sequence
atgaatcagtccagatctcgctccgacggcggcagcgaggaaacactgccccaagaccacaatcatcacgagaatgaaagacgttggcagcaggagagactgcatcgggaggaagcttactatcaattcataaacgagttgaatgatgaggattatcgattgatgagggatcacaacctccttggcacccccggggagatcaccagtgaggaactccagcagagattagatggcgtcaaggaacaattggcctcccagcctgatctgagggacgggactaattatcgtgattccgaggtcccccgcgagagcagccacgaggactccttgttggagtggctgaatactttccggcggactggcaacgccactagaagcgggcagaacggaaaccagacatggcgagccgtttctcgtacaaacccaaataacggggaattcagattcagtcttgagattcacgtcaatcatgaaaacagagggtttgaaatacatggagaagactacacagatattcccttgtcggactccaatagagatcacacagccaaccgtcagcagaggtcaacaagccctgttgcacgcaggacccgctctcaaacgtctgtaaacttcaatggctcttcatcaaacatcccgcggacccgtctagcaagcagaggacagaaccctgctgaggggtcttttagtaccttgggaaggctacggaacgggataggcggggccgctggcatccccagggccaatgcgagcaggactaatttctcatcccacacaaaccagtccggcggtagtgagctgcgccagagagagggtcagagattcggcgctgcccatgtgtgggagaatggtgctcggtcaaatgtaacagtgcgtaacacgaatcaaaggctggaaccaattcggctccggagtacaagtaatagccgcagtcgttcccctattcagcggcaaagtggtaccgtatatcataattctcaaagggaatccagaccagtacagcagacaacacgccgatcagttcggcggcgcggcaggacacgcgtttttcttgagcaggaccgagagcgggagagaagggggaccgcttatacgccattttctaacagtaggcttgtgtcaaggatcaccgtggaggaaggcgaagagagcagtcgaagctcgaccgcagttagacgacacccaacaatcactcttgacctgcaggtccgccggattcgcccaggggaaaacagagaccgagacagtatcgcgaacaggaccagatctcgtgtaggactggccgagaataccgtcacaattgagagcaactcaggagggttcaggagaactatttctcgactcgaacgcagcgggattaggacgtacgtgtccaccatcacagttccattacgacgcattagcgagaacgagctggtagagccttcatcggtggcgcttcgttcaatcttacgccagatcatgaccggctttggggaactctcgtctctgatggaggccgattccgaatccgagctccagagaaacgggcagcatctgcctgacatgcattcggaactgtccaacttgggcacggacaacaaccggtctcagcaccgcgaaggttcaagtcaggatcgccaggctcagggagacagcacagagatgcacggagaaaacgagactacacagccccacactagaaacagcgattctaggggggggcggcagctcagaaaccctaataatctagttgaaacagggacactgcccatactgaggttagcgcatttctttttgcttaacgaaagtgatgacgatgatcggattaggggcctcactaaagaacagattgacaacctgtcaacacgtcattatgagcacaattccatagactctgagctcggcaagatctgtagcgtttgtatctcggactatgtgactgggaacaaattaaggcagctgccatgtatgcacgagttccatattcactgtattgaccgttggctatccgaaaactgcacttgccctatctgccggcagccagttttggggagcaatatagcgaacaatggatag

SEQ ID NO: 160843 - DNA, 2058 bp, Artificial Sequence
  derived and/or modified sequence
atgaaccaatcgcggtcccgcagcgacggtggcagtgaagaaacactgccccaggatcacaaccaccacgagaatgagcgacgctggcagcaggagagactccatcgagaggaggcatattaccaatttatcaacgagttaaacgacgaagactataggttaatgagagaccataatctgctaggaactcctggcgaaataacgtccgaagaattgcagcaaaggttagatggcgtcaaagagcaattggcaagtcaacccgatttgagggacggtaccaactatcgcgactccgaagtgcctcgagagagttctcatgaagactccctgctcgagtggctaaatactttccggcgaaccgggaatgccacaagatctgggcagaatggcaaccagacttggagagctgtttctcgcactaatccgaacaatggtgaattcaggttttcactcgaaattcacgtgaaccatgagaatagggggttcgaaatccatggggaagactatacagacatcccactttctgattctaaccgcgaccacaccgccaaccgacagcagcggtcgacatccccagtggcaagaaggactcgatctcaaaccagcgtgaacttcaacggctcctccagtaacatcccacggacaaggctggcgtcccgggggcaaaacccagccgaagggagcttttccacactcggccgactgcgcaatggaatcggcggcgctgcaggaatacctagagcgaatgcctcacggacaaatttcagctcgcatacgaaccagtccggaggctcagagctcagacaacgggagggacaacggtttggggccgcacacgtctgggagaatggggcaaggtcgaacgtgaccgtccgcaataccaaccaacgcttagaacccatccggctccgctccacgtcaaatagcaggtcccgatctcccatccagaggcagtctggaacagtctaccacaattcccagcgcgaatccaggccggtccagcagactaccaggcgcagcgtacggaggaggggccgaacacgggtttttttggagcaggatcgggaacgagaaaggaggggcaccgcatacactcccttctcaaactctaggcttgtgagccgtatcaccgtggaggagggggaggaaagtagcaggagtagcacagccgtcagaagacatccgacaataacgttggacttgcaggtgaggcgcattcgcccaggcgagaatcgtgatagggacagtatagcgaatcgaaccagatcacgtgtgggacttgccgagaacacggtaactatagagtctaattccggcggttttcgccggaccattagtcggttagagcggtctgggatccgaacctacgtctccacaatcactgtgccgctgcgtaggatctccgagaacgagttagtcgagccatcctcagtggcgctgagatccattctgaggcagatcatgacgggtttcggcgaactgagctctcttatggaagctgattcagaaagtgagctgcaacggaacggacaacatctccctgacatgcactccgagctgtctaatctgggaacggacaataatcgatcccaacatcgggaggggtcctcacaagatcgacaggcccagggggactccaccgagatgcatggtgaaaacgagactactcagccccatacgagaaactcagacagccggggaggaagacaactacggaatcctaataacttggtcgagaccggaacactgcctatcctgaggttagcgcatttttttttactgaatgagagcgacgatgatgatcgcatccgcggactgacaaaagaacagatcgacaatctgtctacacgccattatgagcataattcaatagactctgagctggggaaaatctgcagcgtctgcatttctgactacgtgactggaaacaagctgcggcagttaccttgtatgcatgaatttcacatccactgtatagataggtggctgagcgaaaactgtacctgccctatctgccgacaaccagtccttggttccaacatcgcgaataacggttag

SEQ ID NO: 160844 - DNA, 2058 bp, Artificial Sequence
  derived and/or modified sequence
atgaaccaatcccgctccaggtctgatggaggatccgaggagaccctccctcaggaccacaaccatcacgagaacgagcggaggtggcagcaagagcgcctgcacagagaagaggcttactaccagttcattaacgaattgaacgacgaagactatcgacttatgagagaccataacctgttgggcacccctggcgagatcacatccgaagagcttcaacagagactcgacggagtaaaagagcaactcgcgagtcagcccgacctgagggacggcaccaattatcgcgacagtgaagttcccagggaatccagccacgaagactctttgctcgagtggctcaacacgtttagaaggaccgggaacgccacaagaagtgggcagaatggaaaccagacgtggcgggcagtgtccagaactaatccaaacaatggcgagtttaggttttccttagaaatccacgtgaaccatgagaaccgggggttcgaaatccatggggaagattatacggatattccactgagcgattcaaatcgtgatcacacagccaacagacaacagagatccacctccccagtggccagacggacaagaagtcaaactagcgtcaactttaacggaagctcctctaacattcccaggacccgcctcgcaagtcgcgggcaaaatcccgctgagggatctttcagcacattgggcagactaagaaatggcatagggggcgctgccggaatcccccgggccaacgcctctcggacaaacttcagtagccacaccaatcagtccggagggtccgagcttcgccagcgcgagggacagagatttggagcagctcacgtctgggagaacggcgcccggagcaacgtcactgttcgcaatacaaatcagcgactggagcccattcgcctacgaagtacttcaaatagcaggtcacggtccccgattcagaggcagtctggcacagtgtaccacaactcacaacgcgaatcaaggcctgtgcagcagacaaccaggcggagtgtgcggaggcggggacgcactcgggtctttctggagcaagaccgggaacgggagcgaagggggactgcttataccccattcagcaatagtcgtttggtctctcggatcaccgtcgaggagggcgaggaatcctcccgctcatcaactgccgtcaggaggcatcccaccattacccttgaccttcaagttcggcggatcagacccggggagaatcgcgaccgggattcaatcgcgaaccgtacccgttctcgagtgggcctggcagaaaatactgtgacaatagagagtaactcaggcggttttcgacgaacaattagccgtttagagcgatctggaatcagaacatatgtttcgactattaccgtgcctttgcggcgtatcagcgaaaacgaactggttgaaccttcctccgtggcattacggtctatactacggcagatcatgactgggttcggtgaactcagttctctaatggaagccgactccgaatccgagcttcagcgaaatggtcagcaccttcctgatatgcattccgaactgtcgaatctcggcactgacaataatcggtcacagcatcgcgagggcagttcccaagaccgccaggctcagggcgactctacagagatgcatggagaaaacgagacgactcagccacacactcggaattccgactctcgcggtgggcggcagctcaggaacccaaataatcttgtggagaccggcactttgccgattctgagactggctcatttttttttgctgaacgagtcagatgatgacgacagaatccggggcctgacgaaggagcagatagataacctgagtacacggcactatgagcataatagcatcgatagcgaactcggcaaaatctgttctgtgtgcataagcgattacgtcaccggaaataaacttagacagcttccctgcatgcacgagttccatattcattgtatcgatcggtggctgtctgagaactgcacttgtccaatatgcagacagccggtgctgggaagcaatatcgccaacaacggttag

SEQ ID NO: 160845 - DNA, 990 bp, Artificial Sequence
  derived and/or modified sequence
atgcaacttgaggtcgacaagatgggaactaagctaggcgagttgttggttagccggattaccgtcgaagagggagaagaaagctccaggtctagcacagcagtgagacgccaccctactatcacgctggatttgcaggtgcggaggatcagacccggagaaaatcgggacagagactcaattgctaaccggactagatcacgggtgggattagctgaaaatactgtcactatcgaatcgaattctgggggtttcaggagaaccatttcacggctggaacgttcaggtataaggacatatgtgtctactatcactgtcccgctccggagaatctctgaaaatgagctcgtcgagccctcttctgttgccctgagaagcatcctgcgacagataatgaccgggtttggcgagctttcgagccttatggaggccgactctgagagcgaactgcaaagaaatggccaacacctgcccgacatgcattccgagctgtcaaacctggggaccgacaataaccgctctcagcaccgggaagggagtagtcaagaccgacaggctcagggagactctaccgaaatgcacggggaaaatgagactacacaaccccacaccagaaactccgactcaaggggcggaaggcagttgcggaatcctaataacctggttgaaactggaaccctcccaattctcagactggcacattttttcctgctcaacgagtcagacgatgatgaccgaatccgcggtctcaccaaagagcagattgacaacctctccacccgtcactatgaacacaacagtatagattctgagttggggaaaatatgctccgtctgcatttcagactacgtgactggcaacaagctgcgtcagctgccttgtatgcatgagttccatatacactgtatcgatcgctggctcagtgagaactgtacctgccccatatgtagacagccagtcctgggcagcaatatcgccaataatggatag

SEQ ID NO: 160846 - DNA, 2058 bp, Artificial Sequence
  derived and/or modified sequence
atgaaccagagccgcagcagaagtgatggcggcagcgaggagaccctgccccaggaccacaaccaccatgaaaatgaaagacgctggcagcaggagcggctgcaccgggaggaggcctactaccagttcatcaatgagctgaatgatgaggactaccgcctgatgagggaccacaacctgctgggcaccccaggagagatcaccagcgaggagctgcagcagaggctggatggagtgaaggagcagctggccagccagcctgacctgagagatggcaccaactacagagacagcgaggtgccccgggagagcagccatgaggacagcctgctggagtggctgaacaccttccggaggactggaaatgccaccaggagcggccagaatggaaaccagacctggagggctgtgtccaggaccaaccccaacaacggggagttccgcttcagcctggagatccacgtgaaccacgagaacagaggatttgagatccatggagaggactacacagacatccccctgagtgacagcaacagagaccacacagccaaccggcagcagaggagcaccagccctgtggcccggaggaccaggagccagacctctgtgaacttcaacggcagcagcagcaacatccccaggacccggctggccagccggggccagaacccagctgagggcagcttcagcaccctgggccgcctgagaaatggaattggaggagctgctggcatcccccgggccaatgccagcaggaccaacttcagcagccacaccaaccagagcggcggcagcgagctgcggcagcgggagggccagagatttggagctgcccacgtgtgggagaatggagcccggagcaatgtgacagtgaggaacaccaaccagaggctggagcccatccggctgcggagcaccagcaacagccgcagccgcagccccatccagaggcagagcggcaccgtgtaccacaacagccagcgggagagcaggcctgtgcagcagaccacccggcgctctgtgagaagaagaggccgcaccagggtcttcctggagcaggaccgggagcgggagcggcggggcacagcctacacccccttcagcaacagccggctggtgagccgcatcaccgtggaggagggggaggagagcagccgcagcagcacagctgtgcggcggcaccccaccatcaccctggacctgcaggtgcggcgcatccggcctggagagaacagagaccgggacagcatcgccaacagaaccaggagccgggtgggcctggctgaaaatacagtgaccatcgagagcaacagcggcggcttccggaggaccatcagccggctggagaggagcggcatccgcacctacgtgtccaccatcaccgtgcccctgcggcgcatcagtgaaaatgagctggtggagcccagctctgtggccctgcggagcatcctgcggcagatcatgactggatttggagagctgagcagcctgatggaggccgacagcgagagcgagctgcagagaaatggccagcacctgcctgacatgcacagcgagctgagcaacctgggcacagacaacaacagaagccagcaccgggagggcagcagccaggaccggcaggcccagggcgacagcacagagatgcacggggagaatgagaccacccagccccacaccaggaacagcgacagcagaggaggccggcagctgaggaaccccaacaacctggtggagaccggcaccctgcccatcctgcggctggcccacttcttcctgctgaatgaaagtgatgatgatgaccgcatccggggcctgaccaaggagcagattgacaacctgagcaccaggcactatgagcacaacagcattgacagcgagctgggcaagatctgcagcgtgtgcatcagtgactatgtgactggaaacaagctgcggcagctgccctgcatgcatgagttccacatccactgcatcgaccgctggctgtctgagaactgcacctgccccatctgccggcagcctgtgctgggcagcaacatcgccaacaacggctag

SEQ ID NO: 160847 - DNA, 990 bp, Artificial Sequence
  derived and/or modified sequence
atgcagctggaggtggacaagatgggcaccaagctgggggagctgctggtgagccgcatcaccgtggaggagggggaggagagcagccgcagcagcacagctgtgcggcggcaccccaccatcaccctggacctgcaggtgcggcgcatccggcctggagagaacagagaccgggacagcatcgccaacagaaccaggagccgggtgggcctggctgaaaatacagtgaccatcgagagcaacagcggcggcttccggaggaccatcagccggctggagaggagcggcatccgcacctacgtgtccaccatcaccgtgcccctgcggcgcatcagtgaaaatgagctggtggagcccagctctgtggccctgcggagcatcctgcggcagatcatgactggatttggagagctgagcagcctgatggaggccgacagcgagagcgagctgcagagaaatggccagcacctgcctgacatgcacagcgagctgagcaacctgggcacagacaacaacagaagccagcaccgggagggcagcagccaggaccggcaggcccagggcgacagcacagagatgcacggggagaatgagaccacccagccccacaccaggaacagcgacagcagaggaggccggcagctgaggaaccccaacaacctggtggagaccggcaccctgcccatcctgcggctggcccacttcttcctgctgaatgaaagtgatgatgatgaccgcatccggggcctgaccaaggagcagattgacaacctgagcaccaggcactatgagcacaacagcattgacagcgagctgggcaagatctgcagcgtgtgcatcagtgactatgtgactggaaacaagctgcggcagctgccctgcatgcatgagttccacatccactgcatcgaccgctggctgtctgagaactgcacctgccccatctgccggcagcctgtgctgggcagcaacatcgccaacaacggctag

SEQ ID NO: 160848 - DNA, 2058 bp, Artificial Sequence
  derived and/or modified sequence
atgaaccagagccggagccggagcgacggcggcagcgaggagaccttaccccaggatcataaccatcacgaaaacgagagacgatggcagcaggaacgcctgcaccgcgaggaggcctattatcagtttattaatgaacttaatgacgaggactatcggttgatgagagaccacaacttattggggactcccggcgagataactagtgaggagctgcaacagaggttggacggcgtgaaggagcaactcgcatcccagcccgacctgcgagatggcacaaactatcgagactcggaggtaccaagagaatcatcacatgaagacagtctgttggaatggctgaacactttccgacgcaccgggaatgccacaaggagtggccagaacggcaaccagacatggagggcagtaagtcgaaccaatcccaataatggtgaattcaggttctccctagagatacatgtgaaccatgagaaccgtggattcgaaatccacggggaggattataccgacattcctttatctgactctaatagagaccacacagcaaatcgccagcaacgctcgacgtcccccgttgcccggcgcacccgcagccagactagcgtgaatttcaatgggtcaagctctaacatccctagaacacgtctggcttctcgaggtcagaaccctgccgagggctccttttccaccctcggaaggctgcgcaacggcatcggaggggctgccggcattccccgcgctaatgcctctcggaccaatttcagctctcacaccaatcagtctggtggttctgaactgaggcagcgggagggccagcgttttggcgcagcccacgtgtgggagaacggggcccggtcaaatgtgaccgtccggaacacaaatcagaggctcgagcccatccgattgagaagtacttcgaactctcggagtcgctcccctatccagcggcaaagcggaaccgtgtatcacaatagccagcgtgaatcaagacccgtgcagcagaccaccagacggtcggtgaggcggcgggggcgtacacgtgtcttcttagaacaagatcgagaacgcgaacgtagaggtacagcctacaccccattctctaatagcagactggtgtcccgcatcaccgtggaggagggggaagagtccagccgatcaagcaccgcggtgagaaggcaccccaccataaccctggatcttcaggtacgcaggattcgtcccggcgagaacagagatcgtgacagtatagccaatcgcactagatcaagagtgggtctcgcagaaaatacagttaccattgagagtaactctggcggatttcgaagaacaatttcaaggttagagagatctggcattagaacatatgtgtcgactatcactgtgcccctgaggagaatttctgagaacgagctagtggaaccttcgtccgtagcattgcgctctattttgcgccaaatcatgactggatttggtgagttgtcctcattgatggaggcagattcagagtctgaactgcaacggaatggccaacacttacccgacatgcactcagagctctcaaaccttgggactgataacaatagatcacagcatcgcgaaggctcgtcacaggaccgacaggcacagggagatagtaccgagatgcatggagagaatgagacgacccagccacacacccgtaattcagacagtagaggcggcagacagttgcggaatccgaacaatctggttgaaacggggaccctgccaattctccgactggcccacttctttctcctaaatgagtcagacgacgacgacaggattcggggcctgacaaaagagcaaatcgacaatctttccacgcgccactatgaacataattccattgactctgaactaggcaaaatttgctcggtgtgcattagtgactacgtaaccggaaataaactaagacagcttccctgcatgcacgagtttcatatccactgcattgatagatggttgtcggaaaactgcacatgccccatatgtaggcagcccgtgttgggcagcaacattgctaataatggctag

SEQ ID NO: 160849 - DNA, 2058 bp, Artificial Sequence
  derived and/or modified sequence
atgaaccagagccggagccggagcgacggcggcagcgaggagaccctaccccaggaccacaatcaccacgaaaatgagcgccgatggcagcaggaacggctgcacagggaagaggcatactaccagttcattaatgagctgaacgatgaagattatcgcctaatgagggaccataatctgctgggaacacccggggaaatcacctccgaagagctacagcagcgcctcgatggcgttaaagaacagctggctagccagcccgatctacgtgatggaacaaattatcgggactctgaggtgccgcgcgagtcctctcacgaagactccctgctggagtggttaaatacctttcggcgtacaggtaacgccactaggtcaggtcagaatggcaatcagacgtggcgcgccgtcagcagaacaaacccaaacaacggcgagttcaggttctcacttgagattcacgtgaaccatgaaaatagaggcttcgaaattcacggcgaagactatactgatatacctctgtcagactccaatcgcgatcacaccgccaatcgtcagcagagaagcacttctcccgtggccaggcgtaccagaagtcagaccagtgtgaacttcaacgggtcttcatcaaacatcccccgcacccgactggcttctaggggccagaatccagccgaaggcagcttttctaccttagggagactccggaatggaatcggcggcgctgcgggaattcccagagcaaacgcaagccggacgaacttttcatcacacacgaaccagtccggaggctctgagctgcgacaaagagagggacaacgcttcggagcggcccacgtgtgggaaaacggagcaaggtcaaacgttaccgttcggaacaccaaccagagactggaacctatccgtttacgcagcacatctaactcccggagtaggtctcctatccagcggcagagcggaaccgtgtaccataacagtcaaagggagtcgaggccggttcaacagaccacccgacgttccgttcggcgcagaggcagaacaagagtgttcctagaacaggatagagagcgggagcggcgtggtacagcttacacgcctttcagcaatagtcgtctcgtgtcccgaatcacggtagaggaaggagaagagtcatcaagaagttcaactgccgtacgtcgccacccaactataacacttgatctgcaggtgaggcggattcgacccggtgagaatcgggatcgcgactcaattgccaatcgcacacgaagccgggtagggcttgccgagaacaccgtaacgatcgaaagcaattctggagggtttaggagaactattagccgcctcgagagaagcggaatacggacttacgtttctaccatcacggttcccctacgccggatctcagagaacgagttggtagaaccctctagcgtcgccctcaggtctatcctacgacagatcatgacagggtttggggagttatccagcttgatggaggctgactcagaaagtgaactccaacgcaacggtcagcatctccccgatatgcactcagaattatccaatctgggaacagataacaatcgtagtcagcatcgcgaaggctcatcccaagataggcaggcccagggcgactccaccgagatgcacggagagaacgaaaccactcagccacatacccgtaactcagattcgcgaggcggcaggcagttgagaaatccgaacaacctggtggagactggaacgctaccaattttgagactggcccatttttttctcttaaacgagagcgacgacgatgaccgaattcggggcctaaccaaggagcaaatcgataatctgtccacccgacattacgaacataactcgattgatagcgaacttggtaaaatatgcagcgtgtgcatttcggactatgtcactgggaataagttgagacaattaccctgtatgcatgagtttcacattcactgcatcgaccgatggctcagcgagaattgtacatgtcctatctgcaggcagcctgtgctgggctctaatatcgcaaacaacggctag

SEQ ID NO: 160850 - DNA, 2058 bp, Artificial Sequence
  derived and/or modified sequence
atgaaccagagccggagccggagcgacggcggcagcgaggagaccctaccccaggatcataatcatcacgagaacgagaggcgatggcagcaggaaaggctgcaccgcgaggaagcatactaccagtttataaatgaactgaatgacgaagactatagacttatgcgggaccacaacctgctgggcacccccggagagatcacttcggaagagttgcagcagcggctggatggggtcaaagagcagttggcatcacagccagatctgcgggatgggacaaactacagggatagtgaggtaccgagggagagctctcatgaggattcgttactggagtggctgaacactttccgcaggacaggcaatgctactcgcagcgggcagaatggaaaccagacttggcgcgcagtgtcccgaacgaatccaaataacggcgagttccggttcagtctggaaatacacgtgaaccatgagaatcggggatttgagatccatggtgaggactacacagatatccctctgagcgacagtaatcgggaccataccgccaatagacagcagcgaagtacctcacctgtggctaggcggacacgtagtcaaacgtcggtaaacttcaatggaagctcgtccaatattccccgaacacgccttgcttctcgtggacagaatccggccgagggaagcttttctacccttggcaggcttaggaatggaattggcggagccgcagggattccccgcgccaacgcgagcagaacaaacttctcatcccacactaatcaatccggcgggtctgaactcaggcaacgcgagggtcagaggtttggtgctgcccatgtgtgggaaaatggcgctcggtctaatgtgacagtccgtaacacaaatcagaggctggagccgatccgcctccgaagcacgtccaattcgcgatcgcgcagccccatacaacggcaatcaggcactgtatatcacaactcacagagggagtctcggcctgtgcagcagaccacacgaagaagtgtacggcggaggggtcgcacccgcgtctttttggagcaggatcgggaacgagaaagaagaggaactgcttacacaccattctccaacagtcgcctggtgagcagaatcacagtggaggaaggggaggagagcagccgctcgagcaccgccgttcgacgccacccaactatcactctcgatctccaagtcaggaggattagaccaggtgagaatagagaccgggactccatagcaaacagaacccgctcacgggtgggcctcgcagaaaacacggttacgatagagtcgaattcaggaggattccgtagaacaatctccaggctggaacggtcagggattcgcacatacgtgtctaccattacagtcccattacggaggatttccgagaatgagcttgttgagccttcatccgtggccctgcgatccattctgagacagattatgactggcttcggtgagctgagcagcctgatggaggcagactcagaaagcgagcttcagaggaatggacagcacctgcctgatatgcacagcgagctgagtaatctcggcactgacaacaataggtcgcagcatcgggaggggagttcccaggataggcaggcccagggcgacagcaccgagatgcatggcgagaacgaaaccacccagccacatactcgtaattccgacagccgcgggggccggcagctgcgcaatcctaacaacctggtcgagaccggcacacttccgatactgcggcttgctcatttcttcttgcttaatgagagcgatgatgatgaccggattaggggcttgaccaaagagcagatagataacctcagcaccagacactatgagcacaattctattgatagtgagttaggaaagatttgctctgtttgcatttcggactatgtgactggcaacaagctgcgacagctcccgtgtatgcacgagtttcacatacactgcatagaccggtggctctccgagaattgtacatgtcccatttgtcgccagcccgtgctggggtccaatattgccaacaatggctag

SEQ ID NO: 160851 - DNA, 990 bp, Artificial Sequence
  derived and/or modified sequence
atgcagctggaggtggacaagatgggcaccaagctgggcgagctgttagtgagcagaattacggtcgaagagggcgaagaatcttctaggtcatccaccgccgtgagaagacacccaaccattacgcttgacctacaggtccggcgcatccgcccaggcgaaaaccgagaccgcgactcaattgctaatagaaccagatcacgggtcgggctcgccgagaacacggtcactatcgaaagcaatagtggcggattccgacggaccatctcgagactcgagcgcagcggcatcagaacgtatgtcagcactattaccgtaccactgagaaggatttcagagaacgaactcgtcgagcctagctccgtcgcactccgaagtatcctgaggcaaattatgaccggattcggagaattgtcatctcttatggaagccgactctgaatccgagctgcagagaaacggtcagcacctgccagacatgcattctgagttatctaaccttggcaccgataataatcgctcacaacacagagaagggtcttcacaagaccgccaggctcaaggcgacagcacggaaatgcacggagaaaatgagaccacccagccccataccagaaattctgattcccgtgggggtcgtcagctccgaaatcccaacaatttagtggagacaggcacgctccccatcctgcgcctcgcccacttcttcctgctgaatgaaagcgacgatgatgataggattaggggcctcactaaggaacagatcgataacttaagcacgcgccactatgaacataattcaatcgatagcgaactgggcaaaatatgcagcgtctgtatctcagactatgttacaggcaataagttgaggcagctaccatgcatgcatgagttccatatccattgtatcgatcggtggctgtcggagaattgcacttgtcctatctgcagacagcccgtgctcggtagtaatatcgctaacaacggctag

SEQ ID NO: 160852 - DNA, 2058 bp, Artificial Sequence
  derived and/or modified sequence
atgaatcaatcaaggtcacgctctgacggaggaagcgaggaaacgctcccccaggaccacaaccaccatgagaacgaaaggcgctggcagcaagagcggctacacagagaggaagcctactaccagttcattaatgaactgaatgacgaggactatagacttatgagagatcataatcttcttggcactccaggggaaattacgtctgaggaacttcagcagaggctggatggggtgaaagagcagctggcttcccaaccagacctgagggacggcaccaattatagagatagtgaagtgcccagagaaagctcccatgaagacagcttgctggagtggcttaacacctttcgacggactggaaacgcgacaagatctggccagaatggaaatcagacctggagagctgtttctagaaccaaccctaacaatggcgagttcagattctccctcgagatccacgtcaatcatgagaatagagggttcgagatccatggagaagattatactgacattccactttcggactccaacagggatcataccgctaaccgacagcagaggtctacctctcccgtcgctcgacgcacacgaagtcagaccagtgttaattttaacgggtcttcatctaacattcccagaaccaggctggctagccgagggcagaaccccgctgagggttcattttctaccttaggccgactgagaaatgggatcggtggggcagccggaatccctcgagcgaatgcctctaggaccaacttctccagtcacacgaaccagagcgggggtagtgaacttcgacagcgggaaggtcagcggtttggagctgcacatgtctgggagaacggggcaaggtcaaatgtgacagtgcgcaatactaatcagcgattggaacccatcaggctgaggtccacttccaactccagatcgaggtcgccgattcagagacaaagtggcaccgtttaccacaactcacagcgcgagagtaggccagttcagcagacaaccagaagaagcgtccgccgaaggggtagaacgcgggtcttcctcgaacaagaccgcgaacgagagaggcggggtaccgcatatacgcctttcagcaactctcgattggtgtctcgaattaccgtggaggagggcgaagagagttccagaagttccaccgctgtgcgaagacacccgaccatcacgctcgatcttcaagtgcgcagaataagaccgggagagaatcgggatagagattcaatagctaacaggacacgctcccgggttggactcgccgagaatacagtaactatcgagagcaattcaggaggttttaggcgtacaattagccgactggagcgaagtgggatcaggacctacgtgagcacaataactgtgccactgcgtcggatctccgagaatgagctggtcgaaccatcttctgtggccttgcggtctatcctgagacagataatgactggattcggcgagctcagctccctgatggaggctgatagcgagagcgaactccagagaaacggccagcatttgccagacatgcattctgagttgagcaacctgggcactgacaacaatcgttcacaacaccgagagggatcatcacaggatcggcaggctcagggggactccaccgaaatgcacggcgaaaacgagaccacacagccccacaccaggaattccgactcacgcggtggtagacaactgcgaaatccaaataacttggtggagaccggcacactgcccatccttagactcgcccacttttttcttctcaacgagagtgacgacgatgacagaatcaggggcctgaccaaagaacagatcgacaatttaagcactcgccactatgagcacaatagtatcgactccgagttgggcaaaatttgttctgtgtgcatcagcgattacgtaaccggtaacaaattaaggcaactcccttgtatgcacgagttccacattcattgtattgatcgctggctttctgaaaattgtacatgtccaatttgtaggcagccagtccttgggagcaatatcgcaaataatggatag

SEQ ID NO: 160853 - DNA, 2058 bp, Artificial Sequence
  derived and/or modified sequence
atgaaccaatcgcgctcccggtcagacggcggtagtgaagaaaccttgccgcaagaccataaccatcatgagaatgagagaaggtggcagcaggagcgacttcatcgggaggaggcttactaccagtttatcaacgagctcaacgatgaagactatagactgatgagggaccacaatctgctagggacaccgggtgagatcaccagtgaggagctgcagcagaggcttgacggcgtgaaggagcagttggctagccaaccagacctgagggacggtactaactaccgagactctgaggtgcccagagagtcctcacacgaagattcgctattggagtggctgaatacatttagacgaaccggaaatgccaccagatcaggacagaatggaaatcagacctggcgtgccgtgagccgaacgaatccaaataacggagagttccggttctcactggagatacacgttaatcacgagaacagaggattcgagattcatggcgaagattacacagatattcccctgagcgatagcaaccgcgatcataccgccaatcgccagcaacggtcaacatctccagtcgctaggagaacacgatctcagacttctgtgaacttcaacgggagctcaagcaatatacccagaacacggttggcttctcggggacaaaatcctgccgaaggctcgttctccaccttgggacgactccggaatggcattgggggtgcggctggcataccaagagctaatgcttctaggaccaatttcagttctcacacaaaccagtctgggggatccgagctgagacagagagaaggtcagcgttttggagccgctcacgtgtgggagaatggagcgaggagcaacgtgacagtaaggaatactaaccagagactggaacccattcgcctaagaagcacatctaactcacgttcacggagtcccattcaaagacagtctggtacggtgtaccacaactcgcagcgagagtcccggcctgtgcagcagaccacgagacgatcagtgcggagaaggggcaggaccagagtttttttagagcaggatcgagagcgcgagcgacggggaacagcttacaccccattcagcaattcccggctggtcagccgaatcaccgttgaagagggagaagaaagcagccgttcctccacggctgttcggaggcaccctactataacattagatctgcaggtgcgcaggataaggccgggagagaatagggacagggattccatcgccaataggacccgctcacgggtgggactggcggaaaataccgttaccatcgaatcgaatagtggaggttttcgacgaacaatttctaggctggagagatctggcattaggacatatgtgagcacaatcaccgtgcccctccggcgaatatcggaaaatgaattggtcgagccaagtagcgtggctttacggagcatcctgagacaaatcatgactggctttggcgagctcagctcactgatggaagctgattctgaatctgaactgcagcgtaacggccagcacctgcctgacatgcactcagaactctcaaacttgggaactgacaacaacagatctcagcacagagagggatcgtcacaagataggcaggcccaaggtgatagcaccgaaatgcacggtgagaatgagacgactcagcctcatacccggaactcagacagtagaggcggacggcagcttcggaatcccaataacctggttgagacagggaccctgcccattctaaggctggctcatttttttctgctgaatgagtctgacgacgacgaccgcatacggggactgaccaaagagcagatcgacaatttgagcacccgacactatgagcacaactccatcgatagcgaactgggcaaaatctgcagcgtgtgcataagcgattacgtaacaggaaataaactacgccagttaccctgtatgcacgagttccacattcattgtatagaccgatggctgtccgagaactgcacctgtcctatttgtcgacaaccagtcctgggaagtaacattgcaaacaacggctag

SEQ ID NO: 160854 - DNA, 2058 bp, Artificial Sequence
  derived and/or modified sequence
atgaatcagtctcgatccaggagcgacggagggtccgaggagaccttgccacaagaccacaaccatcatgaaaacgagcgcaggtggcagcaggagagattacaccgagaagaagcgtactaccagttcatcaatgagcttaacgacgaagactataggctgatgcgggatcataacctgctgggcaccccaggcgaaataaccagcgaagagttacaacaacgactggatggcgtgaaggagcagttggcctcgcagccagacctaagagacggaacgaattatcgcgattctgaggtccctagagagagctctcacgaggattctttgctggaatggctgaacacattcaggcggactggtaacgctacgcgcagtggccagaacggaaaccagacctggcgtgcggtatctaggaccaatcccaataacggtgagttcagattctcacttgagatacatgtaaaccacgaaaatcggggttttgagatccacggagaggactacaccgatatccccttgtccgactccaacagggatcataccgccaacagacagcagagaagcacgtccccagtggcgaggcgtacacggtctcaaaccagtgttaactttaacggctcttcaagcaacatccctcgtactcggctagccagtagaggacaaaaccctgcggagggcagcttttcaaccctagggcgattgagaaatggcataggcggagccgctggaattccacgcgcaaacgcatcaagaactaacttttcatcccatacaaatcagtccggaggtagtgaactccgacagcgagaagggcagaggttcggggcagcccacgtgtgggagaatggtgctcgtagcaatgtaacggtgcgcaacacaaatcaaagattggagccaattcgcctccgatctacctcgaatagccgaagccggtccccgattcaacgacagagcggcaccgtgtaccacaactcccaacgtgaaagccggcctgtgcagcagacaaccaggaggtcagtgcgaagaaggggcagaacacgcgtgttcctggagcaggatagagagagagagcggagaggtaccgcttacaccccattcagcaattcccgactcgtttcacggatcactgtcgaagagggggaggaaagctcacgatccagcaccgcggtacgcagacaccctactattacgctcgatcttcaggtacggagaattagaccaggcgaaaaccgcgatagagattccatcgccaatagaaccagatccagagtcgggctggcagagaatacggtgactatagagtctaactccggcggatttaggagaactataagccgcttagaacgctcagggatcaggacctacgtgtcaaccatcacagtgccactaaggcgaatctctgaaaacgagctcgttgagcccagctctgtggctctgagatccatccttaggcagatcatgaccggatttggcgaactcagctcacttatggaggccgactcggagtcagagctgcagagaaacgggcagcacttgcctgacatgcactcagagctgtcaaatctaggtactgacaacaaccggagtcagcatcgcgagggaagtagccaggacaggcaggctcagggtgattctacggagatgcacggcgagaacgagactacccagccacacactcgcaacagcgactcacggggaggcagacagctcagaaatcccaataacttggttgagacgggaactttgcctatcctaagacttgcgcacttttttcttttgaatgagtctgacgatgatgatcgcatccgtggtctgacgaaggaacagatcgataatctttctactagacactacgaacataactccatagacagcgagcttgggaagatatgtagcgtttgtattagtgactacgtgacaggtaataagttgcggcagcttccctgcatgcatgaattccatattcattgtattgacaggtggctgtctgaaaattgtacatgcccaatctgccgccagccagtgctgggaagcaatatagcgaataacggttag

SEQ ID NO: 160855 - DNA, 990 bp, Artificial Sequence
  derived and/or modified sequence
atgcagctggaagtcgataagatggggacaaagctaggggaattgctcgtttcacgcatcactgtggaggagggagaagaatcctcgaggtcctccactgccgtcaggcgtcacccaactattacacttgatctgcaggttcgtcgaatccggcctggggaaaaccgcgatcgtgatagtattgccaacaggactcgctcaagggtggggctggccgagaatactgttacaatcgagagcaactcgggtgggtttcggagaaccattagccggctggagcggtcaggtatacggacctatgtctctactattaccgtgcctctaagaagaatctccgaaaatgagcttgttgagccttccagcgtggccctgagatccatacttcggcagattatgactggattcggtgagttaagttccttgatggaggctgattccgagtcagaactgcagcgcaatggacagcacctacctgacatgcactccgaactgtccaacctgggcacggacaacaacaggtcccagcatcgagaagggagctctcaggatagacaggcccagggtgacagcacggaaatgcacggcgaaaacgaaactacccagccccatactcgcaacagtgactctcggggagggagacagcttaggaacccaaacaacctggttgagactggtacattacccattttgagattggcgcattttttcttgctgaacgagtcagacgacgatgatcggatacggggtttgaccaaagagcagatagacaacttgtccactcgccattatgaacataattcaatagattctgaacttggaaagatttgtagtgtctgtatcagcgattacgtcaccggaaataaactacgacagctgccctgcatgcacgaattccacattcactgtatcgatagatggctgtccgagaactgcacgtgcccaatctgccgacaacctgtcttgggctccaacattgcaaataacggctag

SEQ ID NO: 160856 - DNA, 3276 bp, Artificial Sequence
  derived and/or modified sequence
gcttccttgtgagaatctaggtctctaagggaagcgttacttgaggctcggttgggaagagatgggcagctctcaaaaaaggcacaaacaattgaaggatggataccatggcatatgttaaaagcgtgttgaaaggaaaataagaaagccaggaatctcaggatgaatcagtctagatcgagatcagatggtggcagtgaagaaaccttacctcaagaccataatcatcatgaaaatgagagaagatggcagcaagagcgtctccacagagaagaggcctattatcagtttattaatgaactcaatgatgaagattatcggcttatgagagaccataatcttttaggcacccctggagaaataacatcagaagaactgcaacagcggttagatggcgtcaaggaacaactagcatctcagcctgacttgagagatggaacgaattacagagactcagaagtccctagagaaagttcacatgaagattctcttctagaatggttgaacacctttcggcgcacaggaaatgcaactcgaagtggacaaaatgggaaccaaacttggagagctgtgagtcgaacaaacccgaacaatggagagtttcggtttagtttggaaatccacgtaaatcatgaaaatagaggatttgaaattcatggagaagattatacagacattccactttcagatagtaacagagatcatactgcaaataggcaacaaaggtcaactagtcctgtggctaggcgaacaagaagccaaacctcagtgaatttcaatggtagtagttccaacattccaaggactaggcttgcttcaagggggcaaaatccagctgaaggatctttctcaacattgggaaggttaagaaatggaattgggggagcagctggcattcctcgagctaacgcttcacgcactaatttcagtagtcacacaaaccaatcaggtggtagtgaactcaggcaaagggaggggcaacggtttggagcagcacatgtttgggaaaatggggctagaagtaatgttacagtgaggaatacaaaccaaagattagagccaataagattacgatctacttccaatagtcgaagccgttcaccaattcagagacagagtggcactgtttatcataattcccaaagggaaagtagaccagtacagcaaaccactagaagatctgttaggaggagaggtagaactcgagtctttttagagcaagatagagaacgagaacgcagaggtactgcatataccccattctctaattcaaggcttgtgtcaagaataacagtagaagaaggagaagaatccagcagatcctcaactgctgtacgacgacatccaacaatcacactggaccttcaagtgagaaggatccgtcctggagaaaatagagatcgggatagtattgcaaatagaactcgatccagagtagggctagcagaaaatacagtcactattgaaagcaatagtgggggctttcgccgaaccatttctcgtttagagcggtcaggtattcgaacctatgttagtaccataacagttcctcttcgtaggatttctgagaatgagcttgttgagccatcatcagtggctcttcggtcaattttaaggcagatcatgactgggtttggagaactgagttctctaatggaggccgattctgagtcagaacttcaaagaaatggccagcatttaccagacatgcactcagaactgagtaacttaggtacagataacaacaggagccagcacagggaaggttcctctcaagacaggcaggcccaaggagacagcactgaaatgcatggtgaaaacgagaccacccagcctcatactcgaaacagtgacagtaggggtggcaggcagttgcgaaatccaaacaatttagttgaaactggaacactacccattcttcgccttgctcacttttttttactaaatgaaagtgatgatgatgatcgaatacgtggtttaaccaaagagcagattgacaatctttccaccaggcactatgagcataacagtattgatagtgaactaggtaaaatctgtagtgtttgtattagtgactatgtaactggaaacaagctcaggcaattaccttgcatgcatgaatttcacattcattgtattgaccgatggctctcagagaattgcacttgtccgatctgtcggcagcctgttttagggtctaacatagcaaacaatgggtaaggtgatgggatctactcaaatactgttttttagtagaactgaatgttcaagcattgttttgctgagttatttgtgattagctaaccaggatgaaaaataacagattatatatagtttgaactatttttcgtgtgcttttttaaacttgttaaaaagaaatttatataaaatttaaaatacaaatgttaaattatccagaaatacagaatagttaatattgctagaaccaaataacctctaaaatgtttttattttggtaattttgtcatgctaagcacttttgtatctgcacaattcagtaggttaagaatcaatcttctttttcttaatagtacagcagactttagcttcaagtttcataggcttagtacttatatctagacatttgtgtctaaataagcttttcattaactttttattttaaggacagtatcttttcatgaaagagtatttggctgaatgtttgctatatatatgttacttgaaatgttaaatttaatatgcagcataccataggtgtatatataggtatataattttaaggttaaaatattcagtctacaagtttggttcttatttaagcttttgggctaatactgcatatggcacaatgtttaatattggcaagttcatctcagagaaaggggattcagatataattttaaagtagagataatttactgaagcgtctctgacaatctaacttattagacagcaagcaatatataatactgaaaaagtattcagaaatggaaaatttacatcatataggttatttaacttgtgttcagcctttttgtaacttttttgaaagtgcaaacaattctttggattattaaataaggtatacagtatgcatggtttctcaaatttagttttaaaatctaaaagtctataaagaatcagatgcataggcaatatgttaagttcacttggaggctaaaaatctccagtgaaaacaaaacgaaaacctttaagagaatgtagagtttatataaacacaaagtatgcattgaagatctgtttctaccaataaacattaaaacaaagactgta

SEQ ID NO: 160857 - DNA, 3398 bp, Artificial Sequence
  derived and/or modified sequence
gggaaagaaaccagtagcgggacggagggcgggggtggcaagaaagtcaaggtttagaagtaagccggagacgcctaaccctggtaacatccgaatgggaacgggataggaaggaaggcctttgagagaggaggcgtaaacccaggaacagtgacagtgtaggacgaaaggcctaagtttgttgcggaagatgggcagctctcaaaaaaggcacaaacaattgaaggatggataccatggcatatgttaaaagcgtgttgaaaggaaaataagaaagccaggaatctcaggatgaatcagtctagatcgagatcagatggtggcagtgaagaaaccttacctcaagaccataatcatcatgaaaatgagagaagatggcagcaagagcgtctccacagagaagaggcctattatcagtttattaatgaactcaatgatgaagattatcggcttatgagagaccataatcttttaggcacccctggagaaataacatcagaagaactgcaacagcggttagatggcgtcaaggaacaactagcatctcagcctgacttgagagatggaacgaattacagagactcagaagtccctagagaaagttcacatgaagattctcttctagaatggttgaacacctttcggcgcacaggaaatgcaactcgaagtggacaaaatgggaaccaaacttggagagctgtgagtcgaacaaacccgaacaatggagagtttcggtttagtttggaaatccacgtaaatcatgaaaatagaggatttgaaattcatggagaagattatacagacattccactttcagatagtaacagagatcatactgcaaataggcaacaaaggtcaactagtcctgtggctaggcgaacaagaagccaaacctcagtgaatttcaatggtagtagttccaacattccaaggactaggcttgcttcaagggggcaaaatccagctgaaggatctttctcaacattgggaaggttaagaaatggaattgggggagcagctggcattcctcgagctaacgcttcacgcactaatttcagtagtcacacaaaccaatcaggtggtagtgaactcaggcaaagggaggggcaacggtttggagcagcacatgtttgggaaaatggggctagaagtaatgttacagtgaggaatacaaaccaaagattagagccaataagattacgatctacttccaatagtcgaagccgttcaccaattcagagacagagtggcactgtttatcataattcccaaagggaaagtagaccagtacagcaaaccactagaagatctgttaggaggagaggtagaactcgagtctttttagagcaagatagagaacgagaacgcagaggtactgcatataccccattctctaattcaaggcttgtgtcaagaataacagtagaagaaggagaagaatccagcagatcctcaactgctgtacgacgacatccaacaatcacactggaccttcaagtgagaaggatccgtcctggagaaaatagagatcgggatagtattgcaaatagaactcgatccagagtagggctagcagaaaatacagtcactattgaaagcaatagtgggggctttcgccgaaccatttctcgtttagagcggtcaggtattcgaacctatgttagtaccataacagttcctcttcgtaggatttctgagaatgagcttgttgagccatcatcagtggctcttcggtcaattttaaggcagatcatgactgggtttggagaactgagttctctaatggaggccgattctgagtcagaacttcaaagaaatggccagcatttaccagacatgcactcagaactgagtaacttaggtacagataacaacaggagccagcacagggaaggttcctctcaagacaggcaggcccaaggagacagcactgaaatgcatggtgaaaacgagaccacccagcctcatactcgaaacagtgacagtaggggtggcaggcagttgcgaaatccaaacaatttagttgaaactggaacactacccattcttcgccttgctcacttttttttactaaatgaaagtgatgatgatgatcgaatacgtggtttaaccaaagagcagattgacaatctttccaccaggcactatgagcataacagtattgatagtgaactaggtaaaatctgtagtgtttgtattagtgactatgtaactggaaacaagctcaggcaattaccttgcatgcatgaatttcacattcattgtattgaccgatggctctcagagaattgcacttgtccgatctgtcggcagcctgttttagggtctaacatagcaaacaatgggtaaggtgatgggatctactcaaatactgttttttagtagaactgaatgttcaagcattgttttgctgagttatttgtgattagctaaccaggatgaaaaataacagattatatatagtttgaactatttttcgtgtgcttttttaaacttgttaaaaagaaatttatataaaatttaaaatacaaatgttaaattatccagaaatacagaatagttaatattgctagaaccaaataacctctaaaatgtttttattttggtaattttgtcatgctaagcacttttgtatctgcacaattcagtaggttaagaatcaatcttctttttcttaatagtacagcagactttagcttcaagtttcataggcttagtacttatatctagacatttgtgtctaaataagcttttcattaactttttattttaaggacagtatcttttcatgaaagagtatttggctgaatgtttgctatatatatgttacttgaaatgttaaatttaatatgcagcataccataggtgtatatataggtatataattttaaggttaaaatattcagtctacaagtttggttcttatttaagcttttgggctaatactgcatatggcacaatgtttaatattggcaagttcatctcagagaaaggggattcagatataattttaaagtagagataatttactgaagcgtctctgacaatctaacttattagacagcaagcaatatataatactgaaaaagtattcagaaatggaaaatttacatcatataggttatttaacttgtgttcagcctttttgtaacttttttgaaagtgcaaacaattctttggattattaaataaggtatacagtatgcatggtttctcaaatttagttttaaaatctaaaagtctataaagaatcagatgcataggcaatatgttaagttcacttggaggctaaaaatctccagtgaaaacaaaacgaaaacctttaagagaatgtagagtttatataaacacaaagtatgcattgaagatctgtttctaccaataaacattaaaacaaa

SEQ ID NO: 160858 - DNA, 3867 bp, Artificial Sequence
  derived and/or modified sequence
gacagacttcagaatttattagggtttgtaatttccaggttccaaagcacagcaagggaaagggcctggctgggtagtacgttacacccggaagtaaagagacgcatacaccgttgggtgcactttatagtctggctggcaaacgagcgacaccgacgcgcagagttaagtgctgggacttcccaagcctggaaagcagaccgtgtctctgcaactacgcggctgccacgagcgctgagcggccgggcatttggcctcgaggaggaggcactgtaagggcggcgcaagagggcggaacgcgggacgccaggcaccctagctcccgacggacgcagttttcagttgcacgggcgagctccgggccggctgcggagcgactccccgccgccaagtgggcggcgtggctgtcgggaaagaagggctggggcctgccgttcttcctcccgagtatcccctccagctggacgaccccacgctgcagcacgggcttccggcttctctcctcagtggccaattcgagggcacagcgggctccggaggcgcggcggcaagcctatcccgcctcccaaccacagcctccagcacccgagagaacggccgcccacagcacacgttctccggacaggagggcgaaggcccaagacctggagagatgggcagctctcaaaaaaggcacaaacaattgaaggatggataccatggcatatgttaaaagcgtgttgaaaggaaaataagaaagccaggaatctcaggatgaatcagtctagatcgagatcagatggtggcagtgaagaaaccttacctcaagaccataatcatcatgaaaatgagagaagatggcagcaagagcgtctccacagagaagaggcctattatcagtttattaatgaactcaatgatgaagattatcggcttatgagagaccataatcttttaggcacccctggagaaataacatcagaagaactgcaacagcggttagatggcgtcaaggaacaactagcatctcagcctgacttgagagatggaacgaattacagagactcagaagtccctagagaaagttcacatgaagattctcttctagaatggttgaacacctttcggcgcacaggaaatgcaactcgaagtggacaaaatgggaaccaaacttggagagctgtgagtcgaacaaacccgaacaatggagagtttcggtttagtttggaaatccacgtaaatcatgaaaatagaggatttgaaattcatggagaagattatacagacattccactttcagatagtaacagagatcatactgcaaataggcaacaaaggtcaactagtcctgtggctaggcgaacaagaagccaaacctcagtgaatttcaatggtagtagttccaacattccaaggactaggcttgcttcaagggggcaaaatccagctgaaggatctttctcaacattgggaaggttaagaaatggaattgggggagcagctggcattcctcgagctaacgcttcacgcactaatttcagtagtcacacaaaccaatcaggtggtagtgaactcaggcaaagggaggggcaacggtttggagcagcacatgtttgggaaaatggggctagaagtaatgttacagtgaggaatacaaaccaaagattagagccaataagattacgatctacttccaatagtcgaagccgttcaccaattcagagacagagtggcactgtttatcataattcccaaagggaaagtagaccagtacagcaaaccactagaagatctgttaggaggagaggtagaactcgagtctttttagagcaagatagagaacgagaacgcagaggtactgcatataccccattctctaattcaaggcttgtgtcaagaataacagtagaagaaggagaagaatccagcagatcctcaactgctgtacgacgacatccaacaatcacactggaccttcaagtgagaaggatccgtcctggagaaaatagagatcgggatagtattgcaaatagaactcgatccagagtagggctagcagaaaatacagtcactattgaaagcaatagtgggggctttcgccgaaccatttctcgtttagagcggtcaggtattcgaacctatgttagtaccataacagttcctcttcgtaggatttctgagaatgagcttgttgagccatcatcagtggctcttcggtcaattttaaggcagatcatgactgggtttggagaactgagttctctaatggaggccgattctgagtcagaacttcaaagaaatggccagcatttaccagacatgcactcagaactgagtaacttaggtacagataacaacaggagccagcacagggaaggttcctctcaagacaggcaggcccaaggagacagcactgaaatgcatggtgaaaacgagaccacccagcctcatactcgaaacagtgacagtaggggtggcaggcagttgcgaaatccaaacaatttagttgaaactggaacactacccattcttcgccttgctcacttttttttactaaatgaaagtgatgatgatgatcgaatacgtggtttaaccaaagagcagattgacaatctttccaccaggcactatgagcataacagtattgatagtgaactaggtaaaatctgtagtgtttgtattagtgactatgtaactggaaacaagctcaggcaattaccttgcatgcatgaatttcacattcattgtattgaccgatggctctcagagaattgcacttgtccgatctgtcggcagcctgttttagggtctaacatagcaaacaatgggtaaggtgatgggatctactcaaatactgttttttagtagaactgaatgttcaagcattgttttgctgagttatttgtgattagctaaccaggatgaaaaataacagattatatatagtttgaactatttttcgtgtgcttttttaaacttgttaaaaagaaatttatataaaatttaaaatacaaatgttaaattatccagaaatacagaatagttaatattgctagaaccaaataacctctaaaatgtttttattttggtaattttgtcatgctaagcacttttgtatctgcacaattcagtaggttaagaatcaatcttctttttcttaatagtacagcagactttagcttcaagtttcataggcttagtacttatatctagacatttgtgtctaaataagcttttcattaactttttattttaaggacagtatcttttcatgaaagagtatttggctgaatgtttgctatatatatgttacttgaaatgttaaatttaatatgcagcataccataggtgtatatataggtatataattttaaggttaaaatattcagtctacaagtttggttcttatttaagcttttgggctaatactgcatatggcacaatgtttaatattggcaagttcatctcagagaaaggggattcagatataattttaaagtagagataatttactgaagcgtctctgacaatctaacttattagacagcaagcaatatataatactgaaaaagtattcagaaatggaaaatttacatcatataggttatttaacttgtgttcagcctttttgtaacttttttgaaagtgcaaacaattctttggattattaaataaggtatacagtatgcatggtttctcaaatttagttttaaaatctaaaagtctataaagaatcagatgcataggcaatatgttaagttcacttggaggctaaaaatctccagtgaaaacaaaacgaaaacctttaagagaatgtagagtttatataaacacaaagtatgcattgaagatctgtttctaccaataaacattaaaacaaagactgta

SEQ ID NO: 160859 - DNA, 1524 bp, Artificial Sequence
  derived and/or modified sequence
gaagcgttacttgaggctcggttgggaagagatgggcagctctcaaaaaaggcacaaacaattgaaggatggataccatggcatatgttaaaagcgtgttgaaaggaaaataagaaagccaggaatctcaggatgaatcagtctagatcgagatcagatggtggcagtgaagaaaccttacctcaagaccataatcatcatgaaaatgagagaagatggcagcaagagcgtctccacagagaagaggcctattatcagtttattaatgaactcaatgatgaagattatcggcttatgagagaccataatcttttaggcacccctggagaaataacatcagaagaactgcaacagcggttagatggcgtcaaggaacaactagcatctcagcctgacttgagagatggaacgaattacagagactcagaagtccctagagaaagttcacatgaagattctcttctagaatggttgaacacctttcggcgcacaggaaatgcaactcgaagtggacaaaatgggaaccaaacttggagagctgcttgtgtcaagaataacagtagaagaaggagaagaatccagcagatcctcaactgctgtacgacgacatccaacaatcacactggaccttcaagtgagaaggatccgtcctggagaaaatagagatcgggatagtattgcaaatagaactcgatccagagtagggctagcagaaaatacagtcactattgaaagcaatagtgggggctttcgccgaaccatttctcgtttagagcggtcaggtattcgaacctatgttagtaccataacagttcctcttcgtaggatttctgagaatgagcttgttgagccatcatcagtggctcttcggtcaattttaaggcagatcatgactgggtttggagaactgagttctctaatggaggccgattctgagtcagaacttcaaagaaatggccagcatttaccagacatgcactcagaactgagtaacttaggtacagataacaacaggagccagcacagggaaggttcctctcaagacaggcaggcccaaggagacagcactgaaatgcatggtgaaaacgagaccacccagcctcatactcgaaacagtgacagtaggggtggcaggcagttgcgaaatccaaacaatttagttgaaactggaacactacccattcttcgccttgctcacttttttttactaaatgaaagtgatgatgatgatcgaatacgtggtttaaccaaagagcagattgacaatctttccaccaggcactatgagcataacagtattgatagtgaactaggtaaaatctgtagtgtttgtattagtgactatgtaactggaaacaagctcaggcaattaccttgcatgcatgaatttcacattcattgtattgaccgatggctctcagagaattgcacttgtccgatctgtcggcagcctgttttagggtctaacatagcaaacaatgggtaaggtgatgggatctactcaaatactgttttttagtagaa

SEQ ID NO: 160860 - DNA, 2058 bp, Artificial Sequence
  derived and/or modified sequence
atgaaccagagcagaagcagaagcgacggcggcagcgaggagaccctgccccaggaccacaaccaccacgagaacgagagaagatggcagcaggagagactgcacagagaggaggcctactaccagttcatcaacgagctgaacgacgaggactacagactgatgagagaccacaacctgctgggcacccccggcgagatcaccagcgaggagctgcagcagagactggacggcgtgaaggagcagctggccagccagcccgacctgagagacggcaccaactacagagacagcgaggtgcccagagagagcagccacgaggacagcctgctggagtggctgaacaccttcagaagaaccggcaacgccaccagaagcggccagaacggcaaccagacctggagagccgtgagcagaaccaaccccaacaacggcgagttcagattcagcctggagatccacgtgaaccacgagaacagaggcttcgagatccacggcgaggactacaccgacatccccctgagcgacagcaacagagaccacaccgccaacagacagcagagaagcaccagccccgtggccagaagaaccagaagccagaccagcgtgaacttcaacggcagcagcagcaacatccccagaaccagactggccagcagaggccagaaccccgccgagggcagcttcagcaccctgggcagactgagaaacggcatcggcggcgccgccggcatccccagagccaacgccagcagaaccaacttcagcagccacaccaaccagagcggcggcagcgagctgagacagagagagggccagagattcggcgccgcccacgtgtgggagaacggcgccagaagcaacgtgaccgtgagaaacaccaaccagagactggagcccatcagactgagaagcaccagcaacagcagaagcagaagccccatccagagacagagcggcaccgtgtaccacaacagccagagagagagcagacccgtgcagcagaccaccagaagaagcgtgagaagaagaggcagaaccagagtgttcctggagcaggacagagagagagagagaagaggcaccgcctacacccccttcagcaacagcagactggtgagcagaatcaccgtggaggagggcgaggagagcagcagaagcagcaccgccgtgagaagacaccccaccatcaccctggacctgcaggtgagaagaatcagacccggcgagaacagagacagagacagcatcgccaacagaaccagaagcagagtgggcctggccgagaacaccgtgaccatcgagagcaacagcggcggcttcagaagaaccatcagcagactggagagaagcggcatcagaacctacgtgagcaccatcaccgtgcccctgagaagaatcagcgagaacgagctggtggagcccagcagcgtggccctgagaagcatcctgagacagatcatgaccggcttcggcgagctgagcagcctgatggaggccgacagcgagagcgagctgcagagaaacggccagcacctgcccgacatgcacagcgagctgagcaacctgggcaccgacaacaacagaagccagcacagagagggcagcagccaggacagacaggcccagggcgacagcaccgagatgcacggcgagaacgagaccacccagccccacaccagaaacagcgacagcagaggcggcagacagctgagaaaccccaacaacctggtggagaccggcaccctgcccatcctgagactggcccacttcttcctgctgaacgagagcgacgacgacgacagaatcagaggcctgaccaaggagcagatcgacaacctgagcaccagacactacgagcacaacagcatcgacagcgagctgggcaagatctgcagcgtgtgcatcagcgactacgtgaccggcaacaagctgagacagctgccctgcatgcacgagttccacatccactgcatcgacagatggctgagcgagaactgcacctgccccatctgcagacagcccgtgctgggcagcaacatcgccaacaacggctag

SEQ ID NO: 160861 - DNA, 990 bp, Artificial Sequence
  derived and/or modified sequence
atgcagctggaggtggacaagatgggcaccaagctgggcgagctgctggtgagcagaatcaccgtggaggagggcgaggagagcagcagaagcagcaccgccgtgagaagacaccccaccatcaccctggacctgcaggtgagaagaatcagacccggcgagaacagagacagagacagcatcgccaacagaaccagaagcagagtgggcctggccgagaacaccgtgaccatcgagagcaacagcggcggcttcagaagaaccatcagcagactggagagaagcggcatcagaacctacgtgagcaccatcaccgtgcccctgagaagaatcagcgagaacgagctggtggagcccagcagcgtggccctgagaagcatcctgagacagatcatgaccggcttcggcgagctgagcagcctgatggaggccgacagcgagagcgagctgcagagaaacggccagcacctgcccgacatgcacagcgagctgagcaacctgggcaccgacaacaacagaagccagcacagagagggcagcagccaggacagacaggcccagggcgacagcaccgagatgcacggcgagaacgagaccacccagccccacaccagaaacagcgacagcagaggcggcagacagctgagaaaccccaacaacctggtggagaccggcaccctgcccatcctgagactggcccacttcttcctgctgaacgagagcgacgacgacgacagaatcagaggcctgaccaaggagcagatcgacaacctgagcaccagacactacgagcacaacagcatcgacagcgagctgggcaagatctgcagcgtgtgcatcagcgactacgtgaccggcaacaagctgagacagctgccctgcatgcacgagttccacatccactgcatcgacagatggctgagcgagaactgcacctgccccatctgcagacagcccgtgctgggcagcaacatcgccaacaacggctag

SEQ ID NO: 160862 - protein, 138 aa, Artificial Sequence
  derived and/or modified sequence
MCSSLEQALAVLVTTFHKYSCQEGDKFKLSKGEMKELLHKELPSFVGHSREPCAVRAFRVHLFNPVIGDLRNQSPEGKSDCPKITQHWEKVDEEGLKKLMGSLDENSDQQVDFQEYAVFLALITVMCNDFFQGCPDRP

SEQ ID NO: 160863 - protein, 97 aa, Artificial Sequence
  derived and/or modified sequence
MCSSLEQALAVLVTTFHKYSCQEGDKFKLSKGEMKELLHKELPSFVGEKVDEEGLKKLMGSLDENSDQQVDFQEYAVFLALITVMCNDFFQGCPDRP

SEQ ID NO: 160864 - DNA, 417 bp, Artificial Sequence
  derived and/or modified sequence
atgtgcagttctcttgagcaggctctggctgtactggtgacgacgttccacaagtattcatgtcaggaaggggacaaatttaagttatcaaaaggcgaaatgaaggagttactacataaggagcttccatcttttgtgggacatagcagagaaccatgcgctgtgagagcattccgcgtgcacctgttcaaccccgtgattggggatctcaggaaccagagtccagagggcaagtcggactgccctaaaattacacagcattgggagaaggtggacgaagagggtcttaaaaagttgatggggtctttagacgagaattccgaccagcaagtcgacttccaggagtacgcagtctttcttgcattaatcacagtgatgtgcaatgacttctttcagggctgccctgatcggccctag

SEQ ID NO: 160865 - DNA, 294 bp, Artificial Sequence
  derived and/or modified sequence
atgtgctctagcctggaacaggcacttgcggttctggtaactaccttccataaatacagttgccaggagggcgacaaatttaagctctccaaaggggagatgaaagagctcctgcacaaagagctcccgagttttgttggagagaaggtggacgaagaaggtctcaaaaaattgatggggtccctggacgaaaactctgatcagcaggtggacttccaggaatatgcagtattcctcgccctgattacagttatgtgcaatgatttctttcaaggatgcccagaccgaccttag

SEQ ID NO: 160866 - DNA, 294 bp, Artificial Sequence
  derived and/or modified sequence
atgtgctcctctctcgaacaggccctcgccgtcctcgtgacaacatttcacaaatacagttgccaggagggcgataaattcaaactatcaaagggagagatgaaggagttactgcataaggagttacccagttttgtgggagagaaggtagatgaggagggcctgaagaaactgatgggcagtcttgacgagaacagcgaccagcaagtagactttcaggaatatgctgtgttcttggccctcatcaccgtgatgtgcaatgacttctttcaggggtgccccgataggccgtag

SEQ ID NO: 160867 - DNA, 294 bp, Artificial Sequence
  derived and/or modified sequence
atgtgttccagtctcgagcaagccctggctgtgctggtaacaacattccataaatacagttgccaagagggggacaagtttaagctatctaaaggagagatgaaagagttgttgcataaagagctaccctcattcgtcggagagaaagtggacgaggaaggtcttaagaagttgatgggctccctagatgagaacagcgatcagcaggtggacttccaagaatacgccgtgtttctcgctctgattactgtaatgtgcaatgatttcttccaagggtgccctgaccggccctag

SEQ ID NO: 160868 - DNA, 417 bp, Artificial Sequence
  derived and/or modified sequence
atgtgcagcagcctggagcaggccctggccgtgctggtgaccaccttccacaagtacagctgccaggagggggacaagttcaagctgagcaaaggagagatgaaggagctgctgcacaaggagctgcccagctttgtgggccacagccgggagccctgtgctgtgcgggccttccgggtgcacctgttcaaccctgtgattggagacctgaggaaccagagccctgagggcaagagtgactgccccaagatcacccagcactgggagaaggtggatgaggagggcctgaagaagctgatgggcagcctggatgaaaattctgaccagcaggtggacttccaggagtatgctgtgttcctggccctgatcaccgtgatgtgcaatgacttcttccagggctgcccagaccggccctag

SEQ ID NO: 160869 - DNA, 294 bp, Artificial Sequence
  derived and/or modified sequence
atgtgcagcagcctggagcaggccctggccgtgctggtgaccaccttccacaagtacagctgccaggagggggacaagttcaagctgagcaaaggagagatgaaggagctgctgcacaaggagctgcccagctttgtgggggagaaggtggatgaggagggcctgaagaagctgatgggcagcctggatgagaacagcgaccagcaggtggacttccaggagtatgctgtgttcctggccctgatcaccgtgatgtgcaatgacttcttccagggctgcccagaccggccctag

SEQ ID NO: 160870 - DNA, 417 bp, Artificial Sequence
  derived and/or modified sequence
atgtgcagcagcctggagcaggccctggccgtgctggtgaccacctttcacaagtatagctgccaggagggagataagtttaaattatcaaagggtgagatgaaggagctgctacacaaggaactcccaagctttgttggccactcaagggagccttgcgccgtgcgggcatttagagtgcacctgttcaatccagtgatcggggatctgaggaatcaatcccctgaaggaaagagcgattgtcctaaaattacccaacactgggagaaggtagacgaggaaggtctgaagaagctgatgggctctttggatgaaaattccgaccagcaggtggacttccaggagtatgccgtatttctggccctgattacggtgatgtgcaacgattttttccaaggttgtccggaccgcccttag

SEQ ID NO: 160871 - DNA, 294 bp, Artificial Sequence
  derived and/or modified sequence
atgtgcagcagcctggagcaggccctggccgtgctggtgaccacctttcacaagtactcttgtcaggaaggagacaagttcaaactgagcaagggcgagatgaaggagcttctacacaaagaacttccatcatttgttggagagaaagtggacgaagaaggattgaagaagctcatggggtcactagatgagaactctgaccagcaggtagactttcaggagtacgccgtttttctagcattgatcacagtgatgtgtaacgactttttccagggatgtccggatcggccgtag

SEQ ID NO: 160872 - DNA, 294 bp, Artificial Sequence
  derived and/or modified sequence
atgtgcagcagcctggagcaggccctggccgtgctggtgaccacctttcacaagtattcttgccaggagggtgacaagttcaaactttcgaagggggagatgaaagaactgctgcacaaagagctcccatcgttcgtaggagaaaaggtagatgaagaagggctgaaaaagctgatggggtcactggatgagaacagcgatcaacaagttgatttccaggagtacgccgtatttctggcccttattaccgtcatgtgtaacgatttcttccagggatgcccagaccgaccatag

SEQ ID NO: 160873 - DNA, 294 bp, Artificial Sequence
  derived and/or modified sequence
atgtgcagcagcctggagcaggccctggccgtgctggtgaccacctttcacaagtacagctgtcaggaaggggacaaattcaagctatcgaaaggcgagatgaaagaactactccacaaagagctgccttcttttgtgggagaaaaggttgatgaagaagggcttaaaaaattaatgggttccctggacgagaactcggaccagcaggtggactttcaggaatatgccgttttcctggcgttgattacagtgatgtgcaatgactttttccagggatgcccagatcgcccctag

SEQ ID NO: 160874 - DNA, 417 bp, Artificial Sequence
  derived and/or modified sequence
atgtgtagctcactcgagcaggctctagctgttctggtgactacttttcacaagtatagttgtcaggaaggcgataagttcaaattgagcaaaggggagatgaaggagttgctgcacaaggagttaccgagctttgtgggtcactcaagagagccctgtgcagtccgggctttcagggtccatctgtttaacccagtcatcggcgacctgcgcaaccagagcccagagggcaagtccgactgcccaaagattacccagcactgggagaaggttgacgaggaaggtctgaagaagctcatggggtccttagacgagaattccgaccagcaggtggatttccaggagtatgcagtgtttctggcgctgatcacagtgatgtgcaacgattttttccagggctgccctgaccggccatag

SEQ ID NO: 160875 - DNA, 294 bp, Artificial Sequence
  derived and/or modified sequence
atgtgtagcagtctggagcaggcgttggcagtgctggtgacaacttttcataagtattcctgtcaagagggagataagttcaagctttcaaagggcgagatgaaagagttactacataaggaattgccttcttttgtgggcgagaaagttgatgaggaaggccttaagaagctgatgggatctcttgacgagaacagtgatcaacaggttgacttccaggagtacgcagtgttcctggcactgatcacagtcatgtgtaacgacttcttccagggatgccccgacaggccttag

SEQ ID NO: 160876 - DNA, 294 bp, Artificial Sequence
  derived and/or modified sequence
atgtgtagctctctggaacaggctctggccgtactggtcacaacatttcataaatatagctgccaggagggagataaattcaagctctccaagggggagatgaaagagttactgcacaaggaactgccttcttttgtcggagagaaggtagatgaagaagggctgaagaaactgatgggatctctggacgaaaattctgatcagcaagtggacttccaggaatacgctgtgtttctggcgcttatcacggtgatgtgcaacgatttcttccagggttgtcccgaccgcccatag

SEQ ID NO: 160877 - DNA, 294 bp, Artificial Sequence
  derived and/or modified sequence
atgtgctcctcactggaacaggccctcgcagttcttgtcaccacatttcacaagtattcctgtcaggagggcgacaagttcaaactcagtaagggagaaatgaaagaactgctgcacaaggagttaccaagcttcgtgggggagaaagttgacgaggaggggcttaagaagttaatgggcagcctcgatgaaaattccgatcaacaggtggactttcaggaatatgcagtgtttcttgcactgatcaccgttatgtgcaatgatttttttcagggatgtccggaccggccttag

SEQ ID NO: 160878 - DNA, 557 bp, Artificial Sequence
  derived and/or modified sequence
gctctccttcctgggtctgtctctgccacctggtctgccacagatccatgatgtgcagttctctggagcaggcgctggctgtgctggtcactaccttccacaagtactcctgccaagagggcgacaagttcaagctgagtaagggggaaatgaaggaacttctgcacaaggagctgcccagctttgtggggcattccagagaaccatgtgctgtgagggccttccgagtccatctgtttaatcctgtcattggagacttgagaaaccagagcccagaagggaaaagtgattgtcccaagatcacacagcactgggagaaagtggatgaggaggggctgaagaagctgatgggcagcctggatgagaacagtgaccagcaggtggacttccaggagtatgctgttttcctggcactcatcactgtcatgtgcaatgacttcttccagggctgcccagaccgaccctgaagcagaactcttgacttcctgccatggatctcttgggcccaggactgttgatgcctttgagttttgtattcaataaactttttttgtctg

SEQ ID NO: 160879 - DNA, 998 bp, Artificial Sequence
  derived and/or modified sequence
tggcaccagtctccaggccccagagcaggggttgcctcccctcaccccggtccaggatgcccagtccccacgacacctcccacttcccactgtggcctgggtgggctcaggggctgcccttgacctggcctagagccctcccccagctggtggtggagctggcactctctgggagggagggggctgggagggaatgagtgggaatggcaagaggccagggtttggtgggatcaggttgaggcaggtttggtttccttaaaatgccaagttgggggccagtggggcccacatataaatcctcaccctgggagcctggctgccttgctctccttcctgggtctgtctctgccacctggtctgccacagatccatgatgtgcagttctctggagcaggcgctggctgtgctggtcactaccttccacaagtactcctgccaagagggcgacaagttcaagctgagtaagggggaaatgaaggaacttctgcacaaggagctgcccagctttgtgggggagaaagtggatgaggaggggctgaagaagctgatgggcagcctggatgagaacagtgaccagcaggtggacttccaggagtatgctgttttcctggcactcatcactgtcatgtgcaatgacttcttccagggctgcccagaccgaccctgaagcagaactcttgacttcctgccatggatctcttgggcccaggactgttgatgcctttgagttttgtattcaataaactttttttgtctgttgataatattttaattgctcagtgatgttccataacccggctggctcagctggagtgctgggagatgagggcctcctggatcctgctcccttctgggctctgactctcctggaaatctctccaaggccagagctatgctttaggtctcaattttggaatttcaaacaccagcaaaaaattggaaatcgagataggttgctgacttttattttgtcaaataaagatattaaaaaaggcaaa

SEQ ID NO: 160880 - DNA, 457 bp, Artificial Sequence
  derived and/or modified sequence
ggaggagggtgtgccgctgagtcactgcctgggcatctgggcctggaacctcggccacagatccatgatgtgcagttctctggagcaggcgctggctgtgctggtcactaccttccacaagtactcctgccaagagggcgacaagttcaagctgagtaagggggaaatgaaggaacttctgcacaaggagctgcccagctttgtgggggagaaagtggatgaggaggggctgaagaagctgatgggcagcctggatgagaacagtgaccagcaggtggacttccaggagtatgctgttttcctggcactcatcactgtcatgtgcaatgacttcttccagggctgcccagaccgaccctgaagcagaactcttgacttcctgccatggatctcttgggcccaggactgttgatgcctttgagttttgtattcaataaactttttttgtctgttgata

SEQ ID NO: 160881 - DNA, 453 bp, Artificial Sequence
  derived and/or modified sequence
gtgagctcaccatgtgggggtgaggctgagagaaaacaagtacacagccacagatccatgatgtgcagttctctggagcaggcgctggctgtgctggtcactaccttccacaagtactcctgccaagagggcgacaagttcaagctgagtaagggggaaatgaaggaacttctgcacaaggagctgcccagctttgtgggggagaaagtggatgaggaggggctgaagaagctgatgggcagcctggatgagaacagtgaccagcaggtggacttccaggagtatgctgttttcctggcactcatcactgtcatgtgcaatgacttcttccagggctgcccagaccgaccctgaagcagaactcttgacttcctgccatggatctcttgggcccaggactgttgatgcctttgagttttgtattcaataaactttttttgtctgttgataata

SEQ ID NO: 160882 - DNA, 417 bp, Artificial Sequence
  derived and/or modified sequence
atgtgcagcagcctggagcaggccctggccgtgctggtgaccaccttccacaagtacagctgccaggagggcgacaagttcaagctgagcaagggcgagatgaaggagctgctgcacaaggagctgcccagcttcgtgggccacagcagagagccctgcgccgtgagagccttcagagtgcacctgttcaaccccgtgatcggcgacctgagaaaccagagccccgagggcaagagcgactgccccaagatcacccagcactgggagaaggtggacgaggagggcctgaagaagctgatgggcagcctggacgagaacagcgaccagcaggtggacttccaggagtacgccgtgttcctggccctgatcaccgtgatgtgcaacgacttcttccagggctgccccgacagaccctag

SEQ ID NO: 160883 - DNA, 294 bp, Artificial Sequence
  derived and/or modified sequence
atgtgcagcagcctggagcaggccctggccgtgctggtgaccaccttccacaagtacagctgccaggagggcgacaagttcaagctgagcaagggcgagatgaaggagctgctgcacaaggagctgcccagcttcgtgggcgagaaggtggacgaggagggcctgaagaagctgatgggcagcctggacgagaacagcgaccagcaggtggacttccaggagtacgccgtgttcctggccctgatcaccgtgatgtgcaacgacttcttccagggctgccccgacagaccctag

SEQ ID NO: 160884 - protein, 95 aa, Artificial Sequence
  derived and/or modified sequence
MTELETAMGMIIDVFSRYSGSEGSTQTLTKGELKVLMEKELPGFLQSGKDKDAVDKLLKDLDANGDAQVDFSEFIVFVAAITSACHKYFEKAGLK

SEQ ID NO: 160885 - DNA, 288 bp, Artificial Sequence
  derived and/or modified sequence
atgacagaattggagaccgcgatgggaatgattatcgatgtgttcagccgctactcaggctcagagggatcgacacagacccttaccaagggggaacttaaagtgctgatggagaaggaactgcctggcttcctacagagcggcaaggacaaggacgcagtcgacaaactgctcaaggacctggacgcaaatggtgacgcacaggttgatttttctgaatttatcgtgttcgtcgccgccataacctctgcctgccacaaatacttcgagaaggctggactgaagtag

SEQ ID NO: 160886 - DNA, 288 bp, Artificial Sequence
  derived and/or modified sequence
atgacagagctggagacagccatgggcatgatcattgatgtgttcagccgctacagcggcagcgagggcagcacccagaccctgaccaagggggagctgaaggtgctgatggagaaggagctgcccggcttcctgcagagcggcaaggacaaggatgctgtggacaagctgctgaaggacctggatgccaatggagatgcccaggtggacttcagcgagttcatcgtgtttgtggccgccatcaccagcgcctgccacaagtactttgagaaggccggcctgaagtag

SEQ ID NO: 160887 - DNA, 288 bp, Artificial Sequence
  derived and/or modified sequence
atgaccgagctggagaccgccatgggcatgatcatcgacgtgttcagcaggtactccgggtctgaagggtcgacccagacactgaccaagggtgagcttaaggttctgatggagaaagagctacccggattcctccagagcggcaaagacaaggacgcggtggacaaactcctcaaggatctcgatgccaatggcgatgctcaggttgatttcagcgaattcatagtctttgtcgccgctataacatcggcatgccataagtacttcgaaaaggccggactcaagtag

SEQ ID NO: 160888 - DNA, 288 bp, Artificial Sequence
  derived and/or modified sequence
atgacagagctggaaactgctatgggaatgatcatagatgtgttcagcagatattcgggatctgagggctccactcaaacactaacgaaaggtgaactgaaggtcctgatggagaaggaactccccggattcctgcagtccggcaaggacaaagacgctgtagacaagctgctgaaagacctagacgccaatggggacgctcaggtggatttctctgagttcatagtgtttgtggctgctattacctccgcctgccataagtacttcgagaaagctgggttaaaatag

SEQ ID NO: 160889 - DNA, 1279 bp, Artificial Sequence
  derived and/or modified sequence
cacctagaaggaaggagagctgctcagagaggccccagggaatctgactcaacaggccctaccaggctctcctcttggtctgtgagcatccagccttacttttgtatccaatcatatttccatacttcgctgaactgtgtttatggatagtttccaccagatctttggatcttcatcttgaaggctgccgtgccacataagctatgatcaaatacatctgttatgctcttctcctattcatctgccttctgcccgttgattttcagcaaactcccagaggatgaaggggagttttctgtttggccccacaggggaggagcgagcgagattgacgtggaagctgggcctctgaaggacacagagtgctctaagaaagggacgatggggcagatccatgttcacaaacacgcccatgtgaattcactctcagatgtctcctcgtgtcagcacgctgggtgccagcacgctctgatattgacacaaagggccacggagtcaccactcactccacacacactcaccccgtgcccacttacccagggagggccaggaatgaggatgccactgtggctcagtgatggcgccgagacacaggtgaacactgtaaaatgtggatgcctggaggcagcccacaccctgggccttggctgggggaaaggttccagaaacgtcatcacaacgatgcatttcatcagaactgagcacatgaatggggaggggcaggacttcctgaatgtcccaaccccactgtcccaccctctgtgtcaatatgaggctgccttataaagcaccaagaggctgccagtgggacattttctcggccctgccagcccccaggaggaaggtgggtctgaatctagcaccatgacggaactagagacagccatgggcatgatcatagacgtcttttcccgatattcgggcagcgagggcagcacgcagaccctgaccaagggggagctcaaggtgctgatggagaaggagctaccaggcttcctgcagagtggaaaagacaaggatgccgtggataaattgctcaaggacctggatgccaatggagatgcccaggtggacttcagtgagttcatagtgttcgtggctgcaatcacgtctgcctgtcacaagtactttgagaaggcaggactcaaatgatgccctggagatgtcacagattcctggcagagccatggtcccaggcttcccaaaagtgtttgttggcaattattcccctaggctgagcctgctcatgtacctctgattaataaatgcttatgaaatg

SEQ ID NO: 160890 - DNA, 288 bp, Artificial Sequence
  derived and/or modified sequence
atgaccgagctggagaccgccatgggcatgatcatcgacgtgttcagcagatacagcggcagcgagggcagcacccagaccctgaccaagggcgagctgaaggtgctgatggagaaggagctgcccggcttcctgcagagcggcaaggacaaggacgccgtggacaagctgctgaaggacctggacgccaacggcgacgcccaggtggacttcagcgagttcatcgtgttcgtggccgccatcaccagcgcctgccacaagtacttcgagaaggccggcctgaagtag

SEQ ID NO: 160891 - protein, 210 aa, Artificial Sequence
  derived and/or modified sequence
MVCGGFACSKNALCALNVVYMLVSLLLIGVAAWGKGLGLVSSIHIIGGVIAVGVFLLLIAVAGLVGAVNHHQVLLFFYMIILGLVFIFQFVISCSCLAINRSKQTDVINASWWVMSNKTRDELERSFDCCGLFNLTTLYQQDYDFCTAICKSQSPTCQMCGEKFLKHSDEALKILGGVGLFFSFTEILGVWLAMRFRNQKDPRANPSAFL

SEQ ID NO: 160892 - DNA, 633 bp, Artificial Sequence
  derived and/or modified sequence
atggtgtgcggcggcttcgcctgcagcaagaacgccctgtgcgccctgaacgtggtgtacatgctggtgagcctgctgctgatcggcgtggccgcctggggcaagggcctgggcctggtgagcagcatccacatcatcggcggcgtgatcgccgtgggcgtgttcctgctgctgatcgccgtggccggcctggtgggcgccgtgaaccaccaccaggtgctgctgttcttctacatgatcatcctgggcctggtgttcatcttccagttcgtgatcagctgcagctgcctggccatcaacagaagcaagcagaccgacgtgatcaacgccagctggtgggtgatgagcaacaagaccagagacgagctggagagaagcttcgactgctgcggcctgttcaacctgaccaccctgtaccagcaggactacgacttctgcaccgccatctgcaagagccagagccccacctgccagatgtgcggcgagaagttcctgaagcacagcgacgaggccctgaagatcctgggcggcgtgggcctgttcttcagcttcaccgagatcctgggcgtgtggctggccatgagattcagaaaccagaaggaccccagagccaaccccagcgccttcctgtag

SEQ ID NO: 160893 - DNA, 633 bp, Artificial Sequence
  derived and/or modified sequence
atggtctgcggcggattcgcgtgctctaagaacgccctctgcgcactaaacgtggtgtacatgttagtctcgcttctcctcattggggtcgccgcttggggaaaagggctgggcctggtttcttccatacacattatcgggggggtgatcgcagtcggagtttttctgttactcattgctgtagcaggcctcgtaggagctgtaaaccaccatcaagttctgctctttttctacatgatcattctgggcctggtcttcattttccagttcgttatctcgtgctcctgtctggccatcaaccgaagcaagcagaccgatgtcatcaacgctagttggtgggtaatgtccaataagacacgagatgaactggagcgctcatttgactgttgcggtctctttaacctgacaacattgtaccagcaagactatgacttctgcaccgccatttgtaagtctcaaagcccaacgtgtcaaatgtgtggcgaaaaattcttgaagcactctgatgaggcactcaagattctcggaggcgttgggctgtttttcagcttcacggaaattttaggcgtgtggctagccatgaggttccggaaccagaaggatccacgagccaacccaagtgcgttcctttag

SEQ ID NO: 160894 - DNA, 633 bp, Artificial Sequence
  derived and/or modified sequence
atggtgtgtggcggctttgcctgcagcaagaatgccctgtgtgccctgaatgtggtgtacatgctggtgtccctgctgctgattggagtggccgcctggggcaagggcctgggcctggtgagcagcatccacatcatcggcggcgtgattgctgtgggcgtcttcctgctgctgattgctgtggccggcctggtgggcgctgtgaaccaccaccaggtgctgctcttcttctacatgatcatcctgggcctggtgttcatcttccagtttgtgatcagctgcagctgcctggccatcaacagaagcaagcagacagatgtgatcaatgcctcctggtgggtgatgagcaacaagaccagagatgagctggagaggagctttgactgctgcggcctcttcaacctgaccaccctgtaccagcaggactatgacttctgcacagccatctgcaagagccagagccccacctgccagatgtgtggggagaagttcctgaagcacagtgatgaggccctgaagatcctgggcggcgtgggcctcttcttctccttcacagagatcctgggcgtgtggctggccatgaggttcaggaaccagaaggacccccgggccaaccccagcgccttcctgtag

SEQ ID NO: 160895 - DNA, 633 bp, Artificial Sequence
  derived and/or modified sequence
atggtgtgcggcggcttcgcctgcagcaagaacgccctgtgcgccctgaacgttgtgtatatgttggtttctttgctgctcattggcgtagccgcgtgggggaaggggctcggactagtttccagcatacacatcattgggggcgtcatagctgtgggggtcttcctcttgctgatagctgtcgccggactggtgggggccgtgaaccaccatcaggtgctgctgttcttttacatgatcattttggggcttgtcttcatatttcagttcgtcatttcttgcagttgtctggcgattaacagatctaaacaaaccgacgtaataaacgcgtcgtggtgggttatgagcaacaaaaccagagacgagcttgagagatcattcgattgttgtggcctcttcaacctcacaacactctaccagcaagactatgacttctgcaccgccatttgcaagagtcagtctcccacatgccagatgtgcggggaaaagtttctgaaacacagcgacgaagctttgaaaatcctgggaggagtcggcctgttcttctccttcaccgaaatactgggagtctggttagccatgcggtttcggaaccagaaagaccctcgggccaatccttcagctttcctgtag

SEQ ID NO: 160896 - DNA, 633 bp, Artificial Sequence
  derived and/or modified sequence
atggtgtgcggaggctttgcatgttcaaaaaatgccttgtgcgctctgaatgtcgtctacatgcttgttagtctactgctgattggagtagctgcatggggaaaggggttgggactagtttcgagcatccacatcattggcggtgttatcgcagtgggcgtgttcttactgctgattgccgtagctggtctcgtgggagcggtcaaccaccatcaagtgcttctgttcttttacatgattattctgggactggtgtttatctttcagttcgtcatttcttgtagctgcctcgccataaatcgctccaaacagacagacgtgataaatgcctcctggtgggtgatgagcaacaagacccgggacgagctggagcggagctttgactgttgcggactgtttaatctcaccaccctatatcagcaggattacgacttttgcacagcaatctgtaagtcccagtctccgacttgccaaatgtgcggagagaagtttctcaagcattccgacgaggccttaaagatcttaggtggtgtgggactgtttttttcttttacagagatactcggagtatggctcgcgatgcgttttcgtaaccaaaaggaccctcgagccaatcctagcgccttcctgtag

SEQ ID NO: 160897 - DNA, 1849 bp, Artificial Sequence
  derived and/or modified sequence
agttttaagtttcgcccaatgaaaaaacaaaaggagagggacagaaggcgggtcggtgacgtaatgcgggttgattggcatgcaggccttggacgtccaggattagccacgcatttcgccaatccagaggcaggggagggacggtgcaggcgcagagtattgggtttggctggcctcgatttaaagagacagaagctgtcggggtcctggaagacggtccccaataccctccccccaagtccttgggaccacttgggtccccagagctggggagatggtttgtggcggctttgcctgctccaagaatgcgctttgcgctctcaacgtggtctacatgctggtgagcttgttgctcattggagtggctgcttggggcaagggcctgggtctggtgtccagcatccacatcatcggcggagtcattgctgtgggagtcttccttctccttattgcagtggctggactggtgggtgctgtcaaccaccaccaagtcctgctgttcttttacatgatcatccttggtttggtcttcatcttccaatttgtaatctcttgctcatgtctggctattaaccgaagcaaacagacagatgtcatcaatgcttcttggtgggtcatgagcaacaagactcgggatgaactggaaagaagttttgattgttgtggcttattcaacctcacaaccctgtatcaacaagattatgatttctgcactgcaatctgcaagagccagagccccacatgccagatgtgtggagaaaagtttcttaagcattcagacgaagccctgaaaatcctagggggtgttggactcttctttagctttacagagatccttggtgtttggctagcaatgagatttcggaatcagaaggatcctagagccaaccccagtgcctttctatgagactttggatccttctgacttttcttctgctctctctaagctttctcttcctcccttagggaatatctagggtctgtaaccgttttggtttgagaaaaaggaaaggccccttgtcacatcctctaaaattgatggaatagcaagactttatgccttgacatattttagtgggagccagactataaggaataaaaggaaaaactttcttcctctctctccaagaggatatgggaagcttctgtgagtgcataggatgggggctggagtcattcttagctgtttcccttcctctgtccatatactggatcacctcaacataccctggtgtggctctaagggtaaatcagggatagggccaaggagaaaacaaccaagaactctttcctgtaataagcaggatccagtttgagaaagtttagcgaatataaaagtaaaagccatttaaaaatctatattctttttttttttttgacacagagtcttgctctgttgcccaggctggagtgcaatggcatgatctcggctcaccgcaacctctgcctcccgggttcaagcgatcctcctgcctcagtctcccaagtagctgggattacaggtgtgcaccaccacgcctgactaattttgtatttttagtagagacagggtttcaccatgttagtcaggctggtctcgaactcctgacctcaggtgatccacccgcgttggcctcccaacgtgctgggattataggcgtgagccaccacgccccgcctaaaatccatattcaaagaagcaatttcagttcctttctaagctttgtcagtcaaggggctccactgacttcctaggccctgtaatttaaccagtctttaaggttttgcaggaaagtcccttcttccaagtggtttttccaaatcgcacaatggcaaagccaaacagaggaagaaacattaaaaaaaaaaa

SEQ ID NO: 160898 - protein, 284 aa, Artificial Sequence
  derived and/or modified sequence
MSMLPSFGFTQEQVACVCEVLQQGGNLERLGRFLWSLPACDHLHKNESVLKAKAVVAFHRGNFRELYKILESHQFSPHNHPKLQQLWLKAHYVEAEKLRGRPLGAVGKYRVRRKFPLPRTIWDGEETSYCFKEKSRGVLREWYAHNPYPSPREKRELAEATGLTTTQVSNWFKNRRQRDRAAEAKERENTENNNSSSNKQNQLSPLEGGKPLMSSSEEEFSPPQSPDQNSVLLLQGNMGHARSSNYSLPGLTASQPSHGLQTHQHQLQDSLLGPLTSSLVDLGS

SEQ ID NO: 160899 - DNA, 2687 bp, Artificial Sequence
  derived and/or modified sequence
cggaggcagcaaggccttaaaggctactgagtgcgccggccgttccgtgtccagaacctcccctactcctccgccttctcttccttggccgcccaccgccaagttccgactccggttttcgcctttgcaaagcctaaggaggaggttaggaacagccgcgcccccctccctgcggccgccgccccctgcctctcggctctgctccctgccgcgtgcgcctgggccgtgcgccccggcaggccccagccatgtcgatgctgccgtcgtttggctttacgcaggagcaagtggcgtgcgtgtgcgaggttctgcagcaaggcggaaacctggagcgcctgggcaggttcctgtggtcactgcccgcctgcgaccacctgcacaagaacgagagcgtactcaaggccaaggcggtggtcgccttccaccgcggcaacttccgtgagctctacaagatcctggagagccaccagttctcgcctcacaaccaccccaaactgcagcaactgtggctgaaggcgcattacgtggaggccgagaagctgcgcggccgacccctgggcgccgtgggcaaatatcgggtgcgccgaaaatttccactgccgcgcaccatctgggacggcgaggagaccagctactgcttcaaggagaagtcgaggggtgtcctgcgggagtggtacgcgcacaatccctacccatcgccgcgtgagaagcgggagctggccgaggccaccggcctcaccaccacccaggtcagcaactggtttaagaaccggaggcaaagagaccgggccgcggaggccaaggaaagggagaacaccgaaaacaataactcctcctccaacaagcagaaccaactctctcctctggaagggggcaagccgctcatgtccagctcagaagaggaattctcacctccccaaagtccagaccagaactcggtccttctgctgcagggcaatatgggccacgccaggagctcaaactattctctcccgggcttaacagcctcgcagcccagtcacggcctgcagacccaccagcatcagctccaagactctctgctcggccccctcacctccagtctggtggacttggggtcctaagtggggagggactggggcctcgaagggattcctggagcagcaaccactgcagcgactagggacacttgtaaatagaaatcaggaacatttttgcagcttgtttctggagttgtttgcgcataaaggaatggtggactttcacaaatatctttttaaaaatcaaaaccaacagcgatctcaagcttaatctcctcttctctccaactctttccacttttgcattttccttcccaatgcagagatcagggaaaaaaaaaaaaaaaaacccaaacaaacaaaagcacccaggcacccagtctgagttctgggcaactgatacgcctgtttcagcagcctttcttttttttcaatgaatgggaattgcaaatcaactggattttcattatttccttttaatttatatatggagaaatgtgaagagggaaaggaaatggaaagagaaagagaaagggagataaaaatagtgaaaataagagcctccaggctcagaagaactgattacattcttaaggtgaacaggaaaaatacaatctataactttctttgatgaggaaaaattaagtttacatttttcatatttagtgttaaacaatttaatgtagattaaaataaaagaccagtattaggaggaaaaaacaagtgcctaaatgtcttaatgctctctatgtgagacagaaatagacgtgaccattagtaatgcaactatttttgtcaaatttagtgggattttttggttgttgtttgttttcttgggttttttttttttaaatgacaaactctaaaaatgtaccaatgtgaaaaaacactttcctgaatgccattactcatgccctcaaagctttcatatctgtagcctactcctgtaaagggtttctcctgtttctagtttctagtttgcaaaggtatgccaacgaatctggcaacctggtatttgttactaaaacagcatgtgttttcaggtttcttttctattgtacctaaagcagtctaaattaaaacttagtagaacaccaggagtatgattctgtttctgaaaggtgagtggtgtattgctgtcattgggccctatttttttttttaaatatatttttctttcttacttaatggtggctgtgaattgcagggtactttgaaggccatcatctgaaccaagagtagtaactagattaattatatgacagaaagagtgaatttagccttggggtatttattaacttctattatttagatatgcaattttgtttaccactatctcttcacagcattcatatgttaactaagctcttttgtgttaacaagtttatgacaagactgtgaaagtaaaaataatttatctgcttgaagacaaaaaagggaaggagaacaaggatagaaacattgtgaattaatttgtacaaatagaaagcagaccagcaggacaggagctcttttgcagtgctgccggatggtgtctagaaaaatcccagtaatcatgtaggctccatattatttttgcctggggcaaaatgatgtatcttctgtatttagcttttaaaattagtgaaacaaatggcattatttattaaaattctactcaggataaca

SEQ ID NO: 160900 - DNA, 855 bp, Artificial Sequence
  derived and/or modified sequence
atgtcaatgttaccatcgtttggattcacacaagaacaagtagcatgtgtttgcgaagtccttcagcaaggcggaaatctcgaaagactggggcggttcctgtggtccctgccggcttgtgaccatttgcataaaaatgagtccgttctcaaagctaaagccgttgttgcctttcaccggggcaacttcagggagctgtataaaattcttgagtcacatcagtttagcccccataaccatcctaagctccagcagctgtggctgaaagcacactatgttgaggccgaaaaattaagagggcggccgctcggggctgtgggaaaatatagagtgaggcgcaaattccccctgcctcgaaccatttgggacggcgaagaaacaagctactgttttaaggaaaagtcacgaggagtgctgcgagagtggtacgcacataacccataccccagccctcgcgaaaaacgggagcttgccgaagccactgggttgactactacccaggttagcaactggttcaaaaataggagacagagggacagggcagctgaggcaaaagaacgggagaatacagaaaataataatagtagcagcaacaaacagaatcaactgagtccactggaaggcggaaaaccactcatgagcagtagtgaagaggagtttagcccccctcaatcaccagaccaaaactccgtgctgttgctgcagggaaacatggggcatgctcgtagttccaactacagtctgcctggccttaccgcttcacagccctctcacggactccagactcaccaacaccagctccaggattctctgttgggcccactgacctcatctctcgttgatcttgggagctag

SEQ ID NO: 160901 - DNA, 855 bp, Artificial Sequence
  derived and/or modified sequence
atgtccatgctgcccagctttggcttcacccaggagcaggtggcctgtgtgtgtgaggtgctgcagcagggcggcaacctggagcggctgggccgcttcctgtggagcctgcctgcctgtgaccacctgcacaagaatgaatctgtgctgaaggccaaggctgtggtggccttccaccggggcaacttccgggagctgtacaagatcctggagagccaccagttcagcccccacaaccaccccaagctgcagcagctgtggctgaaggcccactacgtggaggccgagaagctgcggggccggcccctgggcgctgtgggcaagtacagagtgcggaggaagttccccctgcccaggaccatctgggatggagaggagaccagctactgcttcaaggagaagagcagaggagtgctgcgggagtggtacgcccacaacccctaccccagcccccgggagaagcgggagctggccgaggccaccggcctgaccaccacccaggtgagcaactggttcaagaacagacggcagagggacagagctgctgaggccaaggagcgggagaacacagagaacaacaacagcagcagcaacaagcagaaccagctgagccccctggagggcggcaagcccctgatgagcagcagcgaggaggagttcagccccccccagagcccagaccagaacagcgtgctgctgctgcagggcaacatgggccacgcccggagcagcaactacagcctgcccggcctgacagccagccagcccagccacggcctgcagacccaccagcaccagctgcaggacagcctgctgggccccctgaccagcagcctggtggacctgggcagctag

SEQ ID NO: 160902 - DNA, 855 bp, Artificial Sequence
  derived and/or modified sequence
atgagcatgctgcccagcttcggcttcacccaggagcaggtggcctgcgtgtgcgaggtattgcagcagggcggaaatctggagagactggggaggtttctgtggagcctaccagcctgtgaccatctccacaaaaatgagagcgtcttaaaggccaaagccgtggtggcttttcacagaggtaattttcgggagttgtataaaattctggagagtcatcagtttagcccgcacaatcaccctaagctgcagcagctttggctgaaggcccactatgttgaggccgaaaagcttcgcggccggcccttaggagccgtggggaagtacagagtcagacgcaagttccccttgccgcggactatctgggacggggaggagacttcctactgctttaaggaaaagtctagaggtgtccttcgagaatggtacgcgcacaacccctacccgtctccacgtgagaaaagagagctggccgaagctactggcctgacaacaacgcaagtaagtaactggtttaaaaatagacgccagagagatcgagcggccgaagccaaggagcgggagaacaccgaaaacaacaatagttcttcaaacaagcagaaccagctgtctccactagagggaggcaagcctttgatgtcgagtagcgaagaggagttcagtcctcctcagtcccccgatcaaaattccgtgctccttttacaggggaatatgggtcatgcaagaagcagcaattacagcctgcctggtctcactgctagccagccttctcatggcctacagacccaccagcaccagctccaagactccctgttgggtcccttgacgtcaagcctggtggatctggggtcttag

SEQ ID NO: 160903 - DNA, 855 bp, Artificial Sequence
  derived and/or modified sequence
atgagcatgttgcccagctttggatttactcaagagcaggtcgcctgcgtgtgcgaagttctacagcagggcggaaatctggagagattaggcaggttcctatggtctctccctgcatgcgatcacctacataaaaatgagagtgtcctgaaagcgaaagccgtggttgctttccaccggggaaatttcagagaactgtataagatcctcgaaagccaccagttttcacctcataaccatccaaagttacaacagctgtggctcaaggctcattacgtggaggcagagaagctgcggggtcggcctttgggtgctgtcggaaagtacagagtgcgtaggaagttccctctcccaaggacaatctgggacggtgaggaaacctcctattgctttaaagaaaaaagccgaggggtcctgagagagtggtacgcccacaacccatacccatccccgagagagaaaagagagctggcggaagccacaggcctgaccaccacacaggtctcaaattggttcaagaacaggcggcagcgggatcgcgcagccgaggccaaggaaagggagaataccgaaaacaacaacagcagcagcaacaagcagaaccagttgtcacctctcgaaggcggaaaacctctgatgagcagtagtgaggaagagttctccccaccccagtcccctgaccaaaatagtgtcctgcttctacagggcaatatgggccatgcccgttctagtaactacagcctgccagggctgacagctagccagccgagccatgggctgcagacacatcaacaccagttacaagatagcctgctgggaccattgaccagcagcttagtggacctgggtagttag

SEQ ID NO: 160904 - DNA, 3997 bp, Artificial Sequence
  derived and/or modified sequence
tagcagcatccaccgggcgggaggtcggaggcagcaaggccttaaaggctactgagtgcgccggccgttccgtgtccagaacctcccctactcctccgccttctcttccttggccgcccaccgccaagttccgactccggttttcgcctttgcaaagcctaaggaggaggttaggaacagccgcgcccccctccctgcggccgccgccccctgcctctcggctctgctccctgccgcgtgcgcctgggccgtgcgccccggcaggccccagccatgtcgatgctgccgtcgtttggctttacgcaggagcaagtggcgtgcgtgtgcgaggttctgcagcaaggcggaaacctggagcgcctgggcaggttcctgtggtcactgcccgcctgcgaccacctgcacaagaacgagagcgtactcaaggccaaggcggtggtcgccttccaccgcggcaacttccgtgagctctacaagatcctggagagccaccagttctcgcctcacaaccaccccaaactgcagcaactgtggctgaaggcgcattacgtggaggccgagaagctgcgcggccgacccctgggcgccgtgggcaaatatcgggtgcgccgaaaatttccactgccgcgcaccatctgggacggcgaggagaccagctactgcttcaaggagaagtcgaggggtgtcctgcgggagtggtacgcgcacaatccctacccatcgccgcgtgagaagcgggagctggccgaggccaccggcctcaccaccacccaggtcagcaactggtttaagaaccggaggcaaagagaccgggccgcggaggccaaggaaagggagaacaccgaaaacaataactcctcctccaacaagcagaaccaactctctcctctggaagggggcaagccgctcatgtccagctcagaagaggaattctcacctccccaaagtccagaccagaactcggtccttctgctgcagggcaatatgggccacgccaggagctcaaactattctctcccgggcttaacagcctcgcagcccagtcacggcctgcagacccaccagcatcagctccaagactctctgctcggccccctcacctccagtctggtggacttggggtcctaagtggggagggactggggcctcgaagggattcctggagcagcaaccactgcagcgactagggacacttgtaaatagaaatcaggaacatttttgcagcttgtttctggagttgtttgcgcataaaggaatggtggactttcacaaatatctttttaaaaatcaaaaccaacagcgatctcaagcttaatctcctcttctctccaactctttccacttttgcattttccttcccaatgcagagatcagggaaaaaaaaaaaaaaaaacccaaacaaacaaaagcacccaggcacccagtctgagttctgggcaactgatacgcctgtttcagcagcctttcttttttttcaatgaatgggaattgcaaatcaactggattttcattatttccttttaatttatatatggagaaatgtgaagagggaaaggaaatggaaagagaaagagaaagggagataaaaatagtgaaaataagagcctccaggctcagaagaactgattacattcttaaggtgaacaggaaaaatacaatctataactttctttgatgaggaaaaattaagtttacatttttcatatttagtgttaaacaatttaatgtagattaaaataaaagaccagtattaggaggaaaaaacaagtgcctaaatgtcttaatgctctctatgtgagacagaaatagacgtgaccattagtaatgcaactatttttgtcaaatttagtgggattttttggttgttgtttgttttcttgggttttttttttttaaatgacaaactctaaaaatgtaccaatgtgaaaaaacactttcctgaatgccattactcatgccctcaaagctttcatatctgtagcctactcctgtaaagggtttctcctgtttctagtttctagtttgcaaaggtatgccaacgaatctggcaacctggtatttgttactaaaacagcatgtgttttcaggtttcttttctattgtacctaaagcagtctaaattaaaacttagtagaacaccaggagtatgattctgtttctgaaaggtgagtggtgtattgctgtcattgggccctatttttttttttaaatatatttttctttcttacttaatggtggctgtgaattgcagggtactttgaaggccatcatctgaaccaagagtagtaactagattaattatatgacagaaagagtgaatttagccttggggtatttattaacttctattatttagatatgcaattttgtttaccactatctcttcacagcattcatatgttaactaagctcttttgtgttaacaagtttatgacaagactgtgaaagtaaaaataatttatctgcttgaagacaaaaaagggaaggagaacaaggatagaaacattgtgaattaatttgtacaaatagaaagcagaccagcaggacaggagctcttttgcagtgctgccggatggtgtctagaaaaatcccagtaatcatgtaggctccatattatttttgcctggggcaaaatgatgtatcttctgtatttagcttttaaaattagtgaaacaaatggcattatttattaaaattctactcaggataacaggattggcttgcttgtgctttgtaaaatattgttccccagggagaatctatttattttctgacatgacagtttcataattttgattttttcccatctataattgtcaccattaatatattatttctttcttactctttcctatttctgttctggtctagaaaactgaggtgtgcttggggaaatcaaggccttattttttaaaactgtcaaatagctttgagttccagggagaaatggtcactgtacttaactgtacacacttttacttataaagtcgtttttccccctcagtgatggacagatgtgcacacagccactcagagaccatcatttggtttgggagctcagggtcccaatctcccttgttagtgttttggatcattaagtcggtgtttatttaagtcactagggtgtttattctccctgtcttgggccacggagaaatgccaccctctgcaggaggggctctcacagggaatctcctcacattcttcacattcactccccaaaacaaacaccctgcacaaagatagctttcaatgaccctgacaggcttcaaaggacgctgcggaaatctctctggaaaataggaagggccaattactttaatttcttacatgccgtctcttcctactccggtgactaccctccactctcccagctccgcctgggataattttaggctcgtggaagttgtgtctcgcagggcgccccggcccacttcctgctcccttagttggtgaatcttggaaatgtctgcagatccggcgaggagcaagagcgctggtcctgtaaaagcccccgtgattactgcttgtaaacttgttaaaaggacaattttctgtcacagtcataaactctttgtaaaacccctggcactaaatccagagcgcgcatattccagatgtgtttaataagaaattgcacaatgtgcctccttccgccatcctcggctcagtctgggtaaaaggggcgagcaggaggaggcgagaaagctggatattgctttgagtttttttggcaatcatttcagagagatcattaggggaaactaaccatatttttttcttccctcgaggaaatcttcgagaaccagctgttaagggacctccagtttaccttctgggcgtcgcagtttaactgaatctaaagccacttttcgtttctcctctacagatgtcataacggtagccaaaagtaatgaacaacggcttataaatagtttgtaggacgaaaccatacagcattgtgccaagtgaaatgaaaaaaaaaaaaaacactcga

SEQ ID NO: 160905 - DNA, 855 bp, Artificial Sequence
  derived and/or modified sequence
atgagcatgctgcccagcttcggcttcacccaggagcaggtggcctgcgtgtgcgaggtgctgcagcagggcggcaacctggagagactgggcagattcctgtggagcctgcccgcctgcgaccacctgcacaagaacgagagcgtgctgaaggccaaggccgtggtggccttccacagaggcaacttcagagagctgtacaagatcctggagagccaccagttcagcccccacaaccaccccaagctgcagcagctgtggctgaaggcccactacgtggaggccgagaagctgagaggcagacccctgggcgccgtgggcaagtacagagtgagaagaaagttccccctgcccagaaccatctgggacggcgaggagaccagctactgcttcaaggagaagagcagaggcgtgctgagagagtggtacgcccacaacccctaccccagccccagagagaagagagagctggccgaggccaccggcctgaccaccacccaggtgagcaactggttcaagaacagaagacagagagacagagccgccgaggccaaggagagagagaacaccgagaacaacaacagcagcagcaacaagcagaaccagctgagccccctggagggcggcaagcccctgatgagcagcagcgaggaggagttcagccccccccagagccccgaccagaacagcgtgctgctgctgcagggcaacatgggccacgccagaagcagcaactacagcctgcccggcctgaccgccagccagcccagccacggcctgcagacccaccagcaccagctgcaggacagcctgctgggccccctgaccagcagcctggtggacctgggcagctag

SEQ ID NO: 160906 - protein, 424 aa, Artificial Sequence
  derived and/or modified sequence
MHRKHLQEIPDLSSNVATSFTWGWDSSKTSELLSGMGVSALEKEEPDSENIPQELLSNLGHPESPPRKRLKSKGSDKDFVIVRRPKLNRENFPGVSWDSLPDELLLGIFSCLCLPELLKVSGVCKRWYRLASDESLWQTLDLTGKNLHPDVTGRLLSQGVIAFRCPRSFMDQPLAEHFSPFRVQHMDLSNSVIEVSTLHGILSQCSKLQNLSLEGLRLSDPIVNTLAKNSNLVRLNLSGCSGFSEFALQTLLSSCSRLDELNLSWCFDFTEKHVQVAVAHVSETITQLNLSGYRKNLQKSDLSTLVRRCPNLVHLDLSDSVMLKNDCFQEFFQLNYLQHLSLSRCYDIIPETLLELGEIPTLKTLQVFGIVPDGTLQLLKEALPHLQINCSHFTTIARPTIGNKKNQEIWGIKCRLTLQKPSCL

SEQ ID NO: 160907 - protein, 390 aa, Artificial Sequence
  derived and/or modified sequence
MHRKHLQEKEEPDSENIPQELLSNLGHPESPPRKRLKSKGSDKDFVIVRRPKLNRENFPGVSWDSLPDELLLGIFSCLCLPELLKVSGVCKRWYRLASDESLWQTLDLTGKNLHPDVTGRLLSQGVIAFRCPRSFMDQPLAEHFSPFRVQHMDLSNSVIEVSTLHGILSQCSKLQNLSLEGLRLSDPIVNTLAKNSNLVRLNLSGCSGFSEFALQTLLSSCSRLDELNLSWCFDFTEKHVQVAVAHVSETITQLNLSGYRKNLQKSDLSTLVRRCPNLVHLDLSDSVMLKNDCFQEFFQLNYLQHLSLSRCYDIIPETLLELGEIPTLKTLQVFGIVPDGTLQLLKEALPHLQINCSHFTTIARPTIGNKKNQEIWGIKCRLTLQKPSCL

SEQ ID NO: 160908 - DNA, 3273 bp, Artificial Sequence
  derived and/or modified sequence
aattcccagcaggccttgggcctcagtgcggccgcgaagcagagcgggctgtagagccttgcgcgcgcagtggggatggaacgttgctaggcttagcgggtctggctgctgggggcccgagcagcacgctcggagccgccgcgcgccaaagcgggaatctgggaggcgagcagctctgcagttaatgcacgtattttaaactcccgggcctgcggacgctatgcacaggaagcacctccaggagattccagacctgagtagcaacgttgccaccagcttcacgtggggatgggattccagcaagacttctgaactgctgtcaggcatgggggtctccgccctggagaaagaggagcccgacagtgagaacatcccccaggaactgctctcaaacctgggccacccggagagccccccacggaaacggctgaagagcaaagggagtgacaaagactttgtgattgtccgcaggcctaagctaaatcgagagaactttccaggtctgatgagtctctatggcagaccttagacctcacaggtaaaaatctgcacccggatgtgactggtcggttgctgtctcaaggggtgattgccttccgctgcccacgatcatttatggaccaaccattggctgaacatttcagtactctcgcaaaaaactcaaatttagtgcgacttaacctttctgggtgttctggattctctgaatttgccctgcagactttgctaagcagctgttccagactggatgagctgaacctctcctggtgttttgatttcactgaaaagcatgtacaggtggctgttgcgcatgtgtcagagaccatcacccagctgaatcttagcggctacagaaagaatctccagaaatcagatctctctactttagttagaagatgccccaatcttgtccatctagacttaagtgatagtgtcatgctaaagaatgactgctttcaggaatttttccagctcaactacctccaacacctatcactcagtcggtgctatgatataatacctgaaactttacttgaacttggagaaattcccacactaaaaacactacaagtttttggaatcgtgccagatggtacccttcaactgttaaaggaagcccttcctcatctacagattaattgctcccatttcaccaccattgccaggccaactattggcaacaaaaagaaccaggagatatggggcatcaaatgccgactgacactgcaaaagcccagttgtctatgaagtatttattgcaggatggtgtctcttctttagaacagggaaaataggcaggaagcccaattgctggagtacttagctagttttattcttggttttccctttgccttcattctgcaagtatactagggagccatttgagagggaaaactatgaaatcttgctttttgaaatgattctaaaagcttctatcactgctttgctcttaagagccaaagttgtaggccttttgaaattttaggagagtgagcctataatttcaagataccttaaagagcaaaatttgagccacctcttccaagtgcccttcttactaagtctattcagaatcaagcttaaaaattaccaccagcaaacaatcttcatagcccatataacttttatctatttaattttatagtattgctttataagacagcttagaagaacaataagctatttgtattatgagctgaacaaaaagagaatcataggatagtagcgtctgaggccatcttttctaggaataggaaagagaaaaatgtatttgaattttgcctttagatttgaaattaggttaatagaaataagtaaccccatgtaattcaccttaaaacttaacaaaagaccaaacattacaaaacccagagatatagaatcaatataggatttgaaggcccagcagacagttttctatgacaggttaatctgaagtatcctgtaatgttcattaagttactgtgtttccagaatctaaattagatgagaaatataattgtggttttctaacttgataatcaaattatgttaacatgggtcctttagcttttaaaatgacttgctttgttttagaaaggtggtattaatccactctctattcttgaaaatttggatgggagaattctgaagttgcctgctgttttcctttagcgctgaggttcttaaggttacttttatattactctggaatcaagtattttaaattgtattttttttttaaatgatctctcagcaataattgtttgaaactatccatatataaggttatcagacctacagttccctaagaggaactgcatgttctcttcaatcagaaatatacagtagaagcaggtatatcttccatgcagtttcagtagtaagcactacttatacctacataagagttaaaatccagatgtgggaccttttgataccatcagtgatatatatttttttaaactggtacagagaagtgaaaagattaaattctacttctattttttttttttttttttgagacggagtctcgctctgtcaccaaggccggagtgcagtggtgcgatctcggctcactgcaagctccgcctcccaggttcacgtcattctcctgcctcagcctcccgactagctgggactacaggcgcccaccaccacgcccggctaatttttttgtatttttagtagagacggggtttcaccatgttagccaggatggtctcaatctcctgacctcatgatccgcccgtcttggcctcccaaagtgctgggattacaggcatgagcaactgcgcccagccaaattctacttcttaaaaatcacaaaaactagtttaaattgatgacttgttcgtatgttcaaaatgtaacaacaaaaaaagctaacaccagtcatttatattaactttttttttttaaatcaaaaattgttaatgttagaaacatactatgaagtgcctttatctgcttagacctaaggaagattttaaagttgggttgcacaggaaatgatgatgcttcaatttcttaatagttaaaaagtgctaaatactacttgaaattattgtttacagattagtgacaagagctggggttaggatccggttggactctgacatcggatgccctcaaacatacagaacttccaaactcaagtccagccataagctattttgccaacatgtcagagtaatctgtatttttgtatgtgatttctacttttatagacttgttttaaaacaataaaacacatttttataaaaatgagtgcttaaaaaaaaaaaaaaaaaa

SEQ ID NO: 160909 - DNA, 1600 bp, Artificial Sequence
  derived and/or modified sequence
gaattccgggctgtagagccttgcgcgcgcagtggggatggaacgttgctaggcttagcgggtctggctgctgggggcccgagcagcacgctcggagccgccgcgcgccaaagcgggaatctgggaggcgagcagctctgcagttaatgcacgtattttaaactcccgggcctgcggacgctatgcacaggaagcacctccaggagattccagacctgagtagcaacgttgccaccagcttcacgtggggatgggattccagcaagacttctgaactgctgtcaggcatgggggtctccgccctggagaaagaggagcccgacagtgagaacatcccccaggaactgctctcaaacctgggccacccggagagccccccacggaaacggctgaagagcaaagggagtgacaaagactttgtgattgtccgcaggcctaagctaaatcgagagaactttccaggtgtttcatgggactcccttccggatgagctgctcttgggaatcttttcctgtctgtgcctccctgagctgctaaaggtctctggtgtttgtaagaggtggtatcgcctagcgtctgatgagtctctatggcagaccttagacctcacaggtaaaaatctgcacccggatgtgactggtcggttgctgtctcaaggggtgattgccttccgctgcccacgatcatttatggaccaaccattggctgaacatttcagcccttttcgtgtacagcacatggacctatcgaactcagttatagaagtgtccaccctccacggcatactgtctcagtgttccaagttgcagaatctaagcctggaaggcctgcggctttcggatcccattgtcaatactctcgcaaaaaactcaaatttagtgcgacttaacctttctgggtgttctggattctctgaatttgccctgcagactttgctaagcagctgttccagactggatgagctgaacctctcctggtgttttgatttcactgaaaagcatgtacaggtggctgttgcgcatgtgtcagagaccatcacccagctgaatcttagcggctacagaaagaatctccagaaatcagatctctctactttagttagaagatgccccaatcttgtccatctagacttaagtgatagtgtcatgctaaagaatgactgctttcaggaatttttccagctcaactacctccaacacctatcactcagtcggtgctatgatataatacctgaaactttacttgaacttggagaaattcccacactaaaaacactacaagtttttggaatcgtgccagatggtacccttcaactgttaaaggaagcccttcctcatctacagattaattgctcccatttcaccaccattgccaggccaactattggcaacaaaaagaaccaggagatatggggcatcaaatgccgactgacactgcaaaagcccagttgtctatgaagtatttattgcaggatggtgtctcttctttagaacagggaaaataggcaggaagcccaattgctggagtacttagctagttttattcttggttttccctttgccttcattctgcaagtatactagggagccatttgagaggg

SEQ ID NO: 160910 - DNA, 1275 bp, Artificial Sequence
  derived and/or modified sequence
atgcacagaaagcacctgcaggagatccccgacctgagcagcaacgtggccaccagcttcacctggggctgggacagcagcaagaccagcgagctgctgagcggcatgggcgtgagcgccctggagaaggaggagcccgacagcgagaacatcccccaggagctgctgagcaacctgggccaccccgagagcccccccagaaagagactgaagagcaagggcagcgacaaggacttcgtgatcgtgagaagacccaagctgaacagagagaacttccccggcgtgagctgggacagcctgcccgacgagctgctgctgggcatcttcagctgcctgtgcctgcccgagctgctgaaggtgagcggcgtgtgcaagagatggtacagactggccagcgacgagagcctgtggcagaccctggacctgaccggcaagaacctgcaccccgacgtgaccggcagactgctgagccagggcgtgatcgccttcagatgccccagaagcttcatggaccagcccctggccgagcacttcagccccttcagagtgcagcacatggacctgagcaacagcgtgatcgaggtgagcaccctgcacggcatcctgagccagtgcagcaagctgcagaacctgagcctggagggcctgagactgagcgaccccatcgtgaacaccctggccaagaacagcaacctggtgagactgaacctgagcggctgcagcggcttcagcgagttcgccctgcagaccctgctgagcagctgcagcagactggacgagctgaacctgagctggtgcttcgacttcaccgagaagcacgtgcaggtggccgtggcccacgtgagcgagaccatcacccagctgaacctgagcggctacagaaagaacctgcagaagagcgacctgagcaccctggtgagaagatgccccaacctggtgcacctggacctgagcgacagcgtgatgctgaagaacgactgcttccaggagttcttccagctgaactacctgcagcacctgagcctgagcagatgctacgacatcatccccgagaccctgctggagctgggcgagatccccaccctgaagaccctgcaggtgttcggcatcgtgcccgacggcaccctgcagctgctgaaggaggccctgccccacctgcagatcaactgcagccacttcaccaccatcgccagacccaccatcggcaacaagaagaaccaggagatctggggcatcaagtgcagactgaccctgcagaagcccagctgcctgtag

SEQ ID NO: 160911 - DNA, 1173 bp, Artificial Sequence
  derived and/or modified sequence
atgcacagaaagcacctgcaggagaaggaggagcccgacagcgagaacatcccccaggagctgctgagcaacctgggccaccccgagagcccccccagaaagagactgaagagcaagggcagcgacaaggacttcgtgatcgtgagaagacccaagctgaacagagagaacttccccggcgtgagctgggacagcctgcccgacgagctgctgctgggcatcttcagctgcctgtgcctgcccgagctgctgaaggtgagcggcgtgtgcaagagatggtacagactggccagcgacgagagcctgtggcagaccctggacctgaccggcaagaacctgcaccccgacgtgaccggcagactgctgagccagggcgtgatcgccttcagatgccccagaagcttcatggaccagcccctggccgagcacttcagccccttcagagtgcagcacatggacctgagcaacagcgtgatcgaggtgagcaccctgcacggcatcctgagccagtgcagcaagctgcagaacctgagcctggagggcctgagactgagcgaccccatcgtgaacaccctggccaagaacagcaacctggtgagactgaacctgagcggctgcagcggcttcagcgagttcgccctgcagaccctgctgagcagctgcagcagactggacgagctgaacctgagctggtgcttcgacttcaccgagaagcacgtgcaggtggccgtggcccacgtgagcgagaccatcacccagctgaacctgagcggctacagaaagaacctgcagaagagcgacctgagcaccctggtgagaagatgccccaacctggtgcacctggacctgagcgacagcgtgatgctgaagaacgactgcttccaggagttcttccagctgaactacctgcagcacctgagcctgagcagatgctacgacatcatccccgagaccctgctggagctgggcgagatccccaccctgaagaccctgcaggtgttcggcatcgtgcccgacggcaccctgcagctgctgaaggaggccctgccccacctgcagatcaactgcagccacttcaccaccatcgccagacccaccatcggcaacaagaagaaccaggagatctggggcatcaagtgcagactgaccctgcagaagcccagctgcctgtag

SEQ ID NO: 160912 - DNA, 1275 bp, Artificial Sequence
  derived and/or modified sequence
atgcaccggaagcacctgcaagagatccctgacctatcaagcaacgtggccacgtcattcacatgggggtgggatagttcaaagacaagtgagctgcttagcggcatgggggtctctgctttggagaaggaggaaccagattctgagaacattccccaagaattgttgtccaacctgggccaccctgaatcccctccaaggaaacgattgaagagcaagggctctgacaaggacttcgtgatcgttcgtaggcccaagctgaaccgggagaactttcccggcgtaagctgggactctctcccggatgagttgctcctaggcatcttttcctgcttatgtctccctgaactgttgaaagtgagcggggtgtgcaagcggtggtaccggctcgcctcagacgagagcctctggcagacgctcgatctgactggcaaaaacctgcatcctgacgtgacagggagactgttaagccaaggcgtcatcgctttccgttgtccaagatccttcatggaccagcccttggctgaacattttagcccatttcgcgttcagcatatggatctgtccaacagtgttattgaggtaagcaccctccacggaattctgtcccagtgttccaagttgcaaaatctgtccttagaaggcctgaggctgagtgatccaatcgtcaataccctggccaagaactcgaatctggtaagactcaacctgtctgggtgctccgggttctcagagtttgccctgcagaccttactgtcaagctgttccagacttgacgaacttaatctcagttggtgcttcgattttacagagaagcacgtccaagtggcggtagcccacgtctctgaaactattacccagcttaatctgtccggctacagaaagaatttgcagaaaagcgacctttctacccttgtcagacgctgtcccaatctggtgcatttggacctgtcagactcagtgatgctgaagaatgattgctttcaggaattcttccagctaaattacctccagcatctgagcctgagccggtgttatgacattatccccgagacactgctcgagctgggggaaattccgacgctgaaaactctgcaggtcttcggaattgtaccagacggcactctccagctcctgaaggaagctttgccccatctacaaatcaattgcagccacttcactacaattgcccggccgaccatcgggaacaagaaaaaccaggagatttgggggataaagtgcagattaaccctccagaagcccagctgtctgtag

SEQ ID NO: 160913 - DNA, 1173 bp, Artificial Sequence
  derived and/or modified sequence
atgcatcggaagcacctgcaggagaaggaagaaccggatagcgaaaatattccccaggaactgttgagcaatttgggtcacccagagtcgcctccgcgaaagcggcttaaatcaaagggtagtgacaaggacttcgtcatcgttagaaggccgaagctaaacagagaaaattttccaggagtgtcttgggacagtttgcccgacgaattgctgttggggattttctcctgtctgtgcctcccagaactgctgaaagtctccggcgtgtgcaagagatggtacaggctagcctcggatgagtctttatggcagactcttgatctcactgggaaaaatctgcaccccgacgtgacgggacgacttctgagccagggcgtcatcgctttccgatgcccgcggtcttttatggatcagccactcgcggagcactttagccccttcagagtacagcatatggacctgagcaactccgtgatagaggtgtccaccctccatggcattctcagccagtgctcaaagctgcagaatctttctcttgaaggcctgcgcctgtcggaccccatcgttaatactctcgccaaaaatagcaatttggtaaggttgaatctctccgggtgcagtggcttttctgaattcgccctccagactctgctctcttcatgctcaagactcgatgagctgaatctaagctggtgtttcgattttaccgaaaagcatgtccaggtggccgtggcacacgtgagcgagaccattacacagctcaatctttccggctaccgaaaaaacttgcagaaatcagatctcagtacactggtgagacgctgtccaaatctggttcacctggatctgagtgacagcgttatgctgaaaaatgattgcttccaggagttttttcaactgaattatctgcagcatttatcgcttagcaggtgttatgacataatccccgaaacgcttttggaactcggcgagataccaaccctgaagaccctccaggtgttcggaatcgtacccgatggaacgctccagcttctcaaagaagctttgcctcacctgcaaattaactgttcacactttacgacaatagcccgaccaacaattggcaacaagaaaaaccaagagatttggggtatcaaatgtcggctgacactgcaaaaaccctcctgtctgtag

SEQ ID NO: 160914 - DNA, 1275 bp, Artificial Sequence
  derived and/or modified sequence
atgcacaggaagcacctgcaggagatcccagacctgagcagcaatgtggccaccagcttcacctggggctgggacagcagcaagaccagcgagctgctgagcggcatgggcgtgtctgccctggagaaggaggagccagacagcgagaacatcccccaggagctgctgagcaacctgggccaccctgagagcccccccaggaagaggctgaagagcaaaggaagtgacaaggactttgtgattgtgagaagacccaagctgaaccgggagaacttccctggggtgtcctgggacagcctgcctgatgagctgctgctgggcatcttcagctgcctgtgcctgcctgagctgctgaaggtgtctggagtgtgcaagcgctggtaccgcctggccagtgatgagagcctgtggcagaccctggacctgaccgggaagaacctgcacccagatgtgacaggccgcctgctgagccagggcgtgattgccttccgctgccccaggagcttcatggaccagcccctggccgagcacttcagccccttccgggtgcagcacatggacctgagcaacagcgtgattgaggtgtccaccctgcacggcatcctgagccagtgcagcaagctgcagaacctgagcctggagggcctgcggctgagtgaccccatcgtgaacaccctggccaagaacagcaacctggtgcggctgaacctgagcggctgcagcggcttcagcgagtttgccctgcagaccctgctgagcagctgcagccggctggatgagctgaacctgtcctggtgctttgacttcacagagaagcacgtgcaggtggccgtggcccacgtgtctgagaccatcacccagctgaacctgagcggctacaggaagaacctgcagaagagtgacctgagcaccctggtgcggcgctgccccaacctggtgcacctggacctgagtgacagcgtgatgctgaagaatgactgcttccaggagttcttccagctgaactacctgcagcacctgagcctgagccgctgctatgacatcatccctgagaccctgctggagctgggggagatccccaccctgaagaccctgcaggtgtttggcatcgtgcctgatggcaccctgcagctgctgaaggaggccctgccccacctgcagatcaactgcagccacttcaccaccatcgcccggcccaccatcggcaacaagaagaaccaggagatctggggcatcaagtgccgcctgaccctgcagaagcccagctgcctgtag

SEQ ID NO: 160915 - DNA, 1173 bp, Artificial Sequence
  derived and/or modified sequence
atgcacaggaagcacctgcaggagaaggaggagccagacagcgagaacatcccccaggagctgctgagcaacctgggccaccctgagagcccccccaggaagaggctgaagagcaaaggaagtgacaaggactttgtgattgtgagaagacccaagctgaaccgggagaacttccctggggtgtcctgggacagcctgcctgatgagctgctgctgggcatcttcagctgcctgtgcctgcctgagctgctgaaggtgtctggagtgtgcaagcgctggtaccgcctggccagtgatgagagcctgtggcagaccctggacctgaccgggaagaacctgcacccagatgtgacaggccgcctgctgagccagggcgtgattgccttccgctgccccaggagcttcatggaccagcccctggccgagcacttcagccccttccgggtgcagcacatggacctgagcaacagcgtgattgaggtgtccaccctgcacggcatcctgagccagtgcagcaagctgcagaacctgagcctggagggcctgcggctgagtgaccccatcgtgaacaccctggccaagaacagcaacctggtgcggctgaacctgagcggctgcagcggcttcagcgagtttgccctgcagaccctgctgagcagctgcagccggctggatgagctgaacctgtcctggtgctttgacttcacagagaagcacgtgcaggtggccgtggcccacgtgtctgagaccatcacccagctgaacctgagcggctacaggaagaacctgcagaagagtgacctgagcaccctggtgcggcgctgccccaacctggtgcacctggacctgagtgacagcgtgatgctgaagaatgactgcttccaggagttcttccagctgaactacctgcagcacctgagcctgagccgctgctatgacatcatccctgagaccctgctggagctgggggagatccccaccctgaagaccctgcaggtgtttggcatcgtgcctgatggcaccctgcagctgctgaaggaggccctgccccacctgcagatcaactgcagccacttcaccaccatcgcccggcccaccatcggcaacaagaagaaccaggagatctggggcatcaagtgccgcctgaccctgcagaagcccagctgcctgtag

SEQ ID NO: 160916 - DNA, 1275 bp, Artificial Sequence
  derived and/or modified sequence
atgcaccggaagcacctgcaggagatccccgacctgagcagcaacgtcgcgacaagttttacctggggctgggacagcagcaagacatctgaattgctcagtggaatgggggtttcagccttggaaaaggaggaacctgactctgaaaacatacctcaggaattactgagtaatctgggtcaccccgagtccccgccacgcaaacggttgaaatctaaaggaagtgataaagactttgtgatagtccgacgccctaagttaaaccgggagaatttcccaggagtgtcgtgggactcactgccagacgagcttctgctgggcatctttagctgcctctgcctgccggagctacttaaagtgagtggcgtgtgcaaaagatggtacaggttggctagcgacgagtctctgtggcagaccttggatttgactggtaagaaccttcatcctgacgtcaccggaagattattgtcacaaggggtcatcgcctttagatgtccaaggtcctttatggaccagcctttagccgagcatttctccccctttcgcgtgcagcacatggatctgtccaattccgttattgaggtcagtactcttcacggcattctttctcaatgctcaaaactgcagaacctcagtctggagggattaaggctcagtgaccctattgtgaatacactggccaagaatagcaacctcgtgagattgaatttatccggttgctccggattttccgaattcgccctgcagacattgctgtcctcttgtagcagattagatgaacttaatttgtcttggtgcttcgatttcaccgaaaagcacgttcaggtagctgtcgcacacgtgagtgagacaatcacacaacttaacttgtcgggataccggaagaatctccagaagtcagacctgagcacacttgtccgtaggtgccccaacctcgttcacctagatcttagcgattcagtgatgctcaagaacgactgctttcaggaatttttccagctaaattacctgcagcacctcagcctgtccagatgctacgacataatccctgagactctcctggagctcggagaaattcctactttaaaaaccctccaggtattcgggatcgttcctgatggcaccctgcagctcctgaaggaggcactcccccacctgcagataaattgttctcattttacaaccatcgctaggcccaccattggcaataaaaagaaccaagagatctggggaatcaagtgtcgcctgaccctgcagaagcccagctgcctgtag

SEQ ID NO: 160917 - DNA, 1173 bp, Artificial Sequence
  derived and/or modified sequence
atgcaccggaagcacctgcaggagaaggaggagcccgacagcgagaacatcccacaggaactgctgtcgaatctggggcatcctgagagccctccaaggaaaagactcaagtctaaaggcagcgataaggacttcgtcatcgtgaggcgaccaaagctgaatagagagaactttcccggggtaagctgggattcccttcctgatgagttgctattaggcatcttttcttgtttatgtttgcccgagctgttgaaagtcagcggcgtgtgtaagcgctggtatagactagcatcagacgagagcctctggcagacgcttgaccttactggcaagaacttgcacccggatgttaccggtcggctgctgagccaaggggtcatagcgtttcggtgtcctaggtcattcatggatcagcccttggctgagcacttttcccccttcagggttcagcacatggacttgtctaattccgtcatcgaagtctccaccttgcacgggatcctctcacagtgcagcaagttgcagaatcttagtctggagggtttgaggctgagtgacccaattgtgaacaccctggctaagaactccaatttggtgagactcaacctttctggctgcagcgggttcagcgagttcgctttacagactttgttgtctagttgttccagacttgatgaactgaatctctcatggtgctttgatttcaccgaaaagcatgtccaggtcgccgtcgcacatgtgtcagagactataactcagcttaatctgagtgggtaccgcaagaatctgcagaagagtgatctcagcacccttgtaagaaggtgtcccaacctggtacatcttgacctctcagacagcgtaatgctgaaaaacgactgctttcaggagtttttccagctgaactatctgcagcatctgagcctctccagatgctacgacataatacccgaaaccctccttgaactaggcgaaatacctaccctcaagaccttgcaggtgtttggtattgttcctgacgggaccctgcagctcctgaaggaggcactgccacacctgcagatcaactgtagtcacttcaccacaatcgccagacccaccattggaaacaagaagaatcaggagatatggggaatcaagtgtcgattgactctacagaaacccagttgtttatag

SEQ ID NO: 160918 - DNA, 1275 bp, Artificial Sequence
  derived and/or modified sequence
atgcatcggaaacacctgcaggaaatcccagatctgtcatctaatgtggctactagtttcacctggggatgggactcatctaagacaagtgaactattatcaggaatgggtgtgtcagcactggagaaagaagaaccagatagcgagaacatcccgcaggaacttttgtctaacctggggcacccagagtcacccccacgaaaacgcctgaagagcaagggctccgacaaggactttgtgatcgttaggaggccgaagctgaatcgggagaacttccctggtgtgagctgggattccctgccggatgagttactgctcggtatctttagttgtctatgtttgccagaactgttgaaggtcagcggtgtgtgcaagcggtggtatcggctcgcttctgacgaatccctctggcagactctggacctgactggtaagaatctccaccccgacgtgacaggacggctcctgtcacagggggtgattgctttccggtgccccagatcctttatggatcaaccattggccgaacactttagcccattccgggtgcagcacatggacctttcaaattccgtgattgaggtctccaccttacacgggattctctcccagtgttccaagttacagaacttgagcctcgaaggacttcgactctcagatcccattgttaatactctagccaagaattcaaatctcgtgaggctcaacctctctgggtgttctggcttcagcgagtttgcactacagactctgctgagctcatgtagcagactggacgaacttaacctctcttggtgcttcgacttcactgagaaacatgtgcaagtggcagtggcccacgtgtcagagaccattacccagctaaacctgagtgggtacagaaagaatctgcaaaaatcagaccttagcacgctggtgcgcagatgtcccaatctggttcatctagatttatctgatagcgtaatgctcaaaaacgattgttttcaggagttttttcaactcaattacctacagcacctgtccctctcacggtgctacgatatcatcccagagaccctcctggagctgggtgaaatcccgactctgaagactctccaggtgtttggcatcgtcccagacggaactctgcagctcctgaaggaggcactgccccatctgcagattaactgttctcacttcacaacgatcgcacggccaacaatcggtaacaagaagaatcaggaaatctggggaatcaaatgcaggctgaccctacaaaaacctagttgcctctag

SEQ ID NO: 160919 - DNA, 1173 bp, Artificial Sequence
  derived and/or modified sequence
atgcatcggaagcatttacaagagaaggaagagcccgactcagaaaacatccctcaagagctcctgagtaacctgggacatcccgagtcaccacctagaaagagattaaaatccaaggggagcgataaggacttcgtgatcgtcaggaggcccaaattaaatagggagaatttccccggtgtctcgtgggactccctgcctgacgagcttctcctgggtatctttagctgtctgtgtctcccagaactgctgaaggtgtcaggtgtgtgtaagagatggtatcgactcgcatccgacgagtccctgtggcagaccctagatctgactgggaaaaatctgcacccagatgtcactggccgactgcttagtcagggcgttatcgcattccgctgccctagaagctttatggatcagcctctggcagaacattttagcccctttcgggttcagcatatggacctgtccaattcagttatcgaggtgtctaccttgcacggtattttatctcaatgctctaaactacagaacttgtccttggaaggcttacggctctcagacccgatcgtaaacacactggccaaaaatagcaatttggttagactgaatctgtctggctgttcaggattcagtgaatttgctctgcagacactgctgtcatcatgcagtcggcttgatgagctaaacctgagctggtgtttcgactttactgaaaaacatgtgcaagtggccgtggcccatgtcagcgaaactattactcagttgaatttatctggctaccggaagaacctgcaaaaatcagacctaagcacgctcgtccggagatgccctaatctggtgcatctggatctgtccgatagcgtgatgctgaaaaacgattgtttccaggagttctttcagcttaattatcttcagcatttgtctctgtctcgctgttatgatatcatcccagaaacgttactggagctgggagaaataccaacgctcaaaacgctgcaggtatttggtatcgttccagacggcaccctccaactgctgaaagaggcccttccccacttgcagataaattgtagtcactttactaccatcgctaggcctactataggtaacaaaaagaaccaggagatatggggaataaaatgcagactgaccctgcagaaacctagctgtttatag

SEQ ID NO: 160920 - DNA, 3759 bp, Artificial Sequence
  derived and/or modified sequence
agtgcggccgcgaagcagagcgggctgtagagccttgcgcgcgcagtggggatggaacgttgctaggcttagcgggtctggctgctgggggcccgagcagcacgctcggagccgccgcgcgccaaagcgggaatctgggaggcgagcagctctgcagttaatgcacgtattttaaactcccgggcctgcggacgctatgcacaggaagcacctccaggagattccagacctgagtagcaacgttgccaccagcttcacgtggggatgggattccagcaagacttctgaactgctgtcaggcatgggggtctccgccctggagaaagaggagcccgacagtgagaacatcccccaggaactgctctcaaacctgggccacccggagagccccccacggaaacggctgaagagcaaagggagtgacaaagactttgtgattgtccgcaggcctaagctaaatcgagagaactttccaggtgtttcatgggactcccttccggatgagctgctcttgggaatcttttcctgtctgtgcctccctgagctgctaaaggtctctggtgtttgtaagaggtggtatcgcctagcgtctgatgagtctctatggcagaccttagacctcacaggtaaaaatctgcacccggatgtgactggtcggttgctgtctcaaggggtgattgccttccgctgcccacgatcatttatggaccaaccattggctgaacatttcagcccttttcgtgtacagcacatggacctatcgaactcagttatagaagtgtccaccctccacggcatactgtctcagtgttccaagttgcagaatctaagcctggaaggcctgcggctttcggatcccattgtcaatactctcgcaaaaaactcaaatttagtgcgacttaacctttctgggtgttctggattctctgaatttgccctgcagactttgctaagcagctgttccagactggatgagctgaacctctcctggtgttttgatttcactgaaaagcatgtacaggtggctgttgcgcatgtgtcagagaccatcacccagctgaatcttagcggctacagaaagaatctccagaaatcagatctctctactttagttagaagatgccccaatcttgtccatctagacttaagtgatagtgtcatgctaaagaatgactgctttcaggaatttttccagctcaactacctccaacacctatcactcagtcggtgctatgatataatacctgaaactttacttgaacttggagaaattcccacactaaaaacactacaagtttttggaatcgtgccagatggtacccttcaactgttaaaggaagcccttcctcatctacagattaattgctcccatttcaccaccattgccaggccaactattggcaacaaaaagaaccaggagatatggggcatcaaatgccgactgacactgcaaaagcccagttgtctatgaagtatttattgcaggatggtgtctcttctttagaacagggaaaataggcaggaagcccaattgctggagtacttagctagttttattcttggttttccctttgccttcattctgcaagtatactagggagccatttgagagggaaaactatgaaatcttgctttttgaaatgattctaaaagcttctatcactgctttgctcttaagagccaaagttgtaggccttttgaaattttaggagagtgagcctataatttcaagataccttaaagagcaaaatttgagccacctcttccaagtgcccttcttactaagtctattcagaatcaagcttaaaaattaccaccagcaaacaatcttcatagcccatataacttttatctatttaattttatagtattgctttataagacagcttagaagaacaataagctatttgtattatgagctgaacaaaaagagaatcataggatagtagcgtctgaggccatcttttctaggaataggaaagagaaaaatgtatttgaattttgcctttagatttgaaattaggttaatagaaataagtaaccccatgtaattcaccttaaaacttaacaaaagaccaaacattacaaaacccagagatatagaatcaatataggatttgaaggcccagcagacagttttctatgacaggttaatctgaagtatcctgtaatgttcattaagttactgtgtttccagaatctaaattagatgagaaatataattgtggttttctaacttgataatcaaattatgttaacatgggtcctttagcttttaaaatgacttgctttgttttagaaaggtggtattaatccactctctattcttgaaaatttggatgggagaattctgaagttgcctgctgttttcctttagcgctgaggttcttaaggttacttttatattactctggaatcaagtattttaaattgtattttttttttaaatgatctctcagcaataattgtttgaaactatccatatataaggttatcagacctacagttccctaagaggaactgcatgttctcttcaatcagaaatatacagtagaagcaggtatatcttccatgcagtttcagtagtaagcactacttatacctacataagagttaaaatccagatgtgggaccttttgataccatcagtgatatatatttttttaaactggtacagagaagtgaaaagattaaattctacttctattttttttttttttttttgagacggagtctcgctctgtcaccaaggccggagtgcagtggtgcgatctcggctcactgcaagctccgcctcccaggttcacgtcattctcctgcctcagcctcccgactagctgggactacaggcgcccaccaccacgcccggctaatttttttgtatttttagtagagacggggtttcaccatgttagccaggatggtctcaatctcctgacctcatgatccgcccgtcttggcctcccaaagtgctgggattacaggcatgagcaactgcgcccagccaaattctacttcttaaaaatcacaaaaactagtttaaattgatgacttgttcgtatgttcaaaatgtaacaacaaaaaaagctaacaccagtcatttatattaactttttttttttaaatcaaaaattgttaatgttagaaacatactatgaagtgcctttatctgcttagacctaaggaagattttaaagttgggttgcacaggaaatgatgatgcttcaatttcttaatagttaaaaagtgctaaatactacttgaaattattgtttacagattagtgacaagagctggggttaggatccggttggactctgacatcggatgccctcaaacatacagaacttccaaactcaagtccagccataagctattttgccaacatgtcagagtaatctgtatttttgtatgtgatttctacttttatagacttgttttaaaacaataaaacacatttttataaaaatgagtgcttaaactaagttgtattccttttttctttctctttttttaagtgctgtggttaaaatttgaaagcatttagtgtggtatgccatttggcttagatacctctaaataagactcttcaaaacagagccctgagatggtcctttttgacccatctacttcatatgcttgtcacattaaaaaaaaaagtttataatgcctttataaaaggggctaatacagtcttgttatctttttttttaaattatactttaagttctagggtacatgtgcacaacgtgcaggttt

SEQ ID NO: 160921 - DNA, 1409 bp, Artificial Sequence
  derived and/or modified sequence
agtgcggccgcgaagcagagcgggctgtagagccttgcgcgcgcagtggggatggaacgttgctaggcttagcgggtctggctgctgggggcccgagcagcacgctcggagccgccgcgcgccaaagcgggaatctgggaggcgagcagctctgcagttaatgcacgtattttaaactcccgggcctgcggacgctatgcacaggaagcacctccaggagaaagaggagcccgacagtgagaacatcccccaggaactgctctcaaacctgggccacccggagagccccccacggaaacggctgaagagcaaagggagtgacaaagactttgtgattgtccgcaggcctaagctaaatcgagagaactttccaggtgtttcatgggactcccttccggatgagctgctcttgggaatcttttcctgtctgtgcctccctgagctgctaaaggtctctggtgtttgtaagaggtggtatcgcctagcgtctgatgagtctctatggcagaccttagacctcacaggtaaaaatctgcacccggatgtgactggtcggttgctgtctcaaggggtgattgccttccgctgcccacgatcatttatggaccaaccattggctgaacatttcagcccttttcgtgtacagcacatggacctatcgaactcagttatagaagtgtccaccctccacggcatactgtctcagtgttccaagttgcagaatctaagcctggaaggcctgcggctttcggatcccattgtcaatactctcgcaaaaaactcaaatttagtgcgacttaacctttctgggtgttctggattctctgaatttgccctgcagactttgctaagcagctgttccagactggatgagctgaacctctcctggtgttttgatttcactgaaaagcatgtacaggtggctgttgcgcatgtgtcagagaccatcacccagctgaatcttagcggctacagaaagaatctccagaaatcagatctctctactttagttagaagatgccccaatcttgtccatctagacttaagtgatagtgtcatgctaaagaatgactgctttcaggaatttttccagctcaactacctccaacacctatcactcagtcggtgctatgatataatacctgaaactttacttgaacttggagaaattcccacactaaaaacactacaagtttttggaatcgtgccagatggtacccttcaactgttaaaggaagcccttcctcatctacagattaattgctcccatttcaccaccattgccaggccaactattggcaacaaaaagaaccaggagatatggggcatcaaatgccgactgacactgcaaaagcccagttgtctatgaagtatttattgcaggatggtgtctcttctttagaacaggg

SEQ ID NO: 160922 - DNA, 1646 bp, Artificial Sequence
  derived and/or modified sequence
gctaggcttagcgggtctggctgctgggggcccgagcagcacgctcggagccgccgcgcgccaaagcgggaatctgggaggcgagcagctctgcagttaatgcacgtattttaaactcccgggcctgcggacgctatgcacaggaagcacctccaggagattccagacctgagtagcaacgttgccaccagcttcacgtggggatgggattccagcaagacttctgaactgctgtcaggcatgggggtctccgccctggagaaagaggagcccgacagtgagaacatcccccaggaactgctctcaaacctgggccacccggagagccccccacggaaacggctgaagagcaaagggagtgacaaagactttgtgattgtccgcaggcctaagctaaatcgagagaactttccaggtctgatgagtctctatggcagaccttagacctcacaggtaaaaatctgcacccggatgtgactggtcggttgctgtctcaaggggtgattgccttccgctgcccacgatcatttatggaccaaccattggctgaacatttcagtactctcgcaaaaaactcaaatttagtgcgacttaacctttctgggtgttctggattctctgaatttgccctgcagactttgctaagcagctgttccagactggatgagctgaacctctcctggtgttttgatttcactgaaaagcatgtacaggtggctgttgcgcatgtgtcagagaccatcacccagctgaatcttagcggctacagaaagaatctccagaaatcagatctctctactttagttagaagatgccccaatcttgtccatctagacttaagtgatagtgtcatgctaaagaatgactgctttcaggaatttttccagctcaactacctccaacacctatcactcagtcggtgctatgatataatacctgaaactttacttgaacttggagaaattcccacactaaaaacactacaagtttttggaatcgtgccagatggtacccttcaactgttaaaggaagcccttcctcatctacagattaattgctcccatttcaccaccattgccaggccaactattggcaacaaaaagaaccaggagatatggggcatcaaatgccgactgacactgcaaaagcccagttgtctatgaagtatttattgcaggatggtgtctcttctttagaacagggaaaataggcaggaagcccaattgctggagtacttagctagttttattcttggttttccctttgccttcattctgcaagtatactagggagccatttgagagggaaaactatgaaatcttgctttttgaaatgattctaaaagcttctatcactgctttgctcttaagagccaaagttgtaggccttttgaaattttaggagagtgagcctataatttcaagataccttaaagagcaaaatttgagccacctcttccaagtgcccttcttactaagtctattcagaatcaagcttaaaaattaccaccagcaaacaatcttcatagcccatataacttttatctatttaattttatagtattgctttataagacagcttagaagaacaataagctatttgtattatgagctgaacaaaaagagaatcataggatagtagcgtct

SEQ ID NO: 160923 - protein, 311 aa, Artificial Sequence
  derived and/or modified sequence
MPAPRAPRALAAAAPASGKAKLTHPGKAILAGGLAGGIEICITFPTEYVKTQLQLDERSHPPRYRGIGDCVRQTVRSHGVLGLYRGLSSLLYGSIPKAAVRFGMFEFLSNHMRDAQGRLDSTRGLLCGLGAGVAEAVVVVCPMETIKVKFIHDQTSPNPKYRGFFHGVREIVREQGLKGTYQGLTATVLKQGSNQAIRFFVMTSLRNWYRGDNPNKPMNPLITGVFGAIAGAASVFGNTPLDVIKTRMQGLEAHKYRNTWDCGLQILKKEGLKAFYKGTVPRLGRVCLDVAIVFVIYDEVVKLLNKVWKTD

SEQ ID NO: 160924 - DNA, 936 bp, Artificial Sequence
  derived and/or modified sequence
atgcccgcccccagagcccccagagccctggccgccgccgcccccgccagcggcaaggccaagctgacccaccccggcaaggccatcctggccggcggcctggccggcggcatcgagatctgcatcaccttccccaccgagtacgtgaagacccagctgcagctggacgagagaagccacccccccagatacagaggcatcggcgactgcgtgagacagaccgtgagaagccacggcgtgctgggcctgtacagaggcctgagcagcctgctgtacggcagcatccccaaggccgccgtgagattcggcatgttcgagttcctgagcaaccacatgagagacgcccagggcagactggacagcaccagaggcctgctgtgcggcctgggcgccggcgtggccgaggccgtggtggtggtgtgccccatggagaccatcaaggtgaagttcatccacgaccagaccagccccaaccccaagtacagaggcttcttccacggcgtgagagagatcgtgagagagcagggcctgaagggcacctaccagggcctgaccgccaccgtgctgaagcagggcagcaaccaggccatcagattcttcgtgatgaccagcctgagaaactggtacagaggcgacaaccccaacaagcccatgaaccccctgatcaccggcgtgttcggcgccatcgccggcgccgccagcgtgttcggcaacacccccctggacgtgatcaagaccagaatgcagggcctggaggcccacaagtacagaaacacctgggactgcggcctgcagatcctgaagaaggagggcctgaaggccttctacaagggcaccgtgcccagactgggcagagtgtgcctggacgtggccatcgtgttcgtgatctacgacgaggtggtgaagctgctgaacaaggtgtggaagaccgactag

SEQ ID NO: 160925 - DNA, 936 bp, Artificial Sequence
  derived and/or modified sequence
atgcctgcccctcgcgccccacgggccttagctgccgcagctcctgcctccggcaaggctaaactcacgcatcccgggaaagcaattctcgccggcggcctggctggcggcattgaaatctgcatcacattccctacagagtacgtgaaaacccagctccaactcgacgaaagaagtcaccctcccagatacagagggattggtgactgcgtccgccagacggtgcgctcccacggcgtgctcgggctgtaccgggggctgtcctcactattatacggctctattcccaaggcagctgtgcggtttggcatgttcgaattcctatcaaaccacatgagagatgcccaaggcagactggatagtactaggggcctactttgcgggctgggcgctggcgtggccgaagccgttgtggtagtgtgccccatggagaccatcaaggtgaaattcatccatgatcagactagccctaatccaaagtaccgtggattcttccacggtgtgagagagattgtcagagagcagggtttaaaagggacttaccagggtctcacagccaccgttcttaaacagggaagcaaccaggccatacgatttttcgtgatgaccagcctacggaactggtatagaggtgataatcctaacaagcctatgaatccattgatcactggcgttttcggggctatagcaggtgcagcatccgtctttggaaatactccacttgacgtgataaaaacacgcatgcagggactggaagctcacaagtacaggaacacgtgggattgcgggctccagattctgaaaaaggaaggtttaaaagcattctacaaaggtacagtccctcgcttgggccgtgtctgcctggatgtagccattgtatttgttatctacgatgaggtggtcaagctccttaataaagtgtggaagactgactag

SEQ ID NO: 160926 - DNA, 936 bp, Artificial Sequence
  derived and/or modified sequence
atgcctgccccccgggccccccgggccctggccgctgctgccccagccagcggcaaggccaagctgacccaccctgggaaggccatcctggccggcggcctggccggcggcatcgagatctgcatcaccttccccacagaatatgtgaagacccagctgcagctggatgagaggagccaccccccacgctaccggggcattggagactgtgtgcggcagacagtgcgcagccacggcgtgctgggcctgtaccggggcctgagcagcctgctgtatggcagcatccccaaggctgctgtgcgcttcggcatgtttgagttcctgagcaaccacatgagagatgcccagggccgcctggacagcacccggggcctgctgtgtggcctgggcgccggcgtggccgaggccgtggtggtggtgtgccccatggagaccatcaaggtgaagttcatccatgaccagaccagccccaaccccaagtaccggggcttcttccacggcgtgcgggagatcgtgcgggagcagggcctgaagggcacctaccagggcctgacagccaccgtgctgaagcagggcagcaaccaggccatccgcttctttgtgatgaccagcctgaggaactggtacagaggagacaaccccaacaagcccatgaaccccctcatcactggagtgtttggagccatcgccggggccgcctctgtgtttggaaacacccccctggatgtgatcaagaccaggatgcagggcctggaggcccacaagtacagaaacacctgggactgtggcctgcagatcctgaagaaggagggcctgaaggccttctacaagggcaccgtgccccggctgggccgggtgtgcctggatgtggccatcgtgtttgtgatctatgatgaggtggtgaagctgctgaacaaggtgtggaagacagactag

SEQ ID NO: 160927 - DNA, 936 bp, Artificial Sequence
  derived and/or modified sequence
atgcccgccccccgggccccccgggccctggccgccgccgcccccgcatccggaaaagcaaagcttactcatcccgggaaagctatccttgcaggcggtctggccggcggcattgaaatctgtattaccttccccaccgagtatgtgaagacacagttacagctagacgagaggtctcaccctccccgctaccgcggcatcggggactgcgtgagacagacagtccgatcccacggggtgttgggactttacaggggactctcaagtctcctctacggctccattcctaaggccgccgtccgcttcggtatgttcgaattcctgtctaatcacatgcgagacgcccaaggtcgactggattcaactaggggtctgctgtgtgggttaggtgccggcgtcgcagaagccgtggtggtggtgtgtcccatggagactattaaggttaaattcattcacgatcagactagccctaacccaaaatatagaggtttcttccacggcgttcgggagatcgtccgggagcagggcctaaagggcacgtatcagggtctgacagcaacagtgctgaagcaggggtccaatcaggctatcagattcttcgtgatgacctccctgcggaactggtatagaggcgataatcctaataaacccatgaaccccttgatcaccggcgtttttggcgcaatcgccggagccgcttcggtcttcggcaacacgccactggatgtgataaaaacccggatgcaggggttggaggcccataagtacagaaacacctgggattgcggcctccagatcctgaagaaagaggggcttaaagcattctataaaggaacggtcccgcgtctgggacgtgtgtgccttgacgtcgctatcgtgttcgtcatttacgatgaggtggtcaagctgttgaataaagtctggaagaccgattag

SEQ ID NO: 160928 - DNA, 936 bp, Artificial Sequence
  derived and/or modified sequence
atgccggcaccccgtgcacctcgcgcattagccgcagccgctcctgcgtccggaaaagctaagctcacccacccaggtaaagccattctggctggaggactggcaggcggtatcgagatatgcatcacctttccgacagagtatgtcaagactcagctgcaactcgatgaacgatcacacccacctcgatataggggtattggcgactgcgtgagacaaaccgtgcggtcgcacggtgtgttgggcttgtacagaggcttgtcatctctgttgtatgggagcattcctaaggctgctgtgcggtttgggatgttcgaattcttgtctaatcatatgcgggacgcccaagggcgattggatagtacacgcggtttgttgtgcgggctgggcgctggcgtggcggaagcggtagtggtggtgtgcccaatggagacaattaaagtcaaatttattcacgaccagactagccctaatccaaagtatagaggattctttcatggcgtcagggagattgtacgcgagcaaggcctgaagggcacttatcaaggtctgacagccacggttctgaagcagggcagcaaccaggccattcgtttcttcgtcatgacctcactcagaaattggtaccgaggcgacaaccccaataagccaatgaatccacttatcacaggagtgtttggcgctatcgctggcgcagcctccgtattcggtaatacaccactcgacgttataaagacacgcatgcagggactggaggcacacaaatatcggaacacatgggactgcgggctgcagattctgaaaaaagagggattgaaggctttttacaaaggcactgtgccacgtttgggtagggtgtgtctcgatgtagctattgtgttcgttatttacgatgaggttgtcaaactcctcaataaagtgtggaaaacagattag

SEQ ID NO: 160929 - DNA, 447 bp, Artificial Sequence
  derived and/or modified sequence
atgaacttcaccctgatggtgagcatggagcacaccaccaccatggcctcagcaaccccagccccttggccccaccggagtcaacgttgtaggcaagctgtccctgggcaccccgcatccggttgttgcggaacaggtaccttccggacgcagagaagacccggggacaaatctaggagggcgggctcgcggggccgcggtgcagggcctggtaggcatgaccgcgactctgcccacgcagggtccatgcggggcgcgcgcctcgtgccagctttggtgcgactgcaactgagaccccctgctcttagaggagagcgaacaccaatctctatgccacctgcccgtccgccagccggtgtggcctttccaggcgcatccgctggcccaagcagaaccagaagaggagtggcaaccgcaggggggaggcgggctccagctgttatatag

SEQ ID NO: 160930 - DNA, 1641 bp, Artificial Sequence
  derived and/or modified sequence
ggggcctggctcggaccacgcggggcgggacctggagctgacgcggccgccccgcccctgggaccataaccggccgccgccgccaccgcggaccgagcgcggagttctggagtctcggacccgaagccgccacagggcgccccgcctcccgcccgccatgcccgcgccccgcgccccgcgcgctctggcggccgccgcgcccgcgtccgggaaggccaagctgacgcacccggggaaggcgatcctggcaggcggcctggcgggtggcatcgagatctgcatcaccttccccaccgagtacgtgaagacgcagctgcagctggacgagcgctcgcacccgccgcggtaccggggcatcggggactgcgtgcggcagacggttcgcagccatggcgtcctgggcctgtaccgcggccttagctccctgctctacggttccatccccaaggcggccgtcaggtttggaatgttcgagttcctcagcaaccacatgcgggatgcccagggacggctggacagcacgcgtgggctgctgtgcggcctgggcgctggcgtggccgaggccgtggtggtcgtgtgccccatggagaccatcaaggtgaagttcatccacgaccagacctccccaaaccccaagtacagaggattcttccacggggttagggagattgtgcgggaacaagggctgaaggggacgtaccagggcctcacagccactgtcctgaagcagggctcgaaccaggccatccgcttcttcgtcatgacctccctgcgcaactggtaccgaggggacaaccccaacaagcccatgaaccctctgatcactggggtcttcggagctattgcaggcgcagccagtgtctttggaaacactcctctggatgtgattaagacccggatgcagggcctggaggcgcacaaataccggaacacgtgggactgcggcttgcagatcctgaagaaggaggggctcaaggcattctacaagggcactgtcccccgcctgggccgggtctgcctggatgtggccatagtgtttgtcatctatgatgaagtggtgaagctgctcaacaaagtgtggaagacggactaagcctagagaggccgcaaggggaccgccccaggcaccgccagagtgtcctgctacctttgtctcacgattccagtgcagtagtgccaaaaggccccttcccacgtccctcgagctctgtagcctggtctgtgcattgtggctgtcaaatccatgtgtcccccctgtggtctgtgtgtgacaccaccactgtgtcccagtgtctggcccagccatggctggatgtgcatctggcctatgaccctgtgcctgtgtttcatgttctgtgtcacgtgaccctgtgccccgcctcccggggtgcccgtgtggcctgggtcctcggccctgtagccctggcccggtcccagtccggtgccttccaccctgccctggcctaccacagctgcctccgggcctcggcctggcttcaccgcattccaggggctgcagccccctgcttctcccgccattggccttaactggccctcgggccctctctccgccccggacagggtggcacccaccactctcaggaccaccctgccaaggcagaataaaccggatcctgttgc

SEQ ID NO: 160931 - protein, 264 aa, Artificial Sequence
  derived and/or modified sequence
MPRSFLVRKPSDPNRKPNYSELQDSNPEFTFQQPYDQAHLLAAIPPPEILNPTASLPMLIWDSVLAPQAQPIAWASLRLQESPRVAELTSLSDEDSGKGSQPPSPPSPAPSSFSSTSVSSLEAEAYAAFPGLGQVPKQLAQLSEAKDLQARKAFNCKYCNKEYLSLGALKMHIRSHTLPCVCGTCGKAFSRPWLLQGHVRTHTGEKPFSCPHCSRAFADRSNLRAHLQTHSDVKKYQCQACARTFSRMSLLHKHQESGCSGCPR

SEQ ID NO: 160932 - DNA, 1708 bp, Artificial Sequence
  derived and/or modified sequence
ggcacggcctagcgagtggttcttctgcgctactgctgcgcgaatcggcgaccccagtgcctcgaccactatgccgcgctctttcctcgtcaggaagccctccgaccccaatcggaagcctaactacagcgagctgcaggactctaatccagagtttaccttccagcagccctacgaccaggcccacctgctggcagccatcccacctccggagatcctcaaccccaccgcctcgctgccaatgctcatctgggactctgtcctggcgccccaagcccagccaattgcctgggcctcccttcggctccaggagagtcccagggtggcagagctgacctccctgtcagatgaggacagtgggaaaggctcccagccccccagcccaccctcaccggctccttcgtccttctcctctacttcagtctcttccttggaggccgaggcctatgctgccttcccaggcttgggccaagtgcccaagcagctggcccagctctctgaggccaaggatctccaggctcgaaaggccttcaactgcaaatactgcaacaaggaatacctcagcctgggtgccctcaagatgcacatccgaagccacacgctgccctgcgtctgcggaacctgcgggaaggccttctctaggccctggctgctacaaggccatgtccggacccacactggcgagaagcccttctcctgtccccactgcagccgtgccttcgctgaccgctccaacctgcgggcccacctccagacccactcagatgtcaagaagtaccagtgccaggcgtgtgctcggaccttctcccgaatgtccctgctccacaagcaccaagagtccggctgctcaggatgtccccgctgaccctcgaggctccctcttcctctccatacctgcccctgcctgacagccttccccagctccagcaggaaggaccccacatccttctcactgccatggaattccctcctgagtgccccacttctggccacatcagccccacaggactttgatgaagaccattttctggttctgtgtcctctgcctgggctctggaagaggccttcccatggccatttctgtggagggagggcagctggcccccagccctgggggattcctgagctggcctgtctgcgtgggtttttgtatccagagctgtttggatacagctgctttgagctacaggacaaaggctgacagactcactgggaagctcccaccccactcaggggaccccactcccctcacacacacccccccacaaggaaccctcaggccaccctccacgaggtgtgactaactatgcaataatccacccccaggtgcagccccagggcctgcggaggcggtggcagactagagtctgagatgccccgagcccaggcagctatttcagcctcctgtttggtggggtggcacctgtttcccgggcaatttaacaatgtctgaaaagggactgtgagtaatggctgtcacttgtcgggggcccaagtggggtgctctggtctgaccgatgtgtctcccagaactattctgggggcccgacaggtgggcctgggaggaagatgtttacatttttaaaggtacactggtatttatatttcaaacattttgtatcaaggaaacgttttgtatagttatatgtacagtttattgatattcaataaagcagttaatttatatattaaaaaaaaaaaaaaaaaa

SEQ ID NO: 160933 - DNA, 795 bp, Artificial Sequence
  derived and/or modified sequence
atgcccagaagcttcctggtgagaaagcccagcgaccccaacagaaagcccaactacagcgagctgcaggacagcaaccccgagttcaccttccagcagccctacgaccaggcccacctgctggccgccatccccccccccgagatcctgaaccccaccgccagcctgcccatgctgatctgggacagcgtgctggccccccaggcccagcccatcgcctgggccagcctgagactgcaggagagccccagagtggccgagctgaccagcctgagcgacgaggacagcggcaagggcagccagccccccagcccccccagccccgcccccagcagcttcagcagcaccagcgtgagcagcctggaggccgaggcctacgccgccttccccggcctgggccaggtgcccaagcagctggcccagctgagcgaggccaaggacctgcaggccagaaaggccttcaactgcaagtactgcaacaaggagtacctgagcctgggcgccctgaagatgcacatcagaagccacaccctgccctgcgtgtgcggcacctgcggcaaggccttcagcagaccctggctgctgcagggccacgtgagaacccacaccggcgagaagcccttcagctgcccccactgcagcagagccttcgccgacagaagcaacctgagagcccacctgcagacccacagcgacgtgaagaagtaccagtgccaggcctgcgccagaaccttcagcagaatgagcctgctgcacaagcaccaggagagcggctgcagcggctgccccagatag

SEQ ID NO: 160934 - DNA, 795 bp, Artificial Sequence
  derived and/or modified sequence
atgcctcgttccttcctggtgcgaaagcccagcgatcccaatcggaaaccgaattatagcgagctccaggactctaaccccgaatttacattccagcaaccctatgaccaggcccatctgctggccgccatacccccccccgagatcctgaatcccaccgcttccttaccaatgttaatatgggattccgttttagcccctcaggcccagcctatcgcttgggcaagcctaagacttcaggaatcacctcgagtggccgaattgacgtcgctgtctgacgaggattccggcaagggctcacaaccaccaagccccccctctcccgcaccatcaagcttcagctccacttccgtatctagcctggaggctgaggcgtacgccgcctttccaggactagggcaagttccaaagcagctcgcccagctgtctgaagccaaagatctgcaagcccgcaaagccttcaactgtaaatattgcaacaaagagtacctgagcctgggggcccttaagatgcatatacggagccatacccttccatgtgtctgcggaacctgcggcaaagcgtttagtcgcccctggctgctgcagggccacgtccgcacacacacgggagaaaaacccttcagctgtccgcattgtagtagggctttcgcggatagatctaacttacgtgcccacctgcagacccacagtgatgtgaaaaagtaccagtgtcaggcgtgtgctcggacattcagccggatgtcccttttgcataaacaccaggagtcaggatgcagcggatgcccaaggtag

SEQ ID NO: 160935 - DNA, 795 bp, Artificial Sequence
  derived and/or modified sequence
atgcccaggagcttcctggtgaggaagcccagcgaccccaacaggaagcccaactacagcgagctgcaggacagcaaccctgagttcaccttccagcagccctatgaccaggcccacctgctggccgccatccccccacctgagatcctgaaccccacagccagcctgcccatgctgatctgggacagcgtgctggccccccaggcccagcccatcgcctgggccagcctgcggctgcaggagagcccccgggtggccgagctgaccagcctgagtgatgaggacagcggcaagggcagccagccccccagcccccccagccctgcccccagcagcttcagcagcacctctgtgagcagcctggaggccgaggcctatgctgccttccctggcctgggccaggtgcccaagcagctggcccagctgtctgaggccaaggacctgcaggccaggaaggccttcaactgcaagtactgcaacaaggagtacctgagcctgggcgccctgaagatgcacatccgcagccacaccctgccctgtgtgtgtggcacctgtgggaaggccttcagccggccctggctgctgcagggccacgtgaggacccacactggagagaagcccttcagctgcccccactgcagccgggcctttgctgacaggagcaacctgcgggcccacctgcagacccacagtgatgtgaagaagtaccagtgccaggcctgtgcccggaccttcagcaggatgagcctgctgcacaagcaccaggagagcggctgcagcggctgccccaggtag

SEQ ID NO: 160936 - DNA, 795 bp, Artificial Sequence
  derived and/or modified sequence
atgccccggagcttcctggtgcggaagcccagcgaccccaaccggaagccaaactacagtgagctgcaggattcaaatccagagtttacctttcagcagccctacgatcaggctcatctgctggctgccatccctcctcctgagattctaaacccaaccgcaagcctccctatgctgatatgggacagcgttctggcccctcaggcacaacctattgcttgggcatctctccggttgcaggaaagtcccagggtcgccgaattgacgtcactttctgacgaagactccggaaaaggatcgcagccgccgtcaccacccagtcctgccccaagctcattctcttctacctcagtgagcagtttagaggcagaggcatacgcggcattccccgggctcggacaggtccctaaacaacttgcccagctgtccgaggcaaaggatctgcaggctagaaaagccttcaactgtaaatattgcaacaaggaatacctatccctaggggcccttaaaatgcacatacgctctcacacactgccatgtgtgtgtgggacgtgcggcaaagccttttctcgcccctggctgcttcagggccacgtccgcactcacaccggggaaaaaccgttttcgtgccctcattgcagcagagcttttgccgatcgcagcaacctgcgcgcacatctccagactcacagtgatgtgaagaagtatcaatgccaggcttgcgcaagaaccttcagcaggatgtcactgttacacaagcatcaggagagcggatgcagtggatgcccacgctag

SEQ ID NO: 160937 - DNA, 795 bp, Artificial Sequence
  derived and/or modified sequence
atgccgagatccttcctcgtgaggaagccttcagaccccaatagaaagccaaattactcagagctccaggactcgaacccggaatttactttccagcagccgtatgatcaagcccacctgctggctgctattcctccacccgaaatcttgaaccctacagcgagtctgcctatgcttatatgggatagcgttctggctcctcaggctcagcctatcgcatgggcttcgctgaggctccaagagagcccgagggtcgcagagttgactagtttaagcgacgaggactccgggaaggggagccaaccaccgtctccgccttctccagcaccaagcagcttcagctctaccagcgtgtcttcgctggaggccgaagcctatgctgcgtttcctgggctaggccaggttccaaagcagctagcccagctgagcgaagcaaaggacctgcaggccagaaaggccttcaactgcaagtattgcaacaaggagtatctctccttgggtgcactaaagatgcacatccgatctcacacactgccttgcgtgtgtggcacatgcggcaaggcgttcagtcgtccatggctattgcagggacacgtacgaacccatactggggaaaaacccttttcttgcccccactgtagccgagcgttcgcagatcggagcaatttacgcgctcatctccaaacccactctgacgtaaagaaataccagtgccaggcctgtgctcgaacattttctcggatgtcccttctccataagcaccaggaaagcggatgtagcggctgtcccagatag

SEQ ID NO: 160938 - DNA, 1686 bp, Artificial Sequence
  derived and/or modified sequence
tagcgagtggttcttctgcgctactgctgcgcgaatcggcgaccccagtgcctcgaccactatgccgcgctctttcctcgtcaggaagccctccgaccccaatcggaagcctaactacagcgagctgcaggactctaatccagagtttaccttccagcagccctacgaccaggcccacctgctggcagccatcccacctccggagatcctcaaccccaccgcctcgctgccaatgctcatctgggactctgtcctggcgccccaagcccagccaattgcctgggcctcccttcggctccaggagagtcccagggtggcagagctgacctccctgtcagatgaggacagtgggaaaggctcccagccccccagcccaccctcaccggctccttcgtccttctcctctacttcagtctcttccttggaggccgaggcctatgctgccttcccaggcttgggccaagtgcccaagcagctggcccagctctctgaggccaaggatctccaggctcgaaaggccttcaactgcaaatactgcaacaaggaatacctcagcctgggtgccctcaagatgcacatccgaagccacacgctgccctgcgtctgcggaacctgcgggaaggccttctctaggccctggctgctacaaggccatgtccggacccacactggcgagaagcccttctcctgtccccactgcagccgtgccttcgctgaccgctccaacctgcgggcccacctccagacccactcagatgtcaagaagtaccagtgccaggcgtgtgctcggaccttctcccgaatgtccctgctccacaagcaccaagagtccggctgctcaggatgtccccgctgaccctcgaggctccctcttcctctccatacctgcccctgcctgacagccttccccagctccagcaggaaggaccccacatccttctcactgccatggaattccctcctgagtgccccacttctggccacatcagccccacaggactttgatgaagaccattttctggttctgtgtcctctgcctgggctctggaagaggccttcccatggccatttctgtggagggagggcagctggcccccagccctgggggattcctgagctggcctgtctgcgtgggtttttgtatccagagctgtttggatacagctgctttgagctacaggacaaaggctgacagactcactgggaagctcccaccccactcaggggaccccactcccctcacacacacccccccacaaggaaccctcaggccaccctccacgaggtgtgactaactatgcaataatccacccccaggtgcagccccagggcctgcggaggcggtggcagactagagtctgagatgccccgagcccaggcagctatttcagcctcctgtttggtggggtggcacctgtttcccgggcaatttaacaatgtctgaaaagggactgtgagtaatggctgtcacttgtcgggggcccaagtggggtgctctggtctgaccgatgtgtctcccagaactattctgggggcccgacaggtgggcctgggaggaagatgtttacatttttaaaggtacactggtatttatatttcaaacattttgtatcaaggaaacgttttgtatagttatatgtacagtttattgatattcaataaagcagttaatttatatattaaaaa

SEQ ID NO: 160939 - protein, 391 aa, Artificial Sequence
  derived and/or modified sequence
MYSMMMETDLHSPGGAQAPTNLSGPAGAGGGGGGGGGGGGGGGAKANQDRVKRPMNAFMVWSRGQRRKMAQENPKMHNSEISKRLGAEWKVMSEAEKRPFIDEAKRLRALHMKEHPDYKYRPRRKTKTLLKKDKYSLAGGLLAAGAGGGGAAVAMGVGVGVGAAAVGQRLESPGGAAGGGYAHVNGWANGAYPGSVAAAAAAAAMMQEAQLAYGQHPGAGGAHPHAHPAHPHPHHPHAHPHNPQPMHRYDMGALQYSPISNSQGYMSASPSGYGGLPYGAAAAAAAAAGGAHQNSAVAAAAAAAAASSGALGALGSLVKSEPSGSPPAPAHSRAPCPGDLREMISMYLPAGEGGDPAAAAAAAAQSRLHSLPQHYQGAGAGVNGTVPLTHI

SEQ ID NO: 160940 - DNA, 4108 bp, Artificial Sequence
  derived and/or modified sequence
ccggccgtctatgctccaggccctctcctcgcggtgccggtgaacccgccagccgccccgatgtacagcatgatgatggagaccgacctgcactcgcccggcggcgcccaggcccccacgaacctctcgggccccgccggggcgggcggcggcgggggcggaggcgggggcggcggcggcggcgggggcgccaaggccaaccaggaccgggtcaaacggcccatgaacgccttcatggtgtggtcccgcgggcagcggcgcaagatggcccaggagaaccccaagatgcacaactcggagatcagcaagcgcctgggggccgagtggaaggtcatgtccgaggccgagaagcggccgttcatcgacgaggccaagcggctgcgcgcgctgcacatgaaggagcacccggattacaagtaccggccgcgccgcaagaccaagacgctgctcaagaaggacaagtactcgctggccggcgggctcctggcggccggcgcgggtggcggcggcgcggctgtggccatgggcgtgggcgtgggcgtgggcgcggcggccgtgggccagcgcctggagagcccaggcggcgcggcgggcggcggctacgcgcacgtcaacggctgggccaacggcgcctaccccggctcggtggcggcggcggcggcggccgcggccatgatgcaggaggcgcagctggcctacgggcagcacccgggcgcgggcggcgcgcacccgcacgcgcaccccgcgcacccgcacccgcaccacccgcacgcgcacccgcacaacccgcagcccatgcaccgctacgacatgggcgcgctgcagtacagccccatctccaactcgcagggctacatgagcgcgtcgccctcgggctacggcggcctcccctacggcgccgcggccgccgccgccgccgctgcgggcggcgcgcaccagaactcggccgtggcggcggcggcggcggcggcggccgcgtcgtcgggcgccctgggcgcgctgggctctctggtgaagtcggagcccagcggcagcccgcccgccccagcgcactcgcgggcgccgtgccccggggacctgcgcgagatgatcagcatgtacttgcccgccggcgaggggggcgacccggcggcggcagcagcggccgcggcgcagagccggctgcactcgctgccgcagcactaccagggcgcgggcgcgggcgtgaacggcacggtgcccctgacgcacatctagcgccttcgggacgccggggactctgcggcggcgacccacgagctcgcggcccgcgcccggctcccgccccgccccggcgcggcgtggcttttgtacagacgttcccacattcttgtcaaaaggaaaatactggagacgaacgccgggtgacgcgtgtcccccactcaccttccccggagaccctggcgaccgccgggcgctgacaccagacttgggttttagactgaacttcggtgttttcttgagactttttgtacagtatttatcacctacggaggaagcggaaagcgttttctttgctcgaggggacaaaaaagtcaaaacgaggcgagaggcgaagcccacttttgtataccggccggcgcgctcactttcctccgcgttgcttccggacggcgccgaccgccggagcccaagtgacgcggagctcgtcgcatttgttataaatgtagtaaggcaggtccaagcacttacaagttttttgtagttgttaccgctcttttgggttggtttgttaatttatacaaagagattaccaccaccaccccctccttcagacggcggagttatattctgggttttgtaaaactttatgtatctgagcatttccatttttttttttgggttttgtattatttcttgtaaatgcattgtgaaaaattttattttcggcgttgcaatgcggggaggagaagtcagattatgtacatagttttctaaaaagcctttcttctaaaaacgaaaaaagaccccccacccaaaatgtttcgagtcaacaaatttaagagacagagcccattttctccataaatttgtaacatgctatttttatgtgcatgttttatgagttcaaaatgcaatgaggaaatctgacagggaaattatctgtatgaactaaaagtaagggaaccccggggaatgggaggacaggatttttcaaggaacctttttcaatgaaagagaaggaagttaaaacctataggttattttgtagagctgagtgttaatacgggccgagaaataaaagtatcttctgctccggctgtttcactgcggacggctggggctgctgcgcgttaccttgctgcaagcggggcgccttccacctggctgggggtctgcgccacagtttggtccagaggagggaggaggaagggaagaccccagtggtgggaccctggaccaggccatggatgaaggacaaagaccagggcaggtcacgggtttcccaattccccagcaattaagatttcgagcagaatttatctaaatgtgtttcaaggaaacacaatcgctgaaccaaaacgtactgcagccgagccccctccgtccatcctctgcccctccccctggcttctttctcttgggaaaacgggcaaaataattgtgctggattctcacacacacagaaatatcgaccatcaccctcccccgcgtgaactgggatgcaagttgctaaccgatgtgaacgcaaaatgccttgttcattattcctgacgagatcttgaggttgtttgatgctttaaattttttaattatattattttctaggtgtttattggtacattgcagttttttttttgaaatttaaaaatttctgtaaaactttgtcttcaagtaatctgacagcattaaatattgcatttaaaaattatactgtagcaaatacatttaaaaattaatcacaacgttaagatgaaattatatttttggaaaaaaaaaacacttgaagcccagatggaaatacgtttatttcagcagccttaggtttcccctcgctttctcaacacccttccttgtcctggagtatggactgtccgtccaaaagtgagcctatgctataagtttaatgagaaccgaattcagcctgcattcgagaatagctttaagtataatgctgatctgacaattgacgtgtaatttgggaagtcattttgataattttgcttaaaccactcattcgttaaagtgattacaaaaaagttcaagaatgatgtccactgctttctaacaagataataaaccccccccctcttttctttttctttatttttatttcttttagctatttgatcctttctgaagcagttgtttctggaagagtctgtgcgcccatggatggctgagcaccactacgacttagtccgggataagggcctccccagtcctctccgggagatgatttgggaaattttataatgcttgttctgttaactcaccgggaccttgagggtccaatgggaccttgagggttttctctgaaatatacaaacttaaaggactctctctgaggttctttgactgacgtccactctcagtctggcccctgtgctcccctgtgtgtaccctggagtttctgtgtccaattgttggcatctaggtcttggctcaagattaggatgtgggccccactttagaggcacagactatgaaaagctgagttagtgcgcccgggacgccaggcaagcagcttttacagtttggcatcttattgcaggtgcttcgtgcacagtcagctgaaatagccaatgccaggtgctccaaccaccttatttccttgttttgttgattagaacaacacagaaaaaagcaaatataaatttttaatgactccatttaaaaatatcacagggtgggggcaaggaaattagctgagattcatctcaggattgagattctatccccccttccccgcccccagcagtgtcgctccaattcaaattagtggagaaaagattacagtaggccctgagccgactgtgaattcggtgcttggccaaggtaacactcatcgtattcacggagtgaaatactatatgatgatagttattatattatatgacgacttcattcacttcccaaatcacagggt

SEQ ID NO: 160941 - DNA, 1176 bp, Artificial Sequence
  derived and/or modified sequence
atgtacagcatgatgatggagaccgacctgcacagccccggcggcgcccaggcccccaccaacctgagcggccccgccggcgccggcggcggcggcggcggcggcggcggcggcggcggcggcggcggcgccaaggccaaccaggacagagtgaagagacccatgaacgccttcatggtgtggagcagaggccagagaagaaagatggcccaggagaaccccaagatgcacaacagcgagatcagcaagagactgggcgccgagtggaaggtgatgagcgaggccgagaagagacccttcatcgacgaggccaagagactgagagccctgcacatgaaggagcaccccgactacaagtacagacccagaagaaagaccaagaccctgctgaagaaggacaagtacagcctggccggcggcctgctggccgccggcgccggcggcggcggcgccgccgtggccatgggcgtgggcgtgggcgtgggcgccgccgccgtgggccagagactggagagccccggcggcgccgccggcggcggctacgcccacgtgaacggctgggccaacggcgcctaccccggcagcgtggccgccgccgccgccgccgccgccatgatgcaggaggcccagctggcctacggccagcaccccggcgccggcggcgcccacccccacgcccaccccgcccacccccacccccaccacccccacgcccacccccacaacccccagcccatgcacagatacgacatgggcgccctgcagtacagccccatcagcaacagccagggctacatgagcgccagccccagcggctacggcggcctgccctacggcgccgccgccgccgccgccgccgccgccggcggcgcccaccagaacagcgccgtggccgccgccgccgccgccgccgccgccagcagcggcgccctgggcgccctgggcagcctggtgaagagcgagcccagcggcagcccccccgcccccgcccacagcagagccccctgccccggcgacctgagagagatgatcagcatgtacctgcccgccggcgagggcggcgaccccgccgccgccgccgccgccgccgcccagagcagactgcacagcctgccccagcactaccagggcgccggcgccggcgtgaacggcaccgtgcccctgacccacatctag

SEQ ID NO: 160942 - DNA, 1176 bp, Artificial Sequence
  derived and/or modified sequence
atgtacagcatgatgatggaaacggaccttcacagtccaggcggcgcccaggcacctaccaatctcagtggtcctgcaggcgcaggcgggggcggtgggggtggtggggggggcggcggaggcggaggcgcgaaggccaaccaggatcgggtgaagcgaccgatgaacgctttcatggtttggtcacgagggcagcggcgcaagatggcccaagagaaccccaagatgcacaactccgaaatctcaaagcggctcggtgcagaatggaaggtcatgagtgaggctgagaagaggccatttatcgacgaggctaagcgtctccgagctctccatatgaaagagcaccccgactataaataccgaccgagacggaaaactaagacactgctgaagaaagacaagtatagtcttgccggcggccttttagcagcaggagccggcggcggaggtgccgccgtggccatgggggtgggcgtaggtgtgggcgccgcagcagtgggccagaggttagagtcaccaggaggagcagccggtggtggctatgcccatgtgaacggatgggctaacggagcatatcctgggagtgtcgccgccgcggccgccgctgctgctatgatgcaggaagcgcaattggcctacggtcagcaccccggggcaggcggagcccatccccacgctcatcctgcacaccctcatcctcaccacccacatgcccacccacacaatcctcagcctatgcatcgttatgatatgggcgctcttcagtactcgccaattagcaactctcagggctacatgagtgcctcaccaagcgggtatggaggacttccctatggcgctgccgccgcggccgctgccgcagctgggggggcgcatcagaattccgcggtggctgctgcagctgccgccgcagccgcatctagtggagccctaggcgcactcggttcactggtgaagtcagaaccttccggctctcccccagctccagcacactctcgggcaccatgtcctggagatctcagggagatgatatcgatgtacttaccagccggtgaagggggcgaccccgcagccgctgcagctgcggctgctcaaagtcgcctgcattccctacctcagcactaccagggggcaggcgccggcgttaacggcaccgtgcccctgacccacatctag

SEQ ID NO: 160943 - DNA, 1176 bp, Artificial Sequence
  derived and/or modified sequence
atgtacagcatgatgatggagacagacctgcacagccctggaggagcccaggcccccaccaacctgagcggccctgctggggccggcggcggcggcggcggcggcggcggcggcggcggcggcggcggggccaaggccaaccaggacagagtgaagaggcccatgaatgccttcatggtgtggagccggggccagaggaggaagatggcccaggagaaccccaagatgcacaacagcgagatcagcaagaggctgggcgctgagtggaaggtgatgtctgaggccgagaagaggcccttcattgatgaggccaagaggctgcgggccctgcacatgaaggagcacccagactacaagtaccggcccaggaggaagaccaagaccctgctgaagaaggacaagtacagcctggccggcggcctgctggccgccggggccggcggcggcggcgctgctgtggccatgggcgtgggcgtgggcgtgggcgctgctgctgtgggccagaggctggagagccctggaggagctgctgggggcggctacgcccacgtgaatggctgggccaatggagcctacccaggctctgtggccgctgctgctgctgctgctgccatgatgcaggaggcccagctggcctacggccagcaccctggagctggaggagcccacccccacgcccacccagcccacccccacccccaccacccccacgcccacccccacaacccccagcccatgcacagatatgacatgggcgccctgcagtacagccccatcagcaacagccagggctacatgtctgccagccccagcggctatggaggcctgccctacggggctgctgctgctgctgctgctgctgctgggggcgcccaccagaacagcgctgtggccgctgctgctgctgctgctgctgccagcagcggggccctgggcgccctgggcagcctggtgaagtctgagcccagcggcagccccccagccccagcccacagccgggccccctgccctggggacctgcgggagatgatctccatgtacctgcctgctggggagggcggggaccctgctgctgctgctgctgctgctgcccagagccggctgcacagcctgccccagcactaccagggcgctggggccggcgtgaatggaacagtgcccctgacccacatctag

SEQ ID NO: 160944 - DNA, 1176 bp, Artificial Sequence
  derived and/or modified sequence
atgtacagcatgatgatggagaccgacctgcacagccccggcggcgcacaagccccaacgaatcttagcggacccgccggggcagggggagggggcggaggaggaggcggcggtggtggcgggggcggggcgaaagcaaaccaagatcgagttaagagacccatgaatgcattcatggtgtggagtcgcgggcagagaaggaaaatggcgcaggaaaaccctaaaatgcacaatagcgaaatatctaaacggcttggtgcagaatggaaagtgatgagcgaggctgagaaaagaccatttattgatgaagcaaagaggctgcgagccctgcatatgaaggagcacccagattataaatacagacccaggcgcaaaaccaaaacactgctcaaaaaggataaatattccctggcgggtggacttcttgcggcgggtgctggtggagggggcgctgccgtggctatgggggtaggggtgggcgtaggcgccgccgccgttggtcagagactcgaatccccgggtggtgctgccggagggggatacgcccatgttaatggctgggctaacggggcataccccggcagtgtggcagccgccgcagcagctgctgcgatgatgcaggaggcccaattggcatatggccagcaccctggagccggaggcgcacaccctcacgctcaccccgcccatccccatcctcaccaccctcatgcccacccacacaatcctcagccaatgcaccgctacgacatgggggccttgcaatacagcccgatttcaaactcccagggatatatgtcagcttcaccgagtggctatggaggcctgccatatggcgccgcggctgcagctgccgcggcagctggcggagctcatcagaactcagctgtggccgctgccgctgctgcagcggctgcctcctccggggccctgggcgcacttggatctttggtgaagagtgagccatccggctcacccccagccccagctcattcccgggccccgtgtcctggggaccttcgggaaatgatcagcatgtacctcccagctggcgaagggggcgatcctgccgctgcggccgccgctgccgcccagagtagattgcattctctgccccagcactaccagggggcaggggccggtgtgaacggaaccgtgccgctcactcatatatag

SEQ ID NO: 160945 - DNA, 1176 bp, Artificial Sequence
  derived and/or modified sequence
atgtactctatgatgatggagaccgacctgcactctcccggaggggctcaggctcctaccaacctgtcaggaccggcaggagctggcggaggcggtggcggagggggaggaggcggaggcggaggaggcgcaaaagccaaccaggatcgcgttaaaaggcccatgaatgccttcatggtctggagtaggggccagaggcgcaaaatggctcaggagaatcctaagatgcataacagcgagatttctaagaggctgggggcagagtggaaggtgatgtccgaggccgagaagaggccgttcatcgatgaggccaagcggctccgggctctgcacatgaaggagcatccagactacaaatatcgcccacggaggaagaccaagaccttgctaaaaaaggataagtattcactggcgggtggtctccttgcggcaggggcaggaggcggtggggcagccgtagctatgggagtcggtgttggagttggtgctgctgctgtgggccagcgcctggaaagcccgggtggagcagctggagggggatacgctcacgtgaacggctgggcaaacggcgcttatcctggatctgttgccgcagccgcagctgccgcagccatgatgcaagaagctcagctcgcttatggccagcaccctggcgcagggggagctcatccacatgcccacccagcacatccacatccgcaccacccacatgcccacccgcataacccgcagcctatgcaccgctacgacatgggcgctctgcagtactctcctatttccaactcccagggatatatgtccgcttccccgtcaggctacggcggtctgccatacggggctgccgctgccgcagctgctgcagctggcggagcgcatcaaaactctgccgtagctgcagccgcagctgccgcagccgcttcctccggtgccctgggtgcacttggttctctggttaaatccgagccatccggatcgccacccgcaccggcacactccagggcgccttgccccggtgatttacgggagatgattagtatgtatctgccagcaggcgagggaggtgatcctgcagctgcggctgcagccgctgcacaatctcgtctgcactctctgccacaacattaccagggcgctggggcaggagttaatggcacagtcccccttacccatatatag

SEQ ID NO: 160946 - protein, 72 aa, Artificial Sequence
  derived and/or modified sequence
MSYQQQQCKQPCQPPPVCPTPKCPEPCPPPKCPEPCPPPKCPQPCPPQQCQQKYPPVTPSPPCQSKYPPKSK

SEQ ID NO: 160947 - DNA, 219 bp, Artificial Sequence
  derived and/or modified sequence
atgagctatcagcagcagcagtgcaagcaaccatgtcaacctccaccagtgtgtcctactccaaaatgtcccgaaccatgccctccgccaaaatgcccagagccctgccctcctcctaagtgtccacaaccttgcccaccccagcagtgtcagcagaagtacccacccgtgacaccgtctccaccttgccagtctaagtatccacctaaatcaaagtag

SEQ ID NO: 160948 - DNA, 219 bp, Artificial Sequence
  derived and/or modified sequence
atgagctaccagcagcagcagtgcaagcagccctgccagcccccacctgtgtgccccacccccaagtgcccagagccctgccccccacccaagtgcccagagccctgccccccacccaagtgcccccagccctgccccccccagcagtgccagcagaagtacccacctgtgacccccagccccccctgccagagcaagtacccacccaagagcaagtag

SEQ ID NO: 160949 - DNA, 219 bp, Artificial Sequence
  derived and/or modified sequence
atgagctaccagcagcagcagtgcaagcagccctgccagcccccccctgtgtgtccgacacctaaatgtcccgagccgtgtccgcctccaaagtgtcccgaaccatgcccgcctccaaaatgccctcagccatgccctccccagcagtgtcaacagaaatacccaccggtgactcctagccctccttgccaatcaaagtatccaccgaaatcaaaatag

SEQ ID NO: 160950 - DNA, 219 bp, Artificial Sequence
  derived and/or modified sequence
atgagttatcagcagcagcagtgcaaacaaccttgtcaacctcctcccgtttgtcctaccccgaagtgtcccgaaccctgtccaccccctaagtgccctgagccgtgtcctccacctaagtgtccacagccatgtcccccacagcagtgccagcaaaaatacccccctgtgactccatccccaccatgccagagtaaataccctccgaaaagcaagtag

SEQ ID NO: 160951 - DNA, 709 bp, Artificial Sequence
  derived and/or modified sequence
agagatcctctgctgcacgactcttaaacccctggtacctgagcactgatctgccttggagaacctgatcctgagactccagcaggatgtcttatcaacagcagcagtgcaagcagccctgccagccacctcctgtgtgccccacgccaaagtgcccagagccatgtccacccccgaagtgccctgagccctgcccaccaccaaagtgtccacagccctgcccacctcagcagtgccagcagaaatatcctcctgtgacaccttccccaccctgccagtcaaagtatccaccgaagagcaagtaacagcttcagaattcatcaggaccaagaaaggataaggatatttggctcacctcgttccacagctccaccttcatcttctcatcaaagcctaccatggatacacagggagcttctttctccttagccagtaatctgcccatgatgatccctgacagcaaaaagtttcttttctgaggctgccatactgccactgtccaggtggagactgagcaaaggaagtcctgggctgtgccagctcccagagcttcggaagaaagagcagcagctctctccctgggaaccatcagagaattctgttgatgtgttctgtgtctgtctgtcacctggtcacgagcttctaccacctttgcaattgtcacttatctttcactccctgaataaagtatctatgcatatatatttgt

SEQ ID NO: 160952 - DNA, 219 bp, Artificial Sequence
  derived and/or modified sequence
atgagctaccagcagcagcagtgcaagcagccctgccagcccccccccgtgtgccccacccccaagtgccccgagccctgccccccccccaagtgccccgagccctgccccccccccaagtgcccccagccctgccccccccagcagtgccagcagaagtacccccccgtgacccccagccccccctgccagagcaagtacccccccaagagcaagtag

SEQ ID NO: 160953 - protein, 326 aa, Artificial Sequence
  derived and/or modified sequence
MDLSAASHRIPLSDGNSIPIIGLGTYSEPKSTPKGACATSVKVAIDTGYRHIDGAYIYQNEHEVGEAIREKIAEGKVRREDIFYCGKLWATNHVPEMVRPTLERTLRVLQLDYVDLYIIEVPMAFKPGDEIYPRDENGKWLYHKSNLCATWEAMEACKDAGLVKSLGVSNFNRRQLELILNKPGLKHKPVSNQVECHPYFTQPKLLKFCQQHDIVITAYSPLGTSRNPIWVNVSSPPLLKDALLNSLGKRYNKTAAQIVLRFNIQRGVVVIPKSFNLERIKENFQIFDFSLTEEEMKDIEALNKNVRFVELLMWRDHPEYPFHDEY

SEQ ID NO: 160954 - DNA, 981 bp, Artificial Sequence
  derived and/or modified sequence
atggacctaagcgcagcaagccataggatccctttgtctgacggaaactccatccccatcatcggactgggcacatactcggagcctaagtccacacccaagggtgcttgcgccacatccgtgaaagtggcgattgacacgggttacagacacatagacggcgcatacatctaccagaacgagcatgaggtgggtgaagcaatccgcgagaagatcgcagaaggaaaggtgcggcgggaagacatcttctattgtgggaagctttgggctactaatcacgtgcccgaaatggttcggccaaccctcgagagaacactgcgtgtactgcagttggattacgtggatttgtacattatagaagtgcccatggccttcaagccaggcgacgaaatctaccctagagacgagaatggtaagtggctgtatcacaaatcaaatttgtgcgcaacctgggaggcaatggaagcctgcaaagacgctggcttggttaaatccctcggagtatcgaacttcaatcgcaggcaacttgagcttattttgaacaagcccggcttgaagcacaagccagtaagcaatcaggtcgaatgccatccttacttcacacagcctaaactgctgaagttctgtcagcagcatgacatcgtgataactgcctattctccactgggcacctcacgcaaccccatttgggtaaacgttagcagtccacctctcctgaaggatgccctcctaaatagcctgggaaagaggtataacaaaaccgccgcccagatagtgctccgttttaacatccaacgcggtgtggtggtcattccaaagtctttcaacttggagaggatcaaggaaaatttccagattttcgatttcagtttgactgaggaggagatgaaggatatcgaggcactcaacaaaaacgttagatttgttgagctactgatgtggcgtgaccaccctgaatacccctttcacgacgagtactag

SEQ ID NO: 160955 - DNA, 981 bp, Artificial Sequence
  derived and/or modified sequence
atggacctgtctgctgccagccaccgcatccccctgagtgatggcaacagcatccccatcatcggcctgggcacctacagcgagcccaagagcacccccaagggggcctgtgccacctctgtgaaggtggccatcgacaccggctaccgccacattgatggagcctacatctaccagaatgagcacgaggtgggggaggccatccgggagaagattgctgagggcaaggtgcggcgggaggacatcttctactgcggcaagctgtgggccaccaaccacgtgcctgagatggtgcggcccaccctggagaggaccctgcgggtgctgcagctggactatgtggacctgtacatcatcgaggtgcccatggccttcaagccaggagatgagatctaccccagagatgaaaatggcaagtggctgtaccacaagagcaacctgtgtgccacctgggaggccatggaggcctgcaaggatgctggcctggtgaagagcctgggcgtgagcaacttcaacagacggcagctggagctgatcctgaacaagccaggcctgaagcacaagcctgtgagcaaccaggtggagtgccacccctacttcacccagcccaagctgctgaagttctgccagcagcacgacatcgtcatcacagcctacagccccctgggcaccagcaggaaccccatctgggtgaatgtgagcagcccccccctgctgaaggatgccctgctgaacagcctgggcaagcgctacaacaagacagctgcccagatcgtgctgcgcttcaacatccagaggggcgtggtggtgatccccaagagcttcaacctggagcgcatcaaggagaacttccagatctttgacttcagcctgacagaggaggagatgaaggacatcgaggccctgaacaagaatgtgcgctttgtggagctgctgatgtggagggaccaccctgagtaccccttccatgatgagtactag

SEQ ID NO: 160956 - DNA, 2347 bp, Artificial Sequence
  derived and/or modified sequence
cctgtggtgttcagaatcactcctacagtcaggttctccacaatggatctcagtgctgcaagtcaccgcatacctctaagtgatggaaacagcattcccatcatcggacttggtacctactcagaacctaaatcgacccctaagggagcctgtgcaacatcggtgaaggttgctattgacacagggtaccgacatattgatggggcctacatctaccaaaatgaacacgaagttggggaggccatcagggagaagatagcagaaggaaaggtgcggagggaagatatcttctactgtggaaagctatgggctacaaatcatgtcccagagatggtccgcccaaccctggagaggacactcagggtcctccagctagattatgtggatctttacatcattgaagtacccatggcctttaagccaggagatgaaatataccctagagatgagaatggcaaatggttatatcacaagtcaaatctgtgtgccacttgggaggcgatggaagcttgcaaagacgctggcttggtgaaatccctgggagtgtccaattttaaccgcaggcagctggagctcatcctgaacaagccaggactcaaacacaagccagtcagcaaccaggttgagtgccatccgtatttcacccagccaaaactcttgaaattttgccaacaacatgacattgtcattactgcatatagccctttggggaccagtaggaatccaatctgggtgaatgtttcttctccacctttgttaaaggatgcacttctaaactcattggggaaaaggtacaataagacagcagctcaaattgttttgcgtttcaacatccagcgaggggtggttgtcattcctaaaagctttaatcttgaaaggatcaaagaaaattttcagatctttgacttttctctcactgaagaagaaatgaaggacattgaagccttgaataaaaatgtccgctttgtagaattgctcatgtggcgcgatcatcctgaatacccatttcatgatgaatactgactgcagggagttcctgaacagatttttcactcccacgagtgccaagacggtgcaatgggtagtcccctagatgtgaaaatgaagagagagggttttaccatcctgagaagaaataatgatggaaacatgtttaatgtttgtgcagtgtaaatgactttgactcagtcacattgaagtaaaaatattaaaatctgttgaaataactcttaggaaattatcaactaattttttcagatcagtatcttctagattccagacagaaaaaaattacacttcagaaaagacatcaaaggcaacatatgacaacaagtaatttatgaatctgggtagtagcgttggtaatctgagttctttaagggttaacaggacaacgaagtgcatgtggcagtgtgctggcagtggccttgaggctttggaccattggttacaaaacagacacagccaagataagatccacacacacattattaacaaggaagtgatttgctgcaccttgagttgagagggctacatgtagaaaagtcttaaaatagagctaaacaccacagtggtcaacaaagccatcataatgttggtgtttgtttccctccaatgtatgtatgtttagtttttatccaacctgaggaatgaaaacttaactggatctctcttgcatccttaaagggcctgagtctcaacatggctgctgatccatacttacacatcttactgtcaatcttgcctacattgattatagaaccactattacgtgaaaaggcttgaaacaaccaacatatacaaataaaaccctgccttgtaaaatagtaaaagagaagccatatattggcttttcttcttaacttgggagatatattgaaacaaggtgctttataagattattgtacttaagactttaatagtgttacttggatagcttatatgaattttgagaattttatatgaattttgagaaagcaagttcaaaagaactctggtaattttcctgtatgtacaatttaaagagtgaataagattattagaattcagcaatagagatatatctattttcaattcaactacagaaatatattttattggccgggtgcggtggctcatgcctataatcccagcactttgggaggccaaggtgggcagatcaggaggtcaggagatcgagaccatcttggctaacaaggtgaaaccccgtctctactaaaaatacaaaaaattagccaggcgcggtggcgggggcctgtaatcccagctactcaggaggctgaggcagaagaatggcatgaacccgggaggaggagcttgcagtgagccgagatagcgccactgcagt

SEQ ID NO: 160957 - DNA, 981 bp, Artificial Sequence
  derived and/or modified sequence
atggacctgagcgccgccagccaccggatccccctgagcgacggcaactccattccaattatcggtcttggcacctacagtgagcccaaaagcacgcctaagggtgcctgtgccacatccgtgaaagttgcaatcgatacagggtatagacatatagatggtgcctatatctaccagaacgagcacgaagtcggcgaagcaatcagagagaagattgcagaaggtaaagtgcgccgggaagatatattctactgcggaaaactttgggccacgaatcacgtgcccgaaatggtgagacccacattagaaagaacccttcgagtgctacaactggactacgtcgatttgtatattatagaggtgcctatggctttcaaacccggtgacgagatataccccagagatgaaaatggaaaatggctgtaccataagtcaaacctgtgcgctacctgggaggccatggaggcttgcaaggacgccggccttgttaaatcactgggcgtatcaaattttaaccgtcggcagctcgagctgattctcaacaaaccaggactgaaacataagccggtttcaaatcaggttgagtgccatccctacttcactcagcccaagctgctcaaattctgtcagcagcacgacatcgtgattacggcttactctccgctcggaactagtagaaacccgatctgggttaacgtgtcttccccacctctgctcaaagatgccttgcttaatagcttggggaaacgctacaataagactgctgcccagattgtcctgcgcttcaacatccagcgaggagtcgtggttattcccaagtcttttaacctggaacggatcaaagagaactttcagatctttgatttcagtttgaccgaagaagagatgaaagatattgaggcactgaacaagaatgtgcgatttgttgagttattgatgtggcgtgaccaccctgaatatcccttccacgacgaatattag

SEQ ID NO: 160958 - DNA, 981 bp, Artificial Sequence
  derived and/or modified sequence
atggatctgtcagcagcgtcgcaccggatacctctgtcagatggcaactctatacccataataggactggggacctatagcgagcccaagtcaacacccaagggggcttgtgcgaccagcgttaaggtggctatagacactggctatcggcatatcgatggtgcatacatttaccaaaatgagcacgaggtgggggaggcaatccgggagaagatcgctgaaggcaaagtcagacgtgaggacatattctactgtggcaaactttgggcaactaatcatgtcccggagatggtgagacctaccctcgagaggactctccgggtgcttcagctcgactatgtggatttatatatcattgaggtccctatggcctttaaaccaggcgacgaaatttatcccagagatgagaacggcaagtggctctatcacaagagcaacctgtgtgctacgtgggaagccatggaagcttgtaaagatgctgggctggtgaaatcgctcggcgtgtctaatttcaatcgcaggcagctcgagctcatcctgaacaagccgggactaaaacacaaacctgtctcaaatcaggttgagtgtcatccctatttcacccagcctaaactgctcaaattctgccagcagcatgacatcgtcatcacggcttatagccctctaggtacttctaggaatcctatttgggttaatgtgtcaagcccacctcttcttaaagatgcgttacttaactcccttgggaaaagatacaataaaacagccgcacagatcgtgttaaggtttaacatccaaaggggtgtagttgttatccccaagagctttaacctcgagcggatcaaagagaacttccagatctttgactttagtttgactgaggaggaaatgaaggacatcgaggctctgaataaaaacgtcaggtttgttgagctgctgatgtggcgtgaccatcccgagtacccttttcacgatgagtattag

SEQ ID NO: 160959 - DNA, 981 bp, Artificial Sequence
  derived and/or modified sequence
atggacctgagcgccgccagccacagaatccccctgagcgacggcaacagcatccccatcatcggcctgggcacctacagcgagcccaagagcacccccaagggcgcctgcgccaccagcgtgaaggtggccatcgacaccggctacagacacatcgacggcgcctacatctaccagaacgagcacgaggtgggcgaggccatcagagagaagatcgccgagggcaaggtgagaagagaggacatcttctactgcggcaagctgtgggccaccaaccacgtgcccgagatggtgagacccaccctggagagaaccctgagagtgctgcagctggactacgtggacctgtacatcatcgaggtgcccatggccttcaagcccggcgacgagatctaccccagagacgagaacggcaagtggctgtaccacaagagcaacctgtgcgccacctgggaggccatggaggcctgcaaggacgccggcctggtgaagagcctgggcgtgagcaacttcaacagaagacagctggagctgatcctgaacaagcccggcctgaagcacaagcccgtgagcaaccaggtggagtgccacccctacttcacccagcccaagctgctgaagttctgccagcagcacgacatcgtgatcaccgcctacagccccctgggcaccagcagaaaccccatctgggtgaacgtgagcagcccccccctgctgaaggacgccctgctgaacagcctgggcaagagatacaacaagaccgccgcccagatcgtgctgagattcaacatccagagaggcgtggtggtgatccccaagagcttcaacctggagagaatcaaggagaacttccagatcttcgacttcagcctgaccgaggaggagatgaaggacatcgaggccctgaacaagaacgtgagattcgtggagctgctgatgtggagagaccaccccgagtaccccttccacgacgagtactag

SEQ ID NO: 160960 - protein, 968 aa, Artificial Sequence
  derived and/or modified sequence
MAFANFRRILRLSTFEKRKSREYEHVRRDLDPNEVWEIVGELGDGAFGKVYKAKNKETGALAAAKVIETKSEEELEDYIVEIEILATCDHPYIVKLLGAYYHDGKLWIMIEFCPGGAVDAIMLELDRGLTEPQIQVVCRQMLEALNFLHSKRIIHRDLKAGNVLMTLEGDIRLADFGVSAKNLKTLQKRDSFIGTPYWMAPEVVMCETMKDTPYDYKADIWSLGITLIEMAQIEPPHHELNPMRVLLKIAKSDPPTLLTPSKWSVEFRDFLKIALDKNPETRPSAAQLLEHPFVSSITSNKALRELVAEAKAEVMEEIEDGRDEGEEEDAVDAASTLENHTQNSSEVSPPSLNADKPLEESPSTPLAPSQSQDSVNEPCSQPSGDRSLQTTSPPVVAPGNENGLAVPVPLRKSRPVSMDARIQVAQEKQVAEQGGDLSPAANRSQKASQSRPNSSALETLGGEKLANGSLEPPAQAAPGPSKRDSDCSSLCTSESMDYGTNLSTDLSLNKEMGSLSIKDPKLYKKTLKRTRKFVVDGVEVSITTSKIISEDEKKDEEMRFLRRQELRELRLLQKEEHRNQTQLSNKHELQLEQMHKRFEQEINAKKKFFDTELENLERQQKQQVEKMEQDHAVRRREEARRIRLEQDRDYTRFQEQLKLMKKEVKNEVEKLPRQQRKESMKQKMEEHTQKKQLLDRDFVAKQKEDLELAMKRLTTDNRREICDKERECLMKKQELLRDREAALWEMEEHQLQERHQLVKQQLKDQYFLQRHELLRKHEKEREQMQRYNQRMIEQLKVRQQQEKARLPKIQRSEGKTRMAMYKKSLHINGGGSAAEQREKIKQFSQQEEKRQKSERLQQQQKHENQMRDMLAQCESNMSELQQLQNEKCHLLVEHETQKLKALDESHNQNLKEWRDKLRPRKKALEEDLNQKKREQEMFFKLSEEAECPNPSTPSKAAKFFPYSSADAS

SEQ ID NO: 160961 - DNA, 2907 bp, Artificial Sequence
  derived and/or modified sequence
atggcatttgctaatttccgccgaatccttcggctttctacattcgaaaagagaaaaagtcgcgaatacgaacatgtgcgaagggacctggaccctaatgaggtgtgggagatcgttggggaactgggcgacggggctttcggcaaggtctacaaggctaagaacaaggagaccggggccctggccgctgctaaggtgatagagaccaagtcggaggaggagctcgaggactacattgtggagatcgagatactcgcgacgtgtgaccacccatacattgtcaaactccttggcgcctattatcacgatgggaaattgtggattatgatcgaattctgtccaggtggagctgtggatgccatcatgctggagcttgacagagggctgaccgaaccacaaattcaggtagtgtgtcggcagatgttagaagccctcaactttcttcactcaaaacgcattatccacagggatcttaaagctggaaatgtgctgatgaccctggaaggcgatataaggctggccgacttcggtgttagtgcaaaaaacctcaaaaccctgcagaaaagagactcttttatcggcaccccctattggatggccccagaggtggttatgtgcgagaccatgaaggacacaccttacgattacaaagcagacatctggagccttggcattaccctgattgaaatggcgcagattgagccaccacaccacgaactgaaccccatgcgcgtcctcctcaagattgctaaaagcgaccccccgactcttcttaccccaagtaagtggtctgttgaattcagggatttccttaagatcgcactggataagaatcctgagactcgccctagcgccgcacagctgctcgagcacccctttgtgagctctataacctctaacaaggctctgagagagctggtagcggaagccaaggcagaggtgatggaggagatagaggatggccgggacgagggagaagaagaagacgccgtcgatgccgcatccacgttagagaatcacacgcaaaactccagcgaggtaagcccaccttctctcaatgcggataagccgttggaggagagtcccagcacacctctggccccttctcagtcccaggattccgtcaacgagccctgtagccagccctcaggggacagatcccttcaaacaaccagcccccctgtggtcgcccccggtaacgaaaacggcctggccgtccccgtcccactccgcaagtctaggccagtctccatggatgccagaatccaggtggcccaggaaaaacaggtagcagaacagggcggcgacttgagtccagccgccaacaggagtcagaaggcctcacaaagtagacccaacagtagcgcattagagaccttaggcggggaaaaactggcaaacggcagcctcgagcctccagcgcaggcggccccaggaccctctaaacgtgacagcgattgtagttctttgtgcaccagtgaatccatggattatggaacaaacctctccactgatctttctctgaataaggagatgggatccctttcgatcaaagacccgaaattgtacaagaagacgctgaagaggacacggaagtttgttgtcgatggggtagaggtgagcatcaccacatccaagatcatctccgaggacgagaagaaggacgaggagatgcggtttctaaggcggcaggagctgagggagcttcggctgctccagaaagaggagcataggaaccagacgcagttgtcaaataagcacgaactccagcttgagcagatgcacaaaaggttcgagcaggagatcaatgcaaaaaagaagttcttcgatacagagcttgagaacttggagaggcaacagaaacaacaagtggaaaaaatggaacaggaccatgcagtgcgacgcagggaagaggctcggaggatccgattggaacaggaccgagactatacaagatttcaagagcagttgaaactcatgaagaaagaagtaaagaacgaggtggagaaactgcctagacagcagcgtaaagaaagcatgaagcagaaaatggaggaacacactcagaagaagcagctcctggaccgcgacttcgttgctaaacagaaggaggatcttgaactggccatgaagcggctgacgactgacaacagacgggagatttgcgacaaggagagggagtgccttatgaagaagcaggagctactgcgcgatcgggaagccgccttatgggaaatggaggagcatcagctgcaggaaagacaccagctagtgaagcagcagctgaaagatcagtattttctgcaacgacacgagttgttgcgaaagcatgaaaaggagcgtgagcagatgcaaagatacaaccaaaggatgatcgagcagcttaaggttcggcagcagcaagaaaaagcccggcttccaaaaattcagagatctgagggcaagacccgcatggccatgtacaaaaaatccttgcacataaatggaggggggtccgcggccgaacagagagagaagatcaaacagttcagccagcaggaggaaaagcgccagaaatccgagagactgcagcagcagcagaagcacgagaaccaaatgagagatatgctggcccagtgtgaaagcaatatgtccgagctacagcagctacagaatgagaaatgtcacctattagtcgagcacgaaacgcagaagctcaaggcgctggacgagtcgcacaaccaaaaccttaaggagtggcgggacaaacttagaccaagaaagaaagccctcgaagaagatctgaatcagaagaaacgtgagcaggagatgtttttcaagctgtccgaggaagcagaatgtccgaatccttccacaccctctaaggccgctaagtttttcccatattcctccgctgatgcctcgtag

SEQ ID NO: 160962 - DNA, 2907 bp, Artificial Sequence
  derived and/or modified sequence
atggcttttgctaatttcaggcgcatactcaggctgtcaacctttgagaaacgtaagagtcgcgaatacgaacatgtccggcgcgacctcgatcccaatgaagtatgggagatcgtgggtgagctcggtgacggcgcgtttggcaaagtctacaaggcgaagaacaaagaaacaggcgctttggcagcagcaaaggttattgagacaaagtctgaagaagagctcgaagactacatcgtggaaatcgaaatccttgcaacgtgcgaccatccctacatagttaagctattaggagcatattaccatgacggtaaactctggattatgatcgagttctgcccaggcggtgctgtagacgctattatgctggaattggatcgggggctgactgagcctcagatccaggttgtctgccggcaaatgttagaagcattgaacttcttacactcaaagaggattattcacagggatctcaaagccggaaatgtgcttatgactcttgaaggggatattcgactcgcggatttcggagtctctgccaagaacctgaagacactgcagaaaagagactcgtttatcggcacaccttattggatggcacccgaagtagtgatgtgcgaaaccatgaaagacacaccctacgattataaggctgacatttggagtctgggaataactctcatcgagatggctcagattgaaccaccacatcatgagcttaaccccatgcgagtcttactgaagattgccaaatccgacccaccaactctgctgacaccttccaagtggagcgttgagttccgagatttcttgaaaatcgcgctcgataagaaccccgagacccgacccagtgctgctcagctccttgagcacccgttcgtatccagtatcacctctaacaaggctttgagagagctggtggctgaggctaaagctgaagtgatggaggagatcgaagacggcagggatgagggggaagaagaggacgctgtcgatgccgctagcacacttgagaatcatactcagaacagcagtgaggtgagcccaccaagcctgaacgccgataagcccctcgaggagagcccaagcactccactggcaccttcccagagccaggactctgtgaatgagccttgcagtcagccaagcggagatagatcacttcagaccacttctcctccagtggtggccccaggtaacgagaatggcctcgctgtacctgtacccctccggaagtctcggcctgtgtctatggatgcccgaattcaagtggcacaggaaaagcaggtcgctgagcaggggggcgacctctcgccagcggctaacagatcccagaaagcttcccagagcagaccaaacagttcagcattggaaacacttggcggtgagaagcttgccaacggatccctcgaacctcctgctcaggcagcccccgggcctagtaaacgcgactctgactgctcaagtctctgcacctccgagagcatggattacggtaccaatctctccacggatctgagcttaaacaaggagatggggtccctttccatcaaggatccaaaattatacaagaaaactctgaagagaaccagaaagtttgtggtggacggtgtggaggtctccattacgacctcaaaaatcatctcagaggacgagaagaaggacgaggaaatgaggttcttaagaaggcaagagctcagggaactgagattgctgcagaaagaagagcaccgtaaccagacacaattgagcaacaaacacgaactacagctggaacagatgcataaacgttttgagcaggagattaatgcaaaaaagaagttttttgacacagagctggaaaacctggagcggcagcagaaacagcaggtcgaaaagatggaacaggaccacgcagttcggagacgggaagaggcacggaggattcgccttgagcaggacagggactacaccaggttccaggagcagctaaaactgatgaagaaagaggtgaaaaacgaagtggagaaactgcctagacaacagcgaaaggaaagcatgaagcagaagatggaagagcatacccagaaaaagcagctgttggaccgcgactttgttgcaaagcagaaggaggacttggagttggcaatgaaaagattaaccacagataatcgtagggaaatctgcgacaaagagcgcgagtgcctgatgaaaaagcaagaactgctccgggatagagaggccgctctctgggagatggaggagcatcagctacaagaaaggcatcagcttgtgaaacagcagcttaaagatcaatactttctgcagagacacgagctactcagaaagcatgaaaaggagcgcgaacagatgcagcggtataaccagaggatgatcgaacaactaaaggtgagacaacagcaggagaaagctaggctgcccaaaatccagcgctccgaagggaaaacccgcatggctatgtacaagaagtcactacacattaacggaggcggctctgcggcagagcagagagaaaagataaagcagttctcgcagcaggaggagaagcggcagaagtcagaacggttacaacagcagcaaaagcatgaaaaccagatgagggatatgcttgcccagtgcgagtcaaatatgtccgagctacagcagctgcagaatgagaagtgtcacctccttgtggaacatgagactcagaagctgaaagccttggacgaatcccataatcagaacctgaaagagtggcgtgataagctgcgcccgagaaagaaggccctcgaggaagatcttaatcagaagaagcgggaacaggaaatgttctttaagctgtccgaggaagctgaatgccctaacccctctactccatctaaagccgcaaaattctttccgtatagtagcgcagacgcctcgtag

SEQ ID NO: 160963 - DNA, 2907 bp, Artificial Sequence
  derived and/or modified sequence
atggcctttgccaacttccgccgcatcctgcggctgagcacctttgagaagaggaagagccgggagtatgaacatgtgagaagagacctggaccccaatgaggtgtgggagatcgtgggggagctgggagatggagccttcggcaaggtgtacaaggccaagaacaaggagaccggggccctggccgccgccaaggtgattgagaccaagtctgaggaggagctggaggactacatcgtggagattgagatcctggccacctgtgaccacccctacatcgtgaagctgctgggcgcctactaccatgatggcaagctgtggatcatgattgagttctgccctgggggcgctgtggatgccatcatgctggagctggaccggggcctgacagagccccagatccaggtggtgtgccggcagatgctggaggccctgaacttcctgcacagcaagaggatcatccaccgggacctgaaggctggaaatgtgctgatgaccctggagggggacatccggctggccgactttggagtgtctgccaagaacctgaagaccctgcagaagagggacagcttcatcggcaccccctactggatggcccctgaggtggtgatgtgtgagaccatgaaggacaccccctatgactacaaggctgacatctggagcctgggcatcaccctcatcgagatggcccagatcgagcccccccaccacgagctgaaccccatgagggtgctgctgaagatcgccaagagtgacccccccaccctgctgacccccagcaagtggagcgtggagttccgggacttcctgaagatcgccctggacaagaaccctgagacccggcccagcgctgcccagctgctggagcacccctttgtgagcagcatcaccagcaacaaggccctgcgggagctggtggccgaggccaaggccgaggtgatggaggagattgaagatggaagagatgaaggagaggaggaggatgctgtggatgctgccagcaccctggagaaccacacccagaacagcagcgaggtgtccccacccagcctgaatgctgacaagcccctggaggagagccccagcacccccctggcccccagccagagccaggacagcgtgaatgagccctgcagccagcccagcggggacaggagcctgcagaccaccagcccccctgtggtggcccctggaaatgaaaatggcctggccgtgcctgtgcccctgaggaagagcaggcctgtgtccatggatgcccgcatccaggtggcccaggagaagcaggtggccgagcagggcggggacctgagccctgctgccaacagaagccagaaggccagccagagccggcccaacagcagcgccctggagaccctgggcggggagaagctggccaacggcagcctggagcccccagcccaggccgcccctggccccagcaagagggacagcgactgcagcagcctgtgcaccagcgagagcatggactatggcaccaacctgagcacagacctgagcctgaacaaggagatgggcagcctgagcatcaaggaccccaagctgtacaagaagaccctgaagaggaccaggaagtttgtggtggatggagtggaggtgtccatcaccaccagcaagatcatcagtgaagatgagaagaaggatgaggagatgaggttcctgcggcggcaggagctgcgggagctgcggctgctgcagaaggaggagcacaggaaccagacccagctgagcaacaagcatgagctgcagctggagcagatgcacaagagatttgagcaggagatcaatgccaagaagaagttctttgacacagagctggagaacctggagcggcagcagaagcagcaggtggagaagatggagcaggaccatgctgtgagaagaagagaggaggcccggcgcatccggctggagcaggaccgggactacacccgcttccaggagcagctgaagctgatgaagaaggaggtgaagaatgaggtggagaagctgccccggcagcagaggaaggagagcatgaagcagaagatggaggagcacacccagaagaagcagctgctggaccgggactttgtggccaagcagaaggaggacctggagctggccatgaagaggctgaccacagacaacagaagagagatctgtgacaaggagagagaatgtctgatgaagaagcaggagctgctgcgggaccgggaggccgccctgtgggagatggaggagcaccagctgcaggagcggcaccagctggtgaagcagcagctgaaggaccagtacttcctgcagagacatgagctgctgaggaagcatgagaaggagcgggagcagatgcagcgctacaaccagaggatgattgagcagctgaaggtgcggcagcagcaggagaaggcccggctgcccaagatccagaggtctgagggcaagaccaggatggccatgtacaagaagagcctgcacatcaatggaggcggcagcgctgctgagcagcgggagaagatcaagcagttcagccagcaggaggagaagaggcagaagtctgagcggctgcagcagcagcagaagcatgagaaccagatgagggacatgctggcccagtgtgagagcaacatgtctgagctgcagcagctgcagaatgagaagtgccacctgctggtggagcacgagacccagaagctgaaggccctggatgagagccacaaccagaacctgaaggagtggagggacaagctgcggcccaggaagaaggccctggaggaggacctgaaccagaagaagcgggagcaggagatgttcttcaagctgtctgaggaggccgagtgccccaaccccagcacccccagcaaggccgccaagttcttcccctacagcagcgcagatgccagctag

SEQ ID NO: 160964 - DNA, 2907 bp, Artificial Sequence
  derived and/or modified sequence
atggccttcgccaacttccggcggatcctgcggctgagcaccttcgaaaagagaaagtcccgggaatatgagcacgtgcgcagggatctggaccccaatgaggtctgggagattgtcggcgaactcggcgatggggcttttggaaaagtttataaagcaaagaacaaggaaacaggtgccctggctgccgccaaggtgattgagaccaagtccgaagaggagctggaggattatatagttgagatagagatcctggctacctgcgatcacccatatatcgtaaaacttctcggcgcctattatcacgacggaaagctttggataatgatcgagttttgtccggggggcgcagtggatgccattatgcttgagctagaccgcgggctgacagagccgcagattcaggtggtgtgtaggcagatgttagaagctttaaactttctgcacagcaaacgcattatccatcgcgacctgaaggcgggcaatgtgcttatgaccctggaaggcgacattagactggctgactttggcgtcagcgctaaaaatctgaagaccctgcaaaagcgggatagttttattggtaccccatactggatggcacctgaagtggtcatgtgcgagaccatgaaagataccccttacgattacaaggccgatatttggagtctgggtatcaccttaattgaaatggcacagatcgagccaccacatcacgagctcaatccaatgagggtactcttgaaaatagccaagagcgatcctcctacgctcctgaccccctcaaaatggagcgtggagtttagagactttctgaagatcgcactcgataaaaacccagagactagaccaagcgcagctcagctcttggaacaccccttcgtgtctagcatcacgtccaacaaggcccttagggaactggtggcagaggccaaagctgaggtgatggaggaaatcgaggatgggcgggacgagggtgaggaggaagatgccgtggacgcggcctctactctggagaaccatacccagaactcttcggaggtcagccccccttcgttgaacgcagataaacccctggaggaatccccctctacccccctcgctccttcacaaagccaggactccgtgaacgaaccgtgctctcagccatcaggtgatcgctcactccagactacctccccccccgtcgttgccccgggaaacgaaaatgggttggcggtgccagtccctctgcggaagagccggccagtgtcaatggacgctcggatccaggttgctcaggaaaagcaggtcgcagagcagggaggcgatctgagcccggcagccaatcggtcccagaaggcctcccaaagccgtcccaatagcagtgccctggagacactgggcggggaaaagctggcaaatggatctctagagcccccagcccaggcagcaccgggtccatcgaagagagactcggattgctcgtcactgtgtacctccgaaagtatggattacggcaccaacttgtctactgatctctcacttaataaggagatgggatctctgagcataaaggatccaaagctttataagaaaactctgaagaggacacgtaaattcgtggttgacggtgtggaggtcagcattactaccagtaagatcatcagcgaggatgagaaaaaggacgaggagatgagattcctcaggaggcaagaactgagggaactgcggctcctgcagaaggaggaacacagaaaccagacccaactgtctaataaacatgaactccagctggagcaaatgcacaaacgattcgagcaggaaattaacgccaagaagaagttcttcgacaccgagttagaaaacttggaacgccaacagaaacagcaggtagaaaagatggaacaagatcacgctgtgagaaggagggaggaagctagacggatacgccttgaacaagatcgtgactacactaggtttcaagagcagctgaagctcatgaaaaaggaggtgaagaatgaggtagagaaactgccacgtcagcagcggaaggagtcgatgaagcagaaaatggaagagcacacgcagaaaaagcagctcctggacagagactttgtggctaagcagaaagaggacctggaactggcaatgaagcggcttactactgataaccggcgtgagatatgtgataaagagagggaatgtctcatgaaaaagcaggaactgcttcgcgacagagaggccgcactatgggagatggaggagcaccaattgcaagagaggcaccagctggtaaagcagcagttaaaggaccaatatttcttacagcgccatgagctgttgcgaaagcacgagaaggaacgggagcagatgcagagatataaccagcggatgatcgaacagttgaaagtgcggcagcagcaggaaaaggcacgacttcccaagatacagagatcagaaggtaagacccgcatggccatgtacaaaaagagtctacatatcaacggtggggggtccgctgcagaacagcgggagaaaatcaaacaattcagccagcaggaggagaagcgtcagaagagcgagcgcctccagcagcaacagaaacatgaaaaccagatgcgagacatgctcgcccagtgtgagagcaatatgagcgagcttcaacaactgcagaatgaaaaatgccacctactggtggagcacgagacccaaaagttaaaggccctagacgagagtcacaaccagaatttaaaggagtggagggataagttacgcccccgaaaaaaagctctagaagaggatttaaatcaaaaaaaacgggaacaggaaatgttcttcaagttatccgaggaagcagaatgccctaacccatcaactccttccaaggctgccaaattctttccctattctagtgccgatgcttcatag

SEQ ID NO: 160965 - DNA, 2907 bp, Artificial Sequence
  derived and/or modified sequence
atggccttcgccaacttccggcggatcctgcggctgagcaccttcgaaaaaaggaagagtcgggagtatgaacatgtgagacgcgacctcgatcctaatgaggtctgggagattgtaggcgaattaggagatggggccttcggaaaggtgtataaagcaaaaaacaaggaaactggggctctggcggctgccaaagtgatcgagacaaagagcgaagaggagctggaggattacatcgtcgaaattgagatacttgcaacgtgtgaccatccatacatcgtaaagctactgggagcatactaccatgacgggaaactttggatcatgatcgaattctgtccagggggtgcggtcgatgcaataatgctcgaactggaccgaggcctgaccgaaccgcaaattcaagtcgtgtgtcggcaaatgcttgaggctttgaacttcctgcacagcaagaggatcattcatcgggatctaaaggctggtaacgtgcttatgacgctggagggtgacatccgactggccgactttggagtgagcgcaaagaatctgaagaccttgcagaaacgggactccttcatcggtacaccctactggatggcacctgaggtggtcatgtgtgagactatgaaggacacgccatatgattacaaagcagatatttggtccctgggtatcactctcatcgaaatggcacagattgagccgcctcaccacgagcttaacccgatgagagtgctgttgaagattgcaaagtccgacccacctaccttactcacacccagcaaatggtctgtggaattccgagactttctgaaaatcgccctggataaaaaccctgaaacacgcccttctgctgctcaactgctggagcatccattcgtatccagcatcacgtccaacaaagctcttagagagctcgtcgctgaggcgaaagccgaggtaatggaggagattgaagacggcagggacgagggcgaggaggaagacgccgttgatgccgcctctactctcgagaatcacacgcaaaattcatctgaagtgtctcccccttccctgaacgcagacaaaccactggaagagtcgcccagcacaccgctcgcgccctcacaatcacaggacagtgtaaacgaaccgtgctctcagccatccggtgatcgatctctccagactacctcccctccagtggtggcccccggcaatgaaaacggccttgctgttccagtgcccctcagaaagtcccgacccgtgagcatggacgcgagaatccaagttgcccaagaaaagcaggtggcagagcagggcggggatctgagcccagctgcaaatcggtcccaaaaggcatcacagagccgtcccaacagctccgctctcgagacactggggggagaaaagctcgccaacggtagcttggagccccctgcacaggccgctccagggcccagtaagagagattctgactgcagctctctgtgcacctccgagtcaatggactatggtaccaatttgtcaaccgacctttccctgaataaagagatgggctcgctttctattaaagatcccaaattatacaaaaagacgctcaagagaactcgaaaattcgtggtagacggtgttgaggtgagcattacaacgtccaaaataatcagcgaggacgagaagaaggatgaggagatgagatttctccggagacaggaattgcgcgaattgcgcttactgcagaaggaggaacataggaatcagacacagctatccaataagcatgaacttcagttggaacagatgcataagcgctttgagcaggagatcaacgcaaagaaaaagttttttgataccgagctcgagaatctggaaagacagcagaaacaacaggtcgagaagatggaacaagaccatgccgtacggcgcagggaggaggctagaaggatccgtctggaacaggatagggattatactagattccaagaacaactcaagctgatgaagaaggaagtaaagaacgaagtcgagaagctgccccggcagcagcgtaaggaatccatgaaacaaaagatggaagaacatacacagaaaaaacagcttctcgaccgggacttcgtcgctaaacagaaggaggacctcgagttggccatgaagcgtctgaccactgacaatcggagggagatttgtgacaaggagcgagagtgcctgatgaaaaagcaggagttgctgagagatagggaggcagccctatgggaaatggaagagcaccagcttcaggaaaggcatcagctcgtcaaacagcaactgaaagaccagtattttctccagcgtcatgaactcctgcgcaaacacgagaaggagcgggagcagatgcaacggtacaaccagcggatgattgagcagctgaaagtcagacaacaacaggagaaggctcgtctcccaaaaatccagcggtctgagggtaagactaggatggcaatgtacaagaagtcacttcacattaacgggggaggatctgcggccgaacaaagggagaagattaagcagttcagtcagcaagaggagaaaagacagaagagcgagcgtctgcagcaacagcaaaagcacgagaaccagatgagagatatgctcgcacaatgcgagtctaatatgagtgaactccagcaattgcagaatgagaagtgtcacctgctcgtggaacatgagacacagaaacttaaggctctggacgaaagtcataaccagaaccttaaagaatggagagacaagcttaggcctcgtaagaaggctctcgaggaggatttaaatcaaaagaagcgcgagcaggagatgtttttcaaacttagtgaagaagccgagtgtcctaacccatccacacccagcaaggcggcaaaattcttcccttacagtagtgccgatgcctcttag

SEQ ID NO: 160966 - DNA, 2907 bp, Artificial Sequence
  derived and/or modified sequence
atggcatttgctaactttagaaggatcttgaggctgtcgacattcgaaaagagaaagtcacgcgagtacgaacatgtccgccgtgacctggatcccaacgaagtttgggagattgtgggtgagctgggcgacggcgcattcggcaaagtctacaaggcaaagaataaggagaccggcgcactggcagccgcaaaggtaatcgagacaaagtctgaagaagagcttgaagattacatagtagaaattgagattctcgccacctgcgatcacccttatatcgtcaaactgctcggggcttattaccacgatggaaagttgtggatcatgatcgagttctgcccaggcggtgctgtggacgcaataatgttggagctggaccgcggactcaccgagcctcagattcaggttgtgtgccgacaaatgctcgaggccctgaacttcctgcactccaaaaggattattcatcgcgatctgaaagctggaaacgtcctgatgacgctcgaaggagacatccgcctcgcagatttcggagtctccgctaagaacctgaagacgttgcagaagagagactctttcatcggcacaccatactggatggcgcctgaggttgtgatgtgtgagacaatgaaggacacgccctacgattacaaggccgacatttggtctctgggaatcacattgatcgagatggcccagatcgagccaccgcatcatgagctgaatcccatgcgcgtacttctgaaaatcgctaagtcagaccctcctacgctcctgaccccatccaaatggagtgtggagttcagagatttcctcaaaatcgctctggacaagaaccccgagacaagacccagtgccgcacagctgcttgaacatcctttcgtctccagcatcacatctaacaaggcattgagggaattggtggccgaagccaaggctgaagttatggaagaaatagaagatgggagagacgaaggggaagaggaagatgcagtggacgcagcttcgacgcttgaaaatcatacacagaattcatcggaagtctcccctccctcactgaacgcagacaagcctctggaggagagtccttctacacccttagctcctagtcagtcacaggactcagtgaacgaaccctgcagtcagccttctggtgatcggagcctccagacaacctcccctccagttgtggccccaggcaatgagaatggcctcgcagtgcctgtgcctttgagaaaatcacggccagtgtctatggatgctaggatccaggtggcacaggagaagcaggtcgccgagcagggcggtgacctgagtcctgctgctaatcggagccagaaagctagccagtccagacctaactcatccgctttggaaaccctaggaggagagaagcttgcaaatggcagcctggaaccccctgcacaagcagcccctggaccgagtaagagggattcagactgctcttcactgtgcaccagtgaatccatggattatggaaccaatctgtccactgatctgtccctgaacaaagaaatgggttccctctcaataaaggatcccaagctgtacaaaaagaccctgaaacgtaccaggaagttcgtagtggacggtgttgaagtgagcataacaacaagtaaaatcatatcagaagatgagaagaaagatgaagagatgcggttcctcagaaggcaagaactgcgagagctccgcctgctgcaaaaagaggaacacaggaatcagacccagctgtccaacaagcacgagctacagctggaacagatgcacaagaggttcgagcaggagattaatgccaaaaaaaagttcttcgatacagaacttgaaaacttggagaggcagcagaagcagcaggtggaaaagatggagcaagaccatgctgtccgccgtcgggaagaagcccgtcggattaggcttgagcaagaccgggattacacgagattccaggagcagctcaagctcatgaaaaaagaagttaaaaacgaagtagaaaaactcccaaggcaacaaaggaaagaaagcatgaagcagaagatggaagagcacactcagaagaaacagctgctagatagggatttcgtggccaagcagaaggaggatcttgaactggcaatgaaaagactgaccacggacaataggcgcgagatctgcgataaggagcgagaatgtcttatgaagaaacaggagctgcttcgggacagggaagccgcattgtgggagatggaggaacatcaattacaggagaggcaccagttggtcaaacagcagctgaaggaccagtactttttacagcgccacgagctgcttcgcaagcatgagaaggaacgcgagcagatgcaacggtacaatcagcggatgatcgagcagctcaaagtacgacagcaacaagaaaaagcgagactgcctaaaattcaaagatctgaaggtaagacccggatggcaatgtataaaaagtcgctgcacatcaatggcggaggctccgctgccgagcagcgggagaagattaagcagttcagccagcaggaggagaaaagacagaagagtgagcgtcttcagcagcaacaaaagcacgagaatcagatgagagacatgctcgcccagtgcgagagtaacatgtctgagctccagcagctccagaatgagaagtgtcacctgctcgtggaacacgaaacccagaagctaaaagcgctcgacgaatcccataaccaaaacctgaaggaatggcgggataaactgcggcctcgaaagaaggccttagaggaggatctgaatcagaaaaaaagagagcaggaaatgtttttcaagttgagcgaggaggcagaatgccctaacccatcaacgccttctaaagctgcaaaattctttccctattcttccgccgatgctagctag

SEQ ID NO: 160967 - DNA, 2907 bp, Artificial Sequence
  derived and/or modified sequence
atggccttcgcgaacttccgaagaattctgaggttgtcaacctttgagaagcgcaagtctcgggaatatgaacacgtgaggagggacctcgatccgaacgaagtctgggaaatcgtaggcgaactgggagacggtgcatttggcaaggtatataaagccaagaataaggaaacaggcgctttagctgctgccaaggtcatcgaaaccaaaagcgaggaagaactcgaggattacatcgtggagatagagatactcgccacttgcgaccatccctatattgtgaagctcctcggcgcttactatcatgacgggaagctgtggatcatgatagagttctgtcccggtggagctgtggacgctatcatgctggagctagaccggggactcaccgagccgcagattcaggtggtttgtcgacagatgctagaggccctgaatttccttcacagcaaaagaattattcatcgcgacctgaaggctgggaacgtattgatgactctcgagggtgacatccggcttgctgactttggcgtgtcggccaaaaatctcaagacactccagaagagagacagtttcatagggacgccttactggatggcacccgaagtagtcatgtgtgagaccatgaaggatacgccctacgattacaaggccgacatttggtcacttggtataaccctcatcgaaatggcgcagatcgaaccaccgcaccacgaactaaatccaatgcgcgttctgctaaagattgccaagagcgatccgccaaccctgctgacccctagcaaatggtccgtggagttcagggatttcctcaagatcgcactggacaagaaccctgagacgcgcccaagcgccgcacagttattagaacacccatttgtttcttcaattacttctaacaaggctctgcgcgagcttgttgctgaggcaaaggccgaggtaatggaggaaatcgaggatggcagggacgagggtgaagaagaagacgcggtagacgctgcgagcacactggaaaatcatacacagaactctagtgaggtctcccccccatctctgaacgcagacaagcctctagaggagtcaccttcaacgcctctcgccccttcacagtcccaagattcagtgaatgaaccctgcagtcagccgtccggcgatcggagcctgcagaccacatctcctcctgtcgtagctccagggaacgagaatgggttggccgtcccagtaccactgagaaagtcccgtccagtctctatggacgcgaggattcaggtagcccaggagaaacaggtcgccgagcagggcggagatcttagtccggctgctaataggtcccagaaggcctcccagtctcgccctaattctagcgcactcgaaaccttgggaggagagaagctcgccaacggtagcctcgaacctcccgctcaggccgcacccggtcctagcaagcgggattccgattgcagctccctctgtactagtgagagtatggactatggtaccaatcttagcaccgacctgagcctcaataaagagatgggttccctcagcatcaaggacccaaagctgtacaagaagacgctgaagaggactcgcaaattcgttgtggatggggtggaggtgtccatcacaacctctaagatcatctccgaagatgaaaaaaaggatgaagaaatgcggttcctccgaaggcaggaactcagggaactgcgactgctgcagaaggaggagcaccgaaaccagacccagctgtctaataagcacgagctccaactcgagcagatgcataagcgttttgaacaggagattaacgccaagaaaaaatttttcgatacagaacttgagaacttggaaagacaacagaagcaacaggtggagaaaatggaacaggatcacgctgtcaggcgtcgagaagaggccagacgaattcggctggaacaggatcgggattacacaagattccaggaacagttgaagcttatgaagaaagaagtgaaaaacgaagtggagaaattgccacggcagcagaggaaggagtccatgaagcaaaagatggaggagcacacacagaagaagcagttgctcgatcgtgatttcgtcgctaagcaaaaagaggacttagagctggcaatgaagagactgactaccgacaacagacgggagatctgtgataaggagagagagtgcctgatgaaaaagcaggagttgctgagggacagggaagctgccctgtgggagatggaagagcaccagcttcaggagagacaccagctggtcaagcagcagctcaaagaccaatactttctgcagcgtcatgagctccttaggaagcatgaaaaagagagggaacagatgcagcgctataaccagcgcatgattgaacagctgaaagtccggcagcagcaggagaaggctagactgcctaagatacagagatcggaggggaaaacacgaatggccatgtataaaaagtccctgcatattaatggcggagggagtgctgccgaacaaagagaaaaaatcaaacaatttagtcagcaagaagagaaacgacagaagagcgagaggttgcagcagcagcaaaagcatgaaaaccagatgagagacatgcttgcccagtgtgaatcaaatatgagcgaactgcagcagttgcaaaatgaaaagtgccacttgctcgtggaacacgagactcaaaagctgaaagcactagatgagagccacaatcagaacctgaaggagtggagagacaaactgcgccctcgcaaaaaagccttagaagaggacctaaatcagaaaaagcgggaacaggagatgttcttcaaattaagtgaagaggctgagtgtcccaacccctcgactccaagcaaagcggcaaagttttttccttacagttccgccgatgcgtcttag

SEQ ID NO: 160968 - DNA, 6060 bp, Artificial Sequence
  derived and/or modified sequence
cggtgggcgggcgcggggacggtcccctggaacgggtccgaggctctcgcaggcagggctgggccgggcaggagctgcgaggccggcacaagggaggcggccctggggacctgacagggcgggggcgggggcgggcacgccgccgcctgcgcggttccgggtgctcccggcgcggcgctgcccagggcacacttgaccgaggtcgggctgcggggaaaggcgggtctggggagaaccccgagagacgcggcgtcctccaactcctcctccttctcctcgcggccgccgaagccacagcccgagcccgagcccgagcccgagccggcgccaccgcgcccccggccatggcttttgccaatttccgccgcatcctgcgcctgtctaccttcgagaagagaaagtcccgcgaatatgagcacgtccgccgcgacctggaccccaacgaggtgtgggagatcgtgggcgagctgggcgacggcgccttcggcaaggtttacaaggccaagaataaggagacgggtgctttggctgcggccaaagtcattgaaaccaagagtgaggaggagctggaggactacatcgtggagattgagatcctggccacctgcgaccacccctacattgtgaagctcctgggagcctactatcacgacgggaagctgtggatcatgattgagttctgtccagggggagccgtggacgccatcatgctggagctggacagaggcctcacggagccccagatacaggtggtttgccgccagatgctagaagccctcaacttcctgcacagcaagaggatcatccaccgagatctgaaagctggcaacgtgctgatgaccctcgagggagacatcaggctggctgactttggtgtgtctgccaagaatctgaagactctacagaaacgagattccttcatcggcacgccttactggatggcccccgaggtggtcatgtgtgagaccatgaaagacacgccctacgactacaaagccgacatctggtccctgggcatcacgctgattgagatggcccagatcgagccgccacaccacgagctcaaccccatgcgggtcctgctaaagatcgccaagtcggaccctcccacgctgctcacgccctctaagtggtctgtagagttccgtgacttcctgaagatagccctggataagaacccagaaacccgacccagtgccgcgcagctgctggagcatcccttcgtcagcagcatcaccagtaacaaggctctgcgggagctggtggctgaggccaaggccgaggtgatggaagagatcgaagacggccgggatgagggggaagaggaggacgccgtggatgccgcctccaccctggagaaccatactcagaactcctctgaggtgagtccgccaagcctcaatgctgacaagcctctcgaggagtcaccttccaccccgctggcacccagccagtctcaggacagtgtgaatgagccctgcagccagccctctggggacagatccctccaaaccaccagtcccccagtcgtggcccctggaaatgagaacggcctggcagtgcctgtgcccctgcggaagtcccgacccgtgtcaatggatgccagaattcaggtagcccaggagaagcaagttgctgagcagggtggggacctcagcccagcagccaacagatctcaaaaggccagccagagccggcccaacagcagcgccctggagaccttgggtggggagaagctggccaatggcagcctggagccacctgcccaggcagctccagggccttccaagagggactcggactgcagcagcctctgcacctctgagagcatggactatggtaccaatctctccactgacctgtcgctgaacaaagagatgggctctctgtccatcaaggacccgaaactgtacaaaaaaaccctcaagcggacacgcaaatttgtggtggatggtgtggaggtgagcatcaccacctccaagatcatcagcgaagatgagaagaaggatgaggagatgagatttctcaggcgccaggaactccgagagcttcggctgctccagaaagaagagcatcggaaccagacccagctgagtaacaagcatgagctgcagctggagcaaatgcataaacgttttgaacaggaaatcaacgccaagaagaagttctttgacacggaattagagaacctggagcgtcagcaaaagcagcaagtggagaagatggagcaagaccatgccgtgcgccgccgggaggaggccaggcggatccgcctggagcaggatcgggactacaccaggttccaagagcagctcaaactgatgaagaaagaggtgaagaacgaggtggagaagctcccccgacagcagcggaaggaaagcatgaagcagaagatggaggagcacacgcagaaaaagcagcttcttgaccgggactttgtagccaagcagaaggaggacctggagctggccatgaagaggctcaccaccgacaacaggcgggagatctgtgacaaggagcgcgagtgcctcatgaagaagcaggagctccttcgagaccgggaagcagccctgtgggagatggaagagcaccagctgcaggagaggcaccagctggtgaagcagcagctcaaagaccagtacttcctccagcggcacgagctgctgcgcaagcatgagaaggagcgggagcagatgcagcgctacaaccagcgcatgatagagcagctgaaggtgcggcagcaacaggaaaaggcgcggctgcccaagatccagaggagtgagggcaagacgcgcatggccatgtacaagaagagcctccacatcaacggcgggggcagcgcagctgagcagcgtgagaagatcaagcagttctcccagcaggaggagaagaggcagaagtcggagcggctgcagcaacagcagaaacacgagaaccagatgcgggacatgctggcgcagtgtgagagcaacatgagcgagctgcagcagctgcagaatgaaaagtgccacctcctggtagagcacgaaacccagaaactgaaggccctggatgagagccataaccagaacctgaaggaatggcgggacaagcttcggccgcgcaagaaggctctggaagaggatctgaaccagaagaagcgggagcaggagatgttcttcaagctgagcgaggaggcggagtgcccaaacccctccaccccaagcaaggccgccaagttcttcccctacagttctgcggatgcttcttaacaaccgcccggggctgtggctggcagcttggtgggccccagggccttctccttcattctctgtgaacatgtaactcaggaccccttttccctcttgcgtctgtgccagctcaaatccagcccctcgccctgtgccaccccaactgtgcctgatagacctgccccagcgttcctgacttcttgctggcctgtggagggtgaggtgtaattatttgtcacctgaacctaatgtatattctccttgagccccagatcccttcaagctggaagggatggggctgttggtggggtcagggtccaagaggaatgggtgttctgtggcctcgagtcctctcctgtttgcgaaaataccagttttgctctctgtgggacaaagcactgctgatgaagtccccgtgggctcatccgggctggaattcttggtttttcagccattccctgcagagtcactcaatcatcaagtccctcacagccatttctgttcccagaggagccaggcctgcagctggctgctcaggagatggcctcattcctcctgttctcccagtttgctttccacttaagacaaagccttgtctatgtggggggcggggaccggggaaagagggaggctgaaatgtttattctgcttctcccgtgtttcatgccatctcgcgtcccccttcctgcacatgggtgtgaatgcacacacatacgcgtacacacaggacttggtctgctggcctggcctcttctgcccaggtgggttggaacacgtttgctgcctgagcctgtgccactgagcatgttaggtggagcagttggtgtggcacgtgcggggtgttggcaccggaggcatggaaaagcacaggctgtactgccaggctgcgatgcgtgctggcccccgcacaggctcctgtgtgcagggactgattcctcagcacacgaggcttccacaacccagtctgctccatagcactctggcccaccctgtctgcaggtgaaacaggagggctgtttgcctctgccccatccccccgactgtgttcaggagtcccaccttgcatttcagacctgggctggcagtctgttggacttctcttcaggaagaaaaagcatcagggggaaatggaatgcccctgccccaggaacatggcagaagcacaggttctgtacctcagatggactcctgctgggccttcggggtctcagttggcttcccccagattctgattctacagctgcagaatgtatataacgcaataaaagcaaatgtttgaaccagtatgcgggtttacttacaaggaaaccttttttcaccctgatttctaattattttattgaaacaactataaaatgtatggtttctccaggaagatatctgctttttaaaacaacaaacaagaacaacaacacaaaactggtaatgatttggagtaatcatgcgggcatattgagtctgggtagtgtttcgctggtggtagagtggttgagacttcctgggaggactttttccgccttcactcctacagatttaagattctttatttttaggccgggcatggtgactcacctgaggtgaggagttcgagactagcctggccaacatggcaaaaccctgtctctactaaaagtacaaaaattagccaggcgtggtggtgcatgcctataatcccagctactcgggaggctgaggcaggagaatcgcttgaacccaggaggcagaggttgcagtaagccaaggtcacaccactgcactccagcctaggtgacagggcgagactctgtctctcaaaaaaaaaaaaaaaaaaaattctttgagacagggtctctaatatgttgcccaagctgatctcaaactcgtggctcaactgattctcccgcttcaaccttgagtagctgggacgacagatacatgctactgcacccagctaggttaaggttctgtatactctgtctttctaaagcaattccctggaaattttctcaacattggttataactgaatgcttgggaagggaggggcagcccttcaacaggaaaaggggactgcccaaatcttaaatgcacagtcaagattctcttggagctagcaatggttctcaggttagtgagcatttagcttgcctgctgcagaatttgacccagatgggggtgttttttaggtctctcacaaatgagacaagcgaaacaattgtctccttttattctctttggtgcattggtgctggggaaacatgaactagcggcagtgtaactgcagaacatagacccagttctaccaggccaggccagcgttgggaaccaccagacagggctgctttgggctttgcttacagtatttccatgtgtagcctggcgtgtgagaaagtattaggtgaaatgccagtttcatggttcaggtgaaagtctgtgatcattcccctcgtggctcgtccttcacatcacttttgcccttcaaggagttgccgcgtccccgctcagtgccgcctgagccctcagagctcccctgtgcttttctggatggggactggcggggtcacctagcctcaccgtggagccaccgtgcaatgcccatctctgagaggcccacgcggtattcctcgtgccctgtgttagtgctttctgtataagggacagacagaactgggtttttttcctctgtctggttttagagtaaatgtaactaacttttattttccctttatgaaagatagaaattatttttatgtagtttccagactttatacaaaatttttgtaaaatgttctctggaaagttaactacaagaatgtaaatatgcttctaataaaataacaaggttatttgcc

SEQ ID NO: 160969 - DNA, 2962 bp, Artificial Sequence
  derived and/or modified sequence
gggcgggcacgccgccgcctgcgcggttccgggtgctcccggcgcggcgctgcccatggcttttgccaatttccgccgcatcctgcgcctgtctaccttcgagaagagaaagtcccgcgaatatgagcacgtccgccgcgacctggaccccaacgaggtgtgggagatcgtgggcgagctgggcgacggcgccttcggcaaggtttacaaggccaagaataaggagacgggtgctttggctgcggccaaagtcattgaaaccaagagtgaggaggagctggaggactacatcgtggagattgagatcctggccacctgcgaccacccctacattgtgaagctcctgggagcctactatcacgacgggaagctgtggatcatgattgagttctgtccagggggagccgtggacgccatcatgctggagctggacagaggcctcacggagccccagatacaggtggtttgccgccagatgctagaagccctcaacttcctgcacagcaagaggatcatccaccgagatctgaaagctggcaacgtgctgatgaccctcgagggagacatcaggctggctgactttggtgtgtctgccaagaatctgaagactctacagaaacgagattccttcatcggcacgccttactggatggcccccgaggtggtcatgtgtgagaccatgaaagacacgccctacgactacaaagccgacatctggtccctgggcatcacgctgattgagatggcccagatcgagccgccacaccacgagctcaaccccatgcgggtcctgctaaagatcgccaagtcggaccctcccacgctgctcacgccctctaagtggtctgtagagttccgtgacttcctgaagatagccctggataagaacccagaaacccgacccagtgccgcgcagctgctggagcatcccttcgtcagcagcatcaccagtaacaaggctctgcgggagctggtggctgaggccaaggccgaggtgatggaagagatcgaagacggccgggatgagggggaagaggaggacgccgtggatgccgcctccaccctggagaaccatactcagaactcctctgaggtgagtccgccaagcctcaatgctgacaagcctctcgaggagtcaccttccaccccgctggcacccagccagtctcaggacagtgtgaatgagccctgcagccagccctctggggacagatccctccaaaccaccagtcccccagtcgtggcccctggaaatgagaacggcctggcagtgcctgtgcccctgcggaagtcccgacccgtgtcaatggatgccagaattcaggtagcccaggagaagcaagttgctgagcagggtggggacctcagcccagcagccaacagatctcaaaaggccagccagagccggcccaacagcagcgccctggagaccttgggtggggagaagctggccaatggcagcctggagccacctgcccaggcagctccagggccttccaagagggactcggactgcagcagcctctgcacctctgagagcatggactatggtaccaatctctccactgacctgtcgctgaacaaagagatgggctctctgtccatcaaggacccgaaactgtacaaaaaaaccctcaagcggacacgcaaatttgtggtggatggtgtggaggtgagcatcaccacctccaagatcatcagcgaagatgagaagaaggatgaggagatgagatttctcaggcgccaggaactccgagagcttcggctgctccagaaagaagagcatcggaaccagacccagctgagtaacaagcatgagctgcagctggagcaaatgcataaacgttttgaacaggaaatcaacgccaagaagaagttctttgacacggaattagagaacctggagcgtcagcaaaagcagcaagtggagaagatggagcaagaccatgccgtgcgccgccgggaggaggccaggcggatccgcctggagcaggatcgggactacaccaggttccaagagcagctcaaactgatgaagaaagaggtgaagaacgaggtggagaagctcccccgacagcagcggaaggaaagcatgaagcagaagatggaggagcacacgcagaaaaagcagcttcttgaccgggactttgtagccaagcagaaggaggacctggagctggccatgaagaggctcaccaccgacaacaggcgggagatctgtgacaaggagcgcgagtgcctcatgaagaagcaggagctccttcgagaccgggaagcagccctgtgggagatggaagagcaccagctgcaggagaggcaccagctggtgaagcagcagctcaaagaccagtacttcctccagcggcacgagctgctgcgcaagcatgagaaggagcgggagcagatgcagcgctacaaccagcgcatgatagagcagctgaaggtgcggcagcaacaggaaaaggcgcggctgcccaagatccagaggagtgagggcaagacgcgcatggccatgtacaagaagagcctccacatcaacggcgggggcagcgcagctgagcagcgtgagaagatcaagcagttctcccagcaggaggagaagaggcagaagtcggagcggctgcagcaacagcagaaacacgagaaccagatgcgggacatgctggcgcagtgtgagagcaacatgagcgagctgcagcagctgcagaatgaaaagtgccacctcctggtagagcacgaaacccagaaactgaaggccctggatgagagccataaccagaacctgaaggaatggcgggacaagcttcggccgcgcaagaaggctctggaagaggatctgaaccagaagaagcgggagcaggagatgttcttcaagctgagcgaggaggcggagtgcccaaacccctccaccccaagcaaggccgccaagttcttcccctacagttctgcggatgcttcttaa

SEQ ID NO: 160970 - DNA, 2907 bp, Artificial Sequence
  derived and/or modified sequence
atggccttcgccaacttcagaagaatcctgagactgagcaccttcgagaagagaaagagcagagagtacgagcacgtgagaagagacctggaccccaacgaggtgtgggagatcgtgggcgagctgggcgacggcgccttcggcaaggtgtacaaggccaagaacaaggagaccggcgccctggccgccgccaaggtgatcgagaccaagagcgaggaggagctggaggactacatcgtggagatcgagatcctggccacctgcgaccacccctacatcgtgaagctgctgggcgcctactaccacgacggcaagctgtggatcatgatcgagttctgccccggcggcgccgtggacgccatcatgctggagctggacagaggcctgaccgagccccagatccaggtggtgtgcagacagatgctggaggccctgaacttcctgcacagcaagagaatcatccacagagacctgaaggccggcaacgtgctgatgaccctggagggcgacatcagactggccgacttcggcgtgagcgccaagaacctgaagaccctgcagaagagagacagcttcatcggcaccccctactggatggcccccgaggtggtgatgtgcgagaccatgaaggacaccccctacgactacaaggccgacatctggagcctgggcatcaccctgatcgagatggcccagatcgagcccccccaccacgagctgaaccccatgagagtgctgctgaagatcgccaagagcgacccccccaccctgctgacccccagcaagtggagcgtggagttcagagacttcctgaagatcgccctggacaagaaccccgagaccagacccagcgccgcccagctgctggagcaccccttcgtgagcagcatcaccagcaacaaggccctgagagagctggtggccgaggccaaggccgaggtgatggaggagatcgaggacggcagagacgagggcgaggaggaggacgccgtggacgccgccagcaccctggagaaccacacccagaacagcagcgaggtgagcccccccagcctgaacgccgacaagcccctggaggagagccccagcacccccctggcccccagccagagccaggacagcgtgaacgagccctgcagccagcccagcggcgacagaagcctgcagaccaccagcccccccgtggtggcccccggcaacgagaacggcctggccgtgcccgtgcccctgagaaagagcagacccgtgagcatggacgccagaatccaggtggcccaggagaagcaggtggccgagcagggcggcgacctgagccccgccgccaacagaagccagaaggccagccagagcagacccaacagcagcgccctggagaccctgggcggcgagaagctggccaacggcagcctggagccccccgcccaggccgcccccggccccagcaagagagacagcgactgcagcagcctgtgcaccagcgagagcatggactacggcaccaacctgagcaccgacctgagcctgaacaaggagatgggcagcctgagcatcaaggaccccaagctgtacaagaagaccctgaagagaaccagaaagttcgtggtggacggcgtggaggtgagcatcaccaccagcaagatcatcagcgaggacgagaagaaggacgaggagatgagattcctgagaagacaggagctgagagagctgagactgctgcagaaggaggagcacagaaaccagacccagctgagcaacaagcacgagctgcagctggagcagatgcacaagagattcgagcaggagatcaacgccaagaagaagttcttcgacaccgagctggagaacctggagagacagcagaagcagcaggtggagaagatggagcaggaccacgccgtgagaagaagagaggaggccagaagaatcagactggagcaggacagagactacaccagattccaggagcagctgaagctgatgaagaaggaggtgaagaacgaggtggagaagctgcccagacagcagagaaaggagagcatgaagcagaagatggaggagcacacccagaagaagcagctgctggacagagacttcgtggccaagcagaaggaggacctggagctggccatgaagagactgaccaccgacaacagaagagagatctgcgacaaggagagagagtgcctgatgaagaagcaggagctgctgagagacagagaggccgccctgtgggagatggaggagcaccagctgcaggagagacaccagctggtgaagcagcagctgaaggaccagtacttcctgcagagacacgagctgctgagaaagcacgagaaggagagagagcagatgcagagatacaaccagagaatgatcgagcagctgaaggtgagacagcagcaggagaaggccagactgcccaagatccagagaagcgagggcaagaccagaatggccatgtacaagaagagcctgcacatcaacggcggcggcagcgccgccgagcagagagagaagatcaagcagttcagccagcaggaggagaagagacagaagagcgagagactgcagcagcagcagaagcacgagaaccagatgagagacatgctggcccagtgcgagagcaacatgagcgagctgcagcagctgcagaacgagaagtgccacctgctggtggagcacgagacccagaagctgaaggccctggacgagagccacaaccagaacctgaaggagtggagagacaagctgagacccagaaagaaggccctggaggaggacctgaaccagaagaagagagagcaggagatgttcttcaagctgagcgaggaggccgagtgccccaaccccagcacccccagcaaggccgccaagttcttcccctacagcagcgccgacgccagctag

SEQ ID NO: 160971 - protein, 372 aa, Artificial Sequence
  derived and/or modified sequence
MHFSTVTRDMEAFTASSLSSLGAAGGFPGAASPGADPYGPREPPPPPPRYDPCAAAAPGAPGPPPPPHAYPFAPAAGAATSAAAEPEGPGASCAAAAKAPVKKNAKVAGVSVQLEMKALWDEFNQLGTEMIVTKAGRRMFPTFQVKLFGMDPMADYMLLMDFVPVDDKRYRYAFHSSSWLVAGKADPATPGRVHYHPDSPAKGAQWMKQIVSFDKLKLTNNLLDDNGHIILNSMHRYQPRFHVVYVDPRKDSEKYAEENFKTFVFEETRFTAVTAYQNHRITQLKIASNPFAKGFRDCDPEDWPRNHRPGALPLMSAFARSRNPVASPTQPSGTEKGLVTEGSGLQPGLLDVLLKPPSKKSESLRPPHCKDT

SEQ ID NO: 160972 - DNA, 1538 bp, Artificial Sequence
  derived and/or modified sequence
ccggcagggggagcgaggaggaagggaaccgcggccgggccagcggaggcggcggagcgcaccgcccaccagggctcagggtcctccgaccgggtgaagcttcgctggctgccaggatccccggcagggatgcacttcagcaccgtcaccagggacatggaagccttcacggccagcagcctgagcagcctgggggccgcggggggcttcccgggcgccgcgtcgcccggcgccgacccgtacggcccgcgcgagcccccgccgccgccgccgcgctacgacccgtgcgccgccgccgcccccggcgccccgggcccgccgccgccgccgcacgcctacccgtttgcgccggccgccggggccgccaccagcgccgccgccgagcccgagggccccggggccagctgcgcggccgcagccaaggcgccggtgaagaagaacgcgaaggtggccggtgtgagcgtgcagctagagatgaaggcgctgtgggacgagttcaaccagctgggcaccgagatgatcgtcaccaaggccggcaggcggatgtttcccaccttccaagtgaagctcttcggcatggatcccatggccgactatatgctgctcatggacttcgtgccggtggacgataagcgctaccggtacgccttccacagctcctcctggctggtggcggggaaggccgaccctgccacgccaggccgcgtgcactaccacccggactcgcctgccaagggcgcgcagtggatgaagcaaatcgtgtccttcgacaagctcaagctgaccaacaacctactggacgacaacggccacattattctgaattccatgcacagataccagccccgcttccacgtggtctatgtggacccacgcaaagatagcgagaaatatgccgaggagaacttcaaaacctttgtgttcgaggagacacgattcaccgcggtcactgcctaccagaaccatcggatcacgcagctcaagattgccagcaatcccttcgcgaaaggcttccgggactgtgaccctgaggactggccccggaaccaccggcccggcgcactgccgctcatgagcgccttcgcgcgctcgcggaaccccgtggcttccccgacgcagcccagcggcacggagaaagggctggtcacagaaggctctgggctccaacctggcttgctggacgtgctcttgaagcccccaagtaagaagtctgagtccctgagaccaccacactgcaaggacacttgaaggtactcaggtttcagagcccaagtcaggaggtcaagtgtgcatgcaagaggtggcaggggacagatgtgctgctgttcccaggccacctgcacagctggatggtggaagcagttcacttaaaggccatgagttactcgggaggctgaggcaggaggatcacttgagcctattagttggaggctgcagtaagctatgatcatgccactgcactccagcctgggtgacagagtgagacccccactgtccctggtctcttaaaagaaaaaacaaacaaacaaaccaaaaaa

SEQ ID NO: 160973 - DNA, 1119 bp, Artificial Sequence
  derived and/or modified sequence
atgcacttcagcaccgtgaccagagacatggaggccttcaccgccagcagcctgagcagcctgggcgccgccggcggcttccccggcgccgccagccccggcgccgacccctacggccccagagagccccccccccccccccccagatacgacccctgcgccgccgccgcccccggcgcccccggcccccccccccccccccacgcctaccccttcgcccccgccgccggcgccgccaccagcgccgccgccgagcccgagggccccggcgccagctgcgccgccgccgccaaggcccccgtgaagaagaacgccaaggtggccggcgtgagcgtgcagctggagatgaaggccctgtgggacgagttcaaccagctgggcaccgagatgatcgtgaccaaggccggcagaagaatgttccccaccttccaggtgaagctgttcggcatggaccccatggccgactacatgctgctgatggacttcgtgcccgtggacgacaagagatacagatacgccttccacagcagcagctggctggtggccggcaaggccgaccccgccacccccggcagagtgcactaccaccccgacagccccgccaagggcgcccagtggatgaagcagatcgtgagcttcgacaagctgaagctgaccaacaacctgctggacgacaacggccacatcatcctgaacagcatgcacagataccagcccagattccacgtggtgtacgtggaccccagaaaggacagcgagaagtacgccgaggagaacttcaagaccttcgtgttcgaggagaccagattcaccgccgtgaccgcctaccagaaccacagaatcacccagctgaagatcgccagcaaccccttcgccaagggcttcagagactgcgaccccgaggactggcccagaaaccacagacccggcgccctgcccctgatgagcgccttcgccagaagcagaaaccccgtggccagccccacccagcccagcggcaccgagaagggcctggtgaccgagggcagcggcctgcagcccggcctgctggacgtgctgctgaagccccccagcaagaagagcgagagcctgagacccccccactgcaaggacacctag

SEQ ID NO: 160974 - DNA, 1119 bp, Artificial Sequence
  derived and/or modified sequence
atgcatttctcgaccgtcaccagagatatggaggcatttactgcatcaagtctctctagcctgggggccgccggcggatttcccggagcagcctcacctggggcagatccctatggtcccagagagcctccccctcccccacccagatacgatccctgcgccgccgctgcaccaggcgcccctggccctccccctcccccccacgcttatcccttcgccccagccgccggcgccgccacgagtgctgccgcggagcccgagggaccaggtgcttcctgtgccgctgccgcaaaggcccctgttaaaaaaaacgcgaaggtagcaggggtgtccgtgcagctggagatgaaagcactttgggatgagttcaaccagttggggaccgagatgatagtgacgaaagccgggagacgcatgttcccaaccttccaggtcaagcttttcggcatggaccctatggcagattacatgctgctgatggactttgtccccgtggatgacaaacgataccgctacgctttccactcgagttcttggctggtagctggtaaagccgatccagcaacgcctggacgggtgcactatcaccccgattcccctgctaagggcgcgcagtggatgaagcagatcgtgagttttgacaagctcaagctcaccaataatttgctggatgataatggtcacatcatcctcaacagcatgcaccggtaccaacctaggttccacgtagtctatgttgatcctcggaaagactctgaaaagtacgccgaggagaacttcaaaacatttgtgtttgaggaaacacggtttaccgcagtcaccgcttaccaaaaccatagaattactcagcttaagatcgcttctaatccttttgcaaaagggtttcgggactgcgaccctgaagattggcccaggaaccataggccgggggcccttcctctgatgagtgccttcgcccggtctagaaacccagttgcaagccccacacagcctagtggcaccgaaaagggcctggtgaccgagggatccggccttcagccgggcttactggacgttttgcttaaacccccaagtaagaaatccgagtcgcttcggccaccgcactgtaaggatacctag

SEQ ID NO: 160975 - DNA, 1119 bp, Artificial Sequence
  derived and/or modified sequence
atgcacttcagcacagtgacccgggacatggaggccttcaccgccagcagcctgagcagcctgggcgccgccggcggcttccctggggccgccagccctggagctgacccctacggcccccgggagcccccacctcctccacccaggtatgacccctgtgccgccgccgcccctggggcccctggccccccacctccaccccacgcctacccctttgccccagctgctggggccgccaccagcgctgctgctgagcctgagggccctggggccagctgtgccgccgccgccaaggcccctgtgaagaagaatgccaaggtggccggcgtgtctgtgcagctggagatgaaggccctgtgggatgagttcaaccagctgggcacagagatgattgtgaccaaggccggccgcaggatgttccccaccttccaggtgaagctgtttggcatggaccccatggctgactacatgctgctgatggactttgtgcctgtggatgacaagcgctaccgctatgccttccacagcagctcctggctggtggccggcaaggctgaccctgccaccccaggccgggtgcactaccacccagacagccctgccaagggggcccagtggatgaagcagatcgtgtcctttgacaagctgaagctgaccaacaacctgctggatgacaatggccacatcatcctgaacagcatgcaccgctaccagccccgcttccacgtggtgtatgtggaccccaggaaggacagcgagaagtatgcagaggagaacttcaagacctttgtgtttgaggagacccgcttcaccgctgtgacagcctaccagaaccaccgcatcacccagctgaagatcgccagcaacccctttgccaagggcttccgggactgtgaccctgaggactggcccaggaaccacaggcctggggccctgcccctgatgtctgcctttgcccggagcaggaaccctgtggccagccccacccagcccagcggcacagagaagggcctggtgacagagggcagcggcctgcagcccggcctgctggatgtgctgctgaagccacccagcaagaagtctgagagcctgcggcccccccactgcaaggacacctag

SEQ ID NO: 160976 - DNA, 1119 bp, Artificial Sequence
  derived and/or modified sequence
atgcacttcagcaccgtgacccgggacatggaggccttcaccgccagtagcttgagctcacttggagccgccggaggattccctggagcagcgagtccaggcgcagatccatacggaccccgtgagcctccacccccgccgccccgctacgacccatgtgcagccgcagcgcccggggcacccgggccacctcccccgcctcatgcctatcccttcgcaccagcagctggggcagctacatcagctgccgcagagccggaaggaccaggagcaagctgtgctgccgccgcaaaggcccccgtcaagaagaacgccaaagtcgcgggcgtcagcgtgcaactggagatgaaggctctgtgggacgagttcaaccagctaggaaccgaaatgatcgtaaccaaggcaggaagaagaatgttccctaccttccaagtgaaactgtttggaatggatcccatggcagattatatgcttttaatggactttgtgccagttgatgataaacgctaccggtatgcctttcactccagctcttggttagtcgcaggtaaagccgaccccgcaactccgggccgtgtccactatcaccccgactcacccgctaagggagcccagtggatgaaacagattgtatccttcgataaattgaaactgactaataatttgctggatgacaacggccacataatcttgaattctatgcaccgataccagcctcgctttcatgtcgtttacgtggacccacggaaagatagcgagaagtatgccgaggagaactttaagaccttcgtgtttgaggaaacacgttttacggcagtaaccgcatatcaaaaccacaggattacacagcttaagatcgccagtaaccctttcgctaagggtttcagagactgcgaccctgaagattggccacggaaccaccggccaggagccctgcccctcatgagtgccttcgcacgctctaggaatccagtagcatccccaacacagccctcaggcactgaaaagggcctggttacagaaggatctggtcttcagccaggactgctggatgtgctattgaagccaccctctaaaaaaagcgagagtttaagacctccgcactgtaaagacacgtag

SEQ ID NO: 160977 - DNA, 1119 bp, Artificial Sequence
  derived and/or modified sequence
atgcatttcagtacagtcacaagagacatggaggcattcaccgcttcaagcctgtcctctttgggcgcagcaggaggctttcccggagctgcttccccaggcgctgacccctatgggccacgagagcccccaccacctcccccacgatacgatccatgcgccgcagcagctccaggcgctccaggacctcccccacctcctcacgcgtatccctttgcacccgcagccggagcagctacctcagccgctgccgagcccgaaggacctggcgcttcttgcgccgctgccgcaaaagcgcctgttaaaaaaaacgctaaagtggccggagtctcagtgcagttggagatgaaagccttatgggacgaattcaaccagttaggaacagagatgattgtcactaaagccggaagacggatgttcccaacatttcaggtgaagctattcgggatggatcctatggccgattacatgctgttgatggatttcgttcctgtggatgacaagcgatacagatacgcgttccactcctcttcctggttggtggctggcaaggcagatcctgcaactcctggacgtgtccactaccatccagacagccctgcgaagggtgctcagtggatgaaacaaatcgtcagtttcgacaagctgaagctgacaaataatttgcttgatgataatggccacataatcctaaattctatgcatagataccagccgagattccatgtcgtgtacgttgacccacgcaaggattctgagaagtacgcagaggaaaacttcaagacattcgtgtttgaagagaccagatttaccgccgttactgcttaccagaatcatagaataacccagcttaagatcgcgtccaatccctttgcaaaggggttccgggactgtgacccggaggattggccacggaaccacagaccgggagccctgcctctgatgtccgcttttgccaggtccaggaaccctgttgcctcgcccactcagccaagtggcaccgaaaagggcctggtaaccgagggaagcggactacagccaggactgctcgacgttcttctgaagcccccatccaagaaatccgaaagcctgcgtccaccgcactgcaaggatacatag

SEQ ID NO: 160978 - protein, 998 aa, Artificial Sequence
  derived and/or modified sequence
MDGTLQALAQIFKHGKREDCLPYAATVLRCLDGCRLPESNQTLLRKLGVKLVQRLGLTFLKPKVAAWRYQRGCRSLAANLQLLTQGQSEQKPLILTEDDDEDDDVPEGVERVIEQLLVGLKDKDTVVRWSAAKGIGRMAGRLPRALADDVVGSVLDCFSFQETDKAWHGGCLALAELGRRGLLLPSRLVDVVAVILKALTYDEKRGACSVGTNVRDAACYVCWAFARAYEPQELKPFVTAISSALVIAAVFDRDINCRRAASAAFQENVGRQGTFPHGIDILTTADYFAVGNRSNCFLVISVFIAGFPEYTQPMIDHLVTMKISHWDGVIRELAARALHNLAQQAPEFSATQVFPRLLSMTLSPDLHMRHGSILACAEVAYALYKLAAQENRPVTDHLDEQAVQGLKQIHQQLYDRQLYRGLGGQLMRQAVCVLIEKLSLSKMPFRGDTVIDGWQWLINDTLRHLHLISSHSRQQMKDAAVSALAALCSEYYMKEPGEADPAIQEELITQYLAELRNPEEMTRCGFSLALGALPGFLLKGRLQQVLTGLRAVTHTSPEDVSFAESRRDGLKAIARICQTVGVKAGAPDEAVCGENVSQIYCALLGCMDDYTTDSRGDVGTWVRKAAMTSLMDLTLLLARSQPELIEAHTCERIMCCVAQQASEKIDRFRAHAASVFLTLLHFDSPPIPHVPHRGELEKLFPRSDVASVNWSAPSQAFPRITQLLGLPTYRYHVLLGLVVSLGGLTESTIRHSTQSLFEYMKGIQSDPQALGSFSGTLLQIFEDNLLNERVSVPLLKTLDHVLTHGCFDIFTTEEDHPFAVKLLALCKKEIKNSKDIQKLLSGIAVDFPSATLVCVGTVQMYAHTHLRLGAPGPHCAHGSALPRFCEMVQFPGDVRRQALLQLCLLLCHRFPLIRKTTASQVYETLLTYSDVVGADVLDEVVTVLSDTAWDAELAVVREQRNRLCDLLGVPPSWCPTWCLLKPVLEPIPHPCLVRMSCS

SEQ ID NO: 160979 - protein, 1192 aa, Artificial Sequence
  derived and/or modified sequence
MALSDEPAAGGPEEEAEDETLAFGAALEAFGESAETRALLGRLREVHGGGAEREVALERFRVIMDKYQEQPHLLDPHLEWMMNLLLDIVQDQTSPASLVHLAFKFLYIITKVRGYKTFLRLFPHEVADVEPVLDLVTIQNPKDHEAWETRYMLLLWLSVTCLIPFDFSRLDGNLLTQPGQARMSIMDRILQIAESYLIVSDKARDAAAVLVSRFITRPDVKQSKMAEFLDWSLCNLARSSFQTMQGVITMDGTLQALAQIFKHGKREDCLPYAATVLRCLDGCRLPESNQTLLRKLGVKLVQRLGLTFLKPKVAAWRYQRGCRSLAANLQLLTQGQSEQKPLILTEDDDEDDDVPEGVERVIEQLLVGLKDKDTVVRWSAAKGIGRMAGRLPRALADDVVGSVLDCFSFQETDKAWHGGCLALAELGRRGLLLPSRLVDVVAVILKALTYDEKRGACSVGTNVRDAACYVCWAFARAYEPQELKPFVTAISSALVIAAVFDRDINCRRAASAAFQENVGRQGTFPHGIDILTTADYFAVGNRSNCFLVISVFIAGFPEYTQPMIDHLVTMKISHWDGVIRELAARALHNLAQQAPEFSATQVFPRLLSMTLSPDLHMRHGSILACAEVAYALYKLAAQENRPVTDHLDEQAVQGLKQIHQQLYDRQLYRGLGGQLMRQAVCVLIEKLSLSKMPFRGDTVIDGWQWLINDTLRHLHLISSHSRQQMKDAAVSALAALCSEYYMKEPGEADPAIQEELITQYLAELRNPEEMTRCGFSLALGALPGFLLKGRLQQVLTGLRAVTHTSPEDVSFAESRRDGLKAIARICQTVGVKAGAPDEAVCGENVSQIYCALLGCMDDYTTDSRGDVGTWVRKAAMTSLMDLTLLLARSQPELIEAHTCERIMCCVAQQASEKIDRFRAHAASVFLTLLHFDSPPIPHVPHRGELEKLFPRSDVASVNWSAPSQAFPRITQLLGLPTYRYHVLLGLVVSLGGLTESTIRHSTQSLFEYMKGIQSDPQALGSFSGTLLQIFEDNLLNERVSVPLLKTLDHVLTHGCFDIFTTEEDHPFAVKLLALCKKEIKNSKDIQKLLSGIAVFCEMVQFPGDVRRQALLQLCLLLCHRFPLIRKTTASQVYETLLTYSDVVGADVLDEVVTVLSDTAWDAELAVVREQRNRLCDLLGVPRPQLVPQPGAC

SEQ ID NO: 160980 - protein, 750 aa, Artificial Sequence
  derived and/or modified sequence
MALSDEPAAGGPEEEAEDETLAFGAALEAFGESAETRALLGRLREVHGGGAEREVALERFRVIMDKYQEQPHLLDPHLEWMMNLLLDIVQDQTSPASLVHLAFKFLYIITKVRGYKTFLRLFPHEVADVEPVLDLVTIQNPKDHEAWETRYMLLLWLSVTCLIPFDFSRLDGNLLTQPGQARMSIMDRILQIAESYLIVSDKARDAAAVLVSRFITRPDVKQSKMAEFLDWSLCNLARSSFQTMQGVITMDGTLQALAQIFKHGKREDCLPYAATVLRCLDGCRLPESNQTLLRKLGVKLVQRLGLTFLKPKVAAWRYQRGCRSLAANLQLLTQGQSEQKPLILTEDDDEDDDVPEGVERVIEQLLVGLKDKDTVVRWSAAKGIGRMAGRLPRALADDVVGSVLDCFSFQETDKAWHGGCLALAELGRRGLLLPSRLVDVVAVILKALTYDEKRGACSVGTNVRDAACYVCWAFARAYEPQELKPFVTAISSALVIAAVFDRDINCRRAASAAFQENVGRQGTFPHGIDILTTADYFAVGNRSNCFLVISVFIAGFPEYTQPMIDHLVTMKISHWDGVIRELAARALHNLAQQAPEFSATQVFPRLLSMTLSPDLHMRHGSILACAEVAYALYKLAAQENRPVTDHLDEQAVQGLKQIHQQLYDRQLYRGLGGQLMRQAVCVLIEKLSLSKMPFRGDTVIDGWQWLINDSLWLLVGLGRPSRLPSERPAPAGSHRFKSSYPHFPRGRKFC

SEQ ID NO: 160981 - DNA, 2997 bp, Artificial Sequence
  derived and/or modified sequence
atggacggcaccctgcaggccctggcccagatcttcaagcacggcaagagagaggactgcctgccctacgccgccaccgtgctgagatgcctggacggctgcagactgcccgagagcaaccagaccctgctgagaaagctgggcgtgaagctggtgcagagactgggcctgaccttcctgaagcccaaggtggccgcctggagataccagagaggctgcagaagcctggccgccaacctgcagctgctgacccagggccagagcgagcagaagcccctgatcctgaccgaggacgacgacgaggacgacgacgtgcccgagggcgtggagagagtgatcgagcagctgctggtgggcctgaaggacaaggacaccgtggtgagatggagcgccgccaagggcatcggcagaatggccggcagactgcccagagccctggccgacgacgtggtgggcagcgtgctggactgcttcagcttccaggagaccgacaaggcctggcacggcggctgcctggccctggccgagctgggcagaagaggcctgctgctgcccagcagactggtggacgtggtggccgtgatcctgaaggccctgacctacgacgagaagagaggcgcctgcagcgtgggcaccaacgtgagagacgccgcctgctacgtgtgctgggccttcgccagagcctacgagccccaggagctgaagcccttcgtgaccgccatcagcagcgccctggtgatcgccgccgtgttcgacagagacatcaactgcagaagagccgccagcgccgccttccaggagaacgtgggcagacagggcaccttcccccacggcatcgacatcctgaccaccgccgactacttcgccgtgggcaacagaagcaactgcttcctggtgatcagcgtgttcatcgccggcttccccgagtacacccagcccatgatcgaccacctggtgaccatgaagatcagccactgggacggcgtgatcagagagctggccgccagagccctgcacaacctggcccagcaggcccccgagttcagcgccacccaggtgttccccagactgctgagcatgaccctgagccccgacctgcacatgagacacggcagcatcctggcctgcgccgaggtggcctacgccctgtacaagctggccgcccaggagaacagacccgtgaccgaccacctggacgagcaggccgtgcagggcctgaagcagatccaccagcagctgtacgacagacagctgtacagaggcctgggcggccagctgatgagacaggccgtgtgcgtgctgatcgagaagctgagcctgagcaagatgcccttcagaggcgacaccgtgatcgacggctggcagtggctgatcaacgacaccctgagacacctgcacctgatcagcagccacagcagacagcagatgaaggacgccgccgtgagcgccctggccgccctgtgcagcgagtactacatgaaggagcccggcgaggccgaccccgccatccaggaggagctgatcacccagtacctggccgagctgagaaaccccgaggagatgaccagatgcggcttcagcctggccctgggcgccctgcccggcttcctgctgaagggcagactgcagcaggtgctgaccggcctgagagccgtgacccacaccagccccgaggacgtgagcttcgccgagagcagaagagacggcctgaaggccatcgccagaatctgccagaccgtgggcgtgaaggccggcgcccccgacgaggccgtgtgcggcgagaacgtgagccagatctactgcgccctgctgggctgcatggacgactacaccaccgacagcagaggcgacgtgggcacctgggtgagaaaggccgccatgaccagcctgatggacctgaccctgctgctggccagaagccagcccgagctgatcgaggcccacacctgcgagagaatcatgtgctgcgtggcccagcaggccagcgagaagatcgacagattcagagcccacgccgccagcgtgttcctgaccctgctgcacttcgacagcccccccatcccccacgtgccccacagaggcgagctggagaagctgttccccagaagcgacgtggccagcgtgaactggagcgcccccagccaggccttccccagaatcacccagctgctgggcctgcccacctacagataccacgtgctgctgggcctggtggtgagcctgggcggcctgaccgagagcaccatcagacacagcacccagagcctgttcgagtacatgaagggcatccagagcgacccccaggccctgggcagcttcagcggcaccctgctgcagatcttcgaggacaacctgctgaacgagagagtgagcgtgcccctgctgaagaccctggaccacgtgctgacccacggctgcttcgacatcttcaccaccgaggaggaccaccccttcgccgtgaagctgctggccctgtgcaagaaggagatcaagaacagcaaggacatccagaagctgctgagcggcatcgccgtggacttccccagcgccaccctggtgtgcgtgggcaccgtgcagatgtacgcccacacccacctgagactgggcgcccccggcccccactgcgcccacggcagcgccctgcccagattctgcgagatggtgcagttccccggcgacgtgagaagacaggccctgctgcagctgtgcctgctgctgtgccacagattccccctgatcagaaagaccaccgccagccaggtgtacgagaccctgctgacctacagcgacgtggtgggcgccgacgtgctggacgaggtggtgaccgtgctgagcgacaccgcctgggacgccgagctggccgtggtgagagagcagagaaacagactgtgcgacctgctgggcgtgccccccagctggtgccccacctggtgcctgctgaagcccgtgctggagcccatcccccacccctgcctggtgagaatgagctgcagctag

SEQ ID NO: 160982 - DNA, 3579 bp, Artificial Sequence
  derived and/or modified sequence
atggccctgagcgacgagcccgccgccggcggccccgaggaggaggccgaggacgagaccctggccttcggcgccgccctggaggccttcggcgagagcgccgagaccagagccctgctgggcagactgagagaggtgcacggcggcggcgccgagagagaggtggccctggagagattcagagtgatcatggacaagtaccaggagcagccccacctgctggacccccacctggagtggatgatgaacctgctgctggacatcgtgcaggaccagaccagccccgccagcctggtgcacctggccttcaagttcctgtacatcatcaccaaggtgagaggctacaagaccttcctgagactgttcccccacgaggtggccgacgtggagcccgtgctggacctggtgaccatccagaaccccaaggaccacgaggcctgggagaccagatacatgctgctgctgtggctgagcgtgacctgcctgatccccttcgacttcagcagactggacggcaacctgctgacccagcccggccaggccagaatgagcatcatggacagaatcctgcagatcgccgagagctacctgatcgtgagcgacaaggccagagacgccgccgccgtgctggtgagcagattcatcaccagacccgacgtgaagcagagcaagatggccgagttcctggactggagcctgtgcaacctggccagaagcagcttccagaccatgcagggcgtgatcaccatggacggcaccctgcaggccctggcccagatcttcaagcacggcaagagagaggactgcctgccctacgccgccaccgtgctgagatgcctggacggctgcagactgcccgagagcaaccagaccctgctgagaaagctgggcgtgaagctggtgcagagactgggcctgaccttcctgaagcccaaggtggccgcctggagataccagagaggctgcagaagcctggccgccaacctgcagctgctgacccagggccagagcgagcagaagcccctgatcctgaccgaggacgacgacgaggacgacgacgtgcccgagggcgtggagagagtgatcgagcagctgctggtgggcctgaaggacaaggacaccgtggtgagatggagcgccgccaagggcatcggcagaatggccggcagactgcccagagccctggccgacgacgtggtgggcagcgtgctggactgcttcagcttccaggagaccgacaaggcctggcacggcggctgcctggccctggccgagctgggcagaagaggcctgctgctgcccagcagactggtggacgtggtggccgtgatcctgaaggccctgacctacgacgagaagagaggcgcctgcagcgtgggcaccaacgtgagagacgccgcctgctacgtgtgctgggccttcgccagagcctacgagccccaggagctgaagcccttcgtgaccgccatcagcagcgccctggtgatcgccgccgtgttcgacagagacatcaactgcagaagagccgccagcgccgccttccaggagaacgtgggcagacagggcaccttcccccacggcatcgacatcctgaccaccgccgactacttcgccgtgggcaacagaagcaactgcttcctggtgatcagcgtgttcatcgccggcttccccgagtacacccagcccatgatcgaccacctggtgaccatgaagatcagccactgggacggcgtgatcagagagctggccgccagagccctgcacaacctggcccagcaggcccccgagttcagcgccacccaggtgttccccagactgctgagcatgaccctgagccccgacctgcacatgagacacggcagcatcctggcctgcgccgaggtggcctacgccctgtacaagctggccgcccaggagaacagacccgtgaccgaccacctggacgagcaggccgtgcagggcctgaagcagatccaccagcagctgtacgacagacagctgtacagaggcctgggcggccagctgatgagacaggccgtgtgcgtgctgatcgagaagctgagcctgagcaagatgcccttcagaggcgacaccgtgatcgacggctggcagtggctgatcaacgacaccctgagacacctgcacctgatcagcagccacagcagacagcagatgaaggacgccgccgtgagcgccctggccgccctgtgcagcgagtactacatgaaggagcccggcgaggccgaccccgccatccaggaggagctgatcacccagtacctggccgagctgagaaaccccgaggagatgaccagatgcggcttcagcctggccctgggcgccctgcccggcttcctgctgaagggcagactgcagcaggtgctgaccggcctgagagccgtgacccacaccagccccgaggacgtgagcttcgccgagagcagaagagacggcctgaaggccatcgccagaatctgccagaccgtgggcgtgaaggccggcgcccccgacgaggccgtgtgcggcgagaacgtgagccagatctactgcgccctgctgggctgcatggacgactacaccaccgacagcagaggcgacgtgggcacctgggtgagaaaggccgccatgaccagcctgatggacctgaccctgctgctggccagaagccagcccgagctgatcgaggcccacacctgcgagagaatcatgtgctgcgtggcccagcaggccagcgagaagatcgacagattcagagcccacgccgccagcgtgttcctgaccctgctgcacttcgacagcccccccatcccccacgtgccccacagaggcgagctggagaagctgttccccagaagcgacgtggccagcgtgaactggagcgcccccagccaggccttccccagaatcacccagctgctgggcctgcccacctacagataccacgtgctgctgggcctggtggtgagcctgggcggcctgaccgagagcaccatcagacacagcacccagagcctgttcgagtacatgaagggcatccagagcgacccccaggccctgggcagcttcagcggcaccctgctgcagatcttcgaggacaacctgctgaacgagagagtgagcgtgcccctgctgaagaccctggaccacgtgctgacccacggctgcttcgacatcttcaccaccgaggaggaccaccccttcgccgtgaagctgctggccctgtgcaagaaggagatcaagaacagcaaggacatccagaagctgctgagcggcatcgccgtgttctgcgagatggtgcagttccccggcgacgtgagaagacaggccctgctgcagctgtgcctgctgctgtgccacagattccccctgatcagaaagaccaccgccagccaggtgtacgagaccctgctgacctacagcgacgtggtgggcgccgacgtgctggacgaggtggtgaccgtgctgagcgacaccgcctgggacgccgagctggccgtggtgagagagcagagaaacagactgtgcgacctgctgggcgtgcccagaccccagctggtgccccagcccggcgcctgctag

SEQ ID NO: 160983 - DNA, 2997 bp, Artificial Sequence
  derived and/or modified sequence
atggacggaacactccaagcactggctcagatctttaagcacgggaagcgcgaggactgtcttccatatgccgcaacagtgttacgctgtctggatggttgcaggctgcccgaatccaaccagaccctcttaaggaagctgggcgtgaagctcgtgcaacggttaggactgacttttctcaaacccaaggtcgccgcgtggcggtatcagaggggatgccgtagcctagccgctaacctccagctactaacccagggccaatctgaacagaagccgctgatcctgaccgaggacgatgatgaggatgacgacgtaccggagggggtagaacgtgttatcgagcagctcctggttggcctgaaggacaaggacacagttgtccgatggtccgcagctaagggcatcgggagaatggccggaaggcttccaagggccctggcagacgatgtggttggtagtgtgttagactgttttagcttccaggagaccgacaaggcctggcatggcggctgcttggccttagccgagctcggcaggaggggcctgttgttgccaagcaggctggtagacgttgtggcagtaattctgaaggcactaacttatgatgagaaaagaggagcctgctccgtaggaacgaatgtccgagacgcggcttgttacgtgtgttgggccttcgcccgggcttacgagccccaggagcttaaaccttttgtgactgccattagctctgccctagtcattgcagctgtgtttgaccgcgatattaactgtcgcagagcagcctctgctgccttccaggaaaacgtgggtcgacagggaactttcccacacggtatcgatatcttgaccaccgcggactatttcgcagtcggtaaccgatccaactgctttctggtgatatccgtttttatcgcagggttccccgagtacacacagccgatgattgatcatttggtcaccatgaaaatttctcattgggacggagtcatccgtgaactggctgctcgtgctctccataacctcgcacaacaggcgcctgagttttcggctacacaggtgttcccgaggctcctctcaatgaccttgtcacctgacctgcatatgagacacgggtctattctggcatgtgcggaagtggcttacgccctgtacaaactggccgctcaggagaaccgccccgtcactgaccaccttgacgagcaggccgttcagggcctgaagcagattcatcagcagctctacgaccgacaattataccgtgggctgggcggccaactgatgagacaagccgtctgtgtgcttatcgaaaagctcagcctgtccaagatgccatttcgcggagacacggtgattgatggttggcagtggttgattaatgataccctgcggcaccttcacctgatctcatcacacagccggcaacagatgaaggacgccgccgtgagcgccctagccgctctctgctccgaatattatatgaaggaaccaggcgaagccgaccccgccattcaagaggaactgatcacacagtatctagccgagctccgcaatccagaggagatgacccgatgcggtttttctctcgctctgggggctttgcctggattcctgttgaagggcaggctgcagcaagtgcttaccggactgcgtgcagttactcacacctcacctgaggacgttagtttcgcggagagcaggcgagacggattaaaggccatcgctcggatttgccagacagtcggagtgaaggccggggcacctgatgaggccgtctgcggcgaaaacgtttcccaaatttactgcgctctactcgggtgtatggacgattatacgacagactcacgcggggacgtggggacttgggtaaggaaggccgcaatgacttctttgatggacttaaccctgctgctcgcacggtcacaacccgaattgattgaagcccatacctgtgaacgcataatgtgctgcgttgcccaacaggcatctgaaaaaatcgatcgctttagggctcacgctgccagtgtgttcctcacgctcctgcactttgactcacccccaataccacacgttcctcaccgaggtgagctggagaaactctttcccaggagtgacgtcgcaagcgtgaactggagtgccccttctcaggccttccctaggattacgcaacttctgggcctgcctacctacagataccatgtgctcctgggactggtggtgtccctaggaggcttaaccgagtctacgatccgacattctacccagagccttttcgagtacatgaagggcatacagtctgatccgcaggcactaggctccttttctggcacgcttcttcagattttcgaggataatttactgaatgagcgggtatctgtgcccctgctgaagacccttgatcatgtgttgacacacggatgtttcgatatcttcacaaccgaggaagaccacccgttcgccgtgaaacttctagctctgtgtaagaaagagatcaaaaactcaaaagatatccaaaagctgctgagcggaattgccgtcgacttccccagcgccactttggtttgcgtcggaaccgtgcagatgtatgctcatacccacctccgtctgggggcgcccggaccccactgcgcccatggctctgcgctgccacgtttttgcgagatggtgcagttccccggcgacgttaggcgtcaggcattgctacaactttgtttgctcctctgccatagattccctctaattagaaagactacagccagccaggtctacgagacactgcttacttactctgacgtggtaggcgccgatgtccttgacgaagtggttaccgtgctgtccgacactgcgtgggatgccgagctagcggtcgtccgcgagcagcggaaccggctgtgcgatctactgggcgttccaccatcttggtgtcctacatggtgccttctcaagccagtgttggagcccattcctcacccctgccttgtacgaatgagctgttcttag

SEQ ID NO: 160984 - DNA, 3579 bp, Artificial Sequence
  derived and/or modified sequence
atggccctatccgatgagcctgcagcaggcggccctgaagaagaggccgaggacgaaaccctggcctttggcgcggcgttagaagcttttggtgaatccgcagagacccgggccttgttggggagacttcgcgaggtccacgggggtggagctgagcgcgaggttgcactcgagagatttcgcgttatcatggataaatatcaggaacagccccacctcttggaccctcatctcgaatggatgatgaatttactacttgatattgtgcaggaccagacttctcctgcctccctggtgcatctagccttcaaatttctctacatcatcacgaaagtccggggctacaagactttcctgaggctcttccctcacgaagtcgccgatgtcgaacctgtgctggacctcgtgacaatccagaatcctaaggaccacgaggcctgggagaccagatatatgttgcttctgtggttgtccgtgacctgcctgattcccttcgatttttccagattggacggcaatctcctcactcagccagggcaagcccgcatgagcataatggatagaattctacaaatcgcagaatcctatcttattgtgagcgacaaggcacgcgatgcagcagctgtcctcgtaagcaggttcattaccaggcccgatgtgaaacaatcaaaaatggctgaatttttagattggtcactctgcaatctggccagatcaagcttccagacaatgcaaggggtaataacaatggatgggaccctgcaggcactggctcagatctttaaacatggtaaacgtgaggattgtctaccttacgctgctacagtgctgcggtgtctcgacgggtgccgtctaccagagagtaaccagacgctcctaagaaagttaggtgttaaactagtccagagactcggcctgacgtttctgaaaccaaaggtggctgcttggcgctaccagcgaggttgtcggtccttggcggcaaacttgcagcttctgacccagggccagtccgaacaaaagcccctgatcctcaccgaagatgacgatgaggatgacgacgtccccgagggcgtcgaaagggtcattgaacagcttctggtcggcttaaaggacaaagacaccgttgtgagatggtctgccgctaagggaattggccgcatggccggccggcttccaagagccctggcagacgacgtcgtcggttcggtattggattgcttctcctttcaggaaacagacaaagcctggcacggcggttgtttagcccttgccgaactggggagacgcggactcctcctgccatctagactcgtcgacgtcgttgcagtgattctgaaagctctgacttacgacgaaaaacggggtgcatgttctgtgggcacaaatgtcagagacgccgcctgttacgtgtgttgggcctttgcacgcgcttacgaacctcaggaattgaaaccatttgtcaccgccataagcagcgcgctggtgatagccgctgtttttgatcgtgatattaattgtcgccgggccgcttctgctgcctttcaggagaatgtggggcggcaaggcacgtttccgcacggtattgatatcctgactactgcagactattttgccgtcggaaatcggtccaattgttttttggtgatctctgtgtttatcgctggatttcctgagtacacgcagcctatgattgatcatctggtgaccatgaagatctcccactgggatggcgtgatcagagagttggcagcccgggctttgcacaacctggcacaacaagctcccgaattctccgccacgcaagttttcccaaggttgctctcaatgaccttgtctcccgatctacacatgcgtcacgggagtatccttgcgtgtgccgaggtggcctatgcactgtacaagttggctgctcaggagaaccgccccgtgaccgatcacctggatgagcaggccgtccagggcctgaagcaaatacaccagcagctgtatgaccgccagctttatagaggcctgggcgggcagcttatgcggcaggccgtatgcgtgctcatagaaaagctcagcctgtctaagatgccattccggggagataccgtcattgacggatggcagtggttgataaatgatacactgcgccacctccacctcatctcaagccattccaggcagcagatgaaggatgcggccgtgagcgccctggcagccctgtgtagtgagtactatatgaaggaacccggcgaggccgaccctgcaattcaggaggagctgataactcagtatctggctgaactgcggaatccggaagaaatgacacggtgtggcttttcactggccctgggcgctctgcccggattcctgctgaagggccgattacaacaggtacttactgggcttagggcagtgacccatacatcacccgaggacgtgagctttgctgaaagcagaagggacggactcaaggcaatcgcaagaatttgtcaaacagtcggggtgaaagccggagcacccgacgaggcagtgtgtggtgagaacgtgagccagatttactgcgcactcctggggtgtatggatgactatacaactgattctaggggagacgtggggacctgggtacggaaagccgcgatgacatccctgatggatcttaccctactactagccaggagccaaccagagctaatcgaggcccacacatgcgagaggatcatgtgctgtgtcgctcagcaggcatctgagaaaatagacagattcagagcgcacgcagcgagtgtgtttctaacactactccactttgatagtccccccatcccccacgtgcctcataggggcgagctggagaagctgttcccacggagtgacgtagcatctgtcaattggagtgctcccagccaggcatttccgagaataacacagttgctaggactgcctacatacagataccatgtgttattgggactggtggtgagtctgggcgggctgactgagtccacgatacgccactcgacccagtcccttttcgagtatatgaaagggatacagagtgacccccaggccctgggaagtttcagcggcaccttgctccaaatattcgaggacaacttgttgaatgagagggtttcagtgccactgttaaagaccttggaccacgtcctgacacacggatgcttcgatatcttcactacagaggaggatcatcccttcgccgtaaaactgctggctctgtgcaaaaaggagatcaaaaattccaaggatatccagaaactactaagcggcatcgctgttttctgtgaaatggtccaattcccaggagacgtaaggagacaagcactactgcaactttgcttactcctgtgtcacaggtttcccctgatacgaaaaaccaccgctagtcaagtatatgagaccttgctgacctacagcgatgtcgtcggcgccgacgtcctcgatgaggtagtaacggtgctgtctgacaccgcttgggacgccgaactcgctgtagttcgcgagcaacgcaacaggctttgtgatttgttaggggtgcctaggccccaactggtcccccaacccggagcgtgttag

SEQ ID NO: 160985 - DNA, 2997 bp, Artificial Sequence
  derived and/or modified sequence
atggatggcaccctgcaggccctggcccagatcttcaagcacggcaagcgggaggactgcctgccctatgctgccaccgtgctgcgctgcctggatggctgccgcctgcctgagagcaaccagaccctgctgaggaagctgggcgtgaagctggtgcagaggctgggcctgaccttcctgaagcccaaggtggccgcctggagataccagaggggctgccgcagcctggccgccaacctgcagctgctgacccagggccagagcgagcagaagcccctcatcctgacagaagatgatgatgaagatgatgatgtgcctgagggcgtggagcgggtgattgagcagctgctggtgggcctgaaggacaaggacacagtggtgcgctggagcgctgccaagggcattggaaggatggccggccgcctgccccgggccctggctgatgatgtggtgggctctgtgctggactgcttctccttccaggagacagacaaggcctggcacggcggctgcctggccctggccgagctgggcagaagaggcctgctgctgcccagccggctggtggatgtggtggccgtcatcctgaaggccctgacctatgatgagaagagaggagcctgcagcgtgggcaccaacgtgagagatgctgcctgctacgtgtgctgggcctttgcccgggcctatgagccccaggagctgaagccctttgtgacagccatcagcagcgccctggtgattgctgctgtgtttgaccgggacatcaactgccggcgggccgccagcgctgccttccaggagaatgtgggccggcagggcaccttcccccatggaattgacatcctgaccacagctgactactttgctgtgggcaacagaagcaactgcttcctggtgatctctgtgttcatcgccggcttccctgagtacacccagcccatgattgaccacctggtgaccatgaagatcagccactgggatggagtcatccgggagctggccgcccgggccctgcacaacctggcccagcaggcccctgagttcagcgccacccaggtgttcccccggctgctgtccatgaccctgagcccagacctgcacatgagacatggcagcatcctggcctgtgccgaggtggcctatgccctgtacaagctggccgcccaggagaacagacctgtgacagaccacctggatgagcaggccgtgcagggcctgaagcagatccaccagcagctgtatgaccggcagctgtaccggggcctgggcggccagctgatgaggcaggccgtgtgtgtgctgattgagaagctgagcctgagcaagatgcccttccggggggacacagtgattgatggctggcagtggctgatcaatgacaccctgcggcacctgcacctgatcagcagccacagccggcagcagatgaaggatgctgctgtgtctgccctggccgccctgtgcagcgagtactacatgaaggagcccggggaggccgaccctgccatccaggaggagctgatcacccagtacctggccgagctgaggaaccctgaggagatgacccgctgtggcttcagcctggccctgggcgccctgcccggcttcctgctgaagggccgcctgcagcaggtgctgaccggcctgcgggctgtgacccacaccagcccagaagatgtgtcctttgctgagagcagaagagatggcctgaaggccatcgcccgcatctgccagacagtgggcgtgaaggccggggccccagatgaggccgtgtgtggggagaatgtgtcccagatctactgtgccctgctgggctgcatggatgactacaccacagacagcagaggagatgtgggcacctgggtgaggaaggccgccatgaccagcctgatggacctgaccctgctgctggcccggagccagcctgagctgattgaggcccacacctgtgagcgcatcatgtgctgcgtggcccagcaggccagcgagaagattgaccgcttccgggcccacgccgccagcgtcttcctgaccctgctgcactttgacagcccccccatcccccacgtgccccacagaggagagctggagaagctgttccccaggagtgatgtggcctctgtgaactggagcgcccccagccaggccttcccccgcatcacccagctgctgggcctgcccacctaccgctaccacgtgctgctgggcctggtggtgtccctgggcggcctgacagagagcaccatccgccacagcacccagagcctgtttgagtacatgaagggcatccagagcgacccccaggccctgggcagcttcagcggcaccctgctgcagatctttgaggacaacctgctgaatgaaagagtgtctgtgcccctgctgaagaccctggaccacgtgctgacccacggctgctttgacatcttcaccacagaggaggaccacccctttgctgtgaagctgctggccctgtgcaagaaggagatcaagaacagcaaggacatccagaagctgctgtctggaattgctgtggacttccccagcgccaccctggtgtgtgtgggcaccgtgcagatgtatgcccacacccacctgcggctgggcgcccctggcccccactgtgcccacggcagcgccctgccccgcttctgtgagatggtgcagtttcctggagatgtgcggcggcaggccctgctgcagctgtgcctgctgctgtgccaccgcttccccctcatcaggaagaccacagccagccaggtgtatgagaccctgctgacctacagtgatgtggtgggcgcagatgtgctggatgaggtggtgacagtgctgagtgacacagcctgggatgctgagctggccgtggtgcgggagcagaggaaccggctgtgtgacctgctgggcgtgccccccagctggtgccccacctggtgcctgctgaagcctgtgctggagcccatcccccacccctgcctggtgaggatgagctgcagctag

SEQ ID NO: 160986 - DNA, 3579 bp, Artificial Sequence
  derived and/or modified sequence
atggccctgagtgatgagcctgctgctgggggccctgaggaggaggctgaagatgagaccctggcctttggagctgccctggaggccttcggggagagcgctgagacccgggccctgctgggccgcctgcgggaggtgcatggaggcggcgctgagcgggaggtggccctggagcgcttccgggtcatcatggacaagtaccaggagcagccccacctgctggacccccacctggagtggatgatgaacctgctgctggacatcgtgcaggaccagaccagccctgccagcctggtgcacctggccttcaagttcctgtacatcatcaccaaggtgcggggctacaagaccttcctgcggctcttcccccatgaggtggctgatgtggagcctgtgctggacctggtgaccatccagaaccccaaggaccacgaggcctgggagacccgctacatgctgctgctgtggctgtctgtgacctgcctgatcccctttgacttcagccggctggatggcaacctgctgacccagcccggccaggccaggatgagcatcatggaccgcatcctgcagattgctgagagctacctgattgtgtctgacaaggccagagatgctgctgctgtgctggtgagccgcttcatcaccaggccagatgtgaagcagagcaagatggccgagttcctggactggagcctgtgcaacctggcccggagcagcttccagaccatgcagggcgtcatcaccatggatggcaccctgcaggccctggcccagatcttcaagcacggcaagcgggaggactgcctgccctatgctgccaccgtgctgcgctgcctggatggctgccgcctgcctgagagcaaccagaccctgctgaggaagctgggcgtgaagctggtgcagaggctgggcctgaccttcctgaagcccaaggtggccgcctggagataccagaggggctgccgcagcctggccgccaacctgcagctgctgacccagggccagagcgagcagaagcccctcatcctgacagaagatgatgatgaagatgatgatgtgcctgagggcgtggagagggtcatcgagcagctgctggtgggcctgaaggacaaggacacagtggtgcgctggagcgctgccaagggcatcggccgcatggccggccgcctgccccgggccctggctgatgatgtggtgggctctgtgctggactgcttctccttccaggagacagacaaggcctggcatggaggctgcctggccctggccgagctgggccggcggggcctgctgctgcccagccggctggtggatgtggtggccgtcatcctgaaggccctgacctatgatgagaagagaggagcctgcagcgtgggcaccaacgtgagagatgctgcctgctacgtgtgctgggcctttgcccgggcctatgagccccaggagctgaagccctttgtgacagccatcagcagcgccctggtgattgctgctgtgtttgaccgggacatcaactgcagaagagctgccagcgctgccttccaggagaatgtgggccggcagggcaccttcccccacggcatcgacatcctgaccacagctgactactttgctgtgggcaacagaagcaactgcttcctggtgatcagcgtcttcatcgccggcttccctgagtacacccagcccatgattgaccacctggtgaccatgaagatcagccactgggatggagtcatccgggagctggccgcccgggccctgcacaacctggcccagcaggcccctgagttcagcgccacccaggtgttcccccggctgctgtccatgaccctgagcccagacctgcacatgagacatggcagcatcctggcctgtgccgaggtggcctatgccctgtacaagctggccgcccaggagaacagacctgtgacagaccacctggatgagcaggccgtgcagggcctgaagcagatccaccagcagctgtatgaccggcagctgtaccggggcctgggcggccagctgatgaggcaggccgtgtgtgtgctgattgagaagctgagcctgagcaagatgcccttccggggggacacagtgattgatggctggcagtggctgatcaatgacaccctgcggcacctgcacctgatcagcagccacagccggcagcagatgaaggatgctgctgtgtctgccctggccgccctgtgcagcgagtactacatgaaggagcctggagaggccgaccctgccatccaggaggagctgatcacccagtacctggccgagctgagaaatcctgaggagatgacccgctgtggcttcagcctggccctgggcgccctgcccggcttcctgctgaagggccgcctgcagcaggtgctgaccggcctgcgggctgtgacccacaccagcccagaagatgtgtcctttgctgagagcagaagagatggcctgaaggccatcgcccgcatctgccagacagtgggcgtgaaggccggggccccagatgaagctgtgtgtggagaaaatgtgtcccagatctactgtgccctgctgggctgcatggatgactacaccacagacagcagaggagatgtgggcacctgggtgaggaaggccgccatgaccagcctgatggacctgaccctgctgctggcccggagccagcctgagctgattgaggcccacacctgtgagcgcatcatgtgctgcgtggcccagcaggccagcgagaagattgaccgcttccgggcccatgctgcctctgtgttcctgaccctgctgcactttgacagcccccccatcccccacgtgccccacagaggagagctggagaagctgttccccaggagtgatgtggcctctgtgaactggagcgcccccagccaggccttcccccgcatcacccagctgctgggcctgcccacctaccgctaccacgtgctgctgggcctggtggtgtccctgggcggcctgacagagagcaccatccgccacagcacccagagcctgtttgagtacatgaagggcatccagagcgacccccaggccctgggcagcttcagcggcaccctgctgcagatctttgaggacaacctgctgaatgaaagagtgtctgtgcccctgctgaagaccctggaccacgtgctgacccacggctgctttgacatcttcaccacagaggaggaccacccctttgctgtgaagctgctggccctgtgcaagaaggagatcaagaacagcaaggacatccagaagctgctgagcggcattgctgtgttctgtgagatggtgcagtttcctggagatgtgcggcggcaggccctgctgcagctgtgcctgctgctgtgccaccgcttccccctcatcaggaagaccacagccagccaggtgtatgagaccctgctgacctacagtgatgtggtgggcgcagatgtgctggatgaggtggtgacagtgctgagtgacacagcctgggatgctgagctggccgtggtgcgggagcagaggaaccggctgtgtgacctgctgggcgtgccccggccccagctggtgccccagcccggggcctgctag

SEQ ID NO: 160987 - DNA, 2997 bp, Artificial Sequence
  derived and/or modified sequence
atggacggcaccctgcaggccctggcccagatcttcaagcacggcaaacgcgaggattgtctgccctatgctgcaacggtgctaaggtgtcttgatggctgtaggctgcccgagagcaaccagactctgcttagaaagcttggtgtcaagcttgttcagcgactcggtctgacatttctgaagcccaaggtcgccgcttggcggtatcaaagggggtgtcggagcctcgccgcgaacttgcagctgctgacacaggggcagtctgaacagaagcccctcatcctgaccgaggacgatgacgaggacgacgacgtccctgagggcgtagagagggtcatcgagcagttgttggtggggctgaaagacaaggatacggtcgtcaggtggtctgccgccaaaggaattgggcggatggcggggaggctgccacgtgcgcttgcagacgatgttgtaggctctgtcctcgattgtttctcctttcaagaaacagacaaagcgtggcacgggggatgccttgcactcgcggaactcggtagaaggggactcttgctgcctagtaggctcgtggatgtcgtagcagtgatcctgaaagctctgacttacgatgagaaacgcggcgcttgttccgtgggaacaaacgtgcgggatgccgcctgttacgtctgctgggccttcgctcgtgcatacgagcctcaagagctcaaacctttcgtgaccgccatcagcagtgccctggtgattgccgccgtgttcgatcgtgatataaattgtagacgggctgcatctgcagcatttcaagaaaatgtcggacgccaagggacctttccacatggcatcgatatcctgacgacagccgattatttcgccgttggcaatcggtctaactgttttctggttatctccgtattcatagccgggtttcctgaatatacccagcctatgatcgatcacttggtgacaatgaagatctcgcactgggatggtgttattagagaattagccgcccgcgccctgcataatctggcccaacaagcccccgagttttccgctacccaggtgttccctagactcctatccatgaccctctcccctgacctccacatgagacatggatcaatcctcgcctgcgcggaagtggcttatgctctttacaaactggccgcccaggagaaccgaccagtgaccgaccatctcgatgagcaggccgtgcaggggctaaagcagattcatcagcagctctacgaccggcagctgtatcggggcttaggcggacaactgatgaggcaagcagtttgcgtcctgattgagaagctctccctcagcaaaatgccctttcggggtgataccgtcattgatggctggcaatggctgattaatgacacactgagacacctccatttgattagcagtcatagcagacagcaaatgaaggatgccgcggtttctgctctagccgcactctgctctgagtattacatgaaggagcccggggaggcagacccagccatccaggaggagttgatcacacagtacctagccgagcttcgtaaccccgaagaaatgaccagatgtggcttttctctagccctgggtgctctaccgggcttcctgctcaaaggacgcctccaacaggtgctaaccggtcttcgggctgtcacccacacttccccggaagacgtgtcctttgccgaaagccggcgtgatggcctgaaggccattgccaggatatgccaaacagtcggggtgaaagcgggagcgcctgacgaggcagtgtgcggggagaacgtgtcacagatttattgtgcgctactgggatgcatggatgactacacaaccgattcccgcggggatgtgggtacatgggtaagaaaggccgccatgacctctttaatggatctgaccctgctgctcgcccgaagccagcccgaactgatagaagcccacacctgtgaacggatcatgtgctgtgttgcccaacaggccagcgaaaaaatcgaccggttccgtgctcatgcggcttcagtgtttttgactttgctgcattttgactccccgcctataccacatgttccacatcgcggggagcttgaaaaactttttcccagatccgacgtcgcgagtgtgaattggtctgcaccgtcccaggctttccctagaattactcagttacttggattgccaacctatcgctaccacgtcctgcttggcctggtcgtgtctctcggcggcctaacagagagtaccatcagacactctacccaatcattatttgaatacatgaagggcattcagtctgacccccaagccctcggctctttctccggtaccttactgcagatctttgaggacaatctcctcaacgagagagtgagcgtccctttgctcaaaacattagaccatgtccttacacatgggtgcttcgatatttttaccactgaggaggaccacccttttgccgtcaagctactggccctctgtaagaaggaaatcaagaattctaaggacattcagaaactcctttccggtattgcagttgactttccctctgccacactggtgtgcgtcggcacagtgcagatgtacgcccatacccatctgcggttaggggcacccggcccgcactgcgctcatggctccgctttgcctaggttttgtgagatggtgcagttcccaggggatgtccgccggcaggcgctgctacagctgtgccttctactatgccaccgttttcccctgatcaggaaaactactgctagccaggtctacgagaccctgctgacctatagtgacgtcgtcggagcggatgtgttggacgaggtggtgactgtgttaagcgacacagcatgggacgcggagctggctgtagtcagagagcagagaaaccggttgtgcgatctcctcggtgttccaccatcatggtgccccacctggtgcctattaaaacctgtactggagccaatccctcatccctgcctggttcgaatgagttgcagttag

SEQ ID NO: 160988 - DNA, 3579 bp, Artificial Sequence
  derived and/or modified sequence
atggccctgagcgacgagcccgccgccggcggccccgaggaggaggccgaagacgaaacattagctttcggggccgcactggaggccttcggcgaatctgccgagactcgtgctttgttgggaaggctccgcgaggttcatggcggaggtgccgagagggaagtagccctggagaggttcagagtcataatggataaataccaggagcagccccacctacttgaccctcacctggagtggatgatgaacttgcttctggacatcgtccaggaccaaactagccctgcctctctggtccacctggccttcaagtttctgtacatcattactaaggtgcggggatataaaacatttcttcggctcttcccacatgaggtagcagatgtcgagccagtgttggatctggtgacaatccagaatccgaaggaccacgaggcctgggagacacggtatatgctgctgctgtggttatctgttacctgcctgattccgttcgacttctcacgtctggatggcaatttactgacgcagccagggcaggccagaatgagcatcatggacagaattttgcagatagctgagtcatacctgatcgtgagcgacaaggctagagacgcagcggccgtgctcgtgtccagattcatcactcggccagacgtaaagcagagcaagatggcagagtttttggactggtccctgtgcaacctcgctcgatcatcttttcagacaatgcagggtgtgatcaccatggatgggactttgcaggccctcgcgcagatattcaagcacggaaagagagaagactgtctgccgtatgctgctacggtcctccgctgtctagatggatgtagacttcccgagtccaaccagaccctgctccggaagctgggagttaaactggtgcagcggctggggctgactttcctgaagcctaaggtggccgcctggcgctatcaaagaggatgccgctctttggcagctaacttgcagcttctgacccagggccagtccgaacaaaaacctcttattctgactgaagatgatgatgaggacgacgacgtccctgagggcgtggaacgcgttatcgaacagcttttagttgggttgaaagacaaggataccgtcgtaaggtggagtgcggctaaaggcattggcaggatggcgggcaggctgcccagagctctcgcggacgacgttgtgggatcagtactggattgtttcagttttcaggaaacagataaagcttggcacggcggatgtttggcactcgccgaattaggtaggcggggactgctccttccttcccggctggtcgatgttgtggctgtgatcctgaaggcgctcacctatgatgagaaacggggtgcctgctccgtgggtactaacgtgcgggacgccgcgtgctacgtttgttgggcttttgcacgtgcttacgagccacaggaactgaaaccatttgttaccgcaattagcagcgcactggtgatcgctgcagtgttcgaccgcgacattaactgtcgaagagcggcctctgcagcctttcaggaaaatgtgggacggcaagggacatttcctcacgggatcgacatactgacgaccgccgattatttcgcggttgggaaccgatctaattgttttttggttattagcgtctttatagccggctttcctgaatacactcagcctatgattgatcatctcgtgaccatgaaaataagccactgggacggagtaattagggaactggcggctagagcattgcacaatctggcacagcaggcccccgagttcagtgcaacacaggtgttcccccgcttgttgagcatgaccctgagtcctgatctgcatatgcggcatggctctatcttggcttgcgccgaggtggcatacgccctctataagttggccgcgcaagaaaatcgcccagtgactgatcatctggacgagcaagcagtccaagggctgaagcaaattcaccaacagctttacgatcgacagctctaccggggacttggaggccagctgatgcgacaggctgtctgtgtgctcatcgagaagctgagtctgagcaagatgccctttcgcggggataccgtcattgacggttggcaatggctgatcaacgacacccttcgtcacctgcaccttatcagctcacacagcagacaacagatgaaggacgccgccgttagcgccctcgctgccctgtgctcagagtattatatgaaggaaccaggcgaggcagatcccgcaattcaagaagaactgatcactcagtacctggccgagctccggaaccctgaggagatgactcgatgcggattctcactcgcactaggcgccctgccggggttcctgttgaaaggtagattgcagcaagtgctgactggacttcgagccgtgactcatacgtctccggaggatgtttctttcgctgaatccagacgcgacgggctaaaggccatagcgaggatttgccagacagttggagttaaggccggggcacctgacgaggcggtctgtggagaaaatgtctcccagatttattgcgccctgctggggtgtatggatgattacaccacagactccaggggtgacgtcgggacttgggtccggaaggcagctatgacaagtctgatggatctgacattgctcctggcacggtcgcaaccagagctgattgaggcccacacctgcgagcgcattatgtgttgcgtagcacagcaggcgtctgagaaaattgatcgcttcagagcccacgccgcttccgtgttcctgacactgttgcacttcgactctccacctatcccacacgtgcctcatcggggcgagctcgaaaaactctttccaaggagtgacgtggcgtccgtgaactggagcgccccatcacaggccttcccaaggattacccagcttctgggcttgcccacataccggtaccacgtgctgctggggcttgttgtcagcctgggggggctgacggagtccacaatccgccacagcacacagtcgctctttgaatacatgaagggtatacagtccgacccccaggctctcggctccttcagtggcacactattgcagatctttgaagataacctcctaaatgagagagtgtcagtcccactgctaaagaccctggaccacgtgctgacgcatgggtgttttgacatatttacaaccgaagaggatcacccattcgctgtcaaactgctagcgttgtgcaagaaggaaattaagaactcgaaggatatacaaaaattgctctctggcatcgcggttttctgcgagatggtgcagttccctggtgacgttagacggcaggcacttcttcagctgtgtctgctcctgtgtcaccggtttcccttgatcagaaaaactactgcaagccaggtgtatgagacccttctcacctacagcgacgttgtcggtgctgacgtgctggacgaagtggtcacagtgttatccgacaccgcctgggatgccgagcttgccgtggtaagggagcagaggaaccgcctctgcgatctgctcggtgtgcctcggcctcagctggtgccccagcccggtgcttgctag

SEQ ID NO: 160989 - DNA, 2997 bp, Artificial Sequence
  derived and/or modified sequence
atggacggaactcttcaggcccttgcacagatctttaagcacggcaagagagaggactgcctgccttacgctgctactgttctccgctgcttagacggctgccgattaccagaatctaatcagacactccttcgtaaactcggcgtcaagctggtacagaggttgggtctcacttttctgaaacccaaggtggctgcctggaggtaccagcgtggttgtcggagcttagctgcgaatctgcagttactgacacaaggccagtcggagcagaagccactcatcttaaccgaggatgatgacgaggacgatgacgtgcccgagggggtcgaaagagtaatagaacagttgctcgttggactgaaagataaggacactgtggtgaggtggagcgccgcaaagggcattggcaggatggccggtaggcttccacgggctctagctgatgatgtggtgggatcagtactggattgtttctccttccaggagaccgacaaagcgtggcatggcggatgcttggctttggcagagctcggcagaagaggactactactgccctcccggctcgtcgatgtcgttgctgtaatcctcaaggctttaacctacgacgaaaagcggggtgcatgttcagtcggaactaatgtgagggatgccgcttgctacgtgtgttgggccttcgctagggcctatgagccccaggagctgaagccgttcgtgacagcaatttcttctgccctggtgatcgccgcagtcttcgacagagatattaactgtagacgcgcagcatcggcggcattccaggagaacgtggggcgacagggtacattccctcatgggatagacattttgaccactgcagactactttgcagttgggaacaggtctaactgctttctggttatatctgtattcatagctggctttcctgaatacactcaacccatgattgaccacttggtcactatgaagatatctcactgggacggtgtgattcgagagcttgctgcgagagcgctccacaacttggcgcaacaggcgcctgaattctccgcaacacaggtcttcccacgtttgttgagcatgacactgagtcctgacctgcacatgagacatggttctattttagcttgcgcagaagttgcctacgctctatataaactcgccgctcaggaaaataggcctgttaccgaccacctcgacgagcaggcagtccagggcttgaaacaaatccatcagcagctctacgatcggcaactgtatcgtggcctcggtgggcagcttatgcgccaagccgtctgcgtcctaattgagaaactttccctgtcgaagatgccttttcgtggtgatacagttatcgacgggtggcagtggctgattaacgacactctccggcaccttcacctaatctcctcccacagccgacagcagatgaaagatgctgctgtgagtgccctggccgctttatgttcagaatactacatgaaagaacccggagaggcggatccggctatccaggaagaattgatcacccagtatctggccgagctcaggaacccagaggaaatgactcgatgtggatttagtctggccttgggagcattgcctggttttttgttgaaaggccgtcttcagcaggtgttgacggggcttcgggctgtcacacacaccagcccggaagatgtttcattcgctgagtcccgccgtgacggactcaaggctatcgcaaggatctgtcagacagtgggagtgaaggccggtgcacccgatgaagccgtgtgtggagagaacgttagccagatctactgtgcactgctagggtgcatggatgactacaccaccgattctcgaggagacgtcggcacttgggtacgcaaggctgccatgacgagcctgatggatctgacactgttgctggcgaggtcacagcctgagctgattgaggcacatacttgcgagaggatcatgtgttgtgttgcacagcaagcaagtgagaagatcgaccggttccgggcacatgcagcaagcgtattcctgactcttttgcattttgatagtccgccaattccacatgtgccccatcggggtgagcttgaaaaactcttccctcgctctgacgtggcatctgtgaactggtctgcaccaagccaggcttttcctaggattacgcaattgctgggtctccctacctaccgctatcatgtgttgcttggcctcgtggtgtccctgggcggactgactgaaagtaccataaggcatagtacccagtccctcttcgagtacatgaagggtattcaatccgaccctcaggcactaggctcctttagcgggacactcttacagatctttgaggacaaccttctaaacgagagggtgagcgtgcctctactgaaaaccctggaccacgtgttgacacacggatgttttgatatcttcactacagaagaggaccatccattcgccgttaaattgctggccctttgtaaaaaagagatcaaaaacagtaaagatattcagaagctcttgagcgggatcgcagtagacttcccctccgcgacacttgtttgcgtgggcacagtgcagatgtatgcccatacccatcttcggttgggcgcaccaggtccccactgtgctcatggctctgccttacccaggttttgcgagatggtgcagttccctggcgacgtacggagacaagcactgctgcagctatgcctgctactgtgtcaccgcttccccctcatcagaaaaacaaccgcctctcaagtttacgagacattgctaacgtactctgacgtagtcggtgcagatgtgctggacgaagtagttactgtattatccgacaccgcctgggatgcagaactggccgtcgtgcgggagcaaaggaacagattatgtgatctcctaggggtccccccttcttggtgcccaacatggtgcctgttgaaaccggtgctggagccgatcccacacccttgtctggtgaggatgtcatgttcttag

SEQ ID NO: 160990 - DNA, 3579 bp, Artificial Sequence
  derived and/or modified sequence
atggctctgtccgacgagccagcagctggagggccagaagaagaggccgaagacgagaccctcgcttttggagctgcgcttgaggccttcggggagtccgccgagactcgggcactcctcgggaggctgcgtgaggtccatggcggaggtgcagaaagggaagttgcgctggaacgtttccgagtaatcatggataaataccaggagcagcctcacctgcttgacccccatctcgagtggatgatgaacctgctgctcgacatagtccaagaccagaccagcccagccagcctcgtccatcttgcctttaaatttctctacataatcaccaaggtcagaggatataagacgtttctccgcctgtttccccatgaggttgcagatgtggaacccgtgctcgacctagtaactattcaaaatcccaaggatcatgaggcttgggaaaccaggtacatgctattgctgtggctgagcgtgacatgtttaatccctttcgatttctcgcggttagacggaaacttgctaacacaacccggacaggcaagaatgtccattatggacaggatcttacagattgctgagtcctacttgatcgtgtcagataaggccagggatgccgcagccgtccttgttagtaggttcataacccgccctgacgttaaacaaagcaagatggctgaattcctggattggtcactgtgtaacttggcgcgaagttcattccaaacaatgcagggcgtgatcaccatggatggcactctgcaggctcttgcccagatttttaagcacggcaagcgcgaggattgtttaccctatgctgccactgtgctgagatgtctcgatggctgtcgactccccgagagcaatcagacgttgcttagaaagctaggcgtgaaactcgtgcaacggcttggattgacattccttaaaccaaaggtagcagcctggaggtatcaacgaggctgtcggtcactagccgcaaacctgcaactgctcacacagggccaatcagaacagaaacccctgatccttacggaggacgacgatgaggatgacgacgttcctgagggcgtagaacgcgtcatagaacaacttcttgtgggtctgaaagacaaggataccgtggttagatggtccgccgctaagggaatcggtcggatggctggtcggctcccgcgtgccttagccgatgacgttgtcggaagcgtcctggactgcttttcctttcaggagacggataaagcctggcacgggggatgcctggcattagctgaacttgggagaagaggtctgcttctgccatctcgtctcgtagacgtggtagcagttatcctcaaagcccttacttatgatgaaaagagaggcgcttgtagtgtgggtacaaacgtaagagatgccgcttgctacgtgtgttgggccttcgctcgggcatatgagcctcaagagttgaagccgtttgtgacagccatcagctccgccctggtaattgccgctgtttttgacagagacattaactgtcgtcgggcagcctctgccgctttccaagagaatgtgggcaggcagggcacattccctcacggcatcgacattttgacgaccgcagattacttcgccgtggggaacagaagcaactgcttcctggttatcagcgtctttattgctggcttccctgagtatacacagcccatgatcgaccacctggtaactatgaagatcagccactgggatggtgtgatcagggagttggcagcaagggcgttgcacaacttagctcagcaggctcctgaattcagcgctactcaggtgttccctaggttgttgtctatgaccttatcacctgacctgcatatgaggcacggatctatcctcgcttgtgccgaagtggcctatgccctttataagctggcagctcaggaaaatagacccgtgaccgaccatttagacgaacaggccgtacagggacttaaacaaattcatcagcagctctatgacagacagctttatagaggactgggtggacagctcatgagacaggctgtttgtgtcttaattgaaaaactctctctatctaagatgccattccgcggtgacacagtcatcgatggctggcagtggctgattaacgatacacttaggcatcttcacctgatctctagccactcccgtcagcagatgaaagatgcggcagtctcagcactggctgcgttatgcagcgaatattatatgaaggaaccgggagaggccgatcctgctatacaggaggaactgattacccaatacctggccgagctccgcaaccctgaggaaatgacacggtgtggattctccctggcccttggggctctgcctggcttcctcttgaaggggagactgcagcaagttctgacagggctccgagccgttactcacacctctccagaggacgtctcattcgcagaaagcagaagggacggcctcaaggccatcgccagaatttgtcagactgtgggcgtcaaggcaggggcacctgacgaggcagtttgcggagaaaacgtgtctcaaatatattgcgctctcctcggctgcatggacgattataccactgattctaggggagatgtggggacttgggtgcggaaggcggctatgacaagccttatggatctgacactcctgttggcgaggtctcagccagaattgattgaggcccatacctgtgagcggattatgtgctgcgtagcgcagcaggcctctgaaaagatagataggtttcgggcacacgcagcctccgttttcttaaccttgcttcattttgactctcctcctattcctcacgtccctcacagaggcgagcttgagaagttgtttccaagatccgatgtcgcctccgtgaactggagcgccccttctcaggcatttcccagaatcacacagctgctgggtcttccgacgtaccgatatcacgtgctgctcgggttggtggtgagcctggggggtctgactgagagcacaatcaggcattctacacagagtctctttgagtacatgaagggtatccagagtgatccccaggctcttggttcattttccggaaccctgctgcaaattttcgaagataatctccttaatgaacgagtttctgtgcctctgcttaaaaccctcgaccatgtgctgactcatgggtgtttcgacatcttcacaacggaggaggaccatccttttgcagtcaaattgctggccttgtgcaagaaagaaataaagaatagcaaagacatccagaagctgctgagcggcattgccgtattctgtgagatggtgcagtttcctggagatgtgagacgccaggcactgctccaactgtgcctgttgctctgccaccgttttcctctcatcagaaagactacagccagccaagtgtacgagacactgcttacttattcggatgtcgttggtgcagatgtactggacgaggtagtgaccgtgctctcggacacagcttgggatgcggagcttgccgtcgtcagagaacagagaaaccgactctgcgatctgttaggggtgcccagaccacaactagtgcctcaacccggtgcttgttag

SEQ ID NO: 160991 - DNA, 4036 bp, Artificial Sequence
  derived and/or modified sequence
tagcgggcgcctccttttcatccctcatccttcatccctggctttcgcgctctagcggagtgggatctgcgaacacgtgaggcgggggcgcggtccccaggctgccgagatggccctgagcgacgaaccggccgcgggcggccccgaggaggaggcggaggacgagacactggcctttggcgcggcgctggaagcgttcggcgagagcgcggagacccgggcgctgctgggccgcctgcgggaggtgcacggcggcggcgcggagcgcgaggtggccctggagcggttccgcgtaataatggacaaataccaggagcagcctcatctgttggacccgcaccttgaatggatgatgaacttgttgttggacatagtgcaagatcagacatctccagcttcccttgtacatctggcttttaaatttctttacatcatcaccaaggttcgaggctataaaacatttcttcgtttatttcctcatgaagttgccgatgtagagcctgttttagatttggtcacaattcagaatcccaaggaccatgaagcttgggaaacccgctacatgcttttgctctggctctccgtgacctgcctgatcccttttgatttttctcgccttgacgggaacctcctcacccagcctgggcaagcacgaatgtccataatggaccgtattctccaaatagcagagtcctacttgattgtcagtgacaaggcccgagatgcagctgctgtccttgtgtccagatttatcacacgtcctgatgtcaagcaaagcaagatggctgagttcctggactggagcctgtgcaatctggcccgttcctccttccagaccatgcagggggtcatcaccatggatgggacgctgcaggccctggcacaaatatttaaacatggaaaacgtgaagactgtttgccctatgctgccactgtcctcaggtgcctcgatggctgcagactccctgagagcaaccagaccctgctgcggaagctgggggtgaagcttgtgcagcgactggggctgacattcctgaagccgaaggtggcagcatggaggtaccagcgtggctgccgatctttggctgcaaatctgcagctcctcactcagggtcagagtgagcagaagccactcatcctgaccgaagatgacgacgaagatgacgacgtcccagagggggtggagcgtgtgatagagcagctgctggtcgggctgaaggacaaggacacggtcgtgcggtggtctgcagccaagggcatcggtaggatggctggcaggcttcccagagccctggcggatgatgtggtcgggtctgtgctggactgcttcagtttccaggagactgacaaggcgtggcatgggggatgtctggcgctggcagagctgggcaggagaggcctgttgctgccgtctcgactcgtggatgttgtcgccgtgatcctgaaggcgctgacctacgacgagaagcggggtgcctgcagcgtgggcaccaacgtcagggacgccgcctgctacgtgtgctgggccttcgcgcgtgcctatgagcctcaggagctgaagccctttgtgactgcaatctcgagtgcactggtgattgctgcggtgtttgaccgagacataaactgcagaagagcagcctctgccgccttccaggagaatgtggggagacagggcactttccctcatggtattgatattttgaccacagctgactattttgccgtcggtaacagatccaactgtttcctggttataagtgtgtttattgccggctttcctgagtacacgcagccaatgatagaccacctggttaccatgaagatcagccactgggatggggtcatccgagagttggctgcgagggcgctgcacaacctggcccagcaggcacccgagttcagcgccacgcaagtcttcccgaggctgctgtccatgacactgagtccagatcttcacatgaggcatgggtcgattctcgcctgcgcagaagttgcttacgccttgtacaaacttgcagcccaagagaacaggcccgtcacggaccatctggacgagcaggcagtgcagggcctgaagcagattcaccagcagctctatgatcgtcagttatacaggggtctgggaggacagctcatgagacaagcagtgtgtgttttaatagaaaagttgtcactttccaaaatgccctttagaggtgacaccgtaattgatggttggcaatggctgataaatgacactttgagacatctccatctcatctcaagtcactcccgccagcagatgaaggatgcagcagtctcggccctggctgctctatgcagtgaatattacatgaaggagccgggggaggcagatcccgcaattcaggaggagctgatcacgcagtacctggctgagcttcggaaccccgaggagatgactcgctgtggcttctcgttggccttgggcgcccttccaggcttccttctgaaaggccggctccagcaggttctcacaggtttaagagcagttacccacacttcccccgaggacgtaagttttgctgagtccaggagagacggcttgaaggccattgcgaggatttgccagactgttggtgtgaaagcaggagccccagacgaagctgtgtgcggagagaatgtttcccagatttactgtgcgctgctgggctgcatggacgactacaccacggacagcagaggggacgtgggcacctgggtccgcaaggccgccatgaccagtctgatggatctgacacttctgctggctcggagccagcctgagctgatcgaggcccatacctgtgagcgcatcatgtgctgtgtggcccagcaggccagtgagaagattgaccgtttccgtgctcacgccgccagcgtgttcctgacgctcctgcactttgacagccctcccatcccccacgtgccccaccgaggagaactggaaaagctgtttcccaggtccgatgtggcctccgtgaactggagtgcaccttcccaggccttcccacgcatcacccagctccttgggctgcccacctaccgctaccacgtcctgctggggctagtcgtgtccctgggcggcttgacggagtcgacgatccggcactccacccagagcctctttgagtacatgaagggcattcagagcgacccgcaggccctgggcagcttcagcgggacccttctgcagatctttgaggacaaccttctgaatgagagggtgtccgtgccgctgctgaagacgctggaccacgtgctcacccacggctgcttcgacatcttcaccacggaggaggaccacccctttgctgtgaagttgcttgcgctctgtaagaaagaaatcaagaattcaaaagatatccagaagctcctgtcaggcatcgcagttgactttccaagtgcgacactcgtgtgtgtaggcacagtgcagatgtacgcacacacacacctccggcttggggccccaggcccgcactgtgctcacggatctgctctgcccaggttctgcgagatggtgcagttccccggcgacgtgaggaggcaggccctcctgcagctgtgtctgctcctctgccaccgtttcccgctgatccggaagaccacggccagccaggtgtacgagacattgctcacctacagtgacgtcgtgggcgcggatgtgctggacgaggtggtgactgtgctcagtgacactgcgtgggacgcggagcttgcagtggtgagagagcagcgcaaccgtctgtgtgaccttctgggcgtaccccccagctggtgccccacctggtgcctgctgaagccagtcctggagcccatacctcacccctgcctggtgaggatgtcttgttcctgagggaggccggtgtggaaagcctcgcacagtggtgcctccagctgttgaagggtagcgctggcccttggaggctggcactagctgacagcttttcctctctgcacctgcgctctggtgacttggggtggacgcctctgccttcacttgaacacaaatgtgcttcctataaaatcatgtaccaag

SEQ ID NO: 160992 - DNA, 4426 bp, Artificial Sequence
  derived and/or modified sequence
ggccagcgtcggttgccgccttagcgggcgcctccttttcatccctcatccttcatccctggctttcgcgctctagcggagtgggatctgcgaacacgtgaggcgggggcgcggtccccaggctgccgagatggccctgagcgacgaaccggccgcgggcggccccgaggaggaggcggaggacgagacactggcctttggcgcggcgctggaagcgttcggcgagagcgcggagacccgggcgctgctgggccgcctgcgggaggtgcacggcggcggcgcggagcgcgaggtggccctggagcggttccgcgtaataatggacaaataccaggagcagcctcatctgttggacccgcaccttgaatggatgatgaacttgttgttggacatagtgcaagatcagacatctccagcttcccttgtacatctggcttttaaatttctttacatcatcaccaaggttcgaggctataaaacatttcttcgtttatttcctcatgaagttgccgatgtagagcctgttttagatttggtcacaattcagaatcccaaggaccatgaagcttgggaaacccgctacatgcttttgctctggctctccgtgacctgcctgatcccttttgatttttctcgccttgacgggaacctcctcacccagcctgggcaagcacgaatgtccataatggaccgtattctccaaatagcagagtcctacttgattgtcagtgacaaggcccgagatgcagctgctgtccttgtgtccagatttatcacacgtcctgatgtcaagcaaagcaagatggctgagttcctggactggagcctgtgcaatctggcccgttcctccttccagaccatgcagggggtcatcaccatggatgggacgctgcaggccctggcacaaatatttaaacatggaaaacgtgaagactgtttgccctatgctgccactgtcctcaggtgcctcgatggctgcagactccctgagagcaaccagaccctgctgcggaagctgggggtgaagcttgtgcagcgactggggctgacattcctgaagccgaaggtggcagcatggaggtaccagcgtggctgccgatctttggctgcaaatctgcagctcctcactcagggtcagagtgagcagaagccactcatcctgaccgaagatgacgacgaagatgacgacgtcccagagggggtggagcgtgtgatagagcagctgctggtcgggctgaaggacaaggacacggtcgtgcggtggtctgcagccaagggcatcggtaggatggctggcaggcttcccagagccctggcggatgatgtggtcgggtctgtgctggactgcttcagtttccaggagactgacaaggcgtggcatgggggatgtctggcgctggcagagctgggcaggagaggcctgttgctgccgtctcgactcgtggatgttgtcgccgtgatcctgaaggcgctgacctacgacgagaagcggggtgcctgcagcgtgggcaccaacgtcagggacgccgcctgctacgtgtgctgggccttcgcgcgtgcctatgagcctcaggagctgaagccctttgtgactgcaatctcgagtgcactggtgattgctgcggtgtttgaccgagacataaactgcagaagagcagcctctgccgccttccaggagaatgtggggagacagggcactttccctcatggtattgatattttgaccacagctgactattttgccgtcggtaacagatccaactgtttcctggttataagtgtgtttattgccggctttcctgagtacacgcagccaatgatagaccacctggttaccatgaagatcagccactgggatggggtcatccgagagttggctgcgagggcgctgcacaacctggcccagcaggcacccgagttcagcgccacgcaagtcttcccgaggctgctgtccatgacactgagtccagatcttcacatgaggcatgggtcgattctcgcctgcgcagaagttgcttacgccttgtacaaacttgcagcccaagagaacaggcccgtcacggaccatctggacgagcaggcagtgcagggcctgaagcagattcaccagcagctctatgatcgtcagttatacaggggtctgggaggacagctcatgagacaagcagtgtgtgttttaatagaaaagttgtcactttccaaaatgccctttagaggtgacaccgtaattgatggttggcaatggctgataaatgacactttgagacatctccatctcatctcaagtcactcccgccagcagatgaaggatgcagcagtctcggccctggctgctctatgcagtgaatattacatgaaggagccgggggaggcagatcccgcaattcaggaggagctgatcacgcagtacctggctgagcttcggaaccccgaggagatgactcgctgtggcttctcgttggccttgggcgcccttccaggcttccttctgaaaggccggctccagcaggttctcacaggtttaagagcagttacccacacttcccccgaggacgtaagttttgctgagtccaggagagacggcttgaaggccattgcgaggatttgccagactgttggtgtgaaagcaggagccccagacgaagctgtgtgcggagagaatgtttcccagatttactgtgcgctgctgggctgcatggacgactacaccacggacagcagaggggacgtgggcacctgggtccgcaaggccgccatgaccagtctgatggatctgacacttctgctggctcggagccagcctgagctgatcgaggcccatacctgtgagcgcatcatgtgctgtgtggcccagcaggccagtgagaagattgaccgtttccgtgctcacgccgccagcgtgttcctgacgctcctgcactttgacagccctcccatcccccacgtgccccaccgaggagaactggaaaagctgtttcccaggtccgatgtggcctccgtgaactggagtgcaccttcccaggccttcccacgcatcacccagctccttgggctgcccacctaccgctaccacgtcctgctggggctagtcgtgtccctgggcggcttgacggagtcgacgatccggcactccacccagagcctctttgagtacatgaagggcattcagagcgacccgcaggccctgggcagcttcagcgggacccttctgcagatctttgaggacaaccttctgaatgagagggtgtccgtgccgctgctgaagacgctggaccacgtgctcacccacggctgcttcgacatcttcaccacggaggaggaccacccctttgctgtgaagttgcttgcgctctgtaagaaagaaatcaagaattcaaaagatatccagaagctcctgtcaggcatcgcagtgttctgcgagatggtgcagttccccggcgacgtgaggaggcaggccctcctgcagctgtgtctgctcctctgccaccgtttcccgctgatccggaagaccacggccagccaggtgtacgagacattgctcacctacagtgacgtcgtgggcgcggatgtgctggacgaggtggtgactgtgctcagtgacactgcgtgggacgcggagcttgcagtggtgagagagcagcgcaaccgtctgtgtgaccttctgggcgtacccaggccccagctggtgccccagcctggtgcctgctgaagccagtcctggagcccatacctcacccctgcctggtgaggatgtcttgttcctgagggaggccggtgtggaaagcctcgcacagtggtgcctccagctgttgaagggtagcgctggcccttggaggctggcactagctgacagcttttcctctctgcacctgcgctctggtgacttggggtggacgcctctgccttcacttgaacacaaatgtgcttcctataaaatcatgtaccaagaagttcctgccttttgtctctgagcctgatgtgtgtaggggtgatggaaaggctcactgcccaggggtcagccagaggggaggtgggctgcactcctcctgcctggagaccaggcccccttcttgcctggtgctgtccctgctgtgggagacgtctggccacaggcagtgccccacccagtcttggagagagatgaatgttaaatcagaggttcaaatgctagagaactgagaagccctggtggcaggcatggtctggagtgctgggcagatgctgtttctgggcccgtctgcctggtgggggtgctgtcctcccccctgtgcacacgtgagcatcgtgcatgtggcccctctgcagtgcaggagtcactgattgatgggtgtgccgaccagcagcttcacaaatgtctgctgcaaggggaatcgtcagagtccaatgtgtgcctctacagtaatgtcggaaataaataccattcttg

SEQ ID NO: 160993 - DNA, 2203 bp, Artificial Sequence
  derived and/or modified sequence
tagcgggcgcctccttttcatccctcatccttcatccctggctttcgcgctctagcggagtgggatctgcgaacacgtgaggcgggggcgcggtccccaggctgccgagatggccctgagcgacgaaccggccgcgggcggccccgaggaggaggcggaggacgagacactggcctttggcgcggcgctggaagcgttcggcgagagcgcggagacccgggcgctgctgggccgcctgcgggaggtgcacggcggcggcgcggagcgcgaggtggccctggagcggttccgcgtaataatggacaaataccaggagcagcctcatctgttggacccgcaccttgaatggatgatgaacttgttgttggacatagtgcaagatcagacatctccagcttcccttgtacatctggcttttaaatttctttacatcatcaccaaggttcgaggctataaaacatttcttcgtttatttcctcatgaagttgccgatgtagagcctgttttagatttggtcacaattcagaatcccaaggaccatgaagcttgggaaacccgctacatgcttttgctctggctctccgtgacctgcctgatcccttttgatttttctcgccttgacgggaacctcctcacccagcctgggcaagcacgaatgtccataatggaccgtattctccaaatagcagagtcctacttgattgtcagtgacaaggcccgagatgcagctgctgtccttgtgtccagatttatcacacgtcctgatgtcaagcaaagcaagatggctgagttcctggactggagcctgtgcaatctggcccgttcctccttccagaccatgcagggggtcatcaccatggatgggacgctgcaggccctggcacaaatatttaaacatggaaaacgtgaagactgtttgccctatgctgccactgtcctcaggtgcctcgatggctgcagactccctgagagcaaccagaccctgctgcggaagctgggggtgaagcttgtgcagcgactggggctgacattcctgaagccgaaggtggcagcatggaggtaccagcgtggctgccgatctttggctgcaaatctgcagctcctcactcagggtcagagtgagcagaagccactcatcctgaccgaagatgacgacgaagatgacgacgtcccagagggggtggagcgtgtgatagagcagctgctggtcgggctgaaggacaaggacacggtcgtgcggtggtctgcagccaagggcatcggtaggatggctggcaggcttcccagagccctggcggatgatgtggtcgggtctgtgctggactgcttcagtttccaggagactgacaaggcgtggcatgggggatgtctggcgctggcagagctgggcaggagaggcctgttgctgccgtctcgactcgtggatgttgtcgccgtgatcctgaaggcgctgacctacgacgagaagcggggtgcctgcagcgtgggcaccaacgtcagggacgccgcctgctacgtgtgctgggccttcgcgcgtgcctatgagcctcaggagctgaagccctttgtgactgcaatctcgagtgcactggtgattgctgcggtgtttgaccgagacataaactgcagaagagcagcctctgccgccttccaggagaatgtggggagacagggcactttccctcatggtattgatattttgaccacagctgactattttgccgtcggtaacagatccaactgtttcctggttataagtgtgtttattgccggctttcctgagtacacgcagccaatgatagaccacctggttaccatgaagatcagccactgggatggggtcatccgagagttggctgcgagggcgctgcacaacctggcccagcaggcacccgagttcagcgccacgcaagtcttcccgaggctgctgtccatgacactgagtccagatcttcacatgaggcatgggtcgattctcgcctgcgcagaagttgcttacgccttgtacaaacttgcagcccaagagaacaggcccgtcacggaccatctggacgagcaggcagtgcagggcctgaagcagattcaccagcagccgtgcatctgcagctggggtctgatgtctcctgaaagtaaagcagaattttgtgtgtgcgtctgtcggatttctctggggagacagtgtgttcatctttctgggctttga

SEQ ID NO: 160994 - DNA, 3685 bp, Artificial Sequence
  derived and/or modified sequence
tagcgggcgcctccttttcatccctcatccttcatccctggctttcgcgctctagcggagtgggatctgcgaacacgtgaggcgggggcgcggtccccaggctgccgagatggccctgagcgacgaaccggccgcgggcggccccgaggaggaggcggaggacgagacactggcctttggcgcggcgctggaagcgttcggcgagagcgcggagacccgggcgctgctgggccgcctgcgggaggtgcacggcggcggcgcggagcgcgaggtggccctggagcggttccgcgtaataatggacaaataccaggagcagcctcatctgttggacccgcaccttgaatggatgatgaacttgttgttggacatagtgcaagatcagacatctccagcttcccttgtacatctggcttttaaatttctttacatcatcaccaaggttcgaggctataaaacatttcttcgtttatttcctcatgaagttgccgatgtagagcctgttttagatttggtcacaattcagaatcccaaggaccatgaagcttgggaaacccgctacatgcttttgctctggctctccgtgacctgcctgatcccttttgatttttctcgccttgacgggaacctcctcacccagcctgggcaagcacgaatgtccataatggaccgtattctccaaatagcagagtcctacttgattgtcagtgacaaggcccgagatgcagctgctgtccttgtgtccagatttatcacacgtcctgatgtcaagcaaagcaagatggctgagttcctggactggagcctgtgcaatctggcccgttcctccttccagaccatgcagggggtcatcaccatggatgggacgctgcaggccctggcacaaatatttaaacatggaaaacgtgaagactgtttgccctatgctgccactgtcctcaggtgcctcgatggctgcagactccctgagagcaaccagaccctgctgcggaagctgggggtgaagcttgtgcagcgactggggctgacattcctgaagccgaaggtggcagcatggaggtaccagcgtggctgccgatctttggctgcaaatctgcagctcctcactcagggtcagagtgagcagaagccactcatcctgaccgaagatgacgacgaagatgacgacgtcccagagggggtggagcgtgtgatagagcagctgctggtcgggctgaaggacaaggacacggtcgtgcggtggtctgcagccaagggcatcggtaggatggctggcaggcttcccagagccctggcggatgatgtggtcgggtctgtgctggactgcttcagtttccaggagactgacaaggcgtggcatgggggatgtctggcgctggcagagctgggcaggagaggcctgttgctgccgtctcgactcgtggatgttgtcgccgtgatcctgaaggcgctgacctacgacgagaagcggggtgcctgcagcgtgggcaccaacgtcagggacgccgcctgctacgtgtgctgggccttcgcgcgtgcctatgagcctcaggagctgaagccctttgtgactgcaatctcgagtgcactggtgattgctgcggtgtttgaccgagacataaactgcagaagagcagcctctgccgccttccaggagaatgtggggagacagggcactttccctcatggtattgatattttgaccacagctgactattttgccgtcggtaacagatccaactgtttcctggttataagtgtgtttattgccggctttcctgagtacacgcagccaatgatagaccacctggttaccatgaagatcagccactgggatggggtcatccgagagttggctgcgagggcgctgcacaacctggcccagcaggcacccgagttcagcgccacgcaagtcttcccgaggctgctgtccatgacactgagtccagatcttcacatgaggcatgggtcgattctcgcctgcgcagaagttgcttacgccttgtacaaacttgcagcccaagagaacaggcccgtcacggaccatctggacgagcaggcagtgcagggcctgaagcagattcaccagcagctctatgatcgtcagttatacaggggtctgggaggacagctcatgagacaagcagtgtgtgttttaatagaaaagttgtcactttccaaaatgccctttagaggtgacaccgtaattgatggttggcaatggctgataaatgacactttgagacatctccatctcatctcaagtcactcccgccagcagatgaaggatgcagcagtctcggccctggctgctctatgcagtgaatattacatgaaggagccgggggaggcagatcccgcaattcaggaggagctgatcacgcagtacctggctgagcttcggaaccccgaggagatgactcgctgtggcttctcgttggccttgggcgcccttccaggcttccttctgaaaggccggctccagcaggttctcacaggtttaagagcagttacccacacttcccccgaggacgtaagttttgctgagtccaggagagacggcttgaaggccattgcgaggatttgccagactgttggtgtgaaagcaggagccccagacgaagctgtgtgcggagagaatgtttcccagatttactgtgcgctgctgggctgcatggacgactacaccacggacagcagaggggacgtgggcacctgggtccgcaaggccgccatgaccagtctgatggatctgacacttctgctggctcggagccagcctgagctgatcgaggcccatacctgtgagcgcatcatgtgctgtgtggcccagcaggccagtgagaagattgaccgtttccgtgctcacgccgccagcgtgttcctgacgctcctgcactttgacagccctcccatcccccacgtgccccaccgaggagaactggaaaagctgtttcccaggtccgatgtggcctccgtgaactggagtgcaccttcccaggccttcccacgcatcacccagctccttgggctgcccacctaccgctaccacgtcctgctggggctagtcgtgtccctgggcggcttgacggagtcgacgatccggcactccacccagagcctctttgagtacatgaagggcattcagagcgacccgcaggccctgggcagcttcagcgggacccttctgcagatctttgaggacaaccttctgaatgagagggtgtccgtgccgctgctgaagacgctggaccacgtgctcacccacggctgcttcgacatcttcaccacggaggaggaccacccctttgctgtgaagttgcttgcgctctgtaagaaagaaatcaagaattcaaaagatatccagaagctcctgtcaggcatcgcagtgttctgcgagatggtgcagttccccggcgacgtgaggaggcaggccctcctgcagctgtgtctgctcctctgccaccgtttcccgctgatccggaagaccacggccagccaggtgtacgagacattgctcacctacagtgacgtcgtgggcgcggatgtgctggacgaggtggtgactgtgctcagtgacactgcgtgggacgcggagcttgcagtggtgagagagcagcgcaaccgtctgtgtgaccttctgggcgtacccaggccccagctggtgccccagcctggagcttgt

SEQ ID NO: 160995 - protein, 385 aa, Artificial Sequence
  derived and/or modified sequence
MAAFLSAGLGILAPSETYPLPTTSSGWEPRLGSPFPSGPCTSSTGAQAVAEPTGQGPKNPRVSRVTVQLEMKPLWEEFNQLGTEMIVTKAGRRMFPPFQVKILGMDSLADYALLMDFIPLDDKRYRYAFHSSAWLVAGKADPATPGRVHFHPDSPAKGAQWMRQIVSFDKLKLTNNLLDDNGHIILNSMHRYQPRFHVVFVDPRKDSERYAQENFKSFIFTETQFTAVTAYQNHRITQLKIASNPFAKGFRESDLDSWPVAPRPLLSVPARSHSSLSPCVLKGATDREKDPNKASASTSKTPAWLHHQLLPPPEVLLAPATYRPVTYQSLYSGAPSHLGIPRTRPAPYPLPNIRADRDQGGLPLPAGLGLLSPTVVCLGPGQDSQ

SEQ ID NO: 160996 - DNA, 1158 bp, Artificial Sequence
  derived and/or modified sequence
atggccgccttcctgagcgccggcctgggcatcctggcccccagcgagacctaccccctgcccaccaccagcagcggctgggagcccagactgggcagccccttccccagcggcccctgcaccagcagcaccggcgcccaggccgtggccgagcccaccggccagggccccaagaaccccagagtgagcagagtgaccgtgcagctggagatgaagcccctgtgggaggagttcaaccagctgggcaccgagatgatcgtgaccaaggccggcagaagaatgttcccccccttccaggtgaagatcctgggcatggacagcctggccgactacgccctgctgatggacttcatccccctggacgacaagagatacagatacgccttccacagcagcgcctggctggtggccggcaaggccgaccccgccacccccggcagagtgcacttccaccccgacagccccgccaagggcgcccagtggatgagacagatcgtgagcttcgacaagctgaagctgaccaacaacctgctggacgacaacggccacatcatcctgaacagcatgcacagataccagcccagattccacgtggtgttcgtggaccccagaaaggacagcgagagatacgcccaggagaacttcaagagcttcatcttcaccgagacccagttcaccgccgtgaccgcctaccagaaccacagaatcacccagctgaagatcgccagcaaccccttcgccaagggcttcagagagagcgacctggacagctggcccgtggcccccagacccctgctgagcgtgcccgccagaagccacagcagcctgagcccctgcgtgctgaagggcgccaccgacagagagaaggaccccaacaaggccagcgccagcaccagcaagacccccgcctggctgcaccaccagctgctgcccccccccgaggtgctgctggcccccgccacctacagacccgtgacctaccagagcctgtacagcggcgcccccagccacctgggcatccccagaaccagacccgccccctaccccctgcccaacatcagagccgacagagaccagggcggcctgcccctgcccgccggcctgggcctgctgagccccaccgtggtgtgcctgggccccggccaggacagccagtag

SEQ ID NO: 160997 - DNA, 1158 bp, Artificial Sequence
  derived and/or modified sequence
atggccgcatttctctcagcgggcctcggaatcctggctccctccgaaacatatcccctccctaccacttcctccggctgggaacccagattgggctctccttttccgtccgggccctgtacatcttcaacaggggcccaggcagttgccgagccaacaggccagggacccaaaaatccacgcgtgtcaagggttactgtgcagcttgaaatgaagcctctatgggaggagttcaatcagcttgggaccgaaatgattgtgacaaaggcgggtcgcagaatgttccctcccttccaggttaagatacttgggatggacagcctcgccgattacgccctcctgatggatttcattcctttggacgataagcgctataggtatgcatttcattcttcggcgtggctggttgcgggtaaagcagaccctgccacacctggccgtgttcattttcaccctgatagccctgctaaaggagcacaatggatgaggcaaatcgtgtcttttgataaactgaagctgactaacaaccttctggacgataacgggcatattatccttaactccatgcaccgctaccagcctagattccacgtagtgttcgttgacccgcgcaaggatagcgagagatacgcccaagaaaattttaagagcttcattttcactgagacacaatttacagccgttaccgcctaccagaaccataggatcacgcagctcaagatcgccagcaaccccttcgcaaagggcttcagagagtccgatcttgacagctggcccgtggccccccgtccactgctatctgttccagcgcgcagccactctagcctgagtccatgtgtgctaaaaggagctactgatcgtgaaaaagatccaaacaaggcttcggcatcaacatccaagacgccggcctggttacatcatcaattgctcccccctcccgaggtgctccttgcacctgccacgtaccggcccgtcacttaccagtcactctactcaggggccccctctcatctcggaataccaaggactcgccccgcgccatatcccctgccaaatatcagggcagacagggaccagggcggacttccgctgcctgcagggcttggtctcctctccccaacagtggtgtgcctcgggcccgggcaggattcccagtag

SEQ ID NO: 160998 - DNA, 1158 bp, Artificial Sequence
  derived and/or modified sequence
atggccgccttcctgtctgctggcctgggcatcctggcccccagcgagacctaccccctgcccaccaccagcagcggctgggagccccggctgggcagccccttccccagcggcccctgcaccagcagcactggagcccaggccgtggccgagcccaccggccagggccccaagaacccccgggtgtcccgggtgacagtgcagctggagatgaagcccctgtgggaggagttcaaccagctgggcacagagatgattgtgaccaaggccggccgcaggatgttcccccccttccaggtgaagatcctgggcatggacagcctggccgactatgccctgctgatggacttcatccccctggatgacaagcgctaccgctatgccttccacagcagcgcctggctggtggccggcaaggctgaccctgccaccccaggccgggtgcacttccacccagacagccctgccaagggggcccagtggatgaggcagatcgtgtcctttgacaagctgaagctgaccaacaacctgctggatgacaatggccacatcatcctgaacagcatgcaccgctaccagccccgcttccacgtggtgtttgtggaccccaggaaggacagcgagagatatgcccaggagaacttcaagagcttcatcttcacagagacccagttcaccgctgtgacagcctaccagaaccaccgcatcacccagctgaagatcgccagcaacccctttgccaagggcttccgggagagtgacctggacagctggcctgtggccccccggcccctgctgtctgtgcctgcccggagccacagcagcctgagcccctgtgtgctgaagggggccacagaccgggagaaggaccccaacaaggccagcgccagcaccagcaagaccccagcctggctgcaccaccagctgctgcccccacctgaggtgctgctggccccagccacctacagacctgtgacctaccagagcctgtacagcggggcccccagccacctgggcatccccaggaccaggcctgccccctaccccctgcccaacatccgggctgaccgggaccagggcggcctgcccctgcctgctggcctgggcctgctgagccccaccgtggtgtgcctgggccctggccaggacagccagtag

SEQ ID NO: 160999 - DNA, 1158 bp, Artificial Sequence
  derived and/or modified sequence
atggccgccttcctgagcgccggcctgggcatcctggcccccagcgaaacttaccctctgcctacaacgtcttctgggtgggagcccaggttgggtagcccgttccccagcggcccctgtacctcttccaccggggctcaggctgtcgctgaacccactggtcagggtcctaagaacccccgggtcagccgggtgacggtccagctagaaatgaaaccgctgtgggaagaattcaaccagctgggcaccgaaatgatcgtgaccaaagctggaagacgaatgttccctccttttcaggtcaaaattctgggcatggactctcttgctgattatgcccttctgatggatttcatcccccttgatgataaaagataccgatatgcctttcattcttctgcctggcttgtggccggcaaagctgatcccgccacaccaggtcgagtgcattttcatcccgatagtccagccaaaggagctcagtggatgcgacagattgtctctttcgataagttaaagctgacgaataatttgttagacgacaatggacacatcatcctgaattccatgcaccggtatcagcctagatttcacgttgtgttcgtggatcctcgcaaagactcagaacggtatgcccaagagaactttaaatcgttcatcttcacagagactcagtttaccgctgtcacagcctaccagaaccaccgtatcacgcagctgaagattgcgagtaacccttttgccaaaggtttccgagaaagcgatctggactcatggccagttgccccccgccccctgctgtccgtgcccgcccgctcccacagttccctgtcaccttgcgtgctgaagggcgccaccgacagggaaaaggatcctaacaaggcctcagcatctacctctaaaaccccagcttggctgcatcatcagctgttgccacctcctgaggtgctcctggcccccgccacatacagacccgttacgtatcagtctttgtactccggggctccttcccatctgggaatacctcgcacacggcctgccccgtaccctctgcctaacatcagggctgatcgggatcagggagggttaccgctgcctgctgggctgggattgctgagccctacggtagtctgtctgggtccaggccaggactcacagtag

SEQ ID NO: 161000 - DNA, 1158 bp, Artificial Sequence
  derived and/or modified sequence
atggcggcattcttatccgccggacttggaatcctcgcccctagcgagacatatcctctccccactaccagttccggttgggagccgcgactgggctctcccttcccaagcggtccttgcacctcaagcaccggtgctcaggctgtggccgaacccactggccaaggaccaaagaatccccgtgtttcaagagtaaccgtgcaactcgagatgaagcccctgtgggaagagttcaatcagctgggaactgaaatgattgttaccaaagccggacgaaggatgtttccgccatttcaagtgaaaatcctgggaatggactcactggccgattacgcacttttaatggacttcatcccattggacgacaagcgatacaggtatgcatttcactcaagcgcctggctggttgccggtaaagccgaccccgctactcccggtagggtgcactttcaccctgatagccctgcaaagggggcacaatggatgagacagattgtgagtttcgataagctgaaattgaccaacaacctcctggacgacaacggccacattatccttaacagtatgcatcggtatcagccacggtttcacgttgtgtttgtcgaccccagaaaagactctgagcgatatgcccaggagaattttaaatccttcatattcaccgagacccagtttaccgcggtaactgcataccaaaaccatcgcatcacccagcttaaaatagcctccaatccatttgccaaagggttcagagaatccgacctggacagctggcccgtcgcgcctaggcctctgctgagtgtccccgctcgatcacactcctccttgtcaccctgtgtgttaaagggagccaccgatagagagaaggacccaaacaaagcctcggccagtacctcgaagacacccgcttggctccaccaccagctacttccacctccagaagtgctcctggccccagctacttatcggcctgtcacctaccagtcgctgtacagcggcgctccaagtcacctgggaatcccccgaacacgcccagctccctatccgttgccaaacattcgagccgaccgggaccagggagggctgccattaccagcaggcctgggcttgttaagcccaacagtggtttgcttaggaccaggacaagactcacagtag

SEQ ID NO: 161001 - DNA, 1548 bp, Artificial Sequence
  derived and/or modified sequence
acgagtggtgaccaccccttccagcaggcaggttcccagccccagccaagcagtgtttctccaggagccggacagcctctctgtctccatggcagccttcctatctgctggcctcggcatacttgcaccctcagagacctaccccctacctacaaccagctctggctgggagccccggctggggtcaccattcccatcaggcccttgcaccagctctactggggcccaagctgtggccgagcccactgggcagggccccaagaacccacgtgtgtccagagtgacagttcagctggagatgaagcctctgtgggaggaattcaaccagctgggcactgagatgatcgtcaccaaggcaggcaggaggatgttcccccccttccaggtgaagatcctgggcatggactccctggccgactacgccctgctcatggacttcatccccctggacgacaagagatacaggtatgccttccacagctcggcctggctggtggcgggcaaggcagacccagccacacctggccgcgtgcacttccaccccgactcgccagccaagggtgcccagtggatgcgccagattgtgtcctttgacaagctcaagctgaccaacaacctgctggatgacaatggccacatcattctcaactctatgcaccgctaccagccccgtttccacgtggtcttcgtggacccacgcaaggacagtgagcgctatgcccaggagaacttcaagtccttcatcttcacagagacccagttcacagcagtgacagcctatcagaaccacaggatcacccagctgaaaatcgccagcaacccttttgccaaaggctttagagagagtgacctggactcctggcctgtggccccacggcccctgctcagtgtcccagcccggagtcacagcagcctcagtccctgtgtgctgaagggtgccacagacagggagaaagaccccaacaaagcttcagcttccacctccaagacccctgcttggctccatcatcagctgctgcccccacctgaggtcctgctggccccggccacctacaggcctgtcacgtatcagagcctgtactctggagccccgagccacctagggatcccaaggacccgaccagcaccataccccctccccaacatccgggctgatagggatcaaggaggcctgcctctcccagctgggctggggctcctgtcccccactgtggtgtgcctggggcctggccaggactcccagtgatgccagaagccctggggggaagccctgctaccctggaccttacaccgggtgtgggaatcagcctctgccccgccccctccagccccatctctgtctcaaggagagcagggtaggtgaaagtctagagaaagaggctacctgcccagggtcacagcaaggctgggaccatggcaagcttggaaccaggacttctatctcccaaccccagcagcctgaatactgtgccctcttgctttgggggtaactcccgaaaaccctgccttacctctcccttccccctaacattaaactatttggcatga

SEQ ID NO: 161002 - protein, 723 aa, Artificial Sequence
  derived and/or modified sequence
MSLSMRDPVIPGTSMAYHPFLPHRAPDFAMSAVLGHQPPFFPALTLPPNGAAALSLPGALAKPIMDQLVGAAETGIPFSSLGPQAHLRPLKTMEPEEEVEDDPKVHLEAKELWDQFHKRGTEMVITKSGRRMFPPFKVRCSGLDKKAKYILLMDIIAADDCRYKFHNSRWMVAGKADPEMPKRMYIHPDSPATGEQWMSKVVTFHKLKLTNNISDKHGFTILNSMHKYQPRFHIVRANDILKLPYSTFRTYLFPETEFIAVTAYQNDKITQLKIDNNPFAKGFRDTGNGRREKRKQLTLQSMRVFDERHKKENGTSDESSSEQAAFNCFAQASSPAASTVGTSNLKDLCPSEGESDAEAESKEEHGPEACDAAKISTTTSEEPCRDKGSPAVKAHLFAAERPRDSGRLDKASPDSRHSPATISSSTRGLGAEERRSPVREGTAPAKVEEARALPGKEAFAPLTVQTDAAAAHLAQGPLPGLGFAPGLAGQQFFNGHPLFLHPSQFAMGGAFSSMAAAGMGPLLATVSGASTGVSGLDSTAMASAAAAQGLSGASAATLPFHLQQHVLASQGLAMSPFGSLFPYPYTYMAAAAAASSAAASSSVHRHPFLNLNTMRPRLRYSPYSIPVPVPDGSSLLTTALPSMAAAAGPLDGKVAALAASPASVAVDSGSELNSRSSTLSSSSMSLSPKLCAEKEAATSELQSIQRLVSGLEAKPDRSRSASP

SEQ ID NO: 161003 - DNA, 4754 bp, Artificial Sequence
  derived and/or modified sequence
gaattctagaggcggcggagggtggcgaggagctctcgctttctctcgctccctccctctccgactccgtctctctctctctctctctctctcccctccctctctttccctctgttccattttttccccctctaaatcctccctgccctgcgcgcctggacacagatttaggaagcgaattcgctcacgttttaggacaaggaagagagagaggcacgggagaagagcccagcaagatttggattgaaaccgagacaccctccggaggctcggagcagaggaaggaggaggagggcggcgaacggaagccagtttgcaattcaagttttgatagcgctggtagaagggggtttaaatcagatttttttttttttaaaggagagagactttttccgctctctcgctccctgttaaagccgggtctagcacagctgcagacgccaccagcgagaaagagggagaggaagacagatagggggcgggggaagaagaaaaagaaaggtaaaaagtcttctaggagaacctttcacatttgcaacaaaagacctaggggctggagagagattcctgggacgcagggctggagtgtctatttcgagctcagcggcagggctcgggcgcgagtcgagaccctgctcgctcctctcgcttctgaaaccgacgttcaggagcggctttttaaaaacgcaaggcacaaggacggtcacccgcgcgactatgtttgctgatttttcgccttgccctctttaaaagcggcctcccattctccaaaagacacttcccctcctccctttgaagtgcattagttgtgatttctgcctccttttcttttttctttcttttttgttttgctttttccccccttttgaattatgtgctgctgttaaacaacaacaaaaaaacaacaaaacacagcagctgcggacttgtccccggctggagcccagcgccccgcctggagtggatgagcctctccatgagagatccggtcattcctgggacaagcatggcctaccatccgttcctacctcaccgggcgccggacttcgccatgagcgcggtgctgggtcaccagccgccgttcttccccgcgctgacgctgcctcccaacggcgcggcggcgctctcgctgccgggcgccctggccaagccgatcatggatcaattggtgggggcggccgagaccggcatcccgttctcctccctggggccccaggcgcatctgaggcctttgaagaccatggagcccgaagaagaggtggaggacgaccccaaggtgcacctggaggctaaagaactttgggatcagtttcacaagcggggcaccgagatggtcattaccaagtcgggaaggcgaatgtttcctccatttaaagtgagatgttctgggctggataaaaaagccaaatacattttattgatggacattatagctgctgatgactgtcgttataaatttcacaattctcggtggatggtggctggtaaggccgaccccgaaatgccaaagaggatgtacattcacccggacagccccgctactggggaacagtggatgtccaaagtcgtcactttccacaaactgaaactcaccaacaacatttcagacaaacatggatttactatattgaactccatgcacaaataccagccccggttccacattgtaagagccaatgacatcttgaaactcccttatagtacatttcggacatacttgttccccgaaactgaattcatcgctgtgactgcataccagaatgataagataacccagttaaaaatagacaacaacccttttgcaaaaggtttccgggacactggaaatggccgaagagaaaaaagaaaacagctcaccctgcagtccatgagggtgtttgatgaaagacacaaaaaggagaatgggacctctgatgagtcctccagtgaacaagcagctttcaactgcttcgcccaggcttcttctccagccgcctccactgtagggacatcgaacctcaaagatttatgtcccagcgagggtgagagcgacgccgaggccgagagcaaagaggagcatggccccgaggcctgcgacgcggccaagatctccaccaccacgtcggaggagccctgccgtgacaagggcagccccgcggtcaaggctcaccttttcgctgctgagcggccccgggacagcgggcggctggacaaagcgtcgcccgactcacgccatagccccgccaccatctcgtccagcactcgcggcctgggcgcggaggagcgcaggagcccggttcgcgagggcacagcgccggccaaggtggaagaggcgcgcgcgctcccgggcaaggaggccttcgcgccgctcacggtgcagacggacgcggccgccgcgcacctggcccagggccccctgcctggcctcggcttcgccccgggcctggcgggccaacagttcttcaacgggcacccgctcttcctgcaccccagccagtttgccatggggggcgccttctccagcatggcggccgctggcatgggtcccctcctggccacggtttctggggcctccaccggtgtctcgggcctggattccacggccatggcctctgccgctgcggcgcagggactgtccggggcgtccgcggccaccctgcccttccacctccagcagcacgtcctggcctctcagggcctggccatgtcccctttcggaagcctgttcccttacccctacacgtacatggccgcagcggcggccgcctcctctgcggcagcctccagctcggtgcaccgccaccccttcctcaatctgaacaccatgcgcccgcggctgcgctacagcccctactccatcccggtgccggtcccggacggcagcagtctgctcaccaccgccctgccctccatggcggcggccgcggggcccctggacggcaaagtcgccgccctggccgccagcccggcctcggtggcagtggactcgggctctgaactcaacagccgctcctccacgctctcctccagctccatgtccttgtcgcccaaactctgcgcggagaaagaggcggccaccagcgaactgcagagcatccagcggttggttagcggcttggaagccaagccggacaggtcccgcagcgcgtccccgtagacccgtcccagacacgtcttttcattccagtccagttcaggctgccgtgcactttgtcggatataaaataaaccacgggcccgccatggcgttagcccttccttttgcagttgcgtctgggaaggggccccggactccctcgagagaatgtgctagagacagcccctgtcttcttggcgtggtttatatgtccgggatctggatcagattctgggggctcagaaacgtcggttgcattgagctactgggggtaggagttccaacatttatgtccagagcaacttccagcaaggctggtctgggtctctgcccaccaggcggggaggtgttcaaagacatctccctcagtgcggatttatatatatatttttccttcactgtgtcaagtggaaacaaaaacaaaatctttcaaaaaaaaaatcgggacaagtgaacacattaacatgattctgtttgtgcagattaaaaactttatagggacttgcattatcggttctcaataaattactgagcagctttgtttggggagggaagtccctaccatccttgtttagtctatattaagaaaatctgtgtctttttaatattcttgtgatgttttcagagccgctgtaggtctcttcttgcatgtccacagtaatgtatttgtggtttttattttgaacgcttgcttttagagagaaaacaatatagccccctacccttttcccaatcctttgccctcaaatcagtgacccaagggagggggggatttaaagggaaggagtgggcaaaacacataaaatgaatttattatatctaagctctgtagcaggattcatgtcgttctttgacagttctttctctttcctgtatatgcaataacaaggttttaaaaaaataataaagaagtgagactattagacaaagtatttatgtaattatttgataactcttgtaaataggtggaatatgaatgcttggaaaattaaactttaatttattgacattgtacatagctctgtgtaaatagaattgcaactgtcaggttttgtgttcttgttttcctttagttgggtttatttccaggtcacagaattgctgttaacactagaaaacacacttcctgcaccaacaccaataccctttcaaaagagttgtctgcaacatttttgttttcttttttaatgtccaaaagtgggggaaagtgctatttcctattttcaccaaaattggggaaggagtgccactttccagctccacttcaaattccttaaaatataactgagattgctgtggggagggaggagggcagaggctgcggtttgactttttaatttttcttttgttatttgtatttgctagtctctgatttcctcaaaacgaagtggaatttactactgttgtcagtatcggtgttttgaattggtgcctgcctatagagatatattcacagttcaaaagtcaggtgctgagagatggtttaaagacaaattcatgaaggtatattttgtgttatagttgttgatgagttctttggttttctgtatttttccccctctctttaaaacatcactgaaatttcaataaatttttattgaaatgtctaaaaaaaaaaaaaaaaaaaaaaaaaaaaaaa

SEQ ID NO: 161004 - DNA, 2172 bp, Artificial Sequence
  derived and/or modified sequence
atgagcctgagcatgagagaccccgtgatccccggcaccagcatggcctaccaccccttcctgccccacagagcccccgacttcgccatgagcgccgtgctgggccaccagccccccttcttccccgccctgaccctgccccccaacggcgccgccgccctgagcctgcccggcgccctggccaagcccatcatggaccagctggtgggcgccgccgagaccggcatccccttcagcagcctgggcccccaggcccacctgagacccctgaagaccatggagcccgaggaggaggtggaggacgaccccaaggtgcacctggaggccaaggagctgtgggaccagttccacaagagaggcaccgagatggtgatcaccaagagcggcagaagaatgttcccccccttcaaggtgagatgcagcggcctggacaagaaggccaagtacatcctgctgatggacatcatcgccgccgacgactgcagatacaagttccacaacagcagatggatggtggccggcaaggccgaccccgagatgcccaagagaatgtacatccaccccgacagccccgccaccggcgagcagtggatgagcaaggtggtgaccttccacaagctgaagctgaccaacaacatcagcgacaagcacggcttcaccatcctgaacagcatgcacaagtaccagcccagattccacatcgtgagagccaacgacatcctgaagctgccctacagcaccttcagaacctacctgttccccgagaccgagttcatcgccgtgaccgcctaccagaacgacaagatcacccagctgaagatcgacaacaaccccttcgccaagggcttcagagacaccggcaacggcagaagagagaagagaaagcagctgaccctgcagagcatgagagtgttcgacgagagacacaagaaggagaacggcaccagcgacgagagcagcagcgagcaggccgccttcaactgcttcgcccaggccagcagccccgccgccagcaccgtgggcaccagcaacctgaaggacctgtgccccagcgagggcgagagcgacgccgaggccgagagcaaggaggagcacggccccgaggcctgcgacgccgccaagatcagcaccaccaccagcgaggagccctgcagagacaagggcagccccgccgtgaaggcccacctgttcgccgccgagagacccagagacagcggcagactggacaaggccagccccgacagcagacacagccccgccaccatcagcagcagcaccagaggcctgggcgccgaggagagaagaagccccgtgagagagggcaccgcccccgccaaggtggaggaggccagagccctgcccggcaaggaggccttcgcccccctgaccgtgcagaccgacgccgccgccgcccacctggcccagggccccctgcccggcctgggcttcgcccccggcctggccggccagcagttcttcaacggccaccccctgttcctgcaccccagccagttcgccatgggcggcgccttcagcagcatggccgccgccggcatgggccccctgctggccaccgtgagcggcgccagcaccggcgtgagcggcctggacagcaccgccatggccagcgccgccgccgcccagggcctgagcggcgccagcgccgccaccctgcccttccacctgcagcagcacgtgctggccagccagggcctggccatgagccccttcggcagcctgttcccctacccctacacctacatggccgccgccgccgccgccagcagcgccgccgccagcagcagcgtgcacagacaccccttcctgaacctgaacaccatgagacccagactgagatacagcccctacagcatccccgtgcccgtgcccgacggcagcagcctgctgaccaccgccctgcccagcatggccgccgccgccggccccctggacggcaaggtggccgccctggccgccagccccgccagcgtggccgtggacagcggcagcgagctgaacagcagaagcagcaccctgagcagcagcagcatgagcctgagccccaagctgtgcgccgagaaggaggccgccaccagcgagctgcagagcatccagagactggtgagcggcctggaggccaagcccgacagaagcagaagcgccagcccctag

SEQ ID NO: 161005 - DNA, 2172 bp, Artificial Sequence
  derived and/or modified sequence
atgagcctcagcatgcgtgaccctgtaatacctggcacttctatggcgtaccaccctttcctgccccacagggctcccgacttcgcgatgagcgccgtgcttgggcaccagcctcctttttttccagcccttacactcccacccaatggtgccgccgccttaagcttgccaggggcactggccaagcctataatggaccagctggttggggcggctgagactggcatacccttctcaagcctggggccacaggctcatctacgcccgttgaagaccatggagcccgaggaagaagtggaggacgatcccaaagtgcatttagaagccaaggagctgtgggaccagttccacaagaggggaacagagatggttatcacaaaatccggtagaagaatgttcccccctttcaaggtgcgatgttccgggctggacaagaaggctaagtatatcttgctgatggatataatcgccgccgacgactgcaggtacaagtttcataattccagatggatggtggccggcaaagcagatccggagatgcctaaacggatgtatattcaccccgattcacccgccactggagagcaatggatgtcaaaggtggtcacgttccataaactgaagctcaccaacaacatctctgataagcatggttttaccatcctgaattcaatgcataagtatcagcccaggtttcacattgtccgggcgaacgatatccttaaactgccatattctacgttccgtacataccttttccccgaaacagaattcattgccgtgaccgcttaccagaacgacaaaattacacagctcaagattgacaacaacccattcgctaagggattccgcgacactgggaatggtagacgagaaaaaaggaaacagctgaccctccagtctatgagggttttcgatgagcgtcacaagaaagagaatggaactagtgatgagtctagctctgaacaggctgcattcaactgcttcgcacaggcatcatcaccagctgcctcaactgtgggaaccagtaatcttaaggacctgtgtccctccgagggcgaaagcgatgccgaggccgaatctaaggaggaacacggtccagaagcctgcgacgcagcaaagatctcgacgactaccagtgaagagccttgccgggataaaggaagccccgctgtgaaggcccatctgttcgctgcagagcgaccgagagatagcggcaggctcgacaaggcatcacccgacagcaggcattccccagcaacaatcagctcttctacacggggactgggcgctgaggaacgacgctcgccagtgcgggaggggacagccccagccaaggtggaggaagcccgggcgctcccaggaaaagaggcctttgcccccttgacagtccagacggatgccgctgctgctcacctggcacagggacccctgccagggttgggattcgccccgggcctggccggccagcagttcttcaatggtcaccccctctttctgcacccatcgcagtttgctatgggcggcgcgtttagttccatggctgcagcaggcatgggaccccttctcgccacagtgtctggggcctccaccggcgtctcagggctggactcgacagccatggcgtcggctgccgctgcccagggcttgagtggggcaagtgccgccaccttgccatttcatctacagcagcacgtccttgcgtcgcagggcctggccatgagcccctttggtagcctgtttccctatccctacacatacatggccgcggcggccgctgcatcatcggcagcagcttcatcttccgttcatagacacccctttctgaatcttaacacgatgcggccgaggctgagatattctccgtactccattcccgtcccggtgcccgatggtagtagtctgctcaccaccgcattaccgtctatggccgcagccgccgggccattggacggaaaagtagcagccctggccgcctcccctgcctcagtggctgttgattccggaagtgagctgaattctagatccagcacattgagttcttcttcaatgagcctgtccccaaagctgtgcgccgaaaaggaggccgcaactagcgaattgcaatctatccagagactggtgagcgggctcgaagccaagccagataggtctcgatccgccagtccatag

SEQ ID NO: 161006 - DNA, 2172 bp, Artificial Sequence
  derived and/or modified sequence
atgagcctgtccatgagggaccccgtcatccctggcacctccatggcctaccaccccttcctgccccaccgggccccagactttgccatgtctgctgtgctgggccaccagccccccttcttccctgccctgaccctgcccccaaatggagctgctgccctgagcctgcccggggccctggccaagcccatcatggaccagctggtgggcgctgctgagaccggcatccccttcagcagcctgggcccccaggcccacctgcggcccctgaagaccatggagcctgaggaggaggtggaggatgaccccaaggtgcacctggaggccaaggagctgtgggaccagttccacaagaggggcacagagatggtgatcaccaagagcggccgcaggatgttcccccccttcaaggtgcgctgcagcggcctggacaagaaggccaagtacatcctgctgatggacatcatcgccgcagatgactgccgctacaagttccacaacagccgctggatggtggccggcaaggctgaccctgagatgcccaagaggatgtacatccacccagacagccctgccactggagagcagtggatgagcaaggtggtgaccttccacaagctgaagctgaccaacaacatcagtgacaagcacggcttcaccatcctgaacagcatgcacaagtaccagccccgcttccacatcgtgcgggccaatgacatcctgaagctgccctacagcaccttccgcacctacctgtttcctgagacagagttcatcgctgtgacagcctaccagaatgacaagatcacccagctgaagattgacaacaacccctttgccaagggcttccgggacacaggaaatggccggcgggagaagaggaagcagctgaccctgcagagcatgagggtgtttgatgagcggcacaagaaggaaaatggcaccagtgatgagagcagcagcgagcaggccgccttcaactgctttgcccaggccagcagccctgctgccagcacagtgggcaccagcaacctgaaggacctgtgccccagcgagggggagagtgatgctgaggccgagagcaaggaggagcacggccctgaggcctgtgatgctgccaagatcagcaccaccaccagcgaggagccctgccgggacaagggcagccctgctgtgaaggcccacctgtttgctgctgagcggccccgggacagcggccgcctggacaaggccagcccagacagccgccacagccctgccaccatcagcagcagcacccggggcctgggcgctgaggagcggcgcagccctgtgcgggagggcacagccccagccaaggtggaggaggcccgggccctgcccgggaaggaggcctttgcccccctgactgtgcagacagatgctgctgctgcccacctggcccagggccccctgcccggcctgggctttgcccctggcctggccggccagcagttcttcaacggccaccccctcttcctgcaccccagccagtttgccatgggcggggccttcagctccatggctgctgctggcatgggccccctgctggccaccgtgtctggggccagcactggagtgtctggcctggacagcacagccatggccagcgctgctgctgcccagggcctgagcggggccagcgctgccaccctgcccttccacctgcagcagcacgtgctggccagccagggcctggccatgagccccttcggcagcctcttcccctacccctacacctacatggctgctgctgctgctgccagcagcgctgctgccagcagctctgtgcaccgccaccccttcctgaacctgaacaccatgaggccccggctgcgctacagcccctacagcatccctgtgcctgtgcctgatggcagcagcctgctgaccacagccctgcccagcatggctgctgctgctggccccctggatggcaaggtggccgccctggccgccagccctgcctctgtggccgtggacagcggcagcgagctgaacagccgcagcagcaccctgagcagcagctccatgagcctgagccccaagctgtgtgccgagaaggaggccgccaccagcgagctgcagagcatccagaggctggtgtctggcctggaggccaagccagacaggagccgcagcgccagcccctag

SEQ ID NO: 161007 - DNA, 2172 bp, Artificial Sequence
  derived and/or modified sequence
atgagcctgagcatgcgggaccccgtgatccccggcaccagcatggcttatcacccattccttcctcatcgcgcgcctgactttgccatgtcagccgtgctagggcaccagccccccttttttcccgccctaactttacccccaaacggggcggctgctctttctctgccaggagcactggcaaaaccaatcatggaccagctggtcggtgcggccgaaaccggaatcccattttccagcctcggaccccaggctcacttgcgcccactgaaaaccatggaacctgaggaggaggtggaggatgatcccaaagtgcacctggaagctaaggaactctgggatcagttccataagcggggcacagagatggttattacaaagtccggcaggcggatgttcccacccttcaaggtcagatgctcgggcctggataagaaagccaagtacatccttttaatggacatcatcgccgctgatgattgtcgctataagttccataatagccgttggatggttgccggtaaggcagatcccgagatgccaaaacggatgtatattcaccctgacagtcctgcaaccggggagcagtggatgtctaaagtggtcacctttcataaactaaaactaactaacaacatcagcgacaagcacggctttaccatactgaattctatgcataaatatcaaccacgcttccacattgtaagagccaatgatattcttaagcttccatacagcaccttccgaacttatctgttccccgaaaccgagtttatcgccgttacggcttatcaaaatgataaaatcactcaactaaaaattgacaacaacccctttgctaagggtttcagggacacaggtaacggaaggagggagaaaaggaagcagctcacactgcagtccatgcgtgtgttcgacgagaggcacaagaaggagaatggcacatcagatgaatcctcttcagagcaggctgccttcaattgcttcgcccaggccagttctccggccgcctctactgtaggcacaagcaacctgaaagatctgtgcccctccgagggtgaatctgatgcggaagcagagagcaaagaagagcatggtccagaagcatgcgatgcagcgaagatcagcaccacaacttctgaagaaccatgccgggacaagggatccccggccgtcaaagcccacctgttcgcagcggagaggccacgggatagtggacgattggacaaagcaagtccagactctagacactctcctgcaacgatcagcagctcgactaggggcctgggtgctgaggaacgccgttcccccgtgagggagggtacagcccccgcgaaagtggaagaggctagggccctgcctggaaaggaagcattcgctcctttgacagtgcagaccgatgcagcggcggctcacctcgcacagggtcccctgcccggtctggggttcgccccaggcctggccggtcaacagtttttcaacggccacccgctgttcctgcacccctcacagttcgccatgggaggtgccttttctagtatggcagccgctggtatggggcctttgctggcgaccgtctctggcgctagcacgggagtttccggtctcgactctaccgcaatggctagtgctgccgccgcacaggggctctctggagcttccgccgctacattaccattccatctacaacagcacgtgctggccagtcagggactagccatgtctccctttggatctctcttcccctatccatacacctatatggcagcggccgcggcagcctccagcgctgccgcaagttcgagcgttcacaggcacccttttctgaatctgaataccatgaggcccaggttaagatattctccatattcaattccggtgccggtgccagatggctcctccctcctgacaacagcacttccatccatggccgccgctgcaggacccctggatggcaaggttgcggccctggcagcttcgcctgcttccgtggcagtggattccggctcagagctcaacagtagatcatccaccctgtccagcagcagcatgtcattgagcccaaagttatgcgccgagaaggaggcggccacgtccgagctgcagtcaatccagcggctggtctccggccttgaggcaaaacctgaccgctctaggtccgccagcccctag

SEQ ID NO: 161008 - DNA, 2172 bp, Artificial Sequence
  derived and/or modified sequence
atgagccttagtatgcgcgaccctgtaatccctgggacatcaatggcctaccacccctttctcccgcatcgagctcctgatttcgccatgtcagccgtgctgggacaccagccgccattctttcccgctctgaccctgcctcccaacggagctgcggcactttcactaccgggagccctggccaagcctatcatggatcagctggtgggcgctgctgaaactgggatccccttctcttctctcggacctcaagcccacctccggccactcaaaaccatggaacctgaggaagaggtcgaggatgaccccaaagtgcacctggaggccaaggaactgtgggaccagtttcataaaaggggaacggagatggtgattaccaagtctgggagacgtatgttccctccatttaaggtccgctgctcaggcctcgacaaaaaggcgaagtacatcctcctgatggacattatcgcagccgatgattgtcgctataaattccataacagcagatggatggtcgcaggcaaggccgatccagaaatgcccaagcgcatgtacatccatcctgacagtccagccactggcgaacagtggatgagcaaagttgtcacatttcacaagctcaagctcaccaacaatatctccgacaaacacggcttcaccatcttgaattctatgcataaatatcagcccagatttcatattgtcagagcaaatgacatcttaaagttaccttattctacatttaggacatatctgtttcccgaaaccgaatttatcgccgtgacagcctatcagaatgataaaatcacacagctcaaaatagataataatccttttgccaagggttttagggatacgggcaacggccgtcgggagaagcgcaagcaactgaccctgcagtcaatgagggtgttcgatgagaggcataagaaggaaaacggcacgagcgatgagtcttcaagcgaacaggctgccttcaattgtttcgcccaggcaagttcacctgccgcatccacggtggggacatcgaacctgaaagacttgtgtcccagcgaaggggagagtgacgcagaggctgaatccaaggaggaacacgggcctgaagcttgtgacgccgctaaaatctctactacgacatcagaggaaccctgtagagacaagggctcaccagcggtaaaggcacacctgttcgcagctgagcgtccaagagatagcgggcgtctggacaaagcatcgcctgactctcgtcattcacccgctaccatcagttcgtccacccgaggcctgggcgctgaggagaggcgttctccagttcgcgagggtaccgctcctgctaaagttgaggaagccagagccctgcccggaaaagaagcgtttgctccactaaccgtccagactgatgccgcagccgcacacctggcacaggggcctttgccgggtctcggcttcgctcccggactcgcaggccagcagttttttaatggacatccgttattcttgcaccctagtcaatttgcgatgggcggagccttcagcagcatggccgctgcaggcatggggcctctgctggccacggtgtctggagcatccactggggtctctgggctggactccaccgccatggctagtgcagcggcagcacagggcctatccggagcaagtgcggcaactttaccattccacctgcagcagcatgtccttgcttcacagggcctggctatgtccccttttggtagccttttcccttacccatacacatacatggctgcggctgcagcagcctcaagcgcagctgccagctccagcgtccatagacatcctttcctcaatcttaacacaatgaggcccagactgcgatacagcccctactccataccagttccggttcctgacggttcgtcactcttgactacagcgctgccttcgatggcagcagccgcagggcctttggatggaaaagtagcagccttggctgcttcccccgctagtgttgccgtcgactcagggagtgagctcaacagccgaagcagcacactgagttctagctcgatgagtctttctccgaagctttgtgccgagaaggaggcggcaaccagcgagttgcagagcatccaaaggctggtttcaggcctggaggctaaaccagaccggtctcggagcgcttccccatag

SEQ ID NO: 161009 - DNA, 4723 bp, Artificial Sequence
  derived and/or modified sequence
gaattctagaggcggcggagggtggcgaggagctctcgctttctctcgctccctccctctccgactccgtctctctctctctctctctctctcccctccctctctttccctctgttccattttttccccctctaaatcctccctgccctgcgcgcctggacacagatttaggaagcgaattcgctcacgttttaggacaaggaagagagagaggcacgggagaagagcccagcaagatttggattgaaaccgagacaccctccggaggctcggagcagaggaaggaggaggagggcggcgaacggaagccagtttgcaattcaagttttgatagcgctggtagaagggggtttaaatcagatttttttttttttaaaggagagagactttttccgctctctcgctccctgttaaagccgggtctagcacagctgcagacgccaccagcgagaaagagggagaggaagacagatagggggcgggggaagaagaaaaagaaaggtaaaaagtcttctaggagaacctttcacatttgcaacaaaagacctaggggctggagagagattcctgggacgcagggctggagtgtctatttcgagctcagcggcagggctcgggcgcgagtcgagaccctgctcgctcctctcgcttctgaaaccgacgttcaggagcggctttttaaaaacgcaaggcacaaggacggtcacccgcgcgactatgtttgctgatttttcgccttgccctctttaaaagcggcctcccattctccaaaagacacttcccctcctccctttgaagtgcattagttgtgatttctgcctccttttcttttttctttcttttttgttttgctttttccccccttttgaattatgtgctgctgttaaacaacaacaaaaaaacaacaaaacacagcagctgcggacttgtccccggctggagcccagcgccccgcctggagtggatgagcctctccatgagagatccggtcattcctgggacaagcatggcctaccatccgttcctacctcaccgggcgccggacttcgccatgagcgcggtgctgggtcaccagccgccgttcttccccgcgctgacgctgcctcccaacggcgcggcggcgctctcgctgccgggcgccctggccaagccgatcatggatcaattggtgggggcggccgagaccggcatcccgttctcctccctggggccccaggcgcatctgaggcctttgaagaccatggagcccgaagaagaggtggaggacgaccccaaggtgcacctggaggctaaagaactttgggatcagtttcacaagcggggcaccgagatggtcattaccaagtcgggaaggcgaatgtttcctccatttaaagtgagatgttctgggctggataaaaaagccaaatacattttattgatggacattatagctgctgatgactgtcgttataaatttcacaattctcggtggatggtggctggtaaggccgaccccgaaatgccaaagaggatgtacattcacccggacagccccgctactggggaacagtggatgtccaaagtcgtcactttccacaaactgaaactcaccaacaacatttcagacaaacatggatttactatattgaactccatgcacaaataccagccccggttccacattgtaagagccaatgacatcttgaaactcccttatagtacatttcggacatacttgttccccgaaactgaattcatcgctgtgactgcataccagaatgataagataacccagttaaaaatagacaacaacccttttgcaaaaggtttccgggacactggaaatggccgaagagaaaaaagaaaacagctcaccctgcagtccatgagggtgtttgatgaaagacacaaaaaggagaatgggacctctgatgagtcctccagtgaacaagcagctttcaactgcttcgcccaggcttcttctccagccgcctccactgtagggacatcgaacctcaaagatttatgtcccagcgagggtgagagcgacgccgaggccgagagcaaagaggagcatggccccgaggcctgcgacgcggccaagatctccaccaccacgtcggaggagccctgccgtgacaagggcagccccgcggtcaaggctcaccttttcgctgctgagcggccccgggacagcgggcggctggacaaagcgtcgcccgactcacgccatagccccgccaccatctcgtccagcactcgcggcctgggcgcggaggagcgcaggagcccggttcgcgagggcacagcgccggccaaggtggaagaggcgcgcgcgctcccgggcaaggaggccttcgcgccgctcacggtgcagacggacgcggccgccgcgcacctggcccagggccccctgcctggcctcggcttcgccccgggcctggcgggccaacagttcttcaacgggcacccgctcttcctgcaccccagccagtttgccatggggggcgccttctccagcatggcggccgctggcatgggtcccctcctggccacggtttctggggcctccaccggtgtctcgggcctggattccacggccatggcctctgccgctgcggcgcagggactgtccggggcgtccgcggccaccctgcccttccacctccagcagcacgtcctggcctctcagggcctggccatgtcccctttcggaagcctgttcccttacccctacacgtacatggccgcagcggcggccgcctcctctgcggcagcctccagctcggtgcaccgccaccccttcctcaatctgaacaccatgcgcccgcggctgcgctacagcccctactccatcccggtgccggtcccggacggcagcagtctgctcaccaccgccctgccctccatggcggcggccgcggggcccctggacggcaaagtcgccgccctggccgccagcccggcctcggtggcagtggactcgggctctgaactcaacagccgctcctccacgctctcctccagctccatgtccttgtcgcccaaactctgcgcggagaaagaggcggccaccagcgaactgcagagcatccagcggttggttagcggcttggaagccaagccggacaggtcccgcagcgcgtccccgtagacccgtcccagacacgtcttttcattccagtccagttcaggctgccgtgcactttgtcggatataaaataaaccacgggcccgccatggcgttagcccttccttttgcagttgcgtctgggaaggggccccggactccctcgagagaatgtgctagagacagcccctgtcttcttggcgtggtttatatgtccgggatctggatcagattctgggggctcagaaacgtcggttgcattgagctactgggggtaggagttccaacatttatgtccagagcaacttccagcaaggctggtctgggtctctgcccaccaggcggggaggtgttcaaagacatctccctcagtgcggatttatatatatatttttccttcactgtgtcaagtggaaacaaaaacaaaatctttcaaaaaaaaaatcgggacaagtgaacacattaacatgattctgtttgtgcagattaaaaactttatagggacttgcattatcggttctcaataaattactgagcagctttgtttggggagggaagtccctaccatccttgtttagtctatattaagaaaatctgtgtctttttaatattcttgtgatgttttcagagccgctgtaggtctcttcttgcatgtccacagtaatgtatttgtggtttttattttgaacgcttgcttttagagagaaaacaatatagccccctacccttttcccaatcctttgccctcaaatcagtgacccaagggagggggggatttaaagggaaggagtgggcaaaacacataaaatgaatttattatatctaagctctgtagcaggattcatgtcgttctttgacagttctttctctttcctgtatatgcaataacaaggttttaaaaaaataataaagaagtgagactattagacaaagtatttatgtaattatttgataactcttgtaaataggtggaatatgaatgcttggaaaattaaactttaatttattgacattgtacatagctctgtgtaaatagaattgcaactgtcaggttttgtgttcttgttttcctttagttgggtttatttccaggtcacagaattgctgttaacactagaaaacacacttcctgcaccaacaccaataccctttcaaaagagttgtctgcaacatttttgttttcttttttaatgtccaaaagtgggggaaagtgctatttcctattttcaccaaaattggggaaggagtgccactttccagctccacttcaaattccttaaaatataactgagattgctgtggggagggaggagggcagaggctgcggtttgactttttaatttttcttttgttatttgtatttgctagtctctgatttcctcaaaacgaagtggaatttactactgttgtcagtatcggtgttttgaattggtgcctgcctatagagatatattcacagttcaaaagtcaggtgctgagagatggtttaaagacaaattcatgaaggtatattttgtgttatagttgttgatgagttctttggttttctgtatttttccccctctctttaaaacatcactgaaatttcaataaatttttattgaaatgtct

SEQ ID NO: 161010 - protein, 364 aa, Artificial Sequence
  derived and/or modified sequence
MSLAGGRAPRKTAGNRLSGLLEAEEEDEFYQTTYGGFTEESGDDEYQGDQSDTEDEVDSDFDIDEGDEPSSDGEAEEPRRKRRVVTKAYKEPLKSLRPRKVNTPAGSSQKAREEKALLPLELQDDGSDSRKSMRQSTAEHTRQTFLRVQERQGQSRRRKGPHCERPLTQEELLREAKITEELNLRSLETYERLEADKKKQVHKKRKCPGPIITYHSVTVPLVGEPGPKEENVDIEGLDPAPSVSALTPHAGTGPVNPPARCSRTFITFSDDATFEEWFPQGRPPKVPVREVCPVTHRPALYRDPVTDIPYATARAFKIIREAYKKYITAHGLPPTASALGPGPPPPEPLPGSGPRALRQKIVIK

SEQ ID NO: 161011 - DNA, 1324 bp, Artificial Sequence
  derived and/or modified sequence
ctggtgaggggctgcaggtggcggcgcagtctcggtaggcggtatgagtttggctgggggccgggcaccccggaagaccgctgggaaccggctttctgggcttttggaggcagaggaggaagatgagttctaccagacgacttatgggggtttcacagaggaatccggagatgatgagtatcaaggggaccagtcagacacagaggacgaagtggactctgactttgacattgatgaaggggatgaaccatccagtgatggagaagcagaagagccaagaaggaagcgccgagtagtcaccaaggcctataaggaacctctcaagagcttaaggcctcgaaaggtcaacaccccggctggtagctctcagaaggcgcgagaagagaaggcactactgccattagaactacaagatgacggctctgacagtcggaagtctatgcgtcagtctacagctgagcatacacgacaaacgttccttcgggtacaggagaggcagggccagtcaagacggcgaaaggggccccactgtgagcggccactaacccaggaggaactgctccgggaggccaagatcacagaagagcttaatttacggtcactggagacatatgagcggctcgaggctgataaaaagaagcaggttcataagaagcggaagtgccccgggcccataatcacctatcattcagtgacagtgccacttgttggggagccaggccccaaggaagagaacgttgacatagaaggacttgatcctgctccctcggtgtctgcattgactcctcatgctgggactggacccgtcaacccccctgctcgctgctcacgtaccttcatcacttttagtgatgatgcaactttcgaggaatggttcccccaagggcggcccccaaaagtccctgttcgtgaggtctgtccagtgacccatcgtccagccctataccgggaccctgttacagacataccctatgccactgctcgagccttcaagatcattcgtgaggcttacaagaagtacattactgcccatggactgccgcccactgcctcagccctgggccccggcccgccacctcctgagcccctccctggctctgggccccgagccttgcgccagaaaattgtcattaaatgaagagatgtctagtcctcagaaacttctttcctgccctgattggggctcttgctgttccgtttcttctccctgcttctcccctttgtcatctctgatctttgcctaatctgtttctttttccttttcccctagttcttacaggtttcgttgtgttttttaatctaataaaatagaaagatccctttt

SEQ ID NO: 161012 - DNA, 1095 bp, Artificial Sequence
  derived and/or modified sequence
atgagcctggccggcggcagagcccccagaaagaccgccggcaacagactgagcggcctgctggaggccgaggaggaggacgagttctaccagaccacctacggcggcttcaccgaggagagcggcgacgacgagtaccagggcgaccagagcgacaccgaggacgaggtggacagcgacttcgacatcgacgagggcgacgagcccagcagcgacggcgaggccgaggagcccagaagaaagagaagagtggtgaccaaggcctacaaggagcccctgaagagcctgagacccagaaaggtgaacacccccgccggcagcagccagaaggccagagaggagaaggccctgctgcccctggagctgcaggacgacggcagcgacagcagaaagagcatgagacagagcaccgccgagcacaccagacagaccttcctgagagtgcaggagagacagggccagagcagaagaagaaagggcccccactgcgagagacccctgacccaggaggagctgctgagagaggccaagatcaccgaggagctgaacctgagaagcctggagacctacgagagactggaggccgacaagaagaagcaggtgcacaagaagagaaagtgccccggccccatcatcacctaccacagcgtgaccgtgcccctggtgggcgagcccggccccaaggaggagaacgtggacatcgagggcctggaccccgcccccagcgtgagcgccctgaccccccacgccggcaccggccccgtgaacccccccgccagatgcagcagaaccttcatcaccttcagcgacgacgccaccttcgaggagtggttcccccagggcagaccccccaaggtgcccgtgagagaggtgtgccccgtgacccacagacccgccctgtacagagaccccgtgaccgacatcccctacgccaccgccagagccttcaagatcatcagagaggcctacaagaagtacatcaccgcccacggcctgccccccaccgccagcgccctgggccccggcccccccccccccgagcccctgcccggcagcggccccagagccctgagacagaagatcgtgatcaagtag

SEQ ID NO: 161013 - DNA, 1095 bp, Artificial Sequence
  derived and/or modified sequence
atgagtctggcgggaggcagggccccacgtaagaccgccggcaacagactgtccgggctcctggaggcggaggaggaggacgagttctatcaaactacctatggcggcttcactgaggaatccggagacgatgaataccaaggtgaccagtcggacaccgaggatgaggtggacagcgacttcgacatcgacgaaggcgatgagcccagcagtgatggcgaggccgaagagcctaggcgtaaacgtcgagtggtgactaaagcgtacaaggagcctcttaaatccttacgcccccggaaagtaaatacccccgcgggctcttcccaaaaagccagagaggagaaagccctgctgcctctcgagctccaagacgacggtagcgattctaggaagtccatgagacagagcacagcagagcacacccggcagactttccttcgggtgcaagagaggcagggacagtcccgacgccgaaagggaccacactgcgaacggcccctcacccaggaagagctgctgcgggaggcaaagattaccgaggaactcaatttgcgcagtctcgagacctatgaacggctggaggcggacaagaagaaacaggtccataagaagcgaaaatgtcccgggcccattatcacctatcatagtgtcactgtgccgctggtcggcgaacccgggcctaaggaggagaacgttgatatagagggcctggatcccgcccctagtgtgtctgctcttacacctcacgccggcacgggaccagtgaatccccccgcccgatgttcaaggacctttatcacattcagcgatgacgctacattcgaagagtggttcccacagggtcggcctccaaaagtgccggtgcgggaagtgtgtcctgtcactcaccgcccggccctataccgagaccctgtcaccgatattccatacgcaacagctagagcgtttaaaataattagagaagcatacaaaaagtacatcacggctcacggtcttccgccaacggccagtgccctcggcccagggcctcctcctccagagccactgccaggatctggcccccgcgccctgcgacagaagattgtaatcaagtag

SEQ ID NO: 161014 - DNA, 1095 bp, Artificial Sequence
  derived and/or modified sequence
atgagcctggccggcggccgggcccccaggaagacagctggcaaccggctgagcggcctgctggaggccgaggaggaggatgagttctaccagaccacctacggcggcttcacagaggagagcggagatgatgagtaccagggcgaccagagcgacacagaagatgaggtggacagcgactttgatattgatgaaggagatgagcccagcagtgatggagaggccgaggagcccaggaggaagagaagagtggtgaccaaggcctacaaggagcccctgaagagcctgcggcccaggaaggtgaacaccccagctggcagcagccagaaggcccgggaggagaaggccctgctgcccctggagctgcaggatgatggcagtgacagcaggaagtccatgaggcagagcacagctgagcacacccggcagaccttcctgcgggtgcaggagcggcagggccagagcagaagaaggaagggcccccactgtgagcggcccctgacccaggaggagctgctgcgggaggccaagatcacagaggagctgaacctgcggagcctggagacctatgaaaggctggaggccgacaagaagaagcaggtgcacaagaagaggaagtgccccggccccatcatcacctaccacagcgtgacagtgcccctggtgggggagcccggccccaaggaggagaatgtggacatcgagggcctggaccctgcccccagcgtgtctgccctgacccctcatgctggcaccggccctgtgaaccccccagcccgctgcagcaggaccttcatcaccttcagtgatgatgccacctttgaggagtggttcccccagggccggccccccaaggtgcctgtgcgggaggtgtgccctgtgacccacaggcctgccctgtacagagatcctgtgacagacatcccctatgccacagcccgggccttcaagatcatccgggaggcctacaagaagtacatcacagcccacggcctgcccccaacagccagcgccctgggccctggccccccacctcctgagcccctgcccggcagcggcccccgggccctgcggcagaagatcgtcatcaagtag

SEQ ID NO: 161015 - DNA, 1095 bp, Artificial Sequence
  derived and/or modified sequence
atgagcctggccggcggccgggccccccggaagaccgccggcaacaggctgagtggtttgttagaggccgaggaagaggatgagttttaccaaaccacctacgggggtttcaccgaggaatccggtgatgatgaataccagggagaccagagtgacaccgaggacgaagttgactccgacttcgatatcgacgagggtgatgagccgtcatccgatggagaggccgaagaaccccgaagaaagcgtagagtggtgactaaggcttacaaggaacccttgaagtcacttcgccctcgtaaagtcaacacgcccgccggcagctcacagaaagcaagggaagagaaagcccttctgcccctggagctccaagatgacggatccgacagccggaaaagtatgcggcaaagcacagcagaacacacaaggcagactttcctgcgcgtgcaggagaggcaaggacaatcccggagaagaaagggccctcattgtgagcgcccactcacacaagaggaactgctccgtgaagccaaaatcaccgaggagcttaatctgagatctctggagacatacgaacggctggaagccgataagaagaagcaggtgcacaagaagagaaagtgccctggacctatcataacctaccactccgttaccgtccccctcgtgggtgaacccggtccaaaagaagaaaacgtcgacatcgaaggactagatcctgcacctagcgtttctgccctgacgccacacgctggtacaggccctgtgaacccgcctgctcgctgtagtaggacatttattaccttttcagacgacgcaaccttcgaggagtggttcccccagggccggccgccgaaggttcccgtgagagaagtctgtcccgtgacgcacaggccagccctgtacagagacccagtgaccgatattccttacgctactgcgcgtgctttcaagatcatcagagaggcatataagaaatatattacagctcatggcctgccaccaactgcctccgccttaggaccaggaccacctccaccagagccactgcccggaagcggcccccgcgccctccggcagaaaatcgtgattaaatag

SEQ ID NO: 161016 - DNA, 1095 bp, Artificial Sequence
  derived and/or modified sequence
atgagcctggccggtggaagagctcccagaaaaacagctggcaacaggcttagcgggctgttggaagccgaagaggaggatgaattttaccagacgacatacggaggctttaccgaagaatccggcgacgacgagtatcagggagaccagagcgacacagaggatgaagtcgacagtgattttgacattgacgagggcgacgaaccctcaagcgacggggaggccgaagaacctagacgaaagcggcgtgtggttaccaaggcctataaggagcccttgaagtctctgcggcctcgcaaggtgaatacgccagctggttcctcccaaaaagccagagaagagaaagccctgttgcccttagagctgcaagatgacgggtctgactctaggaagtccatgagacagtcaactgccgagcatacacgtcaaacgtttttgcgagtgcaggagcgtcaaggccaatcgagacggagaaagggtccccactgtgaacggcctttaacccaggaagagctcttacgggaagctaagattacggaagagctgaatctccgttccctggagacttatgaacggctggaggcagacaagaagaaacaggtgcataagaaacggaagtgcccaggcccaattattacataccactccgttaccgtcccactcgtgggggaacctgggcctaaggaagagaacgttgatatagagggtctggacccggcaccgtcagttagcgcgttaacacctcacgcaggcactgggcctgtgaacccacccgctcgttgcagtcggacatttattacattctccgatgatgccacgttcgaagagtggttcccccagggcagaccaccaaaagttcccgtgcgggaggtctgtcctgtgacccatagacctgctctttacagggatcctgtaacagacatcccatatgccaccgctagagcctttaaaattattcgggaagcatataagaagtatataaccgcccacgggttgcctcccaccgcttcagccctgggcccaggcccaccgccaccggagccgctgcccggatcgggcccacgcgctttaaggcagaagatcgttattaagtag

SEQ ID NO: 161017 - DNA, 1527 bp, Artificial Sequence
  derived and/or modified sequence
gtggccacccgcaggtagtgatgtcgagcgtcgagctcccaaaaccgagctggtgaggggctgcaggtggcggcgcagtctcggtaggcggtatgagtttggctgggggccgggcaccccggaagaccgctgggaaccggctttctgggcttttggaggcagaggaggaagatgagttctaccagacgacttatgggggtttcacagaggaatccggagatgatgagtatcaaggggaccagtcagacacagaggacgaagtggactctgactttgacattgatgaaggggatgaaccatccagtgatggagaagcagaagagccaagaaggaagcgccgagtagtcaccaaggcctataaggaacctctcaagagcttaaggcctcgaaaggtcaacaccccggctggtagctctcagaaggcgcgagaagagaaggcactactgccattagaactacaagatgacggctctgacagtcggaagtctatgcgtcagtctacagctgagcatacacgacaaacgttccttcgggtacaggagaggcagggccagtcaagacggcgaaaggggccccactgtgagcggccactaacccaggaggaactgctccgggaggccaagatcacagaagagcttaatttacggtcactggagacatatgagcggctcgaggctgataaaaagaagcaggttcataagaagcggaagtgccccgggcccataatcacctatcattcagtgacagtgccacttgttggggagccaggccccaaggaagagaacgttgacatagaaggacttgatcctgctccctcggtgtctgcattgactcctcatgctgggactggacccgtcaacccccctgctcgctgctcacgtaccttcatcacttttagtgatgatgcaactttcgaggaatggttcccccaagggcggcccccaaaagtccctgttcgtgaggtctgtccagtgacccatcgtccagccctataccgggaccctgttacagacataccctatgccactgctcgagccttcaagatcattcgtgaggcttacaagaagtacattactgcccatggactgccgcccactgcctcagccctgggccccggcccgccacctcctgagcccctccctggctctgggccccgagccttgcgccagaaaattgtcattaaatgaagagatgtctagtcctcagaaacttctttcctgccctgattggggctcttgctgttccgtttcttctccctgcttctcccctttgtcatctctgatctttgcctaatctgtttctttttccttttcccctagttcttacaggtttcgttgtgttttttaatctaataaaatagaaagatcccttttgtctggtgtccagtctagggttgggagcaagaagtatttgaatacctgcatatatttgggtctttattcgatagcatttattatgagctgtcctttctaaattgtattcattcctccaactaaattataaacatctgaaaattgcacaccaaaa

SEQ ID NO: 161018 - protein, 545 aa, Artificial Sequence
  derived and/or modified sequence
MMGHRPVLVLSQNTKRESGRKVQSGNINAAKTIADIIRTCLGPKSMMKMLLDPMGGIVMTNDGNAILREIQVQHPAAKSMIEISRTQDEEVGDGTTSVIILAGEMLSVAEHFLEQQMHPTVVISAYRKALDDMISTLKKISIPVDISDSDMMLNIINSSITTKAISRWSSLACNIALDAVKMVQFEENGRKEIDIKKYARVEKIPGGIIEDSCVLRGVMINKDVTHPRMRRYIKNPRIVLLDSSLEYKKGESQTDIEITREEDFTRILQMEEEYIQQLCEDIIQLKPDVVITEKGISDLAQHYLMRANITAIRRVRKTDNNRIARACGARIVSRPEELREDDVGTGAGLLEIKKIGDEYFTFITDCKDPKACTILLRGASKEILSEVERNLQDAMQVCRNVLLDPQLVPGGGASEMAVAHALTEKSKAMTGVEQWPYRAVAQALEVIPRTLIQNCGASTIRLLTSLRAKHTQENCETWGVNGETGTLVDMKELGIWEPLAVKLQTYKTAVETAVLLLRIDDIVSGHKKKGDDQSRQGGAPDAGQE

SEQ ID NO: 161019 - protein, 500 aa, Artificial Sequence
  derived and/or modified sequence
MMKMLLDPMGGIVMTNDGNAILREIQVQHPAAKSMIEISRTQDEEVGDGTTSVIILAGEMLSVAEHFLEQQMHPTVVISAYRKALDDMISTLKKISIPVDISDSDMMLNIINSSITTKAISRWSSLACNIALDAVKMVQFEENGRKEIDIKKYARVEKIPGGIIEDSCVLRGVMINKDVTHPRMRRYIKNPRIVLLDSSLEYKKGESQTDIEITREEDFTRILQMEEEYIQQLCEDIIQLKPDVVITEKGISDLAQHYLMRANITAIRRVRKTDNNRIARACGARIVSRPEELREDDVGTGAGLLEIKKIGDEYFTFITDCKDPKACTILLRGASKEILSEVERNLQDAMQVCRNVLLDPQLVPGGGASEMAVAHALTEKSKAMTGVEQWPYRAVAQALEVIPRTLIQNCGASTIRLLTSLRAKHTQENCETWGVNGETGTLVDMKELGIWEPLAVKLQTYKTAVETAVLLLRIDDIVSGHKKKGDDQSRQGGAPDAGQE

SEQ ID NO: 161020 - protein, 276 aa, Artificial Sequence
  derived and/or modified sequence
MYEGDLEGQSMNWTSEEGRGDIIRSGTNIDRAWQCQNTKRESGRKVQSGNINAAKTIADIIRTCLGPKSMMKMLLDPMGGIVMTNDGNAILREIQVQHPAAKSMIEISRTQDEEVGDGTTSVIILAGEMLSVAEHFLEQQMHPTVVISAYRKALDDMISTLKKISIPVDISDSDMMLNIINSSITTKAISRWSSLACNIALDAVKMVQFEENGRKEIDIKKYARVEKIPGGIIEDSCVLRGVMINKDVTHPRMRRYIKNPRIVLLDSSLEYKKGES

SEQ ID NO: 161021 - protein, 161 aa, Artificial Sequence
  derived and/or modified sequence
MMGHRPVLVLSQNTKRESGRKVQSGNINAAKTIADIIRTCLGPKSMMKMLLDPMGGIVMTNDGNAILREIQVQHPAAKSMIEISRTQDEEVGDGTTSVIILESHSVTMLECGGAILAHCNLCLPAGEMLSVAEHFLEQQMHPTVVISAYRKALDDMISTLK

SEQ ID NO: 161022 - DNA, 1638 bp, Artificial Sequence
  derived and/or modified sequence
atgatggggcaccggcctgttcttgtgctatcccagaatacaaaaagggagtccgggcgaaaggtccagtccgggaacataaacgctgctaagactatcgctgatattattcgcacctgtctgggccccaagtccatgatgaaaatgctgctcgatccgatgggcggaatagtgatgactaacgacggtaatgctatcttgcgggaaattcaggtacagcatcccgctgcgaagtctatgatcgagatcagccgcacacaagatgaggaggtgggtgatggaacgacgagtgttattattctagcgggagagatgttgagtgtggccgaacactttctagaacaacagatgcatcctaccgtcgtgatttccgcataccggaaggcgctcgacgacatgattagcactttgaagaagatttccattccagtggatatcagcgatagtgatatgatgctcaacataattaacagttccataacaaccaaggctatcagtagatggagttccctcgcatgtaatatagcccttgatgctgtgaagatggtccagttcgaggaaaacggtcgaaaggagatcgacatcaagaaatacgccagagtggaaaagattcctggtggaattatagaagattcctgtgttctccggggtgtgatgatcaataaggacgtcacccatccaagaatgaggcggtatataaagaatccacggatagtgctgctggactctagcctggaatataagaagggggaatctcagaccgatatcgagatcactcgtgaagaagatttcacacggatcctgcagatggaagaggagtatattcagcagttgtgcgaagacatcatccagctcaaacctgatgtagttataacggagaaggggattagtgacctggcccaacattacctcatgcgagctaatatcacagcaatccggcgcgttcgaaagacagataataataggattgcacgtgcctgcggagctcgaatcgtgtcacgaccagaggagttgcgcgaggacgatgtcggcacaggcgccggccttctagaaatcaagaagataggtgatgaatattttaccttcatcaccgattgtaaggaccccaaggcctgtaccatacttctccgcggtgccagtaaagaaatcctgagcgaagtggaacggaaccttcaggacgctatgcaagtgtgccgtaacgtactcctcgaccctcagcttgtcccaggtgggggagctagcgaaatggccgtagcacacgcactcacagaaaaaagtaaagccatgacaggagttgagcagtggccttaccgggcggtggcgcaggctttggaggttatccctcgcacattgattcagaattgtggggctagcaccattaggcttttaacttcccttcgcgctaagcacacacaagagaattgcgaaacctggggtgtcaacggtgaaaccggcaccctggtcgacatgaaggaattgggcatctgggagccactcgcagtcaaattgcagacatacaagaccgccgtggagaccgctgttctgctgctgcgcatcgatgatattgtgtcaggccacaaaaaaaagggcgacgatcagagtaggcagggtggtgcacccgatgccggccaggaatag

SEQ ID NO: 161023 - DNA, 1503 bp, Artificial Sequence
  derived and/or modified sequence
atgatgaagatgttgctggaccctatgggcggcattgtaatgaccaatgacggaaacgcaatacttagagagatccaggtgcaacatcctgctgcaaaaagcatgatagaaatctctcgcacgcaggacgaggaagtgggagacgggactacatctgtcataatcttggccggggagatgctgtccgttgctgagcatttcttagaacagcagatgcacccgacagtggtgatctcagcctatagaaaagcgctcgatgatatgatttccaccctgaagaaaatcagcataccggtggatatcagtgacagcgacatgatgttaaacatcattaacagctctattaccacgaaagcaatcagcaggtggtccagcttagcctgcaacatcgccctggacgctgtgaagatggtgcaatttgaagaaaatggtaggaaagaaatcgatattaagaaatacgcacgcgtggaaaaaattccaggcggcattatcgaagacagctgtgtcctccggggcgtcatgattaacaaggacgtgacccacccccggatgagaaggtacatcaaaaatccacgcatcgtattactcgactccagccttgagtataagaagggagagagtcaaacagacatcgagattacaagggaagaagactttaccagaatacttcagatggaggaggagtacatacagcagctgtgcgaggacattattcaactcaaacccgacgtggtgatcacagagaagggcatctcggatttggctcagcactacttgatgcgcgctaacattactgctatcagacgggtgcgcaagaccgacaacaacagaatagccagagcatgcggggctaggatcgtatctcggccggaagagctgcgcgaagacgatgttgggacgggagcaggcttgctcgagatcaagaagataggggacgaatattttacatttatcacagactgtaaggatcctaaagcgtgcactatcttgcttaggggtgcctcaaaggagatattaagcgaagttgaacgcaacctacaggacgccatgcaggtttgccgcaacgtgctgttggacccccagcttgtaccgggaggaggtgcctcagagatggcggtggcccacgccctcaccgaaaaatcaaaagctatgaccggggtagagcagtggccatacagagccgtggcccaggctctggaagtaatcccaaggaccctaatccagaattgcggagctagcaccatacggctgctaacttccttgagggctaagcatacccaagagaactgtgagacctggggggtcaacggcgagaccggtactctggtggacatgaaggagctgggcatatgggaacctctggctgtgaagctacagacctataagactgccgtggagacagctgtgctattgctgcgaattgacgatatcgtatccggtcataagaagaaaggcgatgatcaatcgagacaggggggtgccccagatgccggccaggagtag

SEQ ID NO: 161024 - DNA, 831 bp, Artificial Sequence
  derived and/or modified sequence
atgtacgaaggcgatttagagggtcagagtatgaattggactagcgaagaagggagaggggatatcattcgttcaggaactaatatcgatcgtgcctggcaatgccaaaatacaaaaagagaatcaggccggaaggtgcaaagcggcaatatcaacgccgccaagacgattgctgacatcatcaggacatgtttaggtcccaaaagcatgatgaaaatgctgcttgatccgatgggcggcattgtgatgacaaatgacgggaacgcgattctgagggagatccaagtacagcacccagctgctaagtcaatgatagagatctcccgcacacaggatgaagaggtgggcgatggaactactagcgtcataatcctagctggggaaatgctgtccgtagcggaacattttctcgagcagcaaatgcaccccaccgtcgtgatttccgcataccggaaggctctagatgacatgatttccacccttaaaaaaattagcattccagtggatatctcggattccgacatgatgttgaacattatcaattcgagcatcactacaaaagcaatatccagatggagtagtttggcttgtaatatcgccctggacgccgttaaaatggttcaattcgaagaaaacgggcggaaagagattgacatcaaaaaatatgctcgggtcgaaaagatccctggtggcatcatagaggacagctgcgtactgaggggagtgatgatcaataaagacgttactcatcccagaatgcgccgctacattaagaatccgcgcatcgtgctattagattcctcgttggaatataagaagggagagtcatag

SEQ ID NO: 161025 - DNA, 486 bp, Artificial Sequence
  derived and/or modified sequence
atgatggggcaccgaccagtgctggttctaagccagaatacaaaaagggaaagtggacgcaaggtgcagtctggtaacatcaatgccgccaagactattgccgacatcattcggacatgtctgggtcctaaatcaatgatgaaaatgttgctggaccctatgggagggatcgtgatgacaaatgacgggaatgcaatcctgcgggagattcaggtgcagcaccccgcagccaaatccatgattgagatatccaggactcaggatgaggaggtgggcgacggcaccacttccgtcattattctagagagtcatagcgtcacaatgctcgagtgcggaggtgccatacttgcgcactgtaacctatgcctgcccgcaggcgagatgctgtcagtggcagaacacttcctcgagcagcagatgcatcccaccgtggtaataagtgcttacagaaaggcattagatgacatgatcagcacattgaagtag

SEQ ID NO: 161026 - DNA, 1503 bp, Artificial Sequence
  derived and/or modified sequence
atgatgaaaatgcttctcgaccccatgggggggatcgtgatgactaatgatggcaatgccattctgagggagattcaggtgcaacaccctgccgctaaatctatgattgagatttccaggacccaggatgaagaagtgggagacggtacaaccagtgtaatcattctcgcaggcgagatgttgagcgtggcagagcattttctggaacagcagatgcaccctaccgtcgttatttcagcatatcgcaaggcgcttgacgatatgatcagtacgctgaaaaaaattagcatcccagtagacatctccgacagcgacatgatgttaaacatcattaacagctccatcaccaccaaggccattagcagatggtcttccctcgcctgcaatattgcattggacgcagtgaagatggttcagttcgaggaaaacgggcggaaggagattgacatcaaaaaatatgcccgtgttgaaaaaatcccaggtggaattattgaagactcatgcgtgctgaggggcgtcatgatcaataaggatgtaactcacccccgcatgcgacggtacattaaaaaccctcgcattgttctcctcgacagtagtctcgagtacaaaaagggcgaatcccagactgacattgaaatcacacgcgaggaggatttcacgcggatcctgcaaatggaagaggagtatattcagcagctctgcgaagatatcatacagctcaaaccggacgtcgtgattaccgaaaaaggaatctccgacctggctcagcattacctgatgagagccaatataaccgcgatcagaagggtcagaaaaaccgataataatcgcattgcacgtgcttgtggggcccgcatcgtatctagacctgaagaactgcgggaagatgatgtagggaccggcgctggcctattggaaatcaagaagattggagacgagtacttcactttcatcacagattgcaaagatcccaaagcttgtacgatcttgctcagaggagcgagtaaagagatcctttccgaggtggagaggaatctacaggatgctatgcaggtgtgtcgtaatgtcttgcttgaccctcagttggtgccaggagggggagccagcgagatggcagtggctcacgccctgactgagaagtccaaagccatgaccggagttgaacagtggccctacagggctgtcgcacaggcccttgaggtgattccacgtacccttattcagaactgcggcgcctccactatccggctcctcacaagcctcagggccaagcacacccaggaaaattgtgaaacctggggcgtgaacggcgaaaccggcaccctggtcgatatgaaggaactgggaatttgggaacccctcgcagtaaaacttcagacatataaaacggcagtcgaaacagccgtgcttctgcttcggatagatgatattgtgagcggtcataaaaagaagggagatgatcagtctcgccaggggggtgctccagacgctggccaggagtag

SEQ ID NO: 161027 - DNA, 1638 bp, Artificial Sequence
  derived and/or modified sequence
atgatgggccacaggcctgtgctggtgctgagccagaacaccaagcgggagagcggcaggaaggtgcagagcggcaacatcaatgctgccaagaccatcgctgacatcatccgcacctgcctgggccccaagtccatgatgaagatgctgctggaccccatgggcggcatcgtgatgaccaatgatggaaatgccatcctgcgggagatccaggtgcagcaccctgctgccaagtccatgattgagatcagcaggacccaggatgaggaggtgggagatggcaccaccagcgtcatcatcctggccggggagatgctgtctgtggccgagcacttcctggagcagcagatgcaccccaccgtggtgatcagcgcctacaggaaggccctggatgacatgatcagcaccctgaagaagatcagcatccctgtggacatcagtgacagcgacatgatgctgaacatcatcaacagcagcatcaccaccaaggccatcagccgctggagcagcctggcctgcaacatcgccctggatgctgtgaagatggtgcagtttgaagaaaatggaaggaaggagattgacatcaagaagtatgcccgggtggagaagatccctgggggcatcatcgaggacagctgtgtgctgcggggcgtgatgatcaacaaggatgtgacccaccccaggatgaggcgctacatcaagaacccccgcatcgtgctgctggacagcagcctggagtacaagaagggggagagccagacagacatcgagatcacccgggaggaggacttcacccgcatcctgcagatggaggaggagtacatccagcagctgtgtgaggacatcatccagctgaagccagatgtggtgatcacagagaagggcatcagtgacctggcccagcactacctgatgagggccaacatcacagccatcagaagagtgaggaagacagacaacaacagaattgcccgggcctgtggggccagaattgtgtccaggcctgaggagctgcgggaggatgatgtgggcactggagctggcctgctggagatcaagaagattggagatgagtacttcaccttcatcacagactgcaaggaccccaaggcctgcaccatcctgctgcggggggccagcaaggagatcctgtctgaggtggagaggaacctgcaggatgccatgcaggtgtgcagaaatgtgctgctggacccccagctggtgcctgggggcggggccagcgagatggctgtggcccacgccctgacagagaagagcaaggccatgactggagtggagcagtggccctacagagctgtggcccaggccctggaggtgatccccaggaccctcatccagaactgtggggccagcaccatccggctgctgaccagcctgcgggccaagcacacccaggagaactgtgagacctggggcgtgaatggagagaccggcaccctggtggacatgaaggagctgggcatctgggagcccctggccgtgaagctgcagacctacaagacagctgtggagacagctgtgctgctgctgagaattgatgacatcgtgtctggccacaagaagaagggagatgaccagagccggcagggcggggccccagatgctggccaggagtag

SEQ ID NO: 161028 - DNA, 1503 bp, Artificial Sequence
  derived and/or modified sequence
atgatgaagatgctgctggaccccatgggcggcatcgtgatgaccaatgatggaaatgccatcctgcgggagatccaggtgcagcaccctgctgccaagtccatgattgagatcagcaggacccaggatgaggaggtgggagatggcaccaccagcgtcatcatcctggccggggagatgctgtctgtggccgagcacttcctggagcagcagatgcaccccaccgtggtgatcagcgcctacaggaaggccctggatgacatgatcagcaccctgaagaagatcagcatccctgtggacatcagtgacagcgacatgatgctgaacatcatcaacagcagcatcaccaccaaggccatcagccgctggagcagcctggcctgcaacatcgccctggatgctgtgaagatggtgcagtttgaggagaatggaaggaaggagattgacatcaagaagtatgcccgggtggagaagatccctgggggcatcatcgaggacagctgtgtgctgcggggcgtgatgatcaacaaggatgtgacccaccccaggatgaggcgctacatcaagaaccccagaattgtgctgctggacagcagcctggagtacaagaagggggagagccagacagacatcgagatcacccgggaggaggacttcacccgcatcctgcagatggaggaggagtacatccagcagctgtgtgaggacatcatccagctgaagccagatgtggtgatcacagagaagggcatcagtgacctggcccagcactacctgatgagggccaacatcacagccatccggcgggtgaggaagacagacaacaaccgcatcgcccgggcctgtggggcccgcatcgtgtccaggcctgaggagctgagagaagatgatgtgggcaccggggccggcctgctggagatcaagaagattggagatgagtacttcaccttcatcacagactgcaaggaccccaaggcctgcaccatcctgctgcggggggccagcaaggagatcctgtctgaggtggagaggaacctgcaggatgccatgcaggtgtgcagaaatgtgctgctggacccccagctggtgcctgggggcggggccagcgagatggctgtggcccacgccctgacagagaagagcaaggccatgactggagtggagcagtggccctacagagctgtggcccaggccctggaggtgatccccaggaccctcatccagaactgtggggccagcaccatccggctgctgaccagcctgcgggccaagcacacccaggagaactgtgagacctggggcgtgaatggagaaacaggcaccctggtggacatgaaggagctgggcatctgggagcccctggccgtgaagctgcagacctacaagacagctgtggagacagctgtgctgctgctgagaattgatgacatcgtgtctggccacaagaagaagggagatgaccagagccggcagggcggggccccagatgctggccaggagtag

SEQ ID NO: 161029 - DNA, 831 bp, Artificial Sequence
  derived and/or modified sequence
atgtatgaaggagacctggagggccagagcatgaactggaccagcgaggagggccgcggggacatcatccgcagcggcaccaacatcgaccgggcctggcagtgccagaacaccaagcgggagagcggcaggaaggtgcagagcggcaacatcaatgctgccaagaccatcgctgacatcatccgcacctgcctgggccccaagtccatgatgaagatgctgctggaccccatgggcggcatcgtgatgaccaatgatggaaatgccatcctgcgggagatccaggtgcagcaccctgctgccaagtccatgattgagatcagcaggacccaggatgaggaggtgggagatggcaccaccagcgtcatcatcctggccggggagatgctgtctgtggccgagcacttcctggagcagcagatgcaccccaccgtggtgatcagcgcctacaggaaggccctggatgacatgatcagcaccctgaagaagatcagcatccctgtggacatcagtgacagcgacatgatgctgaacatcatcaacagcagcatcaccaccaaggccatcagccgctggagcagcctggcctgcaacatcgccctggatgctgtgaagatggtgcagtttgaagaaaatggaaggaaggagattgacatcaagaagtatgcccgggtggagaagatccctgggggcatcatcgaggacagctgtgtgctgcggggcgtgatgatcaacaaggatgtgacccaccccaggatgaggcgctacatcaagaacccccgcatcgtgctgctggacagcagcctggagtacaagaagggggagagctag

SEQ ID NO: 161030 - DNA, 486 bp, Artificial Sequence
  derived and/or modified sequence
atgatgggccacaggcctgtgctggtgctgagccagaacaccaagcgggagagcggcaggaaggtgcagagcggcaacatcaatgctgccaagaccatcgctgacatcatccgcacctgcctgggccccaagtccatgatgaagatgctgctggaccccatgggcggcatcgtgatgaccaatgatggaaatgccatcctgcgggagatccaggtgcagcaccctgctgccaagtccatgattgagatcagcaggacccaggatgaggaggtgggagatggcaccaccagcgtcatcatcctggagagccacagcgtgaccatgctggagtgtggcggggccatcctggcccactgcaacctgtgcctgcctgctggggagatgctgtctgtggccgagcacttcctggagcagcagatgcaccccaccgtggtgatcagcgcctacaggaaggccctggatgacatgatcagcaccctgaagtag

SEQ ID NO: 161031 - DNA, 1638 bp, Artificial Sequence
  derived and/or modified sequence
atgatgggccaccggcccgtgctggtgctgagccagaacaccaagcgtgagtccgggagaaaggtgcagagcgggaatataaacgctgccaaaaccattgccgacataatacggacctgcctaggacccaagtctatgatgaagatgctgctggaccctatgggaggtatcgtgatgacaaacgatgggaacgccatactccgagaaattcaggttcagcatcctgccgcgaaaagcatgatcgagatatctcggacacaggatgaggaagtaggcgacgggactaccagcgtaattatcctcgctggcgagatgttgagcgtggcagagcacttcttggagcagcagatgcaccctacagttgtcatctctgcctacagaaaagctctcgacgatatgatttcaacacttaagaagatttctatccccgtcgatatcagcgacagcgatatgatgttaaacatcatcaatagttccattaccactaaagcaatcagcagatggtcttctctcgcatgtaacatagccctcgacgccgtgaagatggtgcaattcgaagaaaatggaagaaaggagatcgacattaaaaaatatgctcgggttgagaagatccccggcgggatcatcgaggacagctgcgtgttgcggggtgttatgattaataaggacgtgactcatcccagaatgcggaggtatattaaaaacccacgaatagtcctgttagactcatcccttgaatataagaagggtgagtctcagacagacatcgaaatcacacgggaggaggatttcactagaattctgcagatggaagaagaatatatacaacaattgtgcgaggacatcatccagttaaaaccagacgtagtgatcactgaaaaaggtatctcggatctcgcacagcactacctgatgagagctaacatcacagctatccgccgtgttcgcaagacggataacaaccggatcgcccgtgcttgcggcgccagaatcgtgagtagacccgaagaactacgggaggacgacgtggggaccggggccggactcctggagattaaaaagattggcgatgaatattttacattcataacagattgcaaggatccaaaggcctgcactatccttctgcgtggagcaagcaaggaaattttgtccgaggttgagaggaatctgcaggatgctatgcaggtctgtcgtaatgtcctcttagatcctcagcttgtccctggtgggggtgccagtgagatggccgtggcacacgctctcactgagaaatcaaaggcaatgactggcgtggagcaatggccctaccgagctgttgcacaagctctggaagtaattcccaggaccctcattcagaattgtggcgcatcaactattcggctgctgacgagcctgcgggcaaagcacacacaggaaaactgtgaaacttggggggtaaacggggagacaggtacactggtagacatgaaggaactaggtatttgggagcccttagctgtgaagctgcaaacgtacaagactgccgtggagactgccgtgctgctcctaagaattgatgatattgtgtccggccataaaaaaaagggagacgaccaaagccgacaggggggagcccctgacgcaggccaggagtag

SEQ ID NO: 161032 - DNA, 1503 bp, Artificial Sequence
  derived and/or modified sequence
atgatgaagatgctgctggaccccatgggcggcatcgtgatgaccaacgacggtaacgctatcctgcgcgagatccaagtgcagcaccctgcagccaaatcaatgatagaaatcagcaggacccaggatgaagaagtcggcgatggtactacttctgtcatcatcttggctggagagatgctaagtgttgccgagcattttctagagcagcagatgcacccgaccgtggtaattagcgcgtaccgcaaggctctggatgacatgattagtactctcaaaaagatttcaattcccgttgacataagtgatagcgatatgatgcttaatatcataaatagtagtatcaccacaaaggccatctcaaggtggagctccttggcctgtaacattgcactggatgccgtgaagatggtccagttcgaagaaaatggacggaaggaaattgacattaagaaatatgcccgggtggaaaagatccccgggggaattatcgaggactcctgtgtgcttcgcggcgtcatgattaataaagacgtcacacatccccgtatgaggcggtacattaagaaccccagaatagtccttctcgactcgtcgttggaatataaaaagggagagtcacagacagatattgaaatcacacgggaagaggactttaccagaattctccaaatggaagaagagtacatccagcaactctgtgaggatataattcaactcaagcctgacgttgtcatcactgaaaaaggaattagcgacctggctcagcattatctcatgcgggccaacattactgccattcggcgggtcaggaaaaccgataataatcggatcgcgagagcctgtggggcccgcattgttagccgccctgaggaactgcgggaagacgacgtggggaccggtgctgggctgctggagatcaaaaagattggggacgaatattttacgtttataactgattgtaaagatcctaaagcatgtacaatcctgttacgtggggcttctaaagaaatcctcagcgaggtcgaacggaacctgcaggacgccatgcaagtttgtcgaaacgtgctgctagatccacagctggtgcccggaggtggcgcttcagaaatggctgtagcgcacgctctgaccgaaaagtctaaagctatgacaggagtagaacagtggccctaccgagccgttgcacaggctttggaggtgatccccaggaccctgattcaaaattgcggtgcctctacaatccgtctgctcacttcattgagggcgaaacatacacaagagaactgcgaaacctggggggtaaatggggaaacagggaccctggtggatatgaaagaactcggcatctgggagcctttggcagtgaagctgcagacatataagactgcagtcgaaaccgccgttttgctcctgagaattgacgatatcgtctctggccataagaagaaaggggacgatcagagtcggcagggaggcgcccctgacgccggccaggagtag

SEQ ID NO: 161033 - DNA, 831 bp, Artificial Sequence
  derived and/or modified sequence
atgtacgagggcgacctggagggccagagcatgaactggaccagcgaggaggggagaggcgacatcatccgttcgggaaccaacatcgatagagcttggcagtgccagaacacaaaaagagagagcgggagaaaggtgcagtccgggaacatcaacgcggcgaaaaccattgcagacatcatccggacatgtttgggtcccaaatcaatgatgaagatgcttcttgatccgatgggaggaattgtaatgacgaacgatggcaacgcgatcttaagggaaatccaggtacagcaccccgccgctaaaagtatgattgagatcagccgcacacaggacgaggaggtgggggatgggacaacttcggtcataattctggccggcgagatgctttcagtggctgagcacttcctggagcagcagatgcatcctaccgtagttatctccgcctacaggaaagccctcgacgacatgatttccacactgaagaaaatcagcatcccagtggatatcagtgactctgatatgatgctgaatattatcaattcttctattacaaccaaagcgatttctaggtggtcctccctggcctgtaatattgcgctcgatgctgtaaagatggtacagtttgaagaaaacgggcgcaaagagattgacattaagaaatacgctcgagttgaaaaaatcccgggcggcatcatagaagatagctgtgttttacggggcgtgatgatcaataaggacgttactcaccccagaatgcggagatacattaagaaccctcgtatcgtgttactggattcatccttagagtacaaaaagggtgaatcatag

SEQ ID NO: 161034 - DNA, 486 bp, Artificial Sequence
  derived and/or modified sequence
atgatgggccaccggcccgtgctggtgctgagccagaacaccaagagggaatcaggtcggaaagtacaatctgggaacatcaatgcggcaaagacgatcgcagatattatcaggacctgtctggggccgaaaagcatgatgaagatgctcctggatcctatgggagggatagtcatgacaaatgacggtaatgccatcctgagggaaatccaggtgcagcaccctgccgccaagagtatgattgaaatctcccggacgcaggacgaggaggtgggtgatggcactacttccgtcattatcctggagtcccacagcgttacgatgttggagtgcggcggtgctatactcgctcattgcaacttgtgtttaccagccggcgaaatgttatctgttgcagaacattttctcgagcagcagatgcacccgactgtagtaatcagcgcataccggaaggctttagatgacatgatctccacactgaagtag

SEQ ID NO: 161035 - DNA, 1503 bp, Artificial Sequence
  derived and/or modified sequence
atgatgaagatgctgctggaccccatgggcggcatcgtgatgaccaatgacgggaacgccattcttagggaaatccaagtgcagcaccctgctgcaaagagcatgatcgaaatttctagaactcaggatgaagaggttggggatggcaccacctccgttatcatactggccggggaaatgctgtctgtcgctgagcattttctggaacagcaaatgcatcccaccgtggtcatcagcgcttaccgaaaggcactggatgatatgatctctaccctcaagaagatttctattcctgtggacatttctgactcagatatgatgctgaatattattaactcttcgattacaactaaagccatcagccggtggagcagtctggcatgtaatatcgccttggacgccgtgaaaatggtgcagttcgaagaaaatggcaggaaggaaattgacattaaaaagtatgcacgcgttgaaaagatccccggaggaattatcgaggatagttgtgtactcagaggggtcatgattaacaaagatgtgacccatccaaggatgagacgctatatcaagaatcctcgtattgtgcttctcgatagctcccttgagtataaaaaaggagagtcacagacagacattgagataacgagagaggaggactttacaaggatcctacagatggaagaggaatacatccaacagctatgtgaggacattatccagttgaaacccgacgtcgtgatcactgagaaagggatcagcgacctcgcacagcactacttaatgcgggccaatataacagcgattcgccgagtgcgcaaaaccgataataaccgaattgcccgggcctgtggtgcccgcatcgtgtccagacctgaggagctgagagaggatgacgtgggaactggcgctggtcttctggaaataaaaaagattggcgatgagtactttacattcatcaccgactgcaaggaccccaaagcctgtactatcctacttagaggagctagcaaggaaattctgagcgaggtcgaacgaaatctgcaggacgctatgcaagtgtgcagaaacgtgctgctggacccgcagctggtgccaggcggcggtgcaagcgaaatggcagtcgcccacgctttgacagagaaaagtaaggcaatgactggcgttgagcagtggccttatcgcgcagtggcccaagccctggaggtgattccccggaccctcatccaaaattgtggcgcctcaaccatcaggcttttgacgtctctcagagccaaacatacacaggaaaattgtgaaacatggggagtcaacggagaaactgggactttagtcgatatgaaggaactgggcatctgggagcctctcgctgtaaagctccagacctataaaaccgcggtggaaaccgcagttttgctgttacgaattgacgatatagtgtcagggcataaaaaaaaaggagacgatcaatcgcgccagggcggcgctccagacgcgggccaggagtag

SEQ ID NO: 161036 - DNA, 1638 bp, Artificial Sequence
  derived and/or modified sequence
atgatgggtcacaggcctgtcctggttttatcccagaatacaaagcgagagtcaggtaggaaagtgcaaagcgggaacattaatgccgcaaagactatcgcggatattattcgcacatgccttggcccaaaatcaatgatgaagatgctgcttgatcctatgggcggaattgtgatgacgaacgatggcaacgctattttgagagagatccaagtgcaacacccagcagcgaagagtatgatcgaaattagcagaactcaggatgaggaagtcggtgatggtactacttctgtcattatcctggccggagagatgctcagcgtggcagagcacttcctggaacagcagatgcatccaacggtcgtgatctccgcctaccggaaggcacttgacgatatgatttcaaccctgaagaagataagcattcccgttgatatttcagattccgacatgatgctgaatatcatcaacagctcaataacgaccaaggccatctcaaggtggtcctccctagcatgcaatatagcgctcgacgccgtgaaaatggtgcagtttgaagagaatgggcgtaaagagatcgacattaaaaaatatgcaagagtcgagaagatccccggtggaatcatcgaggatagctgtgttcttcgtggcgtaatgattaacaaagatgtgacacacccccgtatgaggcggtatatcaagaaccctagaattgtccttttggacagctctttggagtacaagaagggcgagtcacagacggacattgaaattacccgcgaggaggattttaccaggatactgcagatggaggaggagtatattcagcaactgtgcgaggacatcatccagctcaaaccggacgttgtgatcaccgagaaaggtatatccgatctggcgcagcattatctcatgagagccaatattacagcaatcaggcgtgtccggaagaccgataacaataggattgcaagggcatgcggagccagaatcgtttccaggccggaagagttgagagaggacgacgttggcacaggagctgggttattagagatcaaaaagatcggggatgagtattttactttcatcaccgattgcaaggatccgaaagcttgcacaattttgctcaggggggcatccaaggaaatcctgtccgaggtcgaacggaatctgcaagacgctatgcaggtttgcagaaacgtcctcctcgatcctcagctcgtccccggaggaggggcttctgagatggccgtcgcgcatgccctgaccgaaaagtcgaaggccatgacaggcgtggaacagtggccttatcgcgctgtcgcacaggctttggaggtcattccacgcactcttatccaaaactgtggagccagcacgatccgactgttgactagcctccgggctaagcatactcaagagaactgtgaaacctggggcgtaaacggcgaaaccgggaccttggtcgacatgaaagaattggggatctgggaaccactggccgtgaaactgcagacatataagactgcagtggaaacagccgtgctgctcctcagaattgatgatatcgtgagtggacataaaaaaaagggagacgaccagtctcgacaaggaggcgcacccgatgccggtcaggagtag

SEQ ID NO: 161037 - DNA, 1503 bp, Artificial Sequence
  derived and/or modified sequence
atgatgaaaatgctcctcgatcctatgggaggcatcgttatgacaaatgacggaaacgcaatcctgcgcgagatacaggtacagcaccccgctgcaaaatctatgatcgagatctcacgaactcaggatgaagaagttggagacggaaccacttctgtaatcatactggctggcgagatgctgtcagtggcagagcatttcctggagcaacagatgcaccctacagttgtgataagtgcatacaggaaggcactagacgatatgatctctactctaaagaagatatctattccagtggacatatcagactctgatatgatgctgaacataattaacagcagtatcacaactaaggcgatatccagatggagcagcctggcctgtaatatcgctctcgacgccgtgaagatggtccaatttgaagaaaacggtaggaaggaaatagatatcaagaagtacgcacgggttgagaaaatcccaggcggtataattgaggactcgtgtgtgctgcgcggtgtcatgatcaacaaggacgtgacccaccccagaatgaggcgctatataaagaatccgcgaattgtcctgttggattcatccttggaatacaaaaaaggggagtcgcaaacagacattgaaatcacaagggaggaggacttcacccgcatcctgcagatggaggaagagtacatccagcaactgtgcgaggacatcatccagctgaaacccgacgtagttataactgagaaaggtatatctgacttggcacagcactatctgatgcgcgctaacattaccgcaatccgcagagtgcgcaagacagacaataacagaatcgcacgcgcttgtggcgcacggatcgtcagcaggccagaagaactgagagaagatgatgtgggcacaggggctgggttgctcgagatcaaaaaaatcggggacgagtatttcacttttattactgactgtaaggatcctaaagcctgtaccatccttctacgtggcgcttcaaaggagatcctttcagaggtagagcgaaacctccaggatgctatgcaggtatgtagaaatgtccttctggatccccagttggtacccggtggcggtgctagcgaaatggccgttgcccatgctttaacagagaaatccaaagccatgacaggggtggaacagtggccctatcgggctgtggcacaagctctcgaagtcataccgaggacacttatccagaattgcggggcatctacaattcgcttgctgacaagcctacgagccaagcatacgcaagagaattgtgagacctggggcgtcaacggggaaaccggaacactcgtggatatgaaggagctgggtatttgggaaccattggcagtgaagctacagacctacaagaccgctgttgaaaccgcagtgctcctgctgcggatagatgacattgtgtccggacacaaaaaaaaaggagatgatcagagccgacagggcggagcccctgatgctggtcaggagtag

SEQ ID NO: 161038 - DNA, 831 bp, Artificial Sequence
  derived and/or modified sequence
atgtatgagggagatctggaaggccagagcatgaactggacttccgaagagggtcgcggagatatcattaggtccggtaccaacatcgacagagcatggcaatgtcagaacacaaagagggagtcaggacggaaggtgcagagcggaaacattaacgccgctaagacaatcgccgacatcattcggacatgtctgggacccaagagtatgatgaagatgctgcttgaccccatggggggtatcgtcatgaccaatgatggtaacgccattctgcgcgagatccaggtccagcatccagcagccaaatcaatgatcgagatcagccggactcaagacgaagaagttggagacgggactacctctgtcattatcctcgccggtgaaatgctctccgtcgccgaacatttcttggagcagcagatgcaccctacagtggtgatatcagcctatcggaaagctctggacgacatgatttcgaccctgaagaaaatttccattccagtggacataagtgactcagacatgatgttgaatattattaatagctccataacaactaaagccatcagcagatggtcctcccttgcctgtaatattgctctggatgccgttaaaatggtgcaatttgaggagaacggccgaaaggagatagatatcaagaaatatgcgagagtggaaaaaatacccggtggcatcatcgaagacagctgcgtgctgagaggcgtaatgataaacaaagatgttactcaccctcgcatgcgccgatatattaagaatccacggattgtcctgcttgattcatctctagagtataagaaaggggaaagttag

SEQ ID NO: 161039 - DNA, 486 bp, Artificial Sequence
  derived and/or modified sequence
atgatgggtcataggcccgtgttggttctgagccagaatacgaagcgtgaatccggcagaaaggtgcagtcaggtaatattaatgcggctaagaccattgcagatataattcgcacttgcctagggccaaaatctatgatgaaaatgctcctagacccaatggggggaattgttatgaccaacgatggaaatgccatcctgagggagattcaagttcagcatccggctgccaagtcaatgatagaaatttcccgcacacaggacgaagaggtaggcgacggcactacttccgttatcattttagagagccactccgtgaccatgctggaatgcggtggagccatactggcacactgtaatctatgtctgccagctggggagatgctgagtgttgcagaacacttccttgagcagcaaatgcacccaacagtggtgataagcgcctatcggaaagctctggacgacatgatttcgacccttaaatag

SEQ ID NO: 161040 - DNA, 1503 bp, Artificial Sequence
  derived and/or modified sequence
atgatgaagatgttattagacccaatgggcggaattgtgatgaccaatgatgggaacgcaattctccgggagatccaggtacagcatcctgccgcaaagtccatgattgagatctcacgaacacaggatgaggaggtaggtgatggtacaacgagcgtcataatcctggccggtgagatgttgtctgtagctgaacatttcctggaacaacagatgcacccaaccgtggtgatatctgcttatagaaaggctcttgatgatatgatctccaccctcaagaagataagtatccccgtggacatttccgactccgacatgatgttgaatatcattaactcttcaattacgactaaggcaatttccaggtggtcatcactagcctgcaacattgcattggatgctgttaagatggtgcaattcgaggaaaacggcagaaaagagattgacatcaaaaagtacgccagggtggaaaaaatccccggtggcattatcgaagactcctgcgtccttagaggtgttatgattaacaaggatgtaacccacccaagaatgcgaagatacataaagaacccacgcattgtcctccttgacagcagcctcgaatataaaaagggagaatcacagactgatattgaaatcactcgcgaggaagatttcaccaggattcttcagatggaggaagagtatatacagcagctgtgtgaagacatcatccaactcaagccggatgtcgtgattacagagaaaggcattagcgacctcgctcagcactacctgatgagggctaatattacagcaatccgaagggtgagaaaaaccgacaacaacaggattgcccgagcctgtggtgcgcgaatcgttagccggccagaagaactgagggaggacgacgtcgggacaggagcaggactcctggaaataaaaaaaataggcgatgagtatttcacttttatcaccgactgcaaggatcctaaagcctgtaccattttattacggggtgctagcaaagagatcctttcagaggtcgaacgcaatcttcaggacgctatgcaggtctgtagaaatgtgcttctggaccctcagttggttcctgggggaggggctagtgaaatggcagttgctcacgccttgacggaaaagtcaaaggcaatgacgggcgtcgaacaatggccctatcgcgcagttgcccaggccctggaggtgatcccacgaacattgatccagaattgcggcgcaagtacgatcaggctcctaacctctttgcgggcaaagcacacccaggaaaattgcgaaacttggggcgtgaatggagagaccggcaccctggtggatatgaaagaattaggcatttgggaacctctggctgtcaagctgcaaacctataaaacagcagtggaaacggctgtactcctcctgaggatagacgatatagtgtcaggacacaaaaagaaaggtgacgatcaatcacgtcaaggtggagcaccggatgccggacaggagtag

SEQ ID NO: 161041 - DNA, 2150 bp, Artificial Sequence
  derived and/or modified sequence
actgcgcaagcgcctgtgccctcccagtgccttcgtcgtgcgctctctgtctaacttgtctggccgttcttgcgtagggggcgggactaaggctgtcaattggtctgtttttgtgccgatcaatgagatgggtgcggtgattggcgactaccttgagagtagcgggttgaggtgtaagccctgaggaggcagcgttttctgggcttctgtctggttctctctctccagaaggttctgccggttcccccagctctgggtacccggctctgcatcgcgtcgccatgatgggccatcgtccagtgctcgtgctcagccagaacacaaagcgtgaatccggaagaaaagttcaatctggaaacatcaatgctgccaagactattgcagatatcatccgaacatgtttgggacccaagtccatgatgaagatgcttttggacccaatgggaggcattgtgatgaccaatgatggcaatgccattcttcgagagattcaagtccagcatccagcggccaagtccatgatcgaaattagccggacccaggatgaagaggttggagatgggaccacatcagtaattattcttgcaggggaaatgctgtctgtagctgagcacttcctggagcagcagatgcacccaacagtggtgatcagtgcttaccgcaaggcattggatgatatgatcagcaccctaaagaaaataagtatcccagtcgacatcagtgacagtgatatgatgctgaacatcatcaacagctctattactaccaaagccatcagtcggtggtcatctttggcttgcaacattgccctggatgctgtcaagatggtacagtttgaggagaatggtcggaaagagattgacataaaaaaatatgcaagagtggaaaagatacctggaggcatcattgaagactcctgtgtcttgcgtggagtcatgattaacaaggatgtgacccatccacgtatgcggcgctatatcaagaaccctcgcattgtgctgctggattcttctctggaatacaagaaaggagaaagccagactgacattgagattacacgagaggaggacttcacccgaattctccagatggaggaagagtacatccagcagctctgtgaggacattatccaactgaagcccgatgtggtcatcactgaaaagggcatctcagatttagctcagcactaccttatgcgggccaatatcacagccatccgcagagtccggaagacagacaataatcgcattgctagagcctgtggggcccggatagtcagccgaccagaggaactgagagaagatgatgttggaacaggagcaggcctgttggaaatcaagaaaattggagatgaatactttactttcatcactgactgcaaagaccccaaggcctgcaccattctcctccggggggctagcaaagagattctctcggaagtagaacgcaacctccaggatgccatgcaagtgtgtcgcaatgttctcctggaccctcagctggtgccagggggtggggcctccgagatggctgtggcccatgccttgacagaaaaatccaaggccatgactggtgtggaacaatggccatacagggctgttgcccaggccctagaggtcattcctcgtaccctgatccagaactgtggggccagcaccatccgtctacttacctcccttcgggccaagcacacccaggagaactgtgagacctggggtgtaaatggtgagacgggtactttggtggacatgaaggaactgggcatatgggagccattggctgtgaagctgcagacttataagacagcagtggagacggcagttctgctactgcgaattgatgacatcgtttcaggccacaaaaagaaaggcgatgaccagagccggcaaggcggggctcctgatgctggccaggagtgagtgctaggcaaggctacttcaatgcacagaaccagcagagtctccccttttcctgagccagagtgccaggaacactgtggacgtctttgttcagaagggatcaggttggggggcagcccccagtccctttctgtcccagctcagttttccaaaagacactgacatgtaattcttctctattgtaaggtttccatttagtttgcttccgatgattaaatctaagtcatttga

SEQ ID NO: 161042 - DNA, 2048 bp, Artificial Sequence
  derived and/or modified sequence
ctctctccagaaggttctgccggttcccccagctctgggtacccggctctgcatcgcgtcgccatgatgggccatcgtccagtgctcgtgctcaagacggagtttcaccatgttgaccaggctggtctccaactgctgatgagctcaggtgatccgcccacctcggcctcccaaagtgctgagattacaggcgtgagccaccgcgcccggtcccttatttttttctgatgagcaccacctccattgtcttcctttggccagaacacaaagcgtgaatccggaagaaaagttcaatctggaaacatcaatgctgccaagactattgcagatatcatccgaacatgtttgggacccaagtccatgatgaagatgcttttggacccaatgggaggcattgtgatgaccaatgatggcaatgccattcttcgagagattcaagtccagcatccagcggccaagtccatgatcgaaattagccggacccaggatgaagaggttggagatgggaccacatcagtaattattcttgcaggggaaatgctgtctgtagctgagcacttcctggagcagcagatgcacccaacagtggtgatcagtgcttaccgcaaggcattggatgatatgatcagcaccctaaagaaaataagtatcccagtcgacatcagtgacagtgatatgatgctgaacatcatcaacagctctattactaccaaagccatcagtcggtggtcatctttggcttgcaacattgccctggatgctgtcaagatggtacagtttgaggagaatggtcggaaagagattgacataaaaaaatatgcaagagtggaaaagatacctggaggcatcattgaagactcctgtgtcttgcgtggagtcatgattaacaaggatgtgacccatccacgtatgcggcgctatatcaagaaccctcgcattgtgctgctggattcttctctggaatacaagaaaggagaaagccagactgacattgagattacacgagaggaggacttcacccgaattctccagatggaggaagagtacatccagcagctctgtgaggacattatccaactgaagcccgatgtggtcatcactgaaaagggcatctcagatttagctcagcactaccttatgcgggccaatatcacagccatccgcagagtccggaagacagacaataatcgcattgctagagcctgtggggcccggatagtcagccgaccagaggaactgagagaagatgatgttggaacaggagcaggcctgttggaaatcaagaaaattggagatgaatactttactttcatcactgactgcaaagaccccaaggcctgcaccattctcctccggggggctagcaaagagattctctcggaagtagaacgcaacctccaggatgccatgcaagtgtgtcgcaatgttctcctggaccctcagctggtgccagggggtggggcctccgagatggctgtggcccatgccttgacagaaaaatccaaggccatgactggtgtggaacaatggccatacagggctgttgcccaggccctagaggtcattcctcgtaccctgatccagaactgtggggccagcaccatccgtctacttacctcccttcgggccaagcacacccaggagaactgtgagacctggggtgtaaatggtgagacgggtactttggtggacatgaaggaactgggcatatgggagccattggctgtgaagctgcagacttataagacagcagtggagacggcagttctgctactgcgaattgatgacatcgtttcaggccacaaaaagaaaggcgatgaccagagccggcaaggcggggctcctgatgctggccaggagtgagtgctaggcaaggctacttcaatgcacagaaccagcagagtctccccttttcctgagccagagtgccaggaacactgtggacgtctttgttcagaagggatcaggttggggggcagcccccagtccctttctgtcccagctcagttttccaaaagacactgacatgtaattcttctctattgtaa

SEQ ID NO: 161043 - DNA, 842 bp, Artificial Sequence
  derived and/or modified sequence
gagaaggtaatgaatgtatgaaggtgatctggaaggacaatctatgaattggacaagtgaagaaggaagaggagacattataagaagtgggaccaacatagaccgagcctggcagtgccagaacacaaagcgtgaatccggaagaaaagttcaatctggaaacatcaatgctgccaagactattgcagatatcatccgaacatgtttgggacccaagtccatgatgaagatgcttttggacccaatgggaggcattgtgatgaccaatgatggcaatgccattcttcgagagattcaagtccagcatccagcggccaagtccatgatcgaaattagccggacccaggatgaagaggttggagatgggaccacatcagtaattattcttgcaggggaaatgctgtctgtagctgagcacttcctggagcagcagatgcacccaacagtggtgatcagtgcttaccgcaaggcattggatgatatgatcagcaccctaaagaaaataagtatcccagtcgacatcagtgacagtgatatgatgctgaacatcatcaacagctctattactaccaaagccatcagtcggtggtcatctttggcttgcaacattgccctggatgctgtcaagatggtacagtttgaggagaatggtcggaaagagattgacataaaaaaatatgcaagagtggaaaagatacctggaggcatcattgaagactcctgtgtcttgcgtggagtcatgattaacaaggatgtgacccatccacgtatgcggcgctatatcaagaaccctcgcattgtgctgctggattcttctctggaatacaagaaaggagaaagcc

SEQ ID NO: 161044 - DNA, 513 bp, Artificial Sequence
  derived and/or modified sequence
tctgggtacccggctctgcatcgcgtcgccatgatgggccatcgtccagtgctcgtgctcagccagaacacaaagcgtgaatccggaagaaaagttcaatctggaaacatcaatgctgccaagactattgcagatatcatccgaacatgtttgggacccaagtccatgatgaagatgcttttggacccaatgggaggcattgtgatgaccaatgatggcaatgccattcttcgagagattcaagtccagcatccagcggccaagtccatgatcgaaattagccggacccaggatgaagaggttggagatgggaccacatcagtaattattcttgagtctcactctgtcaccatgctggagtgtggtggtgcgatcttggctcactgcaacctctgcctcccagcaggggaaatgctgtctgtagctgagcacttcctggagcagcagatgcacccaacagtggtgatcagtgcttaccgcaaggcattggatgatatgatcagcaccctaaag

SEQ ID NO: 161045 - DNA, 1858 bp, Artificial Sequence
  derived and/or modified sequence
gtctggttctctctctccagaaggttctgccggttcccccagctctgggtacccggctctgcatcgcgtcgccatgatgggccatcgtccagtgctcgtgctcattaggtctagctttatattcttggcccatcccttagtagcggtaatttaaatgtttcaatctgtattacggagttaacagtatttcctagtagaattgtgagaattaaatgaggccagaacacaaagcgtgaatccggaagaaaagttcaatctggaaacatcaatgctgccaagactattgcagatatcatccgaacatgtttgggacccaagtccatgatgaagatgcttttggacccaatgggaggcattgtgatgaccaatgatggcaatgccattcttcgagagattcaagtccagcatccagcggccaagtccatgatcgaaattagccggacccaggatgaagaggttggagatgggaccacatcagtaattattcttgcaggggaaatgctgtctgtagctgagcacttcctggagcagcagatgcacccaacagtggtgatcagtgcttaccgcaaggcattggatgatatgatcagcaccctaaagaaaataagtatcccagtcgacatcagtgacagtgatatgatgctgaacatcatcaacagctctattactaccaaagccatcagtcggtggtcatctttggcttgcaacattgccctggatgctgtcaagatggtacagtttgaggagaatggtcggaaagagattgacataaaaaaatatgcaagagtggaaaagatacctggaggcatcattgaagactcctgtgtcttgcgtggagtcatgattaacaaggatgtgacccatccacgtatgcggcgctatatcaagaaccctcgcattgtgctgctggattcttctctggaatacaagaaaggagaaagccagactgacattgagattacacgagaggaggacttcacccgaattctccagatggaggaagagtacatccagcagctctgtgaggacattatccaactgaagcccgatgtggtcatcactgaaaagggcatctcagatttagctcagcactaccttatgcgggccaatatcacagccatccgcagagtccggaagacagacaataatcgcattgctagagcctgtggggcccggatagtcagccgaccagaggaactgagagaagatgatgttggaacaggagcaggcctgttggaaatcaagaaaattggagatgaatactttactttcatcactgactgcaaagaccccaaggcctgcaccattctcctccggggggctagcaaagagattctctcggaagtagaacgcaacctccaggatgccatgcaagtgtgtcgcaatgttctcctggaccctcagctggtgccagggggtggggcctccgagatggctgtggcccatgccttgacagaaaaatccaaggccatgactggtgtggaacaatggccatacagggctgttgcccaggccctagaggtcattcctcgtaccctgatccagaactgtggggccagcaccatccgtctacttacctcccttcgggccaagcacacccaggagaactgtgagacctggggtgtaaatggtgagacgggtactttggtggacatgaaggaactgggcatatgggagccattggctgtgaagctgcagacttataagacagcagtggagacggcagttctgctactgcgaattgatgacatcgtttcaggccacaaaaagaaaggcgatgaccagagccggcaaggcggggctcctgatgctggccaggagtgagtgctaggcaaggctacttcaatgcacagaacca

SEQ ID NO: 161046 - DNA, 1638 bp, Artificial Sequence
  derived and/or modified sequence
atgatgggccacagacccgtgctggtgctgagccagaacaccaagagagagagcggcagaaaggtgcagagcggcaacatcaacgccgccaagaccatcgccgacatcatcagaacctgcctgggccccaagagcatgatgaagatgctgctggaccccatgggcggcatcgtgatgaccaacgacggcaacgccatcctgagagagatccaggtgcagcaccccgccgccaagagcatgatcgagatcagcagaacccaggacgaggaggtgggcgacggcaccaccagcgtgatcatcctggccggcgagatgctgagcgtggccgagcacttcctggagcagcagatgcaccccaccgtggtgatcagcgcctacagaaaggccctggacgacatgatcagcaccctgaagaagatcagcatccccgtggacatcagcgacagcgacatgatgctgaacatcatcaacagcagcatcaccaccaaggccatcagcagatggagcagcctggcctgcaacatcgccctggacgccgtgaagatggtgcagttcgaggagaacggcagaaaggagatcgacatcaagaagtacgccagagtggagaagatccccggcggcatcatcgaggacagctgcgtgctgagaggcgtgatgatcaacaaggacgtgacccaccccagaatgagaagatacatcaagaaccccagaatcgtgctgctggacagcagcctggagtacaagaagggcgagagccagaccgacatcgagatcaccagagaggaggacttcaccagaatcctgcagatggaggaggagtacatccagcagctgtgcgaggacatcatccagctgaagcccgacgtggtgatcaccgagaagggcatcagcgacctggcccagcactacctgatgagagccaacatcaccgccatcagaagagtgagaaagaccgacaacaacagaatcgccagagcctgcggcgccagaatcgtgagcagacccgaggagctgagagaggacgacgtgggcaccggcgccggcctgctggagatcaagaagatcggcgacgagtacttcaccttcatcaccgactgcaaggaccccaaggcctgcaccatcctgctgagaggcgccagcaaggagatcctgagcgaggtggagagaaacctgcaggacgccatgcaggtgtgcagaaacgtgctgctggacccccagctggtgcccggcggcggcgccagcgagatggccgtggcccacgccctgaccgagaagagcaaggccatgaccggcgtggagcagtggccctacagagccgtggcccaggccctggaggtgatccccagaaccctgatccagaactgcggcgccagcaccatcagactgctgaccagcctgagagccaagcacacccaggagaactgcgagacctggggcgtgaacggcgagaccggcaccctggtggacatgaaggagctgggcatctgggagcccctggccgtgaagctgcagacctacaagaccgccgtggagaccgccgtgctgctgctgagaatcgacgacatcgtgagcggccacaagaagaagggcgacgaccagagcagacagggcggcgcccccgacgccggccaggagtag

SEQ ID NO: 161047 - DNA, 1503 bp, Artificial Sequence
  derived and/or modified sequence
atgatgaagatgctgctggaccccatgggcggcatcgtgatgaccaacgacggcaacgccatcctgagagagatccaggtgcagcaccccgccgccaagagcatgatcgagatcagcagaacccaggacgaggaggtgggcgacggcaccaccagcgtgatcatcctggccggcgagatgctgagcgtggccgagcacttcctggagcagcagatgcaccccaccgtggtgatcagcgcctacagaaaggccctggacgacatgatcagcaccctgaagaagatcagcatccccgtggacatcagcgacagcgacatgatgctgaacatcatcaacagcagcatcaccaccaaggccatcagcagatggagcagcctggcctgcaacatcgccctggacgccgtgaagatggtgcagttcgaggagaacggcagaaaggagatcgacatcaagaagtacgccagagtggagaagatccccggcggcatcatcgaggacagctgcgtgctgagaggcgtgatgatcaacaaggacgtgacccaccccagaatgagaagatacatcaagaaccccagaatcgtgctgctggacagcagcctggagtacaagaagggcgagagccagaccgacatcgagatcaccagagaggaggacttcaccagaatcctgcagatggaggaggagtacatccagcagctgtgcgaggacatcatccagctgaagcccgacgtggtgatcaccgagaagggcatcagcgacctggcccagcactacctgatgagagccaacatcaccgccatcagaagagtgagaaagaccgacaacaacagaatcgccagagcctgcggcgccagaatcgtgagcagacccgaggagctgagagaggacgacgtgggcaccggcgccggcctgctggagatcaagaagatcggcgacgagtacttcaccttcatcaccgactgcaaggaccccaaggcctgcaccatcctgctgagaggcgccagcaaggagatcctgagcgaggtggagagaaacctgcaggacgccatgcaggtgtgcagaaacgtgctgctggacccccagctggtgcccggcggcggcgccagcgagatggccgtggcccacgccctgaccgagaagagcaaggccatgaccggcgtggagcagtggccctacagagccgtggcccaggccctggaggtgatccccagaaccctgatccagaactgcggcgccagcaccatcagactgctgaccagcctgagagccaagcacacccaggagaactgcgagacctggggcgtgaacggcgagaccggcaccctggtggacatgaaggagctgggcatctgggagcccctggccgtgaagctgcagacctacaagaccgccgtggagaccgccgtgctgctgctgagaatcgacgacatcgtgagcggccacaagaagaagggcgacgaccagagcagacagggcggcgcccccgacgccggccaggagtag

SEQ ID NO: 161048 - DNA, 831 bp, Artificial Sequence
  derived and/or modified sequence
atgtacgagggcgacctggagggccagagcatgaactggaccagcgaggagggcagaggcgacatcatcagaagcggcaccaacatcgacagagcctggcagtgccagaacaccaagagagagagcggcagaaaggtgcagagcggcaacatcaacgccgccaagaccatcgccgacatcatcagaacctgcctgggccccaagagcatgatgaagatgctgctggaccccatgggcggcatcgtgatgaccaacgacggcaacgccatcctgagagagatccaggtgcagcaccccgccgccaagagcatgatcgagatcagcagaacccaggacgaggaggtgggcgacggcaccaccagcgtgatcatcctggccggcgagatgctgagcgtggccgagcacttcctggagcagcagatgcaccccaccgtggtgatcagcgcctacagaaaggccctggacgacatgatcagcaccctgaagaagatcagcatccccgtggacatcagcgacagcgacatgatgctgaacatcatcaacagcagcatcaccaccaaggccatcagcagatggagcagcctggcctgcaacatcgccctggacgccgtgaagatggtgcagttcgaggagaacggcagaaaggagatcgacatcaagaagtacgccagagtggagaagatccccggcggcatcatcgaggacagctgcgtgctgagaggcgtgatgatcaacaaggacgtgacccaccccagaatgagaagatacatcaagaaccccagaatcgtgctgctggacagcagcctggagtacaagaagggcgagagctag

SEQ ID NO: 161049 - DNA, 486 bp, Artificial Sequence
  derived and/or modified sequence
atgatgggccacagacccgtgctggtgctgagccagaacaccaagagagagagcggcagaaaggtgcagagcggcaacatcaacgccgccaagaccatcgccgacatcatcagaacctgcctgggccccaagagcatgatgaagatgctgctggaccccatgggcggcatcgtgatgaccaacgacggcaacgccatcctgagagagatccaggtgcagcaccccgccgccaagagcatgatcgagatcagcagaacccaggacgaggaggtgggcgacggcaccaccagcgtgatcatcctggagagccacagcgtgaccatgctggagtgcggcggcgccatcctggcccactgcaacctgtgcctgcccgccggcgagatgctgagcgtggccgagcacttcctggagcagcagatgcaccccaccgtggtgatcagcgcctacagaaaggccctggacgacatgatcagcaccctgaagtag

SEQ ID NO: 161050 - protein, 290 aa, Artificial Sequence
  derived and/or modified sequence
MSNKEGSGGFRKRKHDNFPHNQRREGKDVNSSSPVMLAFKSFQQELDARHDKYERLVKLSRDITVESKRTIFLLHRITSAPDMEDILTESEIKLDGVRQKIFQVAQELSGEDMHQFHRAITTGLQEYVEAVSFQHFIKTRSLISMDEINKQLIFTTEDNGKENKTPSSDAQDKQFGTWRLRVTPVDYLLGVADLTGELMRMCINSVGNGDIDTPFEVSQFLRQVYDGFSFIGNTGPYEVSKKLYTLKQSLAKVENACYALKVRGSEIPKHMLADVFSVKTEMIDQEEGIS

SEQ ID NO: 161051 - protein, 163 aa, Artificial Sequence
  derived and/or modified sequence
MSNKEGSGGFRKRKHDNFPHNQRREGKDVNSSSPVMLAFKSFQQELDARHDKYERLVKLSRDITVESKRTIFLLHRITSSQYLDHSAPDMEDILTESEIKLDGVRQKIFQVAQELSGEDMHQFHRAITTGLQEYVEAVSFQHFIKTRSLISMDEINKQLIFTT

SEQ ID NO: 161052 - DNA, 873 bp, Artificial Sequence
  derived and/or modified sequence
atgagcaacaaggagggcagcggcggcttcagaaagagaaagcacgacaacttcccccacaaccagagaagagagggcaaggacgtgaacagcagcagccccgtgatgctggccttcaagagcttccagcaggagctggacgccagacacgacaagtacgagagactggtgaagctgagcagagacatcaccgtggagagcaagagaaccatcttcctgctgcacagaatcaccagcgcccccgacatggaggacatcctgaccgagagcgagatcaagctggacggcgtgagacagaagatcttccaggtggcccaggagctgagcggcgaggacatgcaccagttccacagagccatcaccaccggcctgcaggagtacgtggaggccgtgagcttccagcacttcatcaagaccagaagcctgatcagcatggacgagatcaacaagcagctgatcttcaccaccgaggacaacggcaaggagaacaagacccccagcagcgacgcccaggacaagcagttcggcacctggagactgagagtgacccccgtggactacctgctgggcgtggccgacctgaccggcgagctgatgagaatgtgcatcaacagcgtgggcaacggcgacatcgacacccccttcgaggtgagccagttcctgagacaggtgtacgacggcttcagcttcatcggcaacaccggcccctacgaggtgagcaagaagctgtacaccctgaagcagagcctggccaaggtggagaacgcctgctacgccctgaaggtgagaggcagcgagatccccaagcacatgctggccgacgtgttcagcgtgaagaccgagatgatcgaccaggaggagggcatcagctag

SEQ ID NO: 161053 - DNA, 492 bp, Artificial Sequence
  derived and/or modified sequence
atgagcaacaaggagggcagcggcggcttcagaaagagaaagcacgacaacttcccccacaaccagagaagagagggcaaggacgtgaacagcagcagccccgtgatgctggccttcaagagcttccagcaggagctggacgccagacacgacaagtacgagagactggtgaagctgagcagagacatcaccgtggagagcaagagaaccatcttcctgctgcacagaatcaccagcagccagtacctggaccacagcgcccccgacatggaggacatcctgaccgagagcgagatcaagctggacggcgtgagacagaagatcttccaggtggcccaggagctgagcggcgaggacatgcaccagttccacagagccatcaccaccggcctgcaggagtacgtggaggccgtgagcttccagcacttcatcaagaccagaagcctgatcagcatggacgagatcaacaagcagctgatcttcaccacctag

SEQ ID NO: 161054 - DNA, 873 bp, Artificial Sequence
  derived and/or modified sequence
atgagcaacaaggagggatcaggagggttcaggaaaagaaagcatgacaatttcccacacaatcagcggcgggagggaaaggatgttaactcgagcagcccagtgatgctcgcattcaagtcctttcagcaggagttagacgctagacacgacaagtatgaacgcctggtaaagttgagcagagacatcactgtggagtcaaagcggacgatcttcttgttgcatcgcattaccagcgccccggatatggaagatatcctgactgagtccgaaatcaaactggatggggttcggcagaaaatcttccaggtggctcaggagctatctggtgaagacatgcaccagttccacagagccattacgaccggcctgcaggaatatgtcgaggcagtgtcatttcaacatttcatcaaaactcgctccctcatctccatggacgagattaataaacagctcatcttcacaactgaggataacggaaaggaaaacaagacccccagctctgatgctcaagataagcagtttggaacatggcgtctgcgggtaacaccagtcgattacttgctgggtgtagctgacctcaccggagagctcatgcgaatgtgcatcaattcagttggcaatggggatattgacactccctttgaggttagtcagttcctgcggcaggtgtatgacgggttttcgttcatcggcaacaccggcccatacgaagtaagcaaaaagctctatacactgaagcagagtttggcaaaggtggagaatgcttgctacgcactgaaggtcagggggtctgaaattcctaagcatatgctcgcagacgtgttctctgtcaagactgagatgatcgaccaggaagaggggataagttag

SEQ ID NO: 161055 - DNA, 492 bp, Artificial Sequence
  derived and/or modified sequence
atgtctaataaggaggggtcgggaggattcaggaagcgcaaacatgataacttccctcataatcagagacgagaggggaaggacgttaattcatccagcccagtgatgctggctttcaagtcctttcaacaggagctcgacgcacgccatgataaatacgaacggctggtaaagctctctcgcgatataacggtggaaagcaagaggacaatttttcttctccaccgtatcacgagtagccagtatctggatcattcagctcctgacatggaggacattctgaccgaaagtgaaattaagcttgatggcgttcgccagaagattttccaggttgcccaggaattgagcggtgaggatatgcaccaatttcatcgcgcaattacaaccggcttacaggagtacgtggaggcagtgtcgttccagcatttcattaagacgaggagcctcataagcatggacgagatcaataagcagttgatctttacaacctag

SEQ ID NO: 161056 - DNA, 873 bp, Artificial Sequence
  derived and/or modified sequence
atgagcaacaaggagggcagcggcggcttcaggaagaggaagcatgacaacttcccccacaaccagaggcgggagggcaaggatgtgaacagcagcagccctgtgatgctggccttcaagagcttccagcaggagctggatgcccggcatgacaagtatgagcggctggtgaagctgagccgggacatcaccgtggagagcaagaggaccatcttcctgctgcaccgcatcaccagcgccccagacatggaggacatcctgacagagagcgagatcaagctggatggagtgcggcagaagatcttccaggtggcccaggagctgtctggagaggacatgcaccagttccaccgggccatcaccaccggcctgcaggagtatgtggaggccgtgtccttccagcacttcatcaagaccaggagcctcatctccatggatgagatcaacaagcagctgatcttcaccacagaagataatggcaaggagaacaagacccccagcagtgatgcccaggacaagcagtttggcacctggaggctgcgggtgacccctgtggactacctgctgggcgtggccgacctgactggagagctgatgaggatgtgcatcaacagcgtgggcaatggagacatcgacaccccatttgaggtgtcccagttcctgcggcaggtgtatgatggcttctccttcatcggcaacacaggcccctatgaggtgtccaagaagctgtacaccctgaagcagagcctggccaaggtggagaatgcctgctacgccctgaaggtgcggggcagcgagatccccaagcacatgctggctgatgtgttttctgtgaagacagagatgattgaccaggaggagggcatctcctag

SEQ ID NO: 161057 - DNA, 492 bp, Artificial Sequence
  derived and/or modified sequence
atgagcaacaaggagggcagcggcggcttcaggaagaggaagcatgacaacttcccccacaaccagaggcgggagggcaaggatgtgaacagcagcagccctgtgatgctggccttcaagagcttccagcaggagctggatgcccggcatgacaagtatgagcggctggtgaagctgagccgggacatcaccgtggagagcaagaggaccatcttcctgctgcaccgcatcaccagcagccagtacctggaccacagcgccccagacatggaggacatcctgacagaaagtgagatcaagctggatggagtgcggcagaagatcttccaggtggcccaggagctgagcggggaggacatgcaccagttccaccgggccatcaccaccggcctgcaggagtatgtggaggccgtgtccttccagcacttcatcaagaccaggagcctcatctccatggatgagatcaacaagcagctgatcttcaccacctag

SEQ ID NO: 161058 - DNA, 873 bp, Artificial Sequence
  derived and/or modified sequence
atgagcaacaaggagggcagcggcggcttccggaagcggaagcacgacaatttccctcataaccaacgccgggagggcaaggacgtcaacagctcctctcccgtgatgttggcgtttaagtccttccagcaagagctggacgctcggcacgataaatatgaaagactggtcaagctgtcccgggacatcaccgtagagtctaaacgtacaatcttcctcttacaccggattacttctgctcctgatatggaggatattctcaccgagagtgagatcaaactggatggcgtgagacagaagatctttcaggtagcccaagagctgtcgggtgaggatatgcatcagttccaccgagccatcactaccggtctgcaagaatacgttgaagcagtgagcttccagcatttcattaagacaagatccctcatctcaatggacgagatcaataagcagcttattttcaccactgaagataacggtaaggagaataaaactccctccagcgatgctcaggataagcaatttggcacatggagattgcgagtgactccagtggattaccttttgggggttgccgatctgactggagaacttatgaggatgtgcatcaattccgtgggcaacggcgatatcgacacaccttttgaagtttcacagtttctacggcaggtttacgatggattttcttttatcggtaacactggcccttatgaggtttctaagaaactgtataccctgaagcaaagtctggccaaagtagaaaacgcctgctacgccctgaaggtcagaggctcagagatccccaagcacatgctcgctgacgtgttctcagtgaagaccgagatgatagaccaagaagaggggatctcttag

SEQ ID NO: 161059 - DNA, 492 bp, Artificial Sequence
  derived and/or modified sequence
atgagcaacaaggagggcagcggcggcttccggaagcggaagcacgacaattttccccacaaccaacgcagagaaggtaaagatgtgaactcatcttcacccgtgatgctcgcgttcaaatccttccagcaggaacttgacgctcgccacgataagtatgagcgcctagttaaactgtcccgcgacataactgtggagtctaagcgcacaatttttttgttgcaccgaatcacgtcatcccagtatctcgatcacagtgctccagatatggaagatatcttgactgagtctgagattaagcttgatggagttcgccagaaaatcttccaagtggcccaagaactttcgggcgaggacatgcaccagtttcacagagccataacaacaggcctccaagagtatgtggaggccgtgtccttccaacatttcattaaaaccagatcactaatcagtatggacgaaattaataagcagctgatctttaccacttag

SEQ ID NO: 161060 - DNA, 873 bp, Artificial Sequence
  derived and/or modified sequence
atgagtaataaggagggatcagggggatttagaaaaagaaagcacgacaactttccacacaatcagcggcgagagggaaaagacgtcaattcctcttccccagttatgctagcgttcaagtcctttcagcaggagcttgacgccagacatgacaaatacgagcggttagtcaagctaagtcgagacattactgttgaaagcaagaggactattttcctccttcacaggattacctctgctccggatatggaggatatcttgaccgagagcgagatcaagttggacggcgtgcgccaaaaaattttccaggtggcacaggagttgtccggtgaggacatgcaccagtttcatcgggcaattacgacagggctgcaggagtacgtcgaagctgttagctttcagcatttcataaaaacgaggagcctcatctctatggacgagatcaataagcagcttatctttactaccgaggacaatgggaaagagaacaagaccccttcctccgacgcccaagacaagcagttcggtacgtggaggttgagggtgactcctgtcgattacctgctgggggtagccgatcttactggtgaactcatgaggatgtgtatcaacagcgtcggaaacggagatatcgacacccctttcgaggttagtcaatttctccgtcaggtctatgatggtttcagcttcatcggcaacactggaccctatgaagtttcaaagaaactgtacacactaaaacagagtcttgctaaggttgaaaatgcatgttatgccttaaaagtgagagggagcgagataccgaagcacatgttagctgacgtttttagtgttaaaaccgagatgattgatcaggaggagggtatctcctag

SEQ ID NO: 161061 - DNA, 492 bp, Artificial Sequence
  derived and/or modified sequence
atgtcaaataaagaaggaagcggcggatttcgaaaaaggaagcatgataattttcctcacaatcagcgtcgcgagggcaaggacgtgaacagctcttccccagtcatgctggcttttaaatcattccagcaggaattggacgccagacatgacaagtacgagaggcttgtgaaactttcgcgcgatatcactgtggaatccaagagaaccatttttctcttgcaccggattacaagctcacagtatctggaccacagcgccccagatatggaggatatccttacagagagcgagataaagctggacggggtacgacagaagatttttcaggtagctcaagagctctccggagaagacatgcatcaatttcacagggcaatcaccactggcctgcaggaatacgtggaggccgtgtcattccagcattttataaagactaggagcctcatttcaatggacgagattaacaagcaattgattttcactacctag

SEQ ID NO: 161062 - DNA, 2762 bp, Artificial Sequence
  derived and/or modified sequence
gcggccgcaatagtacgctcgcgcggcggtggcgggtggtggtccttggaccacgcggtgggcggagccagcggcgacggcctcccctcccctccggacgcaggccggaagtacgtgagaggagacttccggccactgcgttgtagtcggcccggctgcaaagcgtttttctgcaggctgttttcccaggttccctcggcctgtacctcgcgcactcctcttgctccaggtccttcagtctccgctcgtctcaccgtaggctgtgacgacatgagcaacaaagaaggatcaggagggttcaggaaaaggaagcatgacaatttcccacataaccaaagaagagaagggaaggatgttaattcatcttcacccgtgatgttggcctttaaatcatttcagcaggaacttgatgcaaggcatgacaaatatgagagacttgtgaaacttagtcgggatataactgttgaaagtaaaaggacaatttttctcctccataggattacaagtgctcctgatatggaagatatattgactgaatcagaaattaaattggatggtgtcagacaaaagatattccaggtagcccaagagctatcaggggaagatatgcatcagttccatcgagccattactacaggactacaggaatatgtggaagctgtctcttttcaacacttcatcaaaacacgatcattaattagtatggatgaaattaataaacaattgatatttacgactgaagacaatgggaaagaaaataaaactccctcctctgatgcacaggataagcagtttggtacttggagactgagagtcacacctgtcgattaccttctgggagtggctgacttaactggagaattgatgcggatgtgtattaacagtgtggggaatggggacattgataccccctttgaagtgagccagtttttacgtcaggtttatgatgggttttcattcattggcaacactggaccttacgaggtttctaagaagctgtataccttgaaacaaagtttggccaaagtggagaatgcttgttatgccttgaaagtcagagggtcagaaattccaaaacatatgttggcagatgtgttttcagttaaaacagaaatgatagatcaagaagagggcatttcttagaatctaacgttactcagttactaattcttttgagaactcctaagagaccaatttgtaagacttatttagtatttcatttaactttattgtggcttttacatagaaacatattcagttgtacttgttttaaattgtatacaagctgtacataaaattagccaaatgaatcatttcttatatcttattcatgaaagtttgcatacagatgtttgcatatatgcctttttgaatttttgctggttaacctttatcatttatctttgtaatgtgaacatgcttcagagtgtaccttttgccataacctattttaatttactttttctgaagtttggagtgataatttttagtggaagcaatttgtaatttaagttggtagttatattatatatagaaaagattttttagttaaacttctggacatgagcgtcctgtttaaatttcttgttaatatcgtgccaagcctcaaaaataggcttattccatggaacaagaattaaaaatgaataagctatcaatatataatttaagtacaagtttaggctgggcgtggtggctcacgcctgtaatcccagcactttgggaggccgaggtaggcagatcacgaggtcaagagatcaagaccagcctgaccaacgtggcgaaacctcgtctctactagaaatacaaaaattagctggatatggtggtatgtgcctgtaatcccagctacttgggaggctgaggcaggagactcgcttgaacctgggaggcagaggttgcagtgagccgagattgcgccactgcactccagcctgggtaacagagcaagactccatctcaaaaaaagaaagaaagaaaaaagaaagtacaagtttataaagtattatagtgaaaaattcgcattctggctgattttaagccatttaaaatttatataaaacaaccttccataaaaatttgacaggtgcccagatgttgctttctccatttattttttgtttttttttaatcacagtaggtctgatagagaattggagctaaattataatatttttgttggtaaagttgagttatatacttgtacatacaatggaaatgcttttagtagtgattatttagcaatttttgtttttgttatattaggcatgtttggaggctttcctattctagcatttaaatttaaattttattaaaattaaataatttaaatctagcatttaaatttaaataatttaagtctagcatttacttttaaataattataatgaagttttgaaatactaagttaatccagacctttagttgtcccatggtgttaataaagttgccaaagaagatgtattatgaacaattcagcaataagacaattgtcaacacagttgagaataacaatggtaatcgttagtaatatttagaattggaatttgcctactgaaatagttatagatgattacttgtgatgtgaaactgaattgagcatgacaaccagacatttccagttggttttgtaagttttgagaatctagatactgggttttattttttgaaagattagctctgtttgtaagggctgattccttgaaaatgtaattttccagaaaaacacctaaagaaaataaaacatggacatgcctagtaaa

SEQ ID NO: 161063 - DNA, 644 bp, Artificial Sequence
  derived and/or modified sequence
gagaggagacttccggccactgcgttgtagtcggcccggctgcaaagcgtttttctgcaggctgttttcccaggttccctcggcctgtacctcgcgcactcctcttgctccaggtccttcagtctccgctcgtctcaccgtaggctgtgacgacatgagcaacaaagaaggatcaggagggttcaggaaaaggaagcatgacaatttcccacataaccaaagaagagaagggaaggatgttaattcatcttcacccgtgatgttggcctttaaatcatttcagcaggaacttgatgcaaggcatgacaaatatgagagacttgtgaaacttagtcgggatataactgttgaaagtaaaaggacaatttttctcctccataggattacaagttcccaatatcttgatcatagtgctcctgatatggaagatatattgactgaatcagaaattaaattggatggtgtcagacaaaagatattccaggtagcccaagagctatcaggggaagatatgcatcagttccatcgagccattactacaggactacaggaatatgtggaagctgtctcttttcaacacttcatcaaaacacgatcattaattagtatggatgaaattaataaacaattgatatttacgactg

SEQ ID NO: 161064 - protein, 448 aa, Artificial Sequence
  derived and/or modified sequence
MRECISVHVGQAGVQMGNACWELYCLEHGIQPDGQMPSDKTIGGGDDSFTTFFCETGAGKHVPRAVFVDLEPTVIDEIRNGPYRQLFHPEQLITGKEDAANNYARGHYTIGKEIIDPVLDRIRKLSDQCTGLQGFLVFHSFGGGTGSGFTSLLMERLSVDYGKKSKLEFSIYPAPQVSTAVVEPYNSILTTHTTLEHSDCAFMVDNEAIYDICRRNLDIERPTYTNLNRLISQIVSSITASLRFDGALNVDLTEFQTNLVPYPRIHFPLATYAPVISAEKAYHEQLSVAEITNACFEPANQMVKCDPRHGKYMACCLLYRGDVVPKDVNAAIAAIKTKRSIQFVDWCPTGFKVGINYQPPTVVPGGDLAKVQRAVCMLSNTTAIAEAWARLDHKFDLMYAKRAFVHWYVGEGMEEGEFSEAREDMAALEKDYEEVGIDSYEDEDEGEE

SEQ ID NO: 161065 - protein, 433 aa, Artificial Sequence
  derived and/or modified sequence
MGNACWELYCLEHGIQPDGQMPSDKTIGGGDDSFTTFFCETGAGKHVPRAVFVDLEPTVIDEIRNGPYRQLFHPEQLITGKEDAANNYARGHYTIGKEIIDPVLDRIRKLSDQCTGLQGFLVFHSFGGGTGSGFTSLLMERLSVDYGKKSKLEFSIYPAPQVSTAVVEPYNSILTTHTTLEHSDCAFMVDNEAIYDICRRNLDIERPTYTNLNRLISQIVSSITASLRFDGALNVDLTEFQTNLVPYPRIHFPLATYAPVISAEKAYHEQLSVAEITNACFEPANQMVKCDPRHGKYMACCLLYRGDVVPKDVNAAIAAIKTKRSIQFVDWCPTGFKVGINYQPPTVVPGGDLAKVQRAVCMLSNTTAIAEAWARLDHKFDLMYAKRAFVHWYVGEGMEEGEFSEAREDMAALEKDYEEVGIDSYEDEDEGEE

SEQ ID NO: 161066 - DNA, 1347 bp, Artificial Sequence
  derived and/or modified sequence
atgagagagtgcatctcagtgcacgttggacaggctggggtgcagatgggcaatgcctgttgggagctgtactgccttgagcatggtattcagcctgatggccaaatgccaagtgacaagaccatcgggggaggagacgactctttcactacatttttctgcgaaactggggcaggtaagcacgtgccaagggccgtgttcgttgatctagagcctacagtgatagacgaaattcgaaacggaccatataggcagttgttccatcccgagcagctcattacgggaaaggaagatgcagcaaataattacgccaggggccactacaccattggaaaagagatcatagatcctgtactcgacagaatacgcaagctgtcagaccaatgcacaggtttacagggcttcttggtgttccactccttcgggggaggtacagggagtggatttacgagcttgctgatggaacgtctgtctgtcgactacgggaaaaaaagcaagctagaattctcaatttatcccgctccccaagtctctacggcagtggttgaaccttataattccatcctcacaacccacacaactctggaacactctgactgtgcttttatggtggacaacgaggcaatctatgacatctgtagaaggaacctggatatcgagaggccaacatataccaatctgaacagacttatctctcagatcgtaagcagtataaccgcctcgttgcgcttcgatggtgcattaaatgtggaccttacagaatttcagacaaacctggttccataccctaggatccactttcctttggctacctacgcacccgttatctcagccgagaaggcataccacgaacagctgagcgtggccgagatcactaacgcttgcttcgaacctgccaaccagatggttaaatgtgaccctcgccacgggaagtatatggcctgttgtctgctctatagaggagacgtcgtgcctaaagatgtgaacgcggctatagccgcaatcaaaacaaagcggtctatacaatttgttgattggtgtcccactggctttaaagtcggaatcaactaccagccgccaacggtcgtccccggtggcgatctggccaaggtccaacgggctgtctgtatgctcagcaacactactgccatcgcggaagcctgggcccgtttagaccacaagtttgacctgatgtatgctaaacgcgcttttgttcactggtacgtgggcgagggcatggaagaaggagagtttagtgaagctagagaggatatggcagctttggaaaaggattacgaggaggtcggaatcgacagttacgaagatgaagacgaaggcgaagagtag

SEQ ID NO: 161067 - DNA, 1347 bp, Artificial Sequence
  derived and/or modified sequence
atgcgagagtgcatttccgtccacgtcgggcaagccggcgttcaaatgggaaatgcctgctgggaactgtattgtctggaacatgggatccagcctgacgggcaaatgcctagcgataagacaatcggcggcggcgatgacagcttcaccaccttcttttgcgagactggagccgggaaacacgtgccaagggccgtgtttgtcgacctggaacccacagttatcgacgagatacggaatggcccctacagacagctgtttcatccagaacagttaatcaccggaaaggaagatgcagcaaacaactacgctcggggccactatactattgggaaagaaattatagatcccgtgttggatcgcatacggaagctttctgaccaatgcactggtcttcagggcttcctcgtattccactcatttggcggcggcacaggatctgggtttacatctctgctcatggagagactgtcagtggattatggcaagaagagtaagctcgaattttctatttacccagccccccaagtatccacggccgtagtggaaccctataactcgatcctaaccacacacaccacactggaacactccgactgtgccttcatggtggataatgaggccatttacgatatctgccgccgcaatcttgacatcgaaagaccgacctatactaacctgaaccgcctgattagccagatcgtgtcatctattaccgcctcactaaggtttgatggcgccctcaacgtcgatcttaccgaattccagacaaatctcgtgccctatcccaggatccacttccctttagctacatatgcaccagttatctcagctgaaaaggcctaccatgaacagctctctgtagccgagatcaccaacgcctgttttgagcccgctaaccagatggtaaagtgcgatccgcgccatggcaaatacatggcctgttgtctgctgtatcgcggcgatgtcgtccctaaggacgttaatgcggcaatagcagccatcaaaaccaaaagatccatacaattcgtggattggtgtccaacaggatttaaggtggggattaattatcagcctcctaccgtggttcccgggggagatctggccaaagtgcagcgcgccgtgtgcatgttatcaaataccaccgctatagctgaggcctgggctagactggaccacaagttcgatctgatgtatgccaaaagggcttttgtgcattggtatgttggagagggaatggaagaaggggagttctcggaagcccgcgaagatatggcggccctggagaaagactatgaagaagttggcattgactcctacgaagacgaggacgaaggagaggagtag

SEQ ID NO: 161068 - DNA, 1347 bp, Artificial Sequence
  derived and/or modified sequence
atgcgagaatgcatatctgtccacgtcgggcaggccggtgtgcagatggggaacgcttgctgggagttatactgtctggagcacggtatacaaccggatggtcagatgccgtctgacaagacaatcggagggggcgacgatagtttcactactttcttttgcgagaccggagcgggaaaacatgtaccgagggcggtgttcgttgacctcgaacctaccgttattgacgagattagaaatggaccatatagacagttgttccatccagagcagttaattacaggtaaagaagacgctgccaacaattacgccagaggccattacacaatcggcaaagagattatcgaccctgtgttggaccgcatccggaagctttcagaccagtgtacaggcctccagggattcttggtcttccacagctttggcggcgggactggcagtggcttcacatcacttctaatggaaagactctccgtcgactacggtaaaaaaagcaagttagaattctctatatatccagcaccccaggtgagcaccgccgttgtagagccatacaacagcattttaactacacatacaacacttgagcattcagattgcgcttttatggttgataatgaagctatttacgacatttgtaggcgaaaccttgacatagaaagaccaacctatacaaacctcaaccgactcatttctcagatcgtgtcctcaatcaccgcctccctgcgctttgacggcgcgctaaacgtggatttgacagaattccaaacgaacctggttccataccctcgcatccattttccgctggccacttatgcgccggtaatatcagcagaaaaggcctaccacgagcagctgtccgttgcagagatcacaaacgcctgttttgaaccagcgaatcagatggtgaaatgcgatcccagacatggaaaatacatggcctgttgcttgctttacaggggtgatgttgtcccaaaagacgtgaacgctgcaatagccgcaataaaaactaaacggagcattcagtttgttgactggtgtcccaccggtttcaaggtaggcattaactaccagccaccaaccgttgtgcccggaggggacctggcaaaagtccagagagccgtatgtatgctttcgaacaccacagccatcgctgaagcgtgggcaaggctagatcacaagtttgacctgatgtacgccaaaagggcatttgtgcattggtatgtgggagaaggtatggaagagggcgaatttagtgaggccagggaagacatggcagcactcgagaaagattacgaagaggtgggcatcgactcgtatgaagacgaagacgagggggaggaatag

SEQ ID NO: 161069 - DNA, 2162 bp, Artificial Sequence
  derived and/or modified sequence
gcttaccctcccgggaggcgtggcctgcgggccgcccagcctctagtgggcgagcggggaacgcgggccccgccccccccccgcctataagggcggtgcggcactgcagctagcgcagttctcactgagacctgtcaccccgactcaacgtgagacgcaccgcccggactcaccatgcgtgaatgcatctcagtccacgtggggcaggcaggtgtccagatgggcaatgcctgctgggagctctattgcttggaacatgggattcagcctgatgggcagatgcccagtgacaagaccattggtggaggggacgactccttcaccaccttcttctgtgaaactggtgctggaaaacacgtaccccgggcagtttttgtggatctggagcctacggtcattgatgagatccgaaatggcccataccgacagctcttccacccagagcagctcatcactgggaaagaggatgctgccaacaactatgcccgtggtcactataccattggcaaggagatcattgacccagtgctggatcggatccgcaagctgtctgaccagtgcacaggacttcagggcttcctggtgttccacagctttggtgggggcactggctctggcttcacctcactcctgatggagcggctctctgttgactatggcaagaaatccaagctggaattctccatctacccagccccccaggtgtctacagccgtggtcgagccctacaactctatcctgaccacccacaccaccctggagcactcagactgtgccttcatggtggacaacgaagcaatctatgacatctgccgccgcaacctagacatcgagcgcccaacctacaccaacctcaatcgcctcattagccaaattgtctcctccatcacagcttctctgcgctttgacggggccctcaatgtggacctgacagagttccagaccaacctggtgccctaccctcgcatccacttccccctggccacctatgcaccagtcatctctgcagaaaaggcataccacgagcagctgtcggtggcagagatcaccaatgcctgctttgagcctgccaaccagatggtaaagtgtgatccccggcacggcaagtacatggcctgctgcctgctgtaccgtggagatgtggtgcccaaggatgtcaacgctgccattgccgccatcaagaccaagcgcagcattcagtttgtggactggtgccccacaggcttcaaggttggtatcaactaccagcctcccactgtggtgcctgggggtgacctggccaaggtgcagcgtgccgtgtgcatgctgagcaacacgaccgccatcgccgaggcctgggcccgcctggaccacaagttcgacctgatgtatgccaagagggcgtttgtgcactggtatgtgggtgagggcatggaggagggtgagttctccgaggcccgtgaggatatggctgccctggagaaggattatgaggaggtgggcatcgactcctatgaggacgaggatgagggagaagaataaagcagctgcctggagcctattcactatgtttattgcaaaatcctttcgaaataaacagtttccttgcacggtttcttgttccctctgagtgcttgagcttctgctgccttccccttcatgctgctgctgctctgtttgctgttcatgacccttatcccttccatcgctgaaggtgagacctgcaaaggggttcttgccaggcccaggaagcataaccccagggactttaaattgaagtcctagggttactcagtatagggaggaaatgaggaccaaaatccaggcacaaactgttgaaggatgagtcttcagctcctttccaagtaggagtataatccagtggtttctgtctttgaaagttagactgctaccctgttcttcctgctgcctctacatttaccaactctggaagcaaggcttggcccaggctcctctgtgcattatgagggtttgggagtggggctgggctggcccagagttcctgggcatggagccacgtcataagcttgggggatgggagggaacacaggcgatctcctagagttgtttgtgccactgcacctctgagcagctttgcatagcttcctgtcttgctgctttgctggagctggggctgtgccattaaaagtcaggtcatctcc

SEQ ID NO: 161070 - DNA, 1347 bp, Artificial Sequence
  derived and/or modified sequence
atgagagagtgcatcagcgtgcacgtgggccaggccggcgtgcagatgggcaacgcctgctgggagctgtactgcctggagcacggcatccagcccgacggccagatgcccagcgacaagaccatcggcggcggcgacgacagcttcaccaccttcttctgcgagaccggcgccggcaagcacgtgcccagagccgtgttcgtggacctggagcccaccgtgatcgacgagatcagaaacggcccctacagacagctgttccaccccgagcagctgatcaccggcaaggaggacgccgccaacaactacgccagaggccactacaccatcggcaaggagatcatcgaccccgtgctggacagaatcagaaagctgagcgaccagtgcaccggcctgcagggcttcctggtgttccacagcttcggcggcggcaccggcagcggcttcaccagcctgctgatggagagactgagcgtggactacggcaagaagagcaagctggagttcagcatctaccccgccccccaggtgagcaccgccgtggtggagccctacaacagcatcctgaccacccacaccaccctggagcacagcgactgcgccttcatggtggacaacgaggccatctacgacatctgcagaagaaacctggacatcgagagacccacctacaccaacctgaacagactgatcagccagatcgtgagcagcatcaccgccagcctgagattcgacggcgccctgaacgtggacctgaccgagttccagaccaacctggtgccctaccccagaatccacttccccctggccacctacgcccccgtgatcagcgccgagaaggcctaccacgagcagctgagcgtggccgagatcaccaacgcctgcttcgagcccgccaaccagatggtgaagtgcgaccccagacacggcaagtacatggcctgctgcctgctgtacagaggcgacgtggtgcccaaggacgtgaacgccgccatcgccgccatcaagaccaagagaagcatccagttcgtggactggtgccccaccggcttcaaggtgggcatcaactaccagccccccaccgtggtgcccggcggcgacctggccaaggtgcagagagccgtgtgcatgctgagcaacaccaccgccatcgccgaggcctgggccagactggaccacaagttcgacctgatgtacgccaagagagccttcgtgcactggtacgtgggcgagggcatggaggagggcgagttcagcgaggccagagaggacatggccgccctggagaaggactacgaggaggtgggcatcgacagctacgaggacgaggacgagggcgaggagtag

SEQ ID NO: 161071 - DNA, 1347 bp, Artificial Sequence
  derived and/or modified sequence
atgagagagtgcatcagtgtgcacgtggggcaggcgggcgtgcaaatgggcaacgcctgttgggagctttactgcctggagcacggcatccagccggacgggcagatgccctccgacaagactatcggggggggtgacgactccttcaccaccttcttttgcgagactggggcagggaaacatgtgccgcgagccgtgttcgtcgaccttgagcccacagtcatcgacgagatacggaacggcccgtaccggcagctgttccatcctgaacagttgatcacagggaaagaggatgcagcaaacaactacgcccgaggacattatacaatcggcaaggaaatcatcgatccggtcctcgaccgcattcgaaagctctcggaccaatgtacagggctgcaggggtttctcgtctttcacagctttggagggggtaccggtagcggattcacatctcttttgatggaacgcctgagcgtcgactacggaaaaaagtccaagctggaattctccatttatccagctccccaagtgagtacagccgtagtcgaaccctataattcaatacttactactcacactactctggaacattccgattgtgccttcatggttgataacgaggccatctatgacatatgccggaggaatctggacattgagcgccccacttacacgaacttaaacaggctaattagccagattgtgagcagcattacagctagcctacggttcgacggggccctgaacgttgacctcaccgagtttcagacaaatctagttccctatccccgtatccacttccctttggccacttacgcccctgtgattagtgcggagaaagcatatcatgaacagctgtcagtcgcagaaattacaaatgcttgcttcgaaccggccaaccagatggtgaaatgtgatcctaggcatggtaagtatatggcgtgttgtctcctgtacagaggcgacgtagtcccaaaagatgttaacgcagcaatagcggcaattaaaacaaagcggtcgatccagtttgtggactggtgtccaactggattcaaagttggaatcaactatcagcctcctactgtggttccaggaggagacctggctaaagtgcaacgggcagtctgtatgctcagtaataccaccgctatcgcagaagcctgggcaagactcgaccacaagtttgatctgatgtacgccaaacgcgctttcgtccactggtacgtgggggaaggcatggaggagggagaattttctgaagcacgtgaggatatggctgctctggaaaaagattacgaggaagtcggtatcgactcctacgaagatgaggacgagggcgaagagtag

SEQ ID NO: 161072 - DNA, 1347 bp, Artificial Sequence
  derived and/or modified sequence
atgagggagtgcatctctgtgcacgtgggccaggccggcgtgcagatgggaaatgcctgctgggagctgtactgcctggagcacggcatccagccagatggccagatgcccagcgacaagaccatcggcggcggagatgacagcttcaccaccttcttctgtgagaccggggccggcaagcacgtgcccagggctgtgtttgtggacctggagcccaccgtgattgatgagatcagaaatggcccctaccggcagctgttccaccctgagcagctgatcaccgggaaggaggatgctgccaacaactatgcccggggccactacaccatcggcaaggagatcattgatcctgtgctggaccgcatcaggaagctgagtgaccagtgcaccggcctgcagggcttcctggtgttccacagctttggaggcggcactggaagtggcttcaccagcctgctgatggagcggctgtctgtggactatggcaagaagagcaagctggagttcagcatctacccagccccccaggtgtccacagctgtggtggagccctacaacagcatcctgaccacccacaccaccctggagcacagcgactgtgccttcatggtggacaatgaggccatctatgacatctgcagaagaaacctggacatcgagcggcccacctacaccaacctgaacagactcatcagccagatcgtgagcagcatcacagccagcctgcgctttgatggagccctgaatgtggacctgacagagttccagaccaacctggtgccctacccccgcatccacttccccctggccacctacgcccctgtgatctctgctgagaaggcctaccacgagcagctgtctgtggccgagatcaccaatgcctgctttgagcccgccaaccagatggtgaagtgtgaccccaggcatggcaagtacatggcctgctgcctgctgtacagaggagatgtggtgcccaaggatgtgaatgctgccatcgccgccatcaagaccaagaggagcatccagtttgtggactggtgccccaccggcttcaaggtgggcatcaactaccagcccccaacagtggtgcctggaggagacctggccaaggtgcagagagctgtgtgcatgctgagcaacaccacagccatcgccgaggcctgggcccggctggaccacaagtttgacctgatgtatgccaagagggcctttgtgcactggtacgtgggggagggcatggaggagggggagttcagcgaggcccgggaggacatggccgccctggagaaggactatgaggaggtgggcatcgacagctatgaagatgaagatgaaggagaggagtag

SEQ ID NO: 161073 - DNA, 1347 bp, Artificial Sequence
  derived and/or modified sequence
atgcgggagtgcatcagcgtgcacgtgggccaggccggcgtgcagatgggaaatgcatgctgggaactgtattgtctcgagcatggtatacagccggacggccagatgccatcagacaaaaccattggcggaggcgacgacagcttcacaaccttcttttgcgagacaggcgcaggaaagcatgttcccagggcggtgttcgtggatctggagccgaccgtgatcgatgagattcggaacgggccatatcgccagcttttccaccctgagcagctgattacggggaaggaggatgcagctaataactacgctaggggccattatacaatcgggaaagaaattatcgacccggtgctggaccggattcgcaaacttagcgaccaatgcacaggactgcagggcttcctggtgtttcattcatttggagggggcacaggcagtggtttcaccagcctcctgatggaaaggctgtccgttgactatgggaagaaatctaagttagagttttctatctaccccgcaccacaggtgtccactgccgtcgtcgaaccatataattcaattttaaccacacacacaacactggaacactccgattgtgcctttatggtggataacgaagcaatctacgatatttgccgtcgtaacctggatatcgaacggccaacttataccaatctgaacagattgattagccaaatcgtgtcctccattaccgcctctctgcggttcgatggggcattgaatgtcgatctaactgaattccagacgaacctcgttccttacccacgtatacatttcccactggcaacatatgcacctgtcatttcagcagaaaaggcgtatcatgagcaattgagcgtagccgaaatcacaaatgcttgcttcgaacccgccaaccagatggtgaaatgcgatcccagacatggtaaatatatggcctgttgcttactgtaccgtggagacgtggtgccgaaagacgtcaatgcggccatcgccgcaatcaagaccaaacggagtatccagtttgttgattggtgcccaacaggctttaaggtggggatcaattatcaaccacccactgttgtccctggaggcgacctagccaaagtccagagagcagtgtgcatgctaagcaatacaaccgccattgctgaagcttgggccagattggatcacaagttcgacctaatgtacgcaaagcgagccttcgtacactggtacgtcggtgaaggaatggaggagggggaattctccgaagcgcgggaggacatggccgctctcgagaaagattacgaggaggttggaatagattcatacgaggacgaggatgaaggagaggaatag

SEQ ID NO: 161074 - DNA, 2499 bp, Artificial Sequence
  derived and/or modified sequence
gatgacagcgccactgacccgcgggcggccggcgagccgcggcagattccggggtcggccccggcagacaggctgcggggctcgactctgcgggagcgcctaaggcattggcaatctggggctcaggctgtgcagttctgggtcctcggccgcccacaggcgtcggcgaaaggctgccgccccggccggggaccaggaagcgtcaggcagctggcaagggctccccggggacgcgccacagcctcacagccggcccgagtctcctgggaggcagggctggaagggcaggggtgaaggccagctgtggccgcttgggaaggaccgcctcgcctgctcccgacctaagtcagaacacctggatgaccggtgcctccaggacgcaggtgcaggtgagactcgccctgccacagcaccctgcatctccgcggaggccctcgggagcccagcgtgtctgctcaaaacgaggaaagaatggttaaagcccgaatcgcgactcttaatcccagcgggacagcgtgaatgcatctcagtccacgtggggcaggcaggtgtccagatgggcaatgcctgctgggagctctattgcttggaacatgggattcagcctgatgggcagatgcccagtgacaagaccattggtggaggggacgactccttcaccaccttcttctgtgaaactggtgctggaaaacacgtaccccgggcagtttttgtggatctggagcctacggtcattgatgagatccgaaatggcccataccgacagctcttccacccagagcagctcatcactgggaaagaggatgctgccaacaactatgcccgtggtcactataccattggcaaggagatcattgacccagtgctggatcggatccgcaagctgtctgaccagtgcacaggacttcagggcttcctggtgttccacagctttggtgggggcactggctctggcttcacctcactcctgatggagcggctctctgttgactatggcaagaaatccaagctggaattctccatctacccagccccccaggtgtctacagccgtggtcgagccctacaactctatcctgaccacccacaccaccctggagcactcagactgtgccttcatggtggacaacgaagcaatctatgacatctgccgccgcaacctagacatcgagcgcccaacctacaccaacctcaatcgcctcattagccaaattgtctcctccatcacagcttctctgcgctttgacggggccctcaatgtggacctgacagagttccagaccaacctggtgccctaccctcgcatccacttccccctggccacctatgcaccagtcatctctgcagaaaaggcataccacgagcagctgtcggtggcagagatcaccaatgcctgctttgagcctgccaaccagatggtaaagtgtgatccccggcacggcaagtacatggcctgctgcctgctgtaccgtggagatgtggtgcccaaggatgtcaacgctgccattgccgccatcaagaccaagcgcagcattcagtttgtggactggtgccccacaggcttcaaggttggtatcaactaccagcctcccactgtggtgcctgggggtgacctggccaaggtgcagcgtgccgtgtgcatgctgagcaacacgaccgccatcgccgaggcctgggcccgcctggaccacaagttcgacctgatgtatgccaagagggcgtttgtgcactggtatgtgggtgagggcatggaggagggtgagttctccgaggcccgtgaggatatggctgccctggagaaggattatgaggaggtgggcatcgactcctatgaggacgaggatgagggagaagaataaagcagctgcctggagcctattcactatgtttattgcaaaatcctttcgaaataaacagtttccttgcacggtttcttgttccctctgagtgcttgagcttctgctgccttccccttcatgctgctgctgctctgtttgctgttcatgacccttatcccttccatcgctgaaggtgagacctgcaaaggggttcttgccaggcccaggaagcataaccccagggactttaaattgaagtcctagggttactcagtatagggaggaaatgaggaccaaaatccaggcacaaactgttgaaggatgagtcttcagctcctttccaagtaggagtataatccagtggtttctgtctttgaaagttagactgctaccctgttcttcctgctgcctctacatttaccaactctggaagcaaggcttggcccaggctcctctgtgcattatgagggtttgggagtggggctgggctggcccagagttcctgggcatggagccacgtcataagcttgggggatgggagggaacacaggcgatctcctagagttgtttgtgccactgcacctctgagcagctttgcatagcttcctgtcttgctgctttgctggagctggggctgtgccattaaaagtcaggtcatctcc

SEQ ID NO: 161075 - RNA, 1347 nt, Artificial Sequence
  derived and/or modified sequence
augcgagagugcauuuccguccacgucgggcaagccggcguucaaaugggaaaugccugcugggaacuguauugucuggaacaugggauccagccugacgggcaaaugccuagcgauaagacaaucggcggcggcgaugacagcuucaccaccuucuuuugcgagacuggagccgggaaacacgugccaagggccguguuugucgaccuggaacccacaguuaucgacgagauacggaauggccccuacagacagcuguuucauccagaacaguuaaucaccggaaaggaagaugcagcaaacaacuacgcucggggccacuauacuauugggaaagaaauuauagaucccguguuggaucgcauacggaagcuuucugaccaaugcacuggucuucagggcuuccucguauuccacucauuuggcggcggcacaggaucuggguuuacaucucugcucauggagagacugucaguggauuauggcaagaagaguaagcucgaauuuucuauuuacccagccccccaaguauccacggccguaguggaacccuauaacucgauccuaaccacacacaccacacuggaacacuccgacugugccuucaugguggauaaugaggccauuuacgauaucugccgccgcaaucuugacaucgaaagaccgaccuauacuaaccugaaccgccugauuagccagaucgugucaucuauuaccgccucacuaagguuugauggcgcccucaacgucgaucuuaccgaauuccagacaaaucucgugcccuaucccaggauccacuucccuuuagcuacauaugcaccaguuaucucagcugaaaaggccuaccaugaacagcucucuguagccgagaucaccaacgccuguuuugagcccgcuaaccagaugguaaagugcgauccgcgccauggcaaauacauggccuguugucugcuguaucgcggcgaugucgucccuaaggacguuaaugcggcaauagcagccaucaaaaccaaaagauccauacaauucguggauugguguccaacaggauuuaagguggggauuaauuaucagccuccuaccgugguucccgggggagaucuggccaaagugcagcgcgccgugugcauguuaucaaauaccaccgcuauagcugaggccugggcuagacuggaccacaaguucgaucugauguaugccaaaagggcuuuugugcauugguauguuggagagggaauggaagaaggggaguucucggaagcccgcgaagauauggcggcccuggagaaagacuaugaagaaguuggcauugacuccuacgaagacgaggacgaaggagaggaguag

SEQ ID NO: 161076 - RNA, 1347 nt, Artificial Sequence
  derived and/or modified sequence
augcgagaaugcauaucuguccacgucgggcaggccggugugcagauggggaacgcuugcugggaguuauacugucuggagcacgguauacaaccggauggucagaugccgucugacaagacaaucggagggggcgacgauaguuucacuacuuucuuuugcgagaccggagcgggaaaacauguaccgagggcgguguucguugaccucgaaccuaccguuauugacgagauuagaaauggaccauauagacaguuguuccauccagagcaguuaauuacagguaaagaagacgcugccaacaauuacgccagaggccauuacacaaucggcaaagagauuaucgacccuguguuggaccgcauccggaagcuuucagaccaguguacaggccuccagggauucuuggucuuccacagcuuuggcggcgggacuggcaguggcuucacaucacuucuaauggaaagacucuccgucgacuacgguaaaaaaagcaaguuagaauucucuauauauccagcaccccaggugagcaccgccguuguagagccauacaacagcauuuuaacuacacauacaacacuugagcauucagauugcgcuuuuaugguugauaaugaagcuauuuacgacauuuguaggcgaaaccuugacauagaaagaccaaccuauacaaaccucaaccgacucauuucucagaucguguccucaaucaccgccucccugcgcuuugacggcgcgcuaaacguggauuugacagaauuccaaacgaaccugguuccauacccucgcauccauuuuccgcuggccacuuaugcgccgguaauaucagcagaaaaggccuaccacgagcagcuguccguugcagagaucacaaacgccuguuuugaaccagcgaaucagauggugaaaugcgaucccagacauggaaaauacauggccuguugcuugcuuuacaggggugauguugucccaaaagacgugaacgcugcaauagccgcaauaaaaacuaaacggagcauucaguuuguugacuggugucccaccgguuucaagguaggcauuaacuaccagccaccaaccguugugcccggaggggaccuggcaaaaguccagagagccguauguaugcuuucgaacaccacagccaucgcugaagcgugggcaaggcuagaucacaaguuugaccugauguacgccaaaagggcauuugugcauugguaugugggagaagguauggaagagggcgaauuuagugaggccagggaagacauggcagcacucgagaaagauuacgaagaggugggcaucgacucguaugaagacgaagacgagggggaggaauag

SEQ ID NO: 161077 - protein, 230 aa, Artificial Sequence
  derived and/or modified sequence
MEGQRWLPLEANPEVTNQFLKQLGLHPNWQFVDVYGMDPELLSMVPRPVCAVLLLFPITEKYEVFRTEEEEKIKSQGQDVTSSVYFMKQTISNACGTIGLIHAIANNKDKMHFESGSTLKKFLEESVSMSPEERARYLENYDAIRVTHETSAHEGQTEAPSIDEKVDLHFIALVHVDGHLYELDGRKPFPINHGETSDETLLEDAIEVCKKFMERDPDELRFNAIALSAA

SEQ ID NO: 161078 - DNA, 693 bp, Artificial Sequence
  derived and/or modified sequence
atggagggccagagatggctgcccctggaggccaaccccgaggtgaccaaccagttcctgaagcagctgggcctgcaccccaactggcagttcgtggacgtgtacggcatggaccccgagctgctgagcatggtgcccagacccgtgtgcgccgtgctgctgctgttccccatcaccgagaagtacgaggtgttcagaaccgaggaggaggagaagatcaagagccagggccaggacgtgaccagcagcgtgtacttcatgaagcagaccatcagcaacgcctgcggcaccatcggcctgatccacgccatcgccaacaacaaggacaagatgcacttcgagagcggcagcaccctgaagaagttcctggaggagagcgtgagcatgagccccgaggagagagccagatacctggagaactacgacgccatcagagtgacccacgagaccagcgcccacgagggccagaccgaggcccccagcatcgacgagaaggtggacctgcacttcatcgccctggtgcacgtggacggccacctgtacgagctggacggcagaaagcccttccccatcaaccacggcgagaccagcgacgagaccctgctggaggacgccatcgaggtgtgcaagaagttcatggagagagaccccgacgagctgagattcaacgccatcgccctgagcgccgcctag

SEQ ID NO: 161079 - DNA, 693 bp, Artificial Sequence
  derived and/or modified sequence
atggaggggcagcggtggctgccgctggaggctaacccagaagtcacaaaccaattcctaaagcagctgggcttacacccaaactggcaatttgtggatgtctacggaatggaccccgaactgttgagcatggtgcctcgtcctgtgtgcgctgtccttctgcttttcccaatcactgaaaagtacgaagtgtttagaacggaggaggaggagaaaattaaatcccagggacaggatgtgacctcttccgtgtactttatgaaacagactatctcaaatgcttgcggcactatcggcttgatccatgctatcgcaaataataaggataagatgcactttgaatccggaagcacactgaagaaatttctggaggagtctgtgtcgatgtcgcctgaggagcgggcgcggtacctcgaaaattatgacgcaattcgggtcacccatgagacctctgctcacgaagggcagactgaggcccccagtatcgacgagaaagtcgatttgcacttcattgcgctagtgcatgtggatggacacctatacgagctggacggaaggaaaccctttcccattaatcacggggaaactagcgacgaaactttattagaggacgctatcgaagtctgtaagaaattcatggagcgcgaccctgacgaactacgcttcaacgcgatcgccctgtcagcagcttag

SEQ ID NO: 161080 - DNA, 693 bp, Artificial Sequence
  derived and/or modified sequence
atggagggccagcgctggctgcccctggaggccaaccctgaggtgaccaaccagttcctgaagcagctgggcctgcaccccaactggcagtttgtggatgtgtatggcatggaccctgagctgctgtccatggtgcccaggcctgtgtgtgctgtgctgctgctcttccccatcacagagaagtatgaggtgttcagaacagaggaggaggagaagatcaagagccagggccaggatgtgaccagctctgtgtacttcatgaagcagaccatcagcaatgcctgtggcaccatcggcctcatccacgccatcgccaacaacaaggacaagatgcactttgaaagtggcagcaccctgaagaagttcctggaggagagcgtgtccatgagccctgaggagcgggcccgctacctggagaactatgatgccatccgggtgacccatgagaccagcgcccacgagggccagacagaggcccccagcattgatgagaaggtggacctgcacttcatcgccctggtgcacgtggatggccacctgtatgagctggatggcaggaagcccttccccatcaaccacggggagaccagtgatgagaccctgctggaggatgccatcgaggtgtgcaagaagttcatggagcgggaccctgatgagctgcgcttcaatgccatcgccctgtctgctgcctag

SEQ ID NO: 161081 - DNA, 693 bp, Artificial Sequence
  derived and/or modified sequence
atggagggccagcggtggctgcccctggaggccaaccccgaggtgacgaatcaatttctgaagcagctcggactgcacccaaattggcaattcgtcgatgtgtatggcatggaccccgagcttctgtctatggtccctcgacctgtatgtgccgtccttcttctgtttccaatcacagagaagtatgaggtgttcaggaccgaggaagaagagaaaatcaagtcccagggccaggacgtaactagctccgtttatttcatgaaacagaccatttctaacgcatgcggtacaattggcctgatccatgcaattgcgaacaacaaagacaagatgcactttgagtccggtagtaccctcaagaaatttctggaagagtcagtgtcaatgagccctgaggaacgcgcgcgatatttggaaaactacgatgcaattcgagttacccatgagacatccgctcacgaaggccagactgaagctcctagtatcgacgaaaaagttgacctgcatttcattgcccttgtgcatgtagatggtcacctttacgagcttgacggacgcaaacccttccctataaaccacggggaaacatcagacgagaccctgctggaggacgcaatcgaggtgtgcaagaagttcatggagagggatcccgatgagctcagattcaatgctatcgcactgagtgctgcttag

SEQ ID NO: 161082 - DNA, 693 bp, Artificial Sequence
  derived and/or modified sequence
atggaaggacagaggtggctgcctctggaagcaaaccctgaggtgaccaatcaatttcttaaacagttggggcttcatcccaactggcagttcgtggatgtttacggcatggacccagagctcctctctatggtcccccgacctgtgtgcgctgtcttgctgctgtttcccattacggaaaaatacgaggttttccggactgaagaggaggagaaaatcaaatcacaggggcaagacgttacttcctcagtatactttatgaagcagacaatctctaacgcgtgcgggaccattggactgatccatgccatcgccaataataaggataaaatgcactttgagagtggatcaacgctcaagaagtttctcgaggaatcagtgagcatgagtccggaagaaagggcacgctatctcgaaaactacgacgctattagagttacccacgagacaagcgctcatgagggccagaccgaggcaccttctattgatgaaaaagtcgacctccacttcatcgcgctagtgcatgttgacggccacctctacgagctggatgggcgaaagccatttcctattaaccacggcgaaacgtccgatgagactttgctagaagacgccattgaagtgtgtaagaaattcatggaacgggatccagacgagctaagattcaacgcgattgctttaagcgcagcatag

SEQ ID NO: 161083 - DNA, 844 bp, Artificial Sequence
  derived and/or modified sequence
gtcagagctggagggccgggcaccgcggccatggagggtcaacgctggctgccgctggaggccaatcccgaggtcaccaaccagtttcttaaacaattaggtctacatcctaactggcaattcgttgatgtatatggaatggatcctgaactccttagcatggtaccaagaccagtctgtgcagtcttacttctctttcctattacagaaaagtatgaagtattcagaacagaagaggaagaaaaaataaaatctcagggacaagatgttacatcatcagtatatttcatgaagcaaacaatcagcaatgcctgtggaacaattggactgattcatgctattgcaaacaataaagacaagatgcactttgaatctggatcaaccttgaaaaaattcctggaggaatctgtgtcaatgagccctgaagaacgagccagatacctggagaactatgatgccatccgagttactcatgagaccagtgcccatgaaggtcagactgaggcaccaagtatagatgagaaagtagatcttcattttattgcattagttcatgtagatgggcatctctatgaattagatgggcggaagccatttccaattaaccatggtgaaactagtgatgaaactttattagaggatgccatagaagtttgcaagaagtttatggagcgcgaccctgatgaactaagatttaatgcgattgctctttctgcagcatagcttgtcaataatggaaacaccaaaaactgtattatttgcaactaaattttctctgccatacactaactcaaaaattttgatattttcattaacttgatgattaaactttatgtgagttaaa

SEQ ID NO: 161084 - protein, 274 aa, Artificial Sequence
  derived and/or modified sequence
MLSVASRSGPFAPVLSATSRGVAGALRPLVQATVPATPEQPVLDLKRPFLSRESLSGQAVRRPLVASVGLNVPASVCYSHTDIKVPDFSEYRRLEVLDSTKSSRESSEARKGFSYLVTGVTTVGVAYAAKNAVTQFVSSMSASADVLALAKIEIKLSDIPEGKNMAFKWRGKPLFVRHRTQKEIEQEAAVELSQLRDPQHDLDRVKKPEWVILIGVCTHLGCVPIANAGDFGGYYCPCHGSHYDASGRIRLGPAPLNLEVPTYEFTSDDMVIVG

SEQ ID NO: 161085 - DNA, 825 bp, Artificial Sequence
  derived and/or modified sequence
atgctgagcgtggccagcagaagcggccccttcgcccccgtgctgagcgccaccagcagaggcgtggccggcgccctgagacccctggtgcaggccaccgtgcccgccacccccgagcagcccgtgctggacctgaagagacccttcctgagcagagagagcctgagcggccaggccgtgagaagacccctggtggccagcgtgggcctgaacgtgcccgccagcgtgtgctacagccacaccgacatcaaggtgcccgacttcagcgagtacagaagactggaggtgctggacagcaccaagagcagcagagagagcagcgaggccagaaagggcttcagctacctggtgaccggcgtgaccaccgtgggcgtggcctacgccgccaagaacgccgtgacccagttcgtgagcagcatgagcgccagcgccgacgtgctggccctggccaagatcgagatcaagctgagcgacatccccgagggcaagaacatggccttcaagtggagaggcaagcccctgttcgtgagacacagaacccagaaggagatcgagcaggaggccgccgtggagctgagccagctgagagacccccagcacgacctggacagagtgaagaagcccgagtgggtgatcctgatcggcgtgtgcacccacctgggctgcgtgcccatcgccaacgccggcgacttcggcggctactactgcccctgccacggcagccactacgacgccagcggcagaatcagactgggccccgcccccctgaacctggaggtgcccacctacgagttcaccagcgacgacatggtgatcgtgggctag

SEQ ID NO: 161086 - DNA, 825 bp, Artificial Sequence
  derived and/or modified sequence
atgttatctgttgcaagtcgctcagggcccttcgccccagtgctgtcagctaccagtcgcggggttgccggagccttacggcctctcgtacaagctacagtgccagctactcctgagcagcccgtgctggacctgaagagaccgtttctttccagagaatctctgtcaggacaggctgtgcggaggcccctcgtcgcatccgtgggcctcaatgtcccggcgagcgtctgctatagtcataccgatatcaaagtgcccgactttagcgagtacagacgcttggaagtcttggattcaactaaaagctcacgggagagttcagaggcccggaaaggattctcctatctcgtgaccggtgttacaactgtgggcgtcgcttacgccgcaaagaacgctgtaactcagttcgtgagctccatgtccgcctctgccgatgttctggcactcgcgaaaatcgaaattaaactaagcgacatccccgaaggaaagaacatggctttcaagtggagaggcaaacctctgtttgtccgtcatagaacacagaaagaaatcgagcaggaagcagcggtggagctctcccaactgagggacccacagcatgatctggatcgtgtgaaaaagcctgaatgggtgattctgattggcgtgtgcactcaccttggctgtgtccccattgcaaatgccggagatttcggtgggtattactgtccttgccatggcagtcattacgacgcctccggtcgcatccggctagggccggcccctttaaacctggaagtgcccacatatgaattcacttccgacgatatggtgatcgtgggatag

SEQ ID NO: 161087 - DNA, 825 bp, Artificial Sequence
  derived and/or modified sequence
atgctgtctgtggccagccgcagcggcccctttgcccctgtgctgagcgccaccagcagaggagtggccggggccctgcggcccctggtgcaggccaccgtgcctgccaccccagagcagcctgtgctggacctgaagaggcccttcctgagccgggagagcctgagcggccaggccgtgagaagacccctggtggcctctgtgggcctgaatgtgcctgcctctgtgtgctacagccacacagacatcaaggtgcctgacttcagcgagtaccgccgcctggaggtgctggacagcaccaagagcagccgggagagcagcgaggccaggaagggcttctcctacctggtgactggagtgaccaccgtgggcgtggcctatgctgccaagaatgctgtgacccagtttgtgtcctccatgtctgccagcgcagatgtgctggccctggccaagattgagatcaagctgagtgacatccctgagggcaagaacatggccttcaagtggaggggcaagcccctgtttgtgcgccacaggacccagaaggagattgagcaggaggccgctgtggagctgagccagctgcgggacccccagcacgacctggacagagtgaagaagccagagtgggtgatcctgattggagtgtgcacccacctgggctgtgtgcccatcgccaatgctggggactttggaggctactactgcccctgccacggcagccactatgatgccagcggccgcatccggctgggccctgcccccctgaacctggaggtgcccacctatgagttcaccagtgatgacatggtgattgtgggctag

SEQ ID NO: 161088 - DNA, 825 bp, Artificial Sequence
  derived and/or modified sequence
atgctgagcgtggccagccggagcggccccttcgcccccgtgctgtcagccacctcccgtggagtggcgggcgccctcagaccgctggtgcaggctacggtccccgctaccccggagcagcccgttctcgaccttaagcggccatttctgtctagagaaagcctcagcgggcaggcggtgcgacgccctttggtggcgagtgtaggactcaacgtgcctgcatctgtatgctattcacacactgatataaaggtgccagatttctctgagtaccgaagactagaagtgttagactctacaaagagctcacgtgagagctccgaggctcgcaagggtttcagttacctcgtgacaggcgtcactacggttggggtggcatatgcagctaagaatgccgtcactcagtttgtgtcatctatgtcagccagcgccgatgtcctggctttggctaagattgaaattaagctttccgacattcccgaagggaagaatatggctttcaaatggcgagggaagcccctgtttgttaggcacaggacccagaaagaaattgagcaagaggcagcggtggaattgagccaattgagggatccccaacacgacttagatagagtgaagaagccggaatgggtgattctcatcggggtgtgtactcatcttggctgcgtcccgatcgcgaacgccggggatttcggagggtattattgtccgtgccatggatcgcactacgacgcaagcggcaggatccgactaggccccgcccctctgaatttggaggtgccaacttacgagttcaccagtgacgatatggttatcgtcggttag

SEQ ID NO: 161089 - DNA, 825 bp, Artificial Sequence
  derived and/or modified sequence
atgttgagcgtcgcttcaagatctgggccattcgccccagtgctgagcgcaacgagccggggtgtggccggagcccttagacctttagtacaagccacagtgcctgcaactcccgagcaaccagtcctggacctgaagcggcctttcttgagccgcgagtccttgtctggtcaagcggtacgtagacccttagtcgcatctgtgggtttgaacgtacccgcaagcgtgtgctatagtcataccgacatcaaggttcccgatttctccgagtacaggcggctggaggtccttgactccaccaagagttctcgagagtcaagtgaagcccgtaagggattcagttacttggtgactggagtgaccactgtcggagttgcctacgccgcaaaaaacgccgtgactcagttcgtgtccagcatgtcagctagcgccgatgtcttggcgttggccaaaatcgagattaagttgtctgatatccctgaaggcaagaacatggcattcaaatggcgaggcaaacctctgttcgtccggcacagaactcagaaggaaatcgaacaggaggccgctgtggagttgagtcagttaagagacccgcagcatgatctcgacagagtgaagaagcccgaatgggttatactcattggtgtctgtacccatttaggctgcgtccccatagctaatgccggagatttcgggggttattactgcccttgccacggctctcactatgacgcaagtggcaggatccggttggggcctgcacctctgaacctggaggtaccaacctacgaatttacctctgacgatatggtaatcgtgggctag

SEQ ID NO: 161090 - DNA, 1224 bp, Artificial Sequence
  derived and/or modified sequence
atttcctttccggcggcgcgctgtcgtcacgcgtcccgcgcctcctcgcgcctgcgccgtggttggaaggtcgtccctgtgaccggcttggcggttggagcggctgtcgccatgttgtcggtagcatcccgctcaggcccgttcgcgcccgtcctgtcggccacgtcccgcggggtggcgggcgcgctgcggcccttggtgcaggccacggtgcccgccaccccggagcagcctgtgttggacctgaagcggcccttcctcagccgggagtcgctgagcggccaggccgtgcgccggcctttggtcgcctccgtgggcctcaatgtccctgcttctgtttgttattcccacacagacatcaaggtgcctgacttctctgaataccgccgccttgaagttttagatagtacgaagtcttcaagagaaagcagcgaggctaggaaaggtttctcctatttggtaactggagtaactactgtgggtgtcgcatatgctgccaagaatgccgtcacccagttcgtttccagcatgagtgcttctgctgatgtgttggccctggcgaaaatcgaaatcaagttatccgatattccagaaggcaagaacatggctttcaaatggagaggcaaacccctgtttgtgcgtcatagaacccagaaggaaattgagcaggaagctgcagttgaattatcacagttgagggacccacagcatgatctagatcgagtaaagaaacctgaatgggttatcctgataggtgtttgcactcatcttggctgtgtacccattgcaaatgcaggagattttggtggttattactgcccttgccatgggtcacactatgatgcatctggcaggatcagattgggtcctgctcctctcaaccttgaagtccccacgtatgagttcaccagtgacgatatggtgattgttggttaagagacttggactcaagtcataggcttctttcagtctttatgtcacctcaggagacttatttgagaggaagccttctgtacttgaagttgatttgaaatatgtaagaattgatgatgtatttgcaaacattaatgtgaaataaattgaatttaatgttgaatactttcaggcattcacttaataaagacactgttaagcactgttatgctcagtcatacacgcgaaaggtacaatgtcttttagctaattctaattaaaaattacagactggtgtacaagatacttgtg

SEQ ID NO: 161091 - protein, 182 aa, Artificial Sequence
  derived and/or modified sequence
MRRMWATQGLAVALALSVLPGSRALRPGDCEVCISYLGRFYQDLKDRDVTFSPATIENELIKFCREARGKENRLCYYIGATDDAATKIINEVSKPLAHHIPVEKICEKLKKKDSQICELKYDKQIDLSTVDLKKLRVKELKKILDDWGETCKGCAEKSDYIRKINELMPKYAPKAASARTDL

SEQ ID NO: 161092 - DNA, 549 bp, Artificial Sequence
  derived and/or modified sequence
atgcggaggatgtgggcgactcagggccttgccgttgccctggcactcagcgtccttccgggatctagggctctaagaccgggtgattgcgaggtttgcatcagttacctgggcagattttatcaggacctgaaagatcgcgacgttaccttctcaccggcaaccatcgaaaacgaattgatcaagttctgcagggaggcgaggggaaaggaaaaccgcctgtgctactatatcggtgcaactgatgacgcagcaaccaagattatcaacgaagtgtctaagccgctggctcaccacattcccgtcgaaaaaatttgtgaaaaattgaaaaagaaggatagccagatttgcgagctgaaatacgacaaacagatagacctcagtactgttgatctaaaaaagttgcgcgttaaagaattgaaaaaaattcttgacgactggggtgaaacctgtaaaggatgcgctgagaaaagcgactatatccggaagattaatgaattgatgccaaagtacgctccaaaagctgccagtgcccgaaccgacctatag

SEQ ID NO: 161093 - DNA, 549 bp, Artificial Sequence
  derived and/or modified sequence
atgaggagaatgtgggcgactcagggtctcgctgttgctttggcccttagtgttctgccaggatccagagcactgcgcccgggagactgtgaggtttgtatcagctacctgggccgcttctaccaagatctgaaggaccgcgatgtgactttttcccccgcaactatcgagaatgaactgatcaaattctgcagagaggctcgtgggaaagagaatagactgtgttactatatcggagctacagatgacgccgctactaaaatcatcaacgaagtatccaaacctttggcccaccatatacccgtcgaaaagatctgtgaaaagctaaaaaagaaggattctcaaatttgtgaactgaaatatgataagcaaatcgatttgtcaactgtggacctgaagaagctcagggttaaggagctgaaaaagatcctcgatgattggggtgaaacatgcaagggctgtgcggaaaagagcgactatatcaggaaaataaacgagcttatgccgaaatacgctcctaaagccgcatctgctagaactgacctttag

SEQ ID NO: 161094 - DNA, 549 bp, Artificial Sequence
  derived and/or modified sequence
atgaggcgaatgtgggcaacacagggtttggcagtggcattggctctgagcgtgttaccaggatcccgcgccctcaggcccggtgattgcgaggtgtgtattagctatcttgggcgcttctatcaagacctcaaagacagagatgttaccttctctcctgccacaatcgaaaacgaacttatcaagttttgccgagaggcccgcggaaaagaaaaccgtttgtgctattatatcggcgccaccgacgacgcagctactaagattatcaacgaagtttctaagccattagctcaccatataccagtggagaaaatttgcgaaaagctcaaaaaaaaagatagccagatatgcgagttgaagtacgacaagcaaattgacctgagcaccgtggatctgaagaaactgagagtaaaggagttaaaaaaaattctggatgattggggtgagacatgtaaaggatgcgccgaaaaatccgattacatcaggaagattaacgagctaatgcctaaatatgcacctaaagccgccagcgcacgaactgacctatag

SEQ ID NO: 161095 - DNA, 1153 bp, Artificial Sequence
  derived and/or modified sequence
cttccgtcgctgctgtagtcgcttcctgcggccagcccgggttcaatcagcggccgacaactgtctagggctcagacaccaccagccaatgagggagggcagcgtggagccgcccgtctgggctcgcggctcctggaccaatggggaagtggcatgtgggagggcgccggggggccccccgccaatggggagctacggcgcgcggccgggacttggaggcggtgcggcgcggcgggtgcggttcagtcggtcggcggcggcagcggaggaggaggaggaggaggaggaggaggaggatgaggaggatgtgggccacgcaggggctggcggtggcgctggctctgagcgtgctgccgggcagccgggcgctgcggccgggcgactgcgaagtttgtatttcttatctgggaagattttaccaggacctcaaagacagagatgtcacattctcaccagccactattgaaaacgaacttataaagttctgccgggaagcaagaggcaaagagaatcggttgtgctactatatcggggccacagatgatgcagccaccaaaatcatcaatgaggtatcaaagcctctggcccaccacatccctgtggagaagatctgtgagaagcttaagaagaaggacagccagatatgtgagcttaagtatgacaagcagatcgacctgagcacagtggacctgaagaagctccgagttaaagagctgaagaagattctggatgactggggggagacatgcaaaggctgtgcagaaaagtctgactacatccggaagataaatgaactgatgcctaaatatgcccccaaggcagccagtgcacggaccgatttgtagtctgctcaatctctgttgcacctgagggggaaaaaacagttcaactgcttactcccaaaacagcctttttgtaatttattttttaagtgggctcctgacaatactgtatcagatgtgaagcctggagctttcctgatgatgctggccctacagtacccccatgaggggattcccttccttctgttgctggtgtactctaggacttcaaagtgtgtctgggatttttttattaaagaaaaaaaatttctagctgtccttgcagaattatagtgaataccaaaatggggttttgccccaggaggctccta

SEQ ID NO: 161096 - DNA, 549 bp, Artificial Sequence
  derived and/or modified sequence
atgagaagaatgtgggccacccagggcctggccgtggccctggccctgagcgtgctgcccggcagcagagccctgagacccggcgactgcgaggtgtgcatcagctacctgggcagattctaccaggacctgaaggacagagacgtgaccttcagccccgccaccatcgagaacgagctgatcaagttctgcagagaggccagaggcaaggagaacagactgtgctactacatcggcgccaccgacgacgccgccaccaagatcatcaacgaggtgagcaagcccctggcccaccacatccccgtggagaagatctgcgagaagctgaagaagaaggacagccagatctgcgagctgaagtacgacaagcagatcgacctgagcaccgtggacctgaagaagctgagagtgaaggagctgaagaagatcctggacgactggggcgagacctgcaagggctgcgccgagaagagcgactacatcagaaagatcaacgagctgatgcccaagtacgcccccaaggccgccagcgccagaaccgacctgtag

SEQ ID NO: 161097 - DNA, 549 bp, Artificial Sequence
  derived and/or modified sequence
atgcgacgcatgtgggccactcagggcctcgcagtggccctggccttgtcagtgttacctggatcaagagcactccggcccggagactgtgaggtctgcatatcctacttaggccggttctatcaggatctaaaggacagagacgtgacttttagcccagcgactatagagaatgaactgatcaagttctgtcgtgaagctcggggcaaggagaatcgactgtgttattatatcggggccactgacgacgcggctaccaagatcattaatgaggtgagtaagcctctggcccaccatattcccgtcgaaaaaatctgcgagaagctgaaaaagaaggactcccagatttgcgaactgaagtatgataaacagatcgacctttccactgttgatctaaagaagctgcgagtgaaagagctgaagaagattcttgatgactggggtgaaacgtgtaagggctgtgccgaaaaatctgattacatcagaaagatcaatgagctgatgccaaaatatgcccccaaagccgcttctgcccgtaccgacctctag

SEQ ID NO: 161098 - DNA, 549 bp, Artificial Sequence
  derived and/or modified sequence
atgaggaggatgtgggccacccagggcctggccgtggccctggccctgtctgtgctgcccggcagccgggccctgcggcctggggactgtgaggtgtgcatctcctacctgggccgcttctaccaggacctgaaggacagagatgtgaccttctccccagccaccattgaaaatgagctgatcaagttctgccgggaggcccggggcaaggaaaatcggctgtgctactacatcggggccacagatgatgctgccaccaagatcatcaatgaggtgtccaagcccctggcccaccacatccctgtggagaagatctgtgagaagctgaagaagaaggacagccagatctgtgagctgaagtatgacaagcagattgacctgagcacagtggacctgaagaagctgcgggtgaaggagctgaagaagatcctggatgactggggcgagacctgcaagggctgtgccgagaagagtgactacatcaggaagatcaatgagctgatgcccaagtatgcccccaaggccgccagcgccaggacagacctgtag

SEQ ID NO: 161099 - DNA, 549 bp, Artificial Sequence
  derived and/or modified sequence
atgcggcggatgtgggccacccagggcctggccgtggccctggccttgtcagttttgccaggtagcagagccctgcgacctggagactgcgaagtatgcatatcctacctgggtcggttctaccaagatctgaaagatagagatgtgaccttttcacccgcgactatcgagaacgagttgatcaagttctgcagggaagccaggggaaaggaaaacaggctgtgctattacatcggcgcgacagatgacgcggcaaccaagatcataaatgaggtaagcaaaccactggctcatcacattcctgtggaaaagatctgcgagaagctcaaaaaaaaggatagtcagatatgcgaactaaagtacgacaagcagatcgatctgagcacagtcgacttaaaaaaactgcgggtgaaagaactgaaaaaaatcctggacgattggggcgaaacatgtaagggatgtgccgagaaaagcgattatattaggaagataaatgagcttatgcctaagtacgctccaaaggccgcttcggctcgcactgatctgtag

SEQ ID NO: 161100 - RNA, 549 nt, Artificial Sequence
  derived and/or modified sequence
augaggagaaugugggcgacucagggucucgcuguugcuuuggcccuuaguguucugccaggauccagagcacugcgcccgggagacugugagguuuguaucagcuaccugggccgcuucuaccaagaucugaaggaccgcgaugugacuuuuucccccgcaacuaucgagaaugaacugaucaaauucugcagagaggcucgugggaaagagaauagacuguguuacuauaucggagcuacagaugacgccgcuacuaaaaucaucaacgaaguauccaaaccuuuggcccaccauauacccgucgaaaagaucugugaaaagcuaaaaaagaaggauucucaaauuugugaacugaaauaugauaagcaaaucgauuugucaacuguggaccugaagaagcucaggguuaaggagcugaaaaagauccucgaugauuggggugaaacaugcaagggcugugcggaaaagagcgacuauaucaggaaaauaaacgagcuuaugccgaaauacgcuccuaaagccgcaucugcuagaacugaccuuuag

SEQ ID NO: 161101 - RNA, 549 nt, Artificial Sequence
  derived and/or modified sequence
augaggcgaaugugggcaacacaggguuuggcaguggcauuggcucugagcguguuaccaggaucccgcgcccucaggcccggugauugcgagguguguauuagcuaucuugggcgcuucuaucaagaccucaaagacagagauguuaccuucucuccugccacaaucgaaaacgaacuuaucaaguuuugccgagaggcccgcggaaaagaaaaccguuugugcuauuauaucggcgccaccgacgacgcagcuacuaagauuaucaacgaaguuucuaagccauuagcucaccauauaccaguggagaaaauuugcgaaaagcucaaaaaaaaagauagccagauaugcgaguugaaguacgacaagcaaauugaccugagcaccguggaucugaagaaacugagaguaaaggaguuaaaaaaaauucuggaugauuggggugagacauguaaaggaugcgccgaaaaauccgauuacaucaggaagauuaacgagcuaaugccuaaauaugcaccuaaagccgccagcgcacgaacugaccuauag

SEQ ID NO: 161102 - protein, 375 aa, Artificial Sequence
  derived and/or modified sequence
MQLQFRSWMLAALTLLVVFLIFADISEIEEEIGNSGGRGTIRSAVNSLHSKSNRAEVVINGSSSPAVVDRSNESIKHNIQPASSKWRHNQTLSLRIRKQILKFLDAEKDISVLKGTLKPGDIIHYIFDRDSTMNVSQNLYELLPRTSPLKNKHFGTCAIVGNSGVLLNSGCGQEIDAHSFVIRCNLAPVQEYARDVGLKTDLVTMNPSVIQRAFEDLVNATWREKLLQRLHSLNGSILWIPAFMARGGKERVEWVNELILKHHVNVRTAYPSLRLLHAVRGYWLTNKVHIKRPTTGLLMYTLATRFCKQIYLYGFWPFPLDQNQNPVKYHYYDSLKYGYTSQASPHTMPLEFKALKSLHEQGALKLTVGQCDGAT

SEQ ID NO: 161103 - protein, 354 aa, Artificial Sequence
  derived and/or modified sequence
MQLQFRSWMLAALTLLVVFLIFADISEIEEEIGAEVVINGSSSPAVVDRSNESIKHNIQPASSKWRHNQTLSLRIRKQILKFLDAEKDISVLKGTLKPGDIIHYIFDRDSTMNVSQNLYELLPRTSPLKNKHFGTCAIVGNSGVLLNSGCGQEIDAHSFVIRCNLAPVQEYARDVGLKTDLVTMNPSVIQRAFEDLVNATWREKLLQRLHSLNGSILWIPAFMARGGKERVEWVNELILKHHVNVRTAYPSLRLLHAVRGYWLTNKVHIKRPTTGLLMYTLATRFCKQIYLYGFWPFPLDQNQNPVKYHYYDSLKYGYTSQASPHTMPLEFKALKSLHEQGALKLTVGQCDGAT

SEQ ID NO: 161104 - DNA, 1128 bp, Artificial Sequence
  derived and/or modified sequence
atgcagctgcagttcagaagctggatgctggccgccctgaccctgctggtggtgttcctgatcttcgccgacatcagcgagatcgaggaggagatcggcaacagcggcggcagaggcaccatcagaagcgccgtgaacagcctgcacagcaagagcaacagagccgaggtggtgatcaacggcagcagcagccccgccgtggtggacagaagcaacgagagcatcaagcacaacatccagcccgccagcagcaagtggagacacaaccagaccctgagcctgagaatcagaaagcagatcctgaagttcctggacgccgagaaggacatcagcgtgctgaagggcaccctgaagcccggcgacatcatccactacatcttcgacagagacagcaccatgaacgtgagccagaacctgtacgagctgctgcccagaaccagccccctgaagaacaagcacttcggcacctgcgccatcgtgggcaacagcggcgtgctgctgaacagcggctgcggccaggagatcgacgcccacagcttcgtgatcagatgcaacctggcccccgtgcaggagtacgccagagacgtgggcctgaagaccgacctggtgaccatgaaccccagcgtgatccagagagccttcgaggacctggtgaacgccacctggagagagaagctgctgcagagactgcacagcctgaacggcagcatcctgtggatccccgccttcatggccagaggcggcaaggagagagtggagtgggtgaacgagctgatcctgaagcaccacgtgaacgtgagaaccgcctaccccagcctgagactgctgcacgccgtgagaggctactggctgaccaacaaggtgcacatcaagagacccaccaccggcctgctgatgtacaccctggccaccagattctgcaagcagatctacctgtacggcttctggcccttccccctggaccagaaccagaaccccgtgaagtaccactactacgacagcctgaagtacggctacaccagccaggccagcccccacaccatgcccctggagttcaaggccctgaagagcctgcacgagcagggcgccctgaagctgaccgtgggccagtgcgacggcgccacctag

SEQ ID NO: 161105 - DNA, 1065 bp, Artificial Sequence
  derived and/or modified sequence
atgcagctgcagttcagaagctggatgctggccgccctgaccctgctggtggtgttcctgatcttcgccgacatcagcgagatcgaggaggagatcggcgccgaggtggtgatcaacggcagcagcagccccgccgtggtggacagaagcaacgagagcatcaagcacaacatccagcccgccagcagcaagtggagacacaaccagaccctgagcctgagaatcagaaagcagatcctgaagttcctggacgccgagaaggacatcagcgtgctgaagggcaccctgaagcccggcgacatcatccactacatcttcgacagagacagcaccatgaacgtgagccagaacctgtacgagctgctgcccagaaccagccccctgaagaacaagcacttcggcacctgcgccatcgtgggcaacagcggcgtgctgctgaacagcggctgcggccaggagatcgacgcccacagcttcgtgatcagatgcaacctggcccccgtgcaggagtacgccagagacgtgggcctgaagaccgacctggtgaccatgaaccccagcgtgatccagagagccttcgaggacctggtgaacgccacctggagagagaagctgctgcagagactgcacagcctgaacggcagcatcctgtggatccccgccttcatggccagaggcggcaaggagagagtggagtgggtgaacgagctgatcctgaagcaccacgtgaacgtgagaaccgcctaccccagcctgagactgctgcacgccgtgagaggctactggctgaccaacaaggtgcacatcaagagacccaccaccggcctgctgatgtacaccctggccaccagattctgcaagcagatctacctgtacggcttctggcccttccccctggaccagaaccagaaccccgtgaagtaccactactacgacagcctgaagtacggctacaccagccaggccagcccccacaccatgcccctggagttcaaggccctgaagagcctgcacgagcagggcgccctgaagctgaccgtgggccagtgcgacggcgccacctag

SEQ ID NO: 161106 - DNA, 1128 bp, Artificial Sequence
  derived and/or modified sequence
atgcagcttcagttcaggtcctggatgctggcggccctgactttactggttgttttcctcatcttcgccgacatctctgagatcgaggaagagattggaaattctggagggcgcggcacaattcgtagtgcagtgaattcactgcacagcaagagcaacagggctgaagtcgtaattaatggcagcagtagtcctgctgtcgttgatcgttcaaatgagtccatcaagcacaacattcagcccgcgtccagcaagtggcggcataatcagacactaagcttaaggatcaggaagcaaattctcaagtttttggacgccgagaaagatatatctgtactgaaagggacattgaagcccggcgatattatccactacatctttgacagggatagcacaatgaacgtctctcaaaatctctatgaattacttccccgcacctcgcctctcaagaacaaacactttggaacttgcgccattgtgggcaactctggcgtgctcttgaacagcggctgtggtcaagagatcgacgcacactcattcgtcatccgctgcaatctggcaccggttcaggagtacgctagagatgttggacttaaaaccgatctggttaccatgaacccgagtgttattcagcgcgctttcgaggaccttgtcaacgctacttggcgagagaagcttttgcagaggttgcacagtctgaacgggtccatactctggatacccgccttcatggcccgcggtggtaaggagagggtcgaatgggtcaatgaactgattctcaagcaccatgtaaacgtaaggacggcctaccctagccttcggctgcttcacgccgtgcgcggatactggctgacgaacaaggtccatatcaaaagacctactacggggctgctgatgtataccttagccacccggttttgtaaacagatttatctttacggcttctggccatttcctctcgatcagaatcagaatccggtgaagtatcactactacgactcactcaagtatggttacacctcccaggcatcccctcacacgatgcctctggagttcaaggcgctgaagtcccttcacgaacagggggcattgaagctgacggtgggccagtgcgatggtgccacctag

SEQ ID NO: 161107 - DNA, 1065 bp, Artificial Sequence
  derived and/or modified sequence
atgcagctgcagttcagaagctggatgctcgcagccctcactctgctggtagtgttccttatatttgccgacattagtgaaatcgaggaggagatcggagccgaggttgtgattaatggatcgagtagccccgcagtggtggacagaagcaatgaaagtatcaagcataatatccagcccgcctccagtaagtggcggcacaaccagaccctgtcactcagaattcgcaaacagatcttaaaattcctggacgccgagaaggatatatctgtgttgaagggcacgctgaagccaggtgatataatccattacatattcgaccgggacagcacgatgaacgtgtcacaaaatctttacgagctgttacccaggacgtctccactaaagaacaagcactttggaacatgtgccatcgtaggtaattcaggggtcctcttgaattccgggtgcgggcaggaaatcgacgcccactctttcgtgatccgctgtaatctagcacccgtccaggagtacgcacgtgatgtggggctgaagactgacctggtgaccatgaacccatccgtgattcagcgagcctttgaagatctggtgaacgcaacatggagggaaaaactgttgcagaggctccacagcttaaatggtagtatcttgtggatccccgcttttatggctcgcgggggcaaagagagggttgagtgggtgaacgagctgatcctcaaacaccacgtcaatgtcagaaccgcatacccgagtttgagacttcttcatgctgtgcggggttactggttgacgaataaagtccatatcaagcgcccaacaacggggcttctgatgtataccctggcgaccaggttttgtaagcaaatttacttatatggtttctggccatttccattggatcagaaccaaaacccagtgaagtaccactactatgacagccttaagtacggctatacctctcaggcctctcctcacactatgcccctggagttcaaagcattaaaatcactgcacgagcagggcgcattgaaactgactgtgggtcagtgcgatggggcgacttag

SEQ ID NO: 161108 - DNA, 1128 bp, Artificial Sequence
  derived and/or modified sequence
atgcagctgcagttccgctcctggatgctggccgccctgaccctgctggtggtgttcctgatctttgctgacatcagcgagattgaggaggagatcggcaacagcggcggccggggcaccatccgctctgctgtgaacagcctgcacagcaagagcaacagagctgaggtggtgatcaatggcagcagcagccctgctgtggtggacaggagcaatgaaagcatcaagcacaacatccagcctgccagcagcaagtggaggcacaaccagaccctgagcctgcgcatcaggaagcagatcctgaagttcctggatgctgagaaggacatctctgtgctgaagggcaccctgaagccaggggacatcatccactacatctttgaccgggacagcaccatgaatgtgtcccagaacctgtatgagctgctgcccaggaccagccccctgaagaacaagcacttcggcacctgtgccatcgtgggcaacagcggcgtgctgctgaacagcggctgcggccaggagattgatgcccacagctttgtgatccgctgcaacctggcccctgtgcaggagtatgccagagatgtgggcctgaagacagacctggtgaccatgaaccccagcgtcatccagagggcctttgaggacctggtgaatgccacctggagggagaagctgctgcagaggctgcacagcctgaatggcagcatcctgtggatcccagccttcatggcccggggcggcaaggagcgggtggagtgggtgaatgagctgatcctgaagcaccacgtgaatgtgaggacagcctaccccagcctgcggctgctgcatgctgtgcggggctactggctgaccaacaaggtgcacatcaagaggcccaccaccggcctgctgatgtacaccctggccacccgcttctgcaagcagatctacctgtatggcttctggcccttccccctggaccagaaccagaaccctgtgaagtaccactactatgacagcctgaagtatggctacaccagccaggccagcccccacaccatgcccctggagttcaaggccctgaagagcctgcacgagcagggcgccctgaagctgactgtgggccagtgtgatggagccacctag

SEQ ID NO: 161109 - DNA, 1065 bp, Artificial Sequence
  derived and/or modified sequence
atgcagctgcagttccgctcctggatgctggccgccctgaccctgctggtggtgttcctgatctttgctgacatcagcgagattgaggaggagatcggggctgaggtggtgatcaatggcagcagcagccctgctgtggtggacaggagcaatgaaagcatcaagcacaacatccagcctgccagcagcaagtggaggcacaaccagaccctgagcctgcgcatcaggaagcagatcctgaagttcctggatgctgagaaggacatctctgtgctgaagggcaccctgaagccaggggacatcatccactacatctttgaccgggacagcaccatgaatgtgtcccagaacctgtatgagctgctgcccaggaccagccccctgaagaacaagcacttcggcacctgtgccatcgtgggcaacagcggcgtgctgctgaacagcggctgcggccaggagattgatgcccacagctttgtgatccgctgcaacctggcccctgtgcaggagtatgccagagatgtgggcctgaagacagacctggtgaccatgaaccccagcgtcatccagagggcctttgaggacctggtgaatgccacctggagggagaagctgctgcagaggctgcacagcctgaatggcagcatcctgtggatcccagccttcatggcccggggcggcaaggagcgggtggagtgggtgaatgaactcatcctgaagcaccacgtgaatgtgaggacagcctaccccagcctgcggctgctgcatgctgtgcggggctactggctgaccaacaaggtgcacatcaagaggcccaccaccggcctgctgatgtacaccctggccacccgcttctgcaagcagatctacctgtatggcttctggcccttccccctggaccagaaccagaaccctgtgaagtaccactactatgacagcctgaagtatggctacaccagccaggccagcccccacaccatgcccctggagttcaaggccctgaagagcctgcacgagcagggcgccctgaagctgactgtgggccagtgtgatggagccacctag

SEQ ID NO: 161110 - DNA, 1128 bp, Artificial Sequence
  derived and/or modified sequence
atgcagctgcagttccggagctggatgctggccgccctgaccctgcttgttgtgtttctcattttcgccgacatttctgagatcgaggaagagattgggaatagcggcggccgtggaaccatacgctctgccgtgaattcccttcattcaaaaagtaacagggccgaggtggtcattaacggcagttcatctccggcggtggtggatcggtccaatgagtctattaaacacaacatccagccagcctcatctaagtggaggcacaaccagaccctctccttgagaatccggaagcagattctgaaattcctcgacgcggaaaaggatatctccgtgctaaaggggaccttgaaaccgggtgacattatccattacatcttcgatagagatagtaccatgaacgtcagccaaaacctctatgaactcttaccccggacctcacccctgaagaacaagcattttggaacgtgcgccatcgtgggcaacagcggagttctgctgaactcaggatgtggccaggagatagacgcacattccttcgtgatccgatgcaacctggcccctgtacaggagtacgcccgcgacgttgggctgaagactgacctcgtgaccatgaacccttcagtgatccagcgagcttttgaagatctggtcaatgccacctggcgcgagaagttattgcagaggcttcactctctcaatggttctatactttggattcctgctttcatggcccggggcgggaaggaacgggtcgaatgggtgaatgagcttatcctgaaacatcatgttaatgtgcgaacagcgtacccaagtctgagactgctccatgctgtgcgaggctattggttaaccaataaggtccacatcaagcgacccacaactgggctccttatgtacactctggccactaggttctgcaagcagatttatctgtacggcttctggccattccccctcgatcagaaccagaacccggtgaaatatcactactatgactctctcaagtacggctatacctcacaagcctcgccgcacaccatgcctctggagtttaaagccctgaaaagtctgcacgagcagggtgctcttaagctcacagtagggcagtgcgatggcgctacatag

SEQ ID NO: 161111 - DNA, 1065 bp, Artificial Sequence
  derived and/or modified sequence
atgcagctgcagttccggagctggatgctggccgccctgaccctgttggtcgtctttctgatttttgccgacatctccgaaatcgaagaagaaatcggcgctgaagtagtgatcaacgggtcctctagtccggccgtggttgatcgctccaacgagagcattaaacacaacatccagccagcatccagcaagtggaggcacaatcagacgctcagcctgcggattagaaagcaaatattgaagtttctggatgcagagaaggatatatctgtcctgaagggcaccttaaagcccggcgacatcatacattatatctttgaccgcgactctaccatgaacgtgtctcagaacttgtacgaattgttgccacgaacgtctcccctgaaaaataaacatttcggaacctgcgctatagttggaaattccggggttttgctcaactctggatgcggccaggagattgacgcccactcattcgtgatcaggtgcaatcttgccccagttcaagagtacgcccgggacgtggggctcaagaccgatcttgttaccatgaacccttcggtaatccagagggcgtttgaagatcttgtgaacgccacctggagggagaaactgttacagcggctgcattcccttaacggatctattttgtggatcccggcttttatggcgcggggcggaaaggaacgcgtggaatgggtgaacgagctcatccttaagcatcatgttaatgtccggactgcctacccctccctccggcttcttcacgctgtcaggggatactggttaaccaacaaagtgcatatcaaaagacctacaacgggcctgctgatgtacacactggccacgcgcttctgcaaacaaatctatctgtacggtttctggccattccctctggatcagaatcagaatcccgtgaagtaccattattacgactccctgaagtacggctatacttcccaggccagccctcacacaatgcctttggagttcaaggccctgaagtctctccatgaacagggagcccttaaattgactgtcggtcagtgcgatggggccacctag

SEQ ID NO: 161112 - DNA, 1128 bp, Artificial Sequence
  derived and/or modified sequence
atgcagttacagtttcgctcttggatgttggctgccctgacactcctggtcgtgtttctgatcttcgctgacatcagcgagattgaagaggaaattggcaacagtggaggtagaggtacaatcaggtccgctgttaactccctgcactcaaaaagtaaccgagctgaagtggtaattaatggatcaagcagtcccgctgtggtagatcggtccaatgagagtatcaaacacaacatccagcccgctagcagtaagtggcgtcacaatcaaaccctgagccttaggatacggaaacagatcttgaagtttctggacgcagagaaggacatctccgtgctgaagggcaccttgaagccaggagatattattcattacatcttcgacagagactcgacaatgaacgttagccaaaatttatatgagctgctgccgaggacctcaccattgaagaataaacatttcggaacctgcgccatcgtgggaaactccggagtgttacttaactcaggatgtggacaggaaatcgatgcacacagcttcgtgataaggtgcaatttggctcccgttcaggagtacgcacgggacgttggcctgaagacggaccttgtcaccatgaacccttccgtgatccagcgggcattcgaggacctcgtcaacgccacatggagggagaagttgcttcagcgactacatagcctcaacgggagtattctctggatcccagctttcatggcacgcggtggaaaggaacgcgtggagtgggttaacgagctgattcttaagcatcacgtcaatgtgcgcaccgcctatccctcactccggttgctccacgcagtgagagggtactggttgactaacaaagtgcatatcaagagaccaacaacaggcctcctgatgtataccctggcaactaggttttgcaagcagatttacctctatggtttttggcccttccccctcgatcagaaccagaaccccgtgaaataccactactatgatagcctgaagtacggttacacttcgcaggcatctccccacacaatgcctttagagttcaaagccctcaagagccttcatgaacaaggtgctctgaagttgactgtcggtcaatgcgacggtgctacatag

SEQ ID NO: 161113 - DNA, 1065 bp, Artificial Sequence
  derived and/or modified sequence
atgcagcttcagtttaggtcatggatgctcgcagcactgaccctcttggtagtgttcttgatcttcgctgacatctctgaaatagaggaagaaatcggagcagaggttgtgatcaacggctccagctctccagccgtcgtcgacagaagtaacgaaagtataaaacacaatatccaacccgctagtagcaagtggcggcataatcagacactttcactgcgaatacgaaagcaaatactcaaatttctggacgccgagaaggatattagcgttttaaaaggaaccttgaaacccggagacatcattcactacatcttcgaccgagacagcactatgaacgtgagtcagaatctgtatgaactattaccaaggacatctccactgaaaaacaagcatttcgggacatgtgccatcgttggaaattcaggcgtgctcctcaattccgggtgtggccaggagatcgacgcccacagctttgtgatccgttgcaacctggccccagtgcaagaatacgccagagatgtcggattgaaaactgacctagtgacaatgaacccttccgttatccagcgagcatttgaggacctggtgaacgccacctggcgcgagaaattgctgcagcgcctgcactccttgaatgggtccattctatggataccagccttcatggcgcgaggaggaaaggagcgtgttgagtgggtcaacgaattaattctgaagcaccacgtcaacgtgaggaccgcttatccatccctgcgccttctccatgctgtacggggatattggcttacaaacaaagtccacattaagcggccaactacaggcctgctaatgtacactctcgctactcggttctgtaaacagatttacctctatggcttctggccattcccactggaccagaatcagaatccagttaaatatcactattacgatagcctgaagtacggctacacttcacaggcctcaccacacaccatgccacttgagttcaaggccttaaagtccttgcacgagcagggcgcattgaaactcactgttggccagtgcgacggagctacttag

SEQ ID NO: 161114 - DNA, 5708 bp, Artificial Sequence
  derived and/or modified sequence
gggagggaggggcaggcgggagccgggagggagcgagcgggctcgccgcgcctgagcaacccctgcctgtcgctgccgctgccgctgccgctgccgccgccggcccggactcgtccggagcgcagggtgtctgcccagctgcgcgcggcgcgcggaggctccggcgtccgccgctgcgccctccggcccctgctcctcgcgccggcccgcgtgggtcccggcgggcgcgaacccaccatgcagctgcagttccggagctggatgctggccgcgctcacgctgctcgtggtcttcctcatcttcgcagacatctcagagatcgaagaagaaatcgggaattcgggaggcagaggtacaatcagatcagctgtgaacagcttacatagcaaatctaatagagctgaagttgtaataaacggctcctcatcaccagctgttgttgacagaagtaatgaaagcatcaagcacaacatccagccagcctcgtccaaatggagacataaccagacgctctctctgaggatcaggaagcagattttaaagttcttggatgctgaaaaggacatttctgtcctaaagggaaccctgaagcctggagatattattcattacatcttcgatcgagacagcaccatgaatgtgtcccagaacctctacgagctcctccccaggacttcgccactgaagaataagcactttgggacttgtgccatcgtgggcaactcgggggtcttgctgaacagcggctgtgggcaggagattgacgcccacagcttcgtcatcaggtgcaacctggccccagtacaggagtatgcccgggatgtggggctcaagacagacctggtaaccatgaacccctcggtcatccagcgggcctttgaggacttggtcaatgccacgtggcgggagaagctgctgcaacggctgcacagcctcaatggcagcatcctgtggatccctgccttcatggcccggggcggcaaggagcgtgttgagtgggtcaacgagcttatcctgaagcaccacgtcaacgtgcgcactgcatacccctcgctgcgcctgctgcacgccgttcgcggatactggctgaccaacaaagtccacatcaaaagacccaccaccggcctcttgatgtataccctggccacacgtttctgcaaacaaatctacctctacggcttctggccctttccgctggatcagaaccagaacccagtcaagtaccactattatgacagcctcaagtatggctacacctcccaggccagcccgcataccatgcccttggagtttaaggccctcaagagcctacatgagcagggggctttgaaactgactgtcggccagtgcgatggggccacgtagggtgggcaccccatgggactcagtggctcacatttcctgccagctacaccacaggcagatgggagtcggggtggcacaaacaatagaacaagcaggctagtggttttctttgttaaagtgtaaaacagtgaccagaatatatatatctatacctgcatatatatattgacctgagtatttataactgtgtggtgttcatctagcattaggcagataggccacaggaagaaggtgtggagaacccacctgaaccagattgagactcaatccatctttgggggtggaaggacttgacatgaaaagaagccagtcccatgactttggatgacaaactgcctcctggcttggagggatctttgggctcatggatgaatggcgagccacctgttgtcagctgccccaagcctctgggatatgtggattcggagaaagctgaggcccagaggggacactcgacccagtctaaagtgggtgccattcacggaggagagggaggttggagacttcaaccgggcaaaggagcacaaggaaaccaagcagcagaggccccatcagcacagagggcctcgttccacgaacgtagagtttgactgcctaagggacagcacgaatgactcacatgtttcagacaggcctccacggctatggagagaaggctggaggagacacaatggatggttcatgttctggcttagcaagagccaccaagaactttgggtgaagcaagcagatgacaatgaagaggagtaatgttccgaatcatgtttttgaaaaatcaagacctcctgttaagggcccacttgaccctagaataaggcaggagagtgtctaaaatctagctgctttgggtgttttttaaagcaatgtgagtccactgaggaggaagagaccctgggatttcaccctctgggttagtctctgtctcaccctgttagaatgtcacgagggactgtactgtcccctctgtcaccagggaagccacaatgagagcttgaaagggtgctgtcaagataaatgtcatccttcttaaaatacatatgattgcctttttgggtgcctcacagagccccagagtgtgagacctgaaagaatgttcagcatctagctccatgtccctgcaaccactctctgtttgccttctgcattctgcactctgcggggcctttgcagccagactgctgtgtcaatgttactttcttgtcactttcctaccctgatggtcacactagcccaccccaagctccgacattgaggttttcatctctgcagggagaggttccaatgtccaccccacccccaggtacccgcctcttcccacagaagcaattttagaattttgcaaaattcttttccccttattgagattaatatttaagattaaaaaaaaaatacccaaagccaaatgcagttccaaatagtggacataatctcccagggaaatctgggctcgaggcctacaacttaggggctggaatcacaggtctcacatagagaaatagccagcttgaatttgttagtcgtattccttcacctgatgaataacagtgttttaaaacatatttgaaaggtaagtaaaaaactaccatcttgaaggtgaagggagttaagaaaagtaatcaagacctgctcctaagcatatgagaccagatgtaattaatcaatggcaatgcagaacaggaccttggctctaaattaatggttgaccggaagggattggaggcggcagaaccattaaccctacacaagaacactccagcccaaaaccgtgaggaaggtgatatatctctgcattttcccttgttgttgcttgaagtctgtgattggggatttgcgttataaaatgaatattttaaaaagcaacagccctaatagcctctgtgggaactgagtggtttcggactcctcacaggcggtggaaataattaataccatattttatacatctccagagcctttcatcttgaggatctcaaagaccgtagaagacatttaatttctaaagcttgaagtgccccgaggagcaggtagaatttccagcagggccttggtggattaaccaaggccttggattccagaatgtttcatggtaagcactgtggagaacctacatgtcaggttctggagttggccctgagctctatccaccaagccagcaccccaccatccctttgcaggggagtcaaagggccagaactccttgggggaccagaacatggttttccttctgcctatcttagtcatggctcctaaaattgaagctgatatgagctggagtgcaaggagtccttccaccctgccttcaggttctctctggagaaaggttagagaccccaggacaatcaacatgtgcaccgttcccctcctcggcttgagtcctgcactaccaaaatggcctggccatttgatggcggagctccaggggccttggctttctctggctcattgtccttctccatctgggccaattgtccttccctgcccattcagagttcaatttgagcctccactgcagttcctggtgtgggccagctggtgttgggtggccccagggagtcacacagtctgtacccggccccgagatcctctgctgtaactgcagggtcacaggcatcccgggagaatgggcctccaccctcagccagccctcactgctgacaggcacccctctgtcacctcctgccacctgtcagatacccagcctgcccgccatcagccacccgagtggttccgacctccattcacctcaagccccaacaggcccctgtcattccacttcatggaagagacggagccttctgaaatgagatctaccctgaaaatctcttctccttcccctttctgagaaacgtcatccccaccagttaacgtttcctgtacaccctcaccctctctcgtccatctctgttgcctctgcacatcagcacacactgactccacctgggctggctcctgccgcctcttccctacctcctccactagccgcaggaagggcctccagcacccacaactgcccttcctcttgatgcccctcggcttccccccagcctggcagcagcgtcccagcgcctccacattgcccctctcacctcccagctctccacgccacttggctctgcagcgacccctcctagacgctccctggcccctcggcacccagaatgccacattcttgtgtttttttcctccttctttcccaatccctctcaaccatgtatttatttatatatgtatgtatttttttatttattatttatttattgaaacccctactttgattgacaaaggaatcaaggtagatctgaccagtattcccctctcttctccttgtcccaccacatggacatgccttacactggcgtcctctcctgagtccctccgcactctccatcagcaacctcacacctgccttcagacccggctgcaacttcctaagctgcccctgccccagctcctctctgcaacccagccctctcctgagctctaggctgggattacacccgctggagggacactcaccccatctgctcccacggcagcaccatcaactcaacaagtcagaagccaagtggatcatctgtgtccccttcccccacaatccctcctttttctagtaaaagacccgtgatcccgtcagccacccagtctgagatgctgacgttatcttcgactattcttccctgtcctgccttgctaattcttcccactagcactaatctcgactctttgtcacttggactatttcagcaacagtctcatctcccagattacctctgtgcacactgacacgtggtcccgtccatcctgaacatgcacagtgattttcctctcccgttgcacacaaacctttaaaagttccccggcccgtgaacaaatgtacaattctctattctgacattacagaccaccggataaggccccattcttcctttacaccctcccctggtcagcctaggagagttgtttttcctggaaagggtgcctgcgttttactgtctctgtgcctttggtcttgctatccccatcccctggaatgctcccttttcttcccttcaaagcccatgcggaaaccacgtccttcatgaagccctccctgatgtaccaaccactgggatctctccctctgctgaaccaccgtagcactttatttgtacctttctcatggcacttaccatattctgccttgtattatagttatttgtgcacttgtcctttgactgttcttagactgtaagcttgccaagggcagggactgtgttttattcatctgtatccatcacagcactaggcgtggtgcatagcacacagcagttgctcaataaatgtttgttggattaaatccttaa

SEQ ID NO: 161115 - DNA, 1089 bp, Artificial Sequence
  derived and/or modified sequence
ggtcccggcgggcgcgaacccaccatgcagctgcagttccggagctggatgctggccgcgctcacgctgctcgtggtcttcctcatcttcgcagacatctcagagatcgaagaagaaatcggagctgaagttgtaataaacggctcctcatcaccagctgttgttgacagaagtaatgaaagcatcaagcacaacatccagccagcctcgtccaaatggagacataaccagacgctctctctgaggatcaggaagcagattttaaagttcttggatgctgaaaaggacatttctgtcctaaagggaaccctgaagcctggagatattattcattacatcttcgatcgagacagcaccatgaatgtgtcccagaacctctacgagctcctccccaggacttcgccactgaagaataagcactttgggacttgtgccatcgtgggcaactcgggggtcttgctgaacagcggctgtgggcaggagattgacgcccacagcttcgtcatcaggtgcaacctggccccagtacaggagtatgcccgggatgtggggctcaagacagacctggtaaccatgaacccctcggtcatccagcgggcctttgaggacttggtcaatgccacgtggcgggagaagctgctgcaacggctgcacagcctcaatggcagcatcctgtggatccctgccttcatggcccggggcggcaaggagcgtgttgagtgggtcaacgagcttatcctgaagcaccacgtcaacgtgcgcactgcatacccctcgctgcgcctgctgcacgccgttcgcggatactggctgaccaacaaagtccacatcaaaagacccaccaccggcctcttgatgtataccctggccacacgtttctgcaaacaaatctacctctacggcttctggccctttccgctggatcagaaccagaacccagtcaagtaccactattatgacagcctcaagtatggctacacctcccaggccagcccgcataccatgcccttggagtttaaggccctcaagagcctacatgagcagggggctttgaaactgactgtcggccagtgcgatggggccacgtag

SEQ ID NO: 161116 - protein, 277 aa, Artificial Sequence
  derived and/or modified sequence
MWPGILVGGARVASCRYPALGPRLAAHFPAQRPPQRTLQNGLALQRCLHATATRALPLIPIVVEQTGRGERAYDIYSRLLRERIVCVMGPIDDSVASLVIAQLLFLQSESNKKPIHMYINSPGGVVTAGLAIYDTMQYILNPICTWCVGQAASMGSLLLAAGTPGMRHSLPNSRIMIHQPSGGARGQATDIAIQAEEIMKLKKQLYNIYAKHTKQSLQVIESAMERDRYMSPMEAQEFGILDKVLVHPPQDGEDEPTLVQKEPVEAAPAAEPVPAST

SEQ ID NO: 161117 - DNA, 834 bp, Artificial Sequence
  derived and/or modified sequence
atgtggccgggcattctagtaggcggcgcacgggtggcttcttgccgttatcctgccctggggcctcgcctggccgcccatttcccagctcagaggccaccccagagaaccttgcagaacggcctcgccctgcaaagatgcctacatgccacagctacaagggcactgcctctaatccccatagtggtcgaacagaccgggcgtggcgaaagggcctatgacatttatagtcgccttctacgcgagcgaatcgtgtgtgtgatgggcccaatagatgactccgtcgctagtctcgtcatagctcagctgctgtttttgcagagtgagtccaataagaagcctatccacatgtacatcaattccccgggaggcgtggttacagcagggttagcgatttatgatactatgcagtatatccttaatcccatctgtacctggtgcgtggggcaagcagcgtccatgggcagcctgctccttgccgctggcacacctgggatgcgccatagtctgcccaacagcagaatcatgattcatcagccgtcaggcggcgctagaggacaggcgaccgatatcgccatccaagccgaagagattatgaaactaaagaaacaactctataatatttatgcgaagcataccaagcagagccttcaggtgatagaatctgccatggaacgagacagatatatgagccctatggaggcccaggagtttggaatcctcgataaagtcttggtgcacccaccccaggacggtgaggacgaaccaactctagtccaaaaagaaccagtagaggcggctccggctgccgagcctgtccccgcaagtacgtag

SEQ ID NO: 161118 - DNA, 834 bp, Artificial Sequence
  derived and/or modified sequence
atgtggccaggcatcctggtgggcggggcccgggtggccagctgccgctacccagccctgggcccccggctggccgcccacttccctgcccagaggcctccccagaggaccctgcagaatggcctggccctgcagcgctgcctgcacgccacagccacccgggccctgcccctcatccccatcgtggtggagcagacaggccgcggggagcgggcctatgacatctacagccggctgctgcgggagcgcatcgtgtgtgtgatgggccccattgatgacagcgtggccagcctggtgattgcccagctgctcttcctgcagagcgagagcaacaagaagcccatccacatgtacatcaacagccctgggggcgtggtgacagctggcctggccatctatgacaccatgcagtacatcctgaaccccatctgcacctggtgtgtgggccaggccgcctccatgggcagcctgctgctggccgccggcaccccaggcatgaggcacagcctgcccaacagccgcatcatgatccaccagcccagcggcggggcccggggccaggccacagacatcgccatccaggccgaggagatcatgaagctgaagaagcagctgtacaacatctatgccaagcacaccaagcagagcctgcaggtgattgagagcgccatggagcgggaccgctacatgagccccatggaggcccaggagtttggcatcctggacaaggtgctggtgcaccccccccaggatggagaagatgagcccaccctggtgcagaaggagcctgtggaggccgccccagctgctgagcctgtgcctgccagcacctag

SEQ ID NO: 161119 - DNA, 834 bp, Artificial Sequence
  derived and/or modified sequence
atgtggcccggcatcctggtgggcggcgcccgggtggccagctgccgatatcctgcactgggacctaggctcgccgcacactttcccgcccagcggcctccgcagcggacactacaaaacggtttggctcttcagcgctgcctgcacgctaccgcaactagagcacttcccctcatccctatagttgtggagcagactggtcggggtgaacgggcatatgacatatacagtaggctgttacgggaacggatagtgtgtgtaatggggcctatcgacgactcagtggctagcttggtgatcgctcaactactgttcttacagtccgaatctaacaagaaacccattcacatgtacatcaactctccggggggcgtggtgacggccgggttggcaatttacgacaccatgcaatacatactgaatcccatttgcacctggtgcgtgggacaagccgcctcaatgggctccctgctcctcgcagctggtacccccggcatgcggcattcactgcctaactcccgtatcatgatccatcagccatccggaggggccagaggacaggccaccgacatcgccatccaggccgaagaaataatgaagttgaaaaagcagctgtacaacatctatgcgaaacatacgaagcaaagcctccaagttatagaatcagctatggagcgtgaccgatatatgagccccatggaggctcaggagtttggcatccttgacaaggtgctcgtccatccaccgcaagatggagaggacgagccaacgctcgtgcagaaggaacctgtggaggctgctccagctgcagagcccgtgcctgcctcgacctag

SEQ ID NO: 161120 - DNA, 834 bp, Artificial Sequence
  derived and/or modified sequence
atgtggcctgggatactggtgggtggagctcgcgtggcctcttgcaggtacccggctctcgggccaagattagccgctcacttccccgcacagcgccctccacagcgcacactgcagaacgggctggccctgcaaaggtgccttcacgctacagccacacgggctttaccgttaatcccaatagtggtagagcaaaccggacggggagagcgcgcttacgatatttactctcgcctgttgcgggaaagaatcgtttgtgtgatgggacccatcgacgactccgttgcgagcctggtcattgcccagctcctttttctacagagtgaaagtaataaaaagccgatccacatgtacattaactcgcccggtggcgtcgtgaccgctggcttggccatctatgacactatgcaatacatactgaaccccatttgcacgtggtgcgtggggcaggccgcttctatgggcagcttgctgctcgctgccggtactccgggaatgcgccatagccttcctaattcaaggataatgattcaccaacctagcggtggtgctcgtgggcaggccacagatattgcgatccaagcagaagagatcatgaagctgaagaagcaactgtacaacatttacgccaaacacacaaagcagagcctccaagtaatcgagtccgccatggaacgggacagatatatgtcacctatggaggcccaagaatttggcatactagacaaagtgcttgtacatcctccgcaggatggcgaggacgaacccaccctggtgcagaaagaaccagtggaagctgcacctgcagccgaaccggtccccgcaagcacatag

SEQ ID NO: 161121 - DNA, 1151 bp, Artificial Sequence
  derived and/or modified sequence
ccttaatggcgcccgcccagactcctggaagtgagcggcctagcgagcgagctcccaggcgcaaagcacgccggaagctgtagttccgccatcggacggaagccgaccggggcgtgcggagggatgtggcccggaatattggtagggggggcccgggtggcgtcatgcaggtaccccgcgctggggcctcgcctcgccgctcactttccagcgcagcggccgccgcagcggacactccagaacggcctggccctgcagcggtgcctgcacgcgacggcgacccgggctctcccgctcattcccatcgtggtggagcagacgggtcgcggcgagcgcgcctatgacatctactcgcggctgctgcgggagcgcatcgtgtgcgtcatgggcccgatcgatgacagcgttgccagccttgttatcgcacagctcctcttcctgcaatccgagagcaacaagaagcccatccacatgtacatcaacagccctggtggtgtggtgaccgcgggcctggccatctacgacacgatgcagtacatcctcaacccgatctgcacctggtgcgtgggccaggccgccagcatgggctccctgcttctcgccgccggcaccccaggcatgcgccactcgctccccaactcccgtatcatgatccaccagccctcaggaggcgcccggggccaagccacagacattgccatccaggcagaggagatcatgaagctcaagaagcagctctataacatctacgccaagcacaccaaacagagcctgcaggtgatcgagtccgccatggagagggaccgctacatgagccccatggaggcccaggagtttggcatcttagacaaggttctggtccaccctccccaggacggtgaggatgagcccacgctggtgcagaaggagcctgtagaagcagcgccggcagcagaacctgtcccagctagcacctgagagctgggcctcctctccagaatcatgtggaggggccagaggcctgccagacccccagctgggccctgctcaccccttgttgctgggcttggaggggcctcttgaggaacttttaatttgcaggggtgcccgctatggacggggcattccagctgagacactgtgattttaaattaaatctttgtggtctttgc

SEQ ID NO: 161122 - DNA, 834 bp, Artificial Sequence
  derived and/or modified sequence
atgtggcccggcatcctggtgggcggcgccagagtggccagctgcagataccccgccctgggccccagactggccgcccacttccccgcccagagacccccccagagaaccctgcagaacggcctggccctgcagagatgcctgcacgccaccgccaccagagccctgcccctgatccccatcgtggtggagcagaccggcagaggcgagagagcctacgacatctacagcagactgctgagagagagaatcgtgtgcgtgatgggccccatcgacgacagcgtggccagcctggtgatcgcccagctgctgttcctgcagagcgagagcaacaagaagcccatccacatgtacatcaacagccccggcggcgtggtgaccgccggcctggccatctacgacaccatgcagtacatcctgaaccccatctgcacctggtgcgtgggccaggccgccagcatgggcagcctgctgctggccgccggcacccccggcatgagacacagcctgcccaacagcagaatcatgatccaccagcccagcggcggcgccagaggccaggccaccgacatcgccatccaggccgaggagatcatgaagctgaagaagcagctgtacaacatctacgccaagcacaccaagcagagcctgcaggtgatcgagagcgccatggagagagacagatacatgagccccatggaggcccaggagttcggcatcctggacaaggtgctggtgcaccccccccaggacggcgaggacgagcccaccctggtgcagaaggagcccgtggaggccgcccccgccgccgagcccgtgcccgccagcacctag

SEQ ID NO: 161123 - protein, 197 aa, Artificial Sequence
  derived and/or modified sequence
MSRLSRSLLWAATCLGVLCVLSADKNTTQHPNVTTLAPISNVTSAPVTSLPLVTTPAPETCEGRNSCVSCFNVSVVNTTCFWIECKDESYCSHNSTVSDCQVGNTTDFCSVSTATPVPTANSTAKPTVQPSPSTTSKTVTTSGTTNNTVTPTSQPVRKSTFDAASFIGGIVLVLGVQAVIFFLYKFCKSKERNYHTL

SEQ ID NO: 161124 - DNA, 594 bp, Artificial Sequence
  derived and/or modified sequence
atgtcccgcctgtctcggtctctgttatgggcggccacttgcctgggggttttgtgtgttctttctgcagacaaaaatactactcaacacccgaatgtcactacgttagccccgatctcaaatgtgacgtcagcccccgtgacttctctgcctcttgtgaccactcccgctcccgagacctgtgaagggcgcaactcctgcgtgtcttgctttaatgtttccgttgtgaataccacatgcttctggatcgagtgcaaggacgagtcttactgcagccataatagcaccgtgtcggattgtcaggttgggaatacaaccgatttctgttcggtgtccaccgcgacccccgtgcccactgcaaattcaaccgcgaagccgaccgtgcaaccgagccctagcacaacttccaaaaccgtcacgaccagcggtaccactaataatacagtcacccccacttctcagcccgtgcggaaatctacttttgacgccgcgtccttcatcggtggaattgtgctggtgttaggcgtccaagccgtcatcttctttctgtataagttctgcaagagcaaggagcgcaattaccacacactatag

SEQ ID NO: 161125 - DNA, 594 bp, Artificial Sequence
  derived and/or modified sequence
atgagccggctgagccgcagcctgctgtgggccgccacctgcctgggcgtgctgtgtgtgctgtctgctgacaagaacaccacccagcaccccaacgtgaccaccctggcccccatcagcaatgtgaccagcgcccctgtgaccagcctgcccctggtgaccaccccagcccctgagacctgtgagggcaggaacagctgtgtgtcctgcttcaacgtgtctgtggtgaacaccacctgcttctggattgagtgcaaggatgagagctactgcagccacaacagcacagtgtctgactgccaggtgggcaacaccacagacttctgcagcgtgtccacagccacccctgtgcccacagccaacagcacagccaagcccaccgtgcagcccagccccagcaccaccagcaagacagtgaccaccagcggcaccaccaacaacacagtgacccccaccagccagcctgtgaggaagagcacctttgatgctgccagcttcatcggcggcatcgtgctggtgctgggcgtgcaggccgtcatcttcttcctgtacaagttctgcaagagcaaggagaggaactaccacaccctgtag

SEQ ID NO: 161126 - DNA, 594 bp, Artificial Sequence
  derived and/or modified sequence
atgagccggctgagccggagcctgctgtgggccgccacctgcctgggcgtcctttgtgtgctcagtgcagacaagaacacaacccaacatcctaacgtgaccaccctggcccccatctctaatgtcacgtcggcccctgtcactagtttgccgctggtcacaacacccgctcccgagacttgcgagggcagaaactcctgcgtctcctgcttcaacgtcagcgtagtcaacaccacctgcttctggatcgaatgcaaggacgaatcctattgctcacataactccactgtgtccgattgccaggtcggtaacacgactgacttctgctcagtgagcactgcaaccccagtccctacagccaattccacagctaagcctaccgttcagccatccccaagcaccacaagcaagaccgtgaccacatccggtaccactaataacacggtgacacccacctcacagcctgtgcgaaaatccacattcgacgcagcttcattcataggcggaattgtactcgttctcggcgtgcaagcagtgattttctttctgtataagttttgcaagtccaaagagcggaactatcacactctgtag

SEQ ID NO: 161127 - DNA, 594 bp, Artificial Sequence
  derived and/or modified sequence
atgtcacgcctcagcagatctttactgtgggcagccacgtgcttgggtgtattgtgtgtcctgagcgctgacaagaatacgacccaacaccctaacgtgactacactggctccaataagtaatgtaacctctgccccagttacttccctaccacttgtcacaactccggctccggagacctgtgaaggacgcaactcgtgcgtgagctgcttcaatgttagcgtggtaaataccacctgcttttggatagagtgcaaggatgaatcctactgcagccataactccaccgtctccgactgccaagtcgggaacacgaccgacttctgcagtgtgtctacagctacaccagtcccaacagccaattccacagcaaagcctactgtccaaccatctccatcgaccacttccaaaaccgtgacgactagcggaacaacgaataacactgtcacaccaacaagccagcctgtgcggaaatcaacctttgacgcggctagcttcatcggtggaattgtactggtgcttggagtgcaggcagtcatctttttcctttacaaattctgtaagtcaaaagaaagaaattaccacacactgtag

SEQ ID NO: 161128 - DNA, 2993 bp, Artificial Sequence
  derived and/or modified sequence
ggattgaggggttgactgagcgttgcgagccttagctttctcccgaacgccagcgctgaggacacgatgtcgcggctctcccgctcactgctttgggccgccacctgcctgggcgtgctctgcgtgctgtccgcggacaagaacacgacccagcacccgaacgtgacgactttagcgcccatctccaacgtaacctcggcgccggtgacgtccctcccgctggtcaccactccggcaccagaaacctgtgaaggtcgaaacagctgcgtttcctgttttaatgttagcgttgttaatactacctgcttttggatagaatgtaaagatgagagctattgttcacataactcaacagttagtgattgtcaagtggggaacacgacagacttctgttccgtttccacggccactccagtgccaacagccaattctacagctaaacccacagttcagccctccccttctacaacttccaagacagttactacatcaggtacaacaaataacactgtgactccaacctcacaacctgtgcgaaagtctacctttgatgcagccagtttcattggaggaattgtcctggtcttgggtgtgcaggctgtaattttctttctttataaattctgcaaatctaaagaacgaaattaccacactctgtaaacagacccattgaattaataaggactggtgattcatttgtgtaactcactgaagccaaaatactatcttttaagatgtcccacatggaagacgctattccaggatctttaaatttccatggatgcatataggatgtttgggagcatcatccgtgaagaaaaaatcaattaaatcattgtgttcaacaggaatatttaaaatattctgcatgaatcctgtggctgtcttattttaaatagctgctgctgtgggattatattttttttccttaacatgccaaatataactttctgaaagtgatggaaaatgttgtcttgtgcagacaacatcatggctcttggcagtttaaatttagtaattttaatttagtgaacagaattgagaagaacgtgccaaatgagaatcaattaggtggatttttggctgtcatttcaaaagtggaataaatttattaatttagtagtactaaatggtatccttagattaaaattttgtgcttgataacagctgttttttctacattagaaataagatgccacacaaggaactacattccagatttaaagaaatgaaaggataccattagtgtgtataacagattattgttcatacttgtaaagcatcttatgtcattgagaatataaagaacagtgccttagaagacagtgaaaggtaagctctagcttaatgtctatgatttgttctttgacattaaggaaggtaaggattggtcagaggatgtaacttgatgtgagcagtagtaaacctgttttagatatcatactgttaatattttattgaaaatttatttcagagcggagaaacttaagctaaagtctgttatacagaattgaaagccttcgtatcttgaacctcccaacatttttcttatggctgttgaaaagtatagagctaaattgatttaattacactttcctttgtactttaaaaaaaagtatgctagcactattgtaccttgaaaggatttccaccagactgtcttgagtagtgacttctttggtgaggcaagaaggatatacattattttagaatcatttactatttaaatgagacaatcatattattttagaatcatttattttaaatgagacaatcattttaagttttaagataacagaagtgaccaatgtaatttcacaacacctaaggattttttggttgatcaggttactgtagatttttactgattgtcctggatgaatagactgtgctttttctttttctctcccttccttcttggtttcccatagtataataagcatgcatactttaacttctatagttttctcctttagagggtcgtcttcagttttagaggtttacttctcccttgcctttgactcattggactagtgcagaggctttaagtagtttaaaatgggcttttgcttttctaggtcattaacgttttttatttagtttctttagccaatagtggctgagtttcgcacttgattttcaatattttatagtaagaaatgacaaactgctttgtttcatttcataaacaaactctgcatttagataactattaaaggttgttaagatgaagatttactgtttctttgttactcgttggtacagctgtttgttttacttgcacatttgtacatatacttaatgttttcaagtgccttaattgtttaaaatctctggcttcaaagtttcttggggaaaggtcggtttacctcacattttttgtttccattagtaatattctaggtacctcacaaaatgtattatggtgccatggctgttagtttttagtgagtgctgtaggattaattcgaaaataggcagaattccattcctcccaaggtggcaaaaattagctatactgatgtaattgtcatttacctgggtatgaattccctgacacacattcatgtcaacatatgtagcaaattttgtgaaaacataacaatttgaagcttctgtaattttgagcactgctctaacaacaagcataatataaaattagttagattttgcaagtctacaaatgagctcttgcaacagaactcacagcctttttacttttttcccctaactttagcaatgtagtatcttgagccattaatttttgggtttttttaaaatccagaaggtatatagaaaccttttcagatttttcatctgatttgttcttgcagatgttcttctatcaaataccttattttaccttacagatatttgttgcacaggcagatactgctgtatttagacatttctatttcagttcattaaaaactgcaaaaccaatctgtatcatgtaccaaactgacttaaaataaatctacatgtttattgaa

SEQ ID NO: 161129 - DNA, 594 bp, Artificial Sequence
  derived and/or modified sequence
atgagcagactgagcagaagcctgctgtgggccgccacctgcctgggcgtgctgtgcgtgctgagcgccgacaagaacaccacccagcaccccaacgtgaccaccctggcccccatcagcaacgtgaccagcgcccccgtgaccagcctgcccctggtgaccacccccgcccccgagacctgcgagggcagaaacagctgcgtgagctgcttcaacgtgagcgtggtgaacaccacctgcttctggatcgagtgcaaggacgagagctactgcagccacaacagcaccgtgagcgactgccaggtgggcaacaccaccgacttctgcagcgtgagcaccgccacccccgtgcccaccgccaacagcaccgccaagcccaccgtgcagcccagccccagcaccaccagcaagaccgtgaccaccagcggcaccaccaacaacaccgtgacccccaccagccagcccgtgagaaagagcaccttcgacgccgccagcttcatcggcggcatcgtgctggtgctgggcgtgcaggccgtgatcttcttcctgtacaagttctgcaagagcaaggagagaaactaccacaccctgtag

SEQ ID NO: 161130 - protein, 387 aa, Artificial Sequence
  derived and/or modified sequence
MNRHHLQDHFLEIDKKNCCVFRDDFIVKVLPPVLGLEFIFGLLGNGLALWIFCFHLKSWKSSRIFLFNLAVADFLLIICLPFLMDNYVRRWDWKFGDIPCRLMLFMLAMNRQGSIIFLTVVAVDRYFRVVHPHHALNKISNRTAAIISCLLWGITIGLTVHLLKKKMPIQNGGANLCSSFSICHTFQWHEAMFLLEFFLPLGIILFCSARIIWSLRQRQMDRHAKIKRAITFIMVVAIVFVICFLPSVVVRIRIFWLLHTSGTQNCEVYRSVDLAFFITLSFTYMNSMLDPVVYYFSSPSFPNFFSTLINRCLQRKMTGEPDNNRSTSVELTGDPNKTRGAPEALMANSGEPWSPSYLGPTSNNHAKKGHCHQEPGSLEKQLGCCIE

SEQ ID NO: 161131 - protein, 387 aa, Artificial Sequence
  derived and/or modified sequence
MNRHHLQDHFLEIDKKNCCVFRDDFIAKVLPPVLGLEFIFGLLGNGLALWIFCFHLKSWKSSRIFLFNLAVADFLLIICLPFVMDYYVRRSDWKFGDIPCRLVLFMFAMNRQGSIIFLTVVAVDRYFRVVHPHHALNKISNWTAAIISCLLWGITVGLTVHLLKKKLLIQNGTANVCISFSICHTFRWHEAMFLLEFFLPLGIILFCSARIIWSLRQRQMDRHAKIKRAITFIMVVAIVFVICFLPSVVVRIHIFWLLHTSGTQNCEVYRSVDLAFFITLSFTYMNSMLDPVVYYFSSPSFPNFFSTLINRCLQRKITGEPDNNRSTSVELTGDPNKTRGAPEALIANSGEPWSPSYLGPTSNNHSKKGHCHQEPASLEKQLGCCIE

SEQ ID NO: 161132 - DNA, 1164 bp, Artificial Sequence
  derived and/or modified sequence
atgaacagacaccacctgcaggaccacttcctggagatcgacaagaagaactgctgcgtgttcagagacgacttcatcgtgaaggtgctgccccccgtgctgggcctggagttcatcttcggcctgctgggcaacggcctggccctgtggatcttctgcttccacctgaagagctggaagagcagcagaatcttcctgttcaacctggccgtggccgacttcctgctgatcatctgcctgcccttcctgatggacaactacgtgagaagatgggactggaagttcggcgacatcccctgcagactgatgctgttcatgctggccatgaacagacagggcagcatcatcttcctgaccgtggtggccgtggacagatacttcagagtggtgcacccccaccacgccctgaacaagatcagcaacagaaccgccgccatcatcagctgcctgctgtggggcatcaccatcggcctgaccgtgcacctgctgaagaagaagatgcccatccagaacggcggcgccaacctgtgcagcagcttcagcatctgccacaccttccagtggcacgaggccatgttcctgctggagttcttcctgcccctgggcatcatcctgttctgcagcgccagaatcatctggagcctgagacagagacagatggacagacacgccaagatcaagagagccatcaccttcatcatggtggtggccatcgtgttcgtgatctgcttcctgcccagcgtggtggtgagaatcagaatcttctggctgctgcacaccagcggcacccagaactgcgaggtgtacagaagcgtggacctggccttcttcatcaccctgagcttcacctacatgaacagcatgctggaccccgtggtgtactacttcagcagccccagcttccccaacttcttcagcaccctgatcaacagatgcctgcagagaaagatgaccggcgagcccgacaacaacagaagcaccagcgtggagctgaccggcgaccccaacaagaccagaggcgcccccgaggccctgatggccaacagcggcgagccctggagccccagctacctgggccccaccagcaacaaccacgccaagaagggccactgccaccaggagcccggcagcctggagaagcagctgggctgctgcatcgagtag

SEQ ID NO: 161133 - DNA, 1164 bp, Artificial Sequence
  derived and/or modified sequence
atgaataggcaccatcttcaggaccactttctggaaatagataaaaaaaactgttgcgtgttccgggatgattttatagtgaaagtgctgccccctgttctcgggctagagtttatattcggactgctgggaaatggactggctttgtggattttttgttttcatctgaaatcttggaagtcatcccggattttcctgtttaatctggcagtggcagatttcttactcatcatttgcctgccattcctgatggataactatgtaaggcgctgggattggaagttcggggacatcccctgccggctcatgctctttatgctcgccatgaacaggcagggatccattatcttcttaactgtagtggccgtggaccggtatttccgagtggtgcacccacaccatgccctcaacaaaataagtaaccgcacagctgcaataatatcttgcctactctgggggatcaccattggattaacagtccatctccttaagaagaagatgcccatccaaaatggaggcgccaacctctgcagctccttctccatctgccatacttttcagtggcatgaagcaatgtttcttttggagttcttccttcccctgggcattatcctcttctgtagtgctcggattatctggagcttgcgtcagcgacaaatggatagacacgccaagataaagagggccattacattcatcatggtcgtggcaattgtgttcgtgatatgcttcctgcccagcgtggtggtcaggatccgcatcttttggctgctccacacctccgggacgcagaactgcgaggtgtatcgcagcgtcgacctggctttcttcattacactttcatttacttacatgaatagcatgctggacccagtggtgtactacttctctagtccaagctttcctaactttttctctactctgatcaataggtgtctccagcgcaaaatgacgggcgaacctgacaacaatcgcagcactagcgtcgaactaaccggggatcccaacaaaactagaggcgcccccgaggctctgatggccaatagcggcgaaccatggtcgccgagctacctgggacccacgagcaacaaccacgccaaaaagggccactgtcaccaggagcccggctcacttgaaaaacaactgggttgctgtatcgagtag

SEQ ID NO: 161134 - DNA, 1164 bp, Artificial Sequence
  derived and/or modified sequence
atgaatcggcaccatctgcaggatcactttctggaaatagacaagaagaactgctgtgtgttccgagatgacttcattgtcaaggtgttgccgccggtgttggggctggagtttatcttcgggcttctgggcaatggccttgccctgtggattttctgtttccacctcaagtcctggaaatccagccggattttcctgttcaacctggcagtggctgactttctactgatcatctgcctgcccttcctgatggacaactatgtgaggcgttgggactggaagtttggggacatcccttgccggctgatgctcttcatgttggctatgaaccgccagggcagcatcatcttcctcacggtggtggcggtagacaggtatttccgggtggtccatccccaccacgccctgaacaagatctccaatcggacagcagccatcatctcttgccttctgtggggcatcactattggcctgacagtccacctcctgaagaagaagatgccgatccagaatggcggtgcaaatttgtgcagcagcttcagcatctgccataccttccagtggcacgaagccatgttcctcctggagttcttcctgcccctgggcatcatcctgttctgctcagccagaattatctggagcctgcggcagagacaaatggaccggcatgccaagatcaagagagccatcaccttcatcatggtggtggccatcgtctttgtcatctgcttccttcccagcgtggttgtgcggatccgcatcttctggctcctgcacacttcgggcacgcagaattgtgaagtgtaccgctcggtggacctggcgttctttatcactctcagcttcacctacatgaacagcatgctggaccccgtggtgtactacttctccagcccatcctttcccaacttcttctccactttgatcaaccgctgcctccagaggaagatgacaggtgagccagataataaccgcagcacgagcgtcgagctcacaggggaccccaacaaaaccagaggcgctccagaggcgttaatggccaactccggtgagccatggagcccctcttatctgggcccaacctctaataaccatgccaagaagggacattgtcaccaagaaccaggatctctggagaaacagttgggctgttgcatcgagtaa

SEQ ID NO: 161135 - DNA, 1164 bp, Artificial Sequence
  derived and/or modified sequence
atgaacagacaccacctgcaggaccacttcctggagattgacaagaagaactgctgcgtgttcagagatgacttcatcgtgaaggtgctgccccctgtgctgggcctggagttcatcttcggcctgctgggcaatggcctggccctgtggatcttctgcttccacctgaagtcctggaagagcagccgcatcttcctgttcaacctggccgtggccgacttcctgctgatcatctgcctgcccttcctgatggacaactacgtgcggcgctgggactggaagtttggagacatcccctgccgcctgatgctgttcatgctggccatgaaccggcagggcagcatcatcttcctgactgtggtggccgtggaccgctacttccgggtggtgcacccccaccacgccctgaacaagatcagcaacagaacagctgccatcatcagctgcctgctgtggggcatcaccatcggcctgactgtgcacctgctgaagaagaagatgcccatccagaatggaggagccaacctgtgcagcagcttcagcatctgccacaccttccagtggcatgaggccatgttcctgctggagttcttcctgcccctgggcatcatcctcttctgcagcgcccgcatcatctggagcctgcggcagaggcagatggacagacatgccaagatcaagagggccatcaccttcatcatggtggtggccatcgtgtttgtgatctgcttcctgcccagcgtggtggtgcgcatccgcatcttctggctgctgcacaccagcggcacccagaactgtgaggtgtacagatctgtggacctggccttcttcatcaccctgtccttcacctacatgaacagcatgctggaccctgtggtgtactacttcagcagccccagcttccccaacttcttcagcaccctcatcaaccgctgcctgcagaggaagatgaccggggagccagacaacaacagaagcacctctgtggagctgaccggggaccccaacaagaccaggggggcccctgaggccctgatggccaacagcggggagccctggagccccagctacctgggccccaccagcaacaaccacgccaagaagggccactgccaccaggagcccggcagcctggagaagcagctgggctgctgcatcgagtag

SEQ ID NO: 161136 - DNA, 1164 bp, Artificial Sequence
  derived and/or modified sequence
atgaaccggcaccacctgcaggaccacttcctggagatcgacaagaagaactgctgtgttttcagagatgatttcatcgtgaaggtgctgcccccggtcctgggactggaattcatctttggtctgctgggaaatggactcgctttgtggattttttgttttcaccttaaatcttggaaaagctcccgtatttttctgttcaacctggccgtggccgatttccttctaatcatttgccttccttttctgatggataactatgtgagacgctgggactggaaattcggggatatcccatgcaggctcatgttgtttatgctggctatgaatcgacaaggcagcataatatttttaacggtagtggcggtggaccggtattttcgagtagtgcatccacaccatgcccttaataagattagcaaccggacagcagccataatctcatgcctcctgtggggtatcactattgggctcactgtccacctactgaagaaaaagatgcccatacaaaacggcggagctaatctttgctcttccttctcaatttgtcatacgttccagtggcatgaagccatgtttttgctcgaatttttcctgcccttgggtatcatacttttttgtagcgcccggatcatctggtctctgcggcagcggcagatggaccggcacgccaaaatcaagagagctattaccttcattatggttgtcgctatcgtgtttgtcatctgcttcctgccctctgtggtagtccgcatccggatcttttggcttctgcacacgtcgggcacccagaactgtgaggtgtacagatcagtagatctagcgtttttcattaccctgtcttttacttatatgaattctatgctcgaccccgtggtgtactacttttcgagtccaagcttccctaattttttcagtactctaattaaccggtgtctacagcggaaaatgacaggagagcctgacaacaacagatccacgtctgttgaacttacaggtgaccctaacaagacaaggggcgcccctgaagccctgatggccaatagtggggagccctggtcccctagttacctggggcctacatcaaacaatcatgccaagaaaggccattgccatcaggaacccggttcgttagaaaagcaactgggttgctgcattgagtag

SEQ ID NO: 161137 - DNA, 1164 bp, Artificial Sequence
  derived and/or modified sequence
atgaacaggcaccacttacaggaccacttcttggagatcgataagaaaaattgctgcgtgtttagggatgacttcattgtcaaggtgcttcccccagtactcggcctagagttcatcttcggtctgctagggaatggacttgcactgtggatcttctgttttcacctgaaatcatggaaaagttcacggatctttcttttcaatctggcggtggcagattttctgttgattatttgcctcccctttcttatggacaattacgtcagacggtgggactggaaatttggcgacatcccctgcagactaatgctgttcatgttggcaatgaataggcagggttctataattttcttaaccgtggtggccgtcgacaggtatttcagggtagtacaccctcaccacgctctgaacaagattagcaatagaaccgcagccatcataagttgcttgctgtggggcatcacgattggtttgacggtacatctactgaagaaaaaaatgcccattcagaacggcggtgcaaacctttgcagtagctttagcatctgccacacgttccagtggcacgaggcaatgtttctcctggaattttttttacccctcgggattattctgttctgttcggcacggatcatctggtcactccgccaacgccaaatggaccgacatgcaaagatcaaacgggcaatcaccttcattatggtagtagccatcgtcttcgtgatatgcttcttgcctagtgtagtggtgcgtatccggatcttctggctcttgcacacaagcgggactcagaactgtgaagtgtatcgctcagtggacctggccttcttcataacgctgtcctttacctacatgaactctatgctggaccctgtggtctactatttctcttctcctagcttccctaacttcttctctacccttattaacaggtgtctccagaggaagatgactggcgaacccgataataaccggtctacaagtgtggaactgaccggggaccctaacaagactaggggcgctcccgaggcactcatggccaattcaggcgagccttggagcccgtcttaccttggccctacctcaaataatcacgctaagaagggacattgccaccaggagcctgggtctcttgaaaaacagctgggctgttgcattgagtag

SEQ ID NO: 161138 - DNA, 1164 bp, Artificial Sequence
  derived and/or modified sequence
atgaacagacaccacctgcaggaccacttcctggagatcgacaagaagaactgctgcgtgttcagagacgacttcatcgccaaggtgctgccccccgtgctgggcctggagttcatcttcggcctgctgggcaacggcctggccctgtggatcttctgcttccacctgaagagctggaagagcagcagaatcttcctgttcaacctggccgtggccgacttcctgctgatcatctgcctgcccttcgtgatggactactacgtgagaagaagcgactggaagttcggcgacatcccctgcagactggtgctgttcatgttcgccatgaacagacagggcagcatcatcttcctgaccgtggtggccgtggacagatacttcagagtggtgcacccccaccacgccctgaacaagatcagcaactggaccgccgccatcatcagctgcctgctgtggggcatcaccgtgggcctgaccgtgcacctgctgaagaagaagctgctgatccagaacggcaccgccaacgtgtgcatcagcttcagcatctgccacaccttcagatggcacgaggccatgttcctgctggagttcttcctgcccctgggcatcatcctgttctgcagcgccagaatcatctggagcctgagacagagacagatggacagacacgccaagatcaagagagccatcaccttcatcatggtggtggccatcgtgttcgtgatctgcttcctgcccagcgtggtggtgagaatccacatcttctggctgctgcacaccagcggcacccagaactgcgaggtgtacagaagcgtggacctggccttcttcatcaccctgagcttcacctacatgaacagcatgctggaccccgtggtgtactacttcagcagccccagcttccccaacttcttcagcaccctgatcaacagatgcctgcagagaaagatcaccggcgagcccgacaacaacagaagcaccagcgtggagctgaccggcgaccccaacaagaccagaggcgcccccgaggccctgatcgccaacagcggcgagccctggagccccagctacctgggccccaccagcaacaaccacagcaagaagggccactgccaccaggagcccgccagcctggagaagcagctgggctgctgcatcgagtag

SEQ ID NO: 161139 - DNA, 1164 bp, Artificial Sequence
  derived and/or modified sequence
atgaatagacatcatctgcaggaccatttcctggaaattgataagaagaattgttgcgtgttcagggatgactttattgccaaagtacttcctcccgtcctgggcctcgagttcatcttcggtttactcggtaacggactggcactttggattttttgtttccatttaaagagctggaaaagttctcgcatcttcttattcaacttagcagtggcagattttttgctgatcatttgccttccattcgtcatggattactatgtgcggcggtccgactggaagttcggcgatattccatgtaggctggtcctgttcatgtttgccatgaatcgccagggctctatcatcttcttaacggtggtcgctgtggatcgctacttccgggtcgtgcacccccatcatgctctgaacaaaatcagcaactggactgcagccatcatttcatgcctcctgtggggtatcactgtcgggctcactgtccacttactcaaaaaaaaacttctgatccagaacggaactgccaacgtctgcatctctttctctatctgtcatacatttaggtggcacgaagctatgttcttactggagttctttctgccccttggtattatcctgttctgctcggctcgaataatctggtcactgagacaaaggcagatggaccgccacgcaaaaatcaagcgcgcaataacatttattatggtggtggccatcgtgttcgtgatttgtttcctcccttcagtcgtggtgcgcattcacattttttggttgttacatacaagcggaacccaaaactgtgaggtgtaccgtagcgtagacctagcattcttcatcactttaagctttacatacatgaattccatgctagacccagtggtgtattacttctctagtccttcatttcctaatttttttagcacattgatcaacagatgtctgcagaggaagatcaccggcgaaccggataataaccgcagtacaagcgtggaattaacaggcgaccctaataagaccaggggcgccccagaagccctgatagccaattccggggagccttggagcccctcttatctgggtcctacctctaataaccactccaagaaagggcattgccatcaagagcctgcctctttggagaagcagttaggatgttgtatcgaatag

SEQ ID NO: 161140 - DNA, 1164 bp, Artificial Sequence
  derived and/or modified sequence
atgaacagacaccacctgcaggaccacttcctggagattgacaagaagaactgctgcgtgttcagagatgacttcatcgccaaggtgctgccccctgtgctgggcctggagttcatcttcggcctgctgggcaatggcctggccctgtggatcttctgcttccacctgaagtcctggaagagcagccgcatcttcctgttcaacctggccgtggccgacttcctgctgatcatctgcctgccctttgtgatggactactacgtgagaagaagtgactggaagtttggagacatcccctgccgcctggtgctcttcatgtttgccatgaaccggcagggcagcatcatcttcctgactgtggtggccgtggaccgctacttccgggtggtgcacccccaccacgccctgaacaagatcagcaactggacagctgccatcatcagctgcctgctgtggggcatcaccgtgggcctgactgtgcacctgctgaagaagaagctgctgatccagaatggaacagccaacgtgtgcatctccttcagcatctgccacaccttccgctggcatgaggccatgttcctgctggagttcttcctgcccctgggcatcatcctcttctgcagcgcccgcatcatctggagcctgcggcagaggcagatggacagacatgccaagatcaagagggccatcaccttcatcatggtggtggccatcgtgtttgtgatctgcttcctgcccagcgtggtggtgcgcatccacatcttctggctgctgcacaccagcggcacccagaactgtgaggtgtacagatctgtggacctggccttcttcatcaccctgtccttcacctacatgaacagcatgctggaccctgtggtgtactacttcagcagccccagcttccccaacttcttcagcaccctcatcaaccgctgcctgcagaggaagatcaccggggagccagacaacaacagaagcacctctgtggagctgaccggggaccccaacaagaccaggggggcccctgaggccctgattgccaacagcggggagccctggagccccagctacctgggccccaccagcaacaaccacagcaagaagggccactgccaccaggagcccgccagcctggagaagcagctgggctgctgcatcgagtag

SEQ ID NO: 161141 - DNA, 2137 bp, Artificial Sequence
  derived and/or modified sequence
ttcgtagtttcctgataaccattcagtcatctatttcaacaccctgacatgacataaaggcaggcacggaaccacacgttcaccatacagacacacgccactttgctggagcattcactaggcgaggcgctccatcggactcactagctgcactcatgaatcggcaccatctgcaggatcactttctggaaatagacaagaagaactgctgtgtgttccgagatgacttcattgccaaggtgttgccgccggtgttggggctggagtttatctttgggcttctgggcaatggccttgccctgtggattttctgtttccacctcaagtcctggaaatccagccggattttcctgttcaacctggcagtagctgactttctactgatcatctgcctgccgttcgtgatggactactatgtgcggcgttcagactggaagtttggggacatcccttgccggctggtgctcttcatgtttgccatgaaccgccagggcagcatcatattcctcacggtggtggcggtagacaggtatttccgggtggtccatccccaccacgccctgaacaagatctccaattggacagcagccatcatctcttgccttctgtggggcatcactgttggcctaacagtccacctcctgaagaagaagttgctgatccagaatggcactgcaaatgtgtgcatcagcttcagcatctgccataccttccggtggcacgaagctatgttcctcctggagttcttcctgcccctgggcatcatcctgttctgctcagccagaattatctggagcctgcggcagagacaaatggaccggcatgccaagatcaagagagccatcaccttcatcatggtggtggccatcgtctttgtcatctgcttccttcccagcgtggttgtgcggatccacatcttctggctcctgcacacttcgggcacgcagaattgtgaagtgtaccgctcggtggacctggcgttctttatcactctcagcttcacctacatgaacagcatgctggaccccgtggtgtactacttctccagcccatcctttcccaacttcttctccactttgatcaaccgctgcctccagaggaagataacaggtgagccagataataaccgcagcacgagcgtcgagctcacaggggaccccaacaaaaccagaggcgctccagaggcgttaatcgccaactccggtgagccatggagcccctcttatctgggcccaacctcaaataaccattccaagaagggacattgtcaccaagaaccagcatctctggagaaacagttgggctgttgcatcgagtaatgtcactggactcggcctaagatttcctggaacttccagattcagagaatctgatttagggaaactgtggcagatgagtgggagactggttgcaaggtgtgaccgcaggaatcctggaggaacagagagtaaagcttctaggcatctgaaacttgcttcatctctgacgctcgcaggactgaagatgggcaaattgtaggcgtttctgctgagcagagttggagccagagatctacttgtgacttgttggccttcttcccacatctgcctcagactggagggggctcagctcctggggtgatatctagcctgcttgtgagctctagcagggataaggagagctgagattggagggaattgtgttgttcctggaggaagcccaggcatcattaaacaagccagtaggtcacctggcttccgtggaccaattcatctttcagacaatctttagcagaaatggactcagggaagagactcacatgctttggttagtatctgtgtttccggtgggtgtaataggggattagccccagaagggactgagctaaacagtgttattatgggaaaggaaatggcattgctgctttcaaccagcgactaatgcaatccattcctctcttgtttatagtaatctaagggttgaacagttaaaacggcttcaggatagaaagctgtttcccacctgtttgcttttaccattaaaagggaaacgtgcctctgccccacgggtagaggggtgcacgttcctcctggttccttcgcttgtgtttctgtacttaccaaaaatctaccatttcaataaattttgataggagaca

SEQ ID NO: 161142 - DNA, 1164 bp, Artificial Sequence
  derived and/or modified sequence
atgaaccggcaccacctgcaggaccacttcctggagatcgacaagaaaaattgctgcgtgtttcgggatgactttattgcaaaagttttgcctcccgtgctgggactggagtttatcttcggcttgctgggaaatggcttggctctgtggattttttgtttccatttgaagtcttggaaatcctctcgaatcttcctttttaacctagccgtggcagacttcttgctgatcatatgtctcccattcgtgatggattattatgtgcgccgcagcgattggaagttcggagacatcccatgtcgattagtcctctttatgtttgcaatgaatcggcaaggctccataattttcctgactgttgtggctgtggaccgatacttccgcgtggtgcacccccaccatgccttaaacaagatatctaattggactgccgcaattatctcttgtctgctctgggggattaccgtggggctgactgtacatctgttgaagaaaaagctgctcatccagaatggcaccgcgaatgtgtgcatatctttttctatttgccacacctttaggtggcacgaggcaatgtttttactggaattcttcctaccgttaggaatcattctcttctgttctgcgcgcattatctggtcactgcgccaacggcaaatggataggcacgctaagataaagcgggctattacttttatcatggtggtggccatcgtattcgtgatctgttttcttccatcagtggtggtgaggattcacatcttttggctcttgcacacttcaggtacgcagaattgtgaggtgtatcgttctgtggatctcgcgttctttatcactctgagcttcacctatatgaatagcatgctggatccggttgtttactacttcagctcaccttccttccccaacttcttttctacgcttatcaatagatgccttcaacgtaagattactggcgaaccggataataatagatcaacaagcgtcgaactgaccggtgatcctaataaaacacggggagcgcccgaagctcttatagcgaactccggcgaaccgtggtctccatcatatctgggcccaacgtcaaacaaccacagcaagaagggacactgtcatcaagaacccgcctccttagagaaacagttaggctgctgtattgaatag

SEQ ID NO: 161143 - DNA, 1164 bp, Artificial Sequence
  derived and/or modified sequence
atgaacaggcatcacctgcaggaccattttctcgaaatcgacaagaagaactgttgtgtgtttcgggatgattttatagcaaaggtccttccgcctgtactgggactcgagtttatctttggcctcctggggaatgggcttgcactgtggattttctgttttcacctgaagtcttggaagagcagcaggatctttttatttaatctagcagtggccgattttctcttaattatctgcctacccttcgttatggactattatgtgaggcgctccgattggaaattcggtgatatcccatgcagacttgtcctgttcatgtttgccatgaatcgccaggggtccattatatttcttactgtggtagcagtcgacagatattttagggtggttcatccacaccacgcactgaataaaatctctaactggaccgccgcaattatcagctgtctcctatggggcatcactgtcgggctcaccgtccacctcctgaagaagaaactgttgattcagaacggtactgccaacgtatgtattagcttcagcatctgtcacacatttagatggcacgaggccatgttcctcctggagttctttttgccactcggtatcattctgttctgtagtgctcgtataatttggagtctccgtcagcggcagatggatcgacacgccaagatcaagcgcgctataacttttatcatggttgtagctatcgtttttgtcatttgtttcctgccatcagttgtcgtgcggatccacatcttttggctgctgcacacctctggcacacagaactgtgaggtttacagatctgtggaccttgccttctttatcaccctgtcttttacgtatatgaattctatgctggacccagtagtctactactttagctcaccatctttccctaatttcttctccactttgatcaacaggtgcctccagagaaaaataactggggaacctgacaataatcggtctacaagcgttgaattaaccggcgacccaaataagactcgcggtgcaccagaagcattaatcgccaactctggcgagccatggtctcccagctatctgggacccacatctaataaccacagcaagaaggggcactgccaccaagaacccgctagccttgaaaaacagctcggctgctgtattgaatag

SEQ ID NO: 161144 - protein, 389 aa, Artificial Sequence
  derived and/or modified sequence
MGKMAAAVGSVATLATEPGEDAFRKLFRFYRQSRPGTADLEGVIDFSAAHAARGKGPGAQKVIKSQLNVSSVSEQNAYRAGLQPVSKWQAYGLKGYPGFIFIPNPFLPGYQWHWVKQCLKLYSQKPNVCNLDKHMSKEETQDLWEQSKEFLRYKEATKRRPRSLLEKLRWVTVGYHYNWDSKKYSADHYTPFPSDLGFLSEQVAAACGFEDFRAEAGILNYYRLDSTLGIHVDRSELDHSKPLLSFSFGQSAIFLLGGLQRDEAPTAMFMHSGDIMIMSGFSRLLNHAVPRVLPNPEGEGLPHCLEAPLPAVLPRDSMVEPCSMEDWQVCASYLKTARVNMTVRQVLATDQNFPLEPIEDEKRDISTEGFCHLDDQNSEVKRARINPDS

SEQ ID NO: 161145 - DNA, 1170 bp, Artificial Sequence
  derived and/or modified sequence
atgggaaagatggctgctgccgtcggaagtgtcgccactctagctaccgaacccggagaggacgccttccgcaaattgtttagattttataggcaaagtagacccgggactgcagatctggagggggtgatagacttcagcgctgctcatgctgcccgcggcaagggaccaggcgcccagaaagtaattaagagccaattgaatgttagtagcgtgtcagaacaaaacgcctatcgtgccggccttcaacccgtgtccaagtggcaggcttacggcctgaaaggttacccaggtttcatctttatccctaatcctttcctgcctggataccagtggcattgggtgaaacagtgccttaaactgtacagccagaaacccaacgtatgcaacttagataaacacatgagtaaggaggagacccaggatctgtgggaacaaagcaaggaattccttcgttataaagaggctaccaagaggcggccccggtctctccttgaaaagctgagatgggtgactgtagggtaccattataattgggattctaagaagtactctgctgaccactacactccatttccctctgaccttggatttctgagcgagcaggtggctgccgcttgtgggttcgaagattttcgggcagaagccggcatactcaattactaccggttggacagtacacttggcatccacgtagataggtcagaactcgatcattccaagcctttactgtccttcagcttcggacagagcgctatcttcctcctcggtgggctgcaacgagacgaggcccctaccgctatgtttatgcatagcggcgacataatgatcatgtctggctttagcaggctgctgaatcacgctgtacctcgggtcctgcccaaccccgagggcgagggcctgccccactgcctcgaggcccctttaccagccgtgctgcctcgtgacagtatggtggagccttgttcaatggaagactggcaggtctgtgcatcctacctgaagactgctcgggtcaatatgaccgtccggcaggtgttggccacggatcagaactttcccttggagcctattgaagatgagaagcgcgatatctctacagagggattttgccaccttgatgaccagaatagtgaagtcaagcgtgccagaattaaccccgacagctag

SEQ ID NO: 161146 - DNA, 1170 bp, Artificial Sequence
  derived and/or modified sequence
atgggcaagatggctgctgctgtgggctctgtggccaccctggccacagagcccggggaggatgccttcaggaagctgttccgcttctaccggcagagcaggcctggaacagctgacctggagggcgtcatcgacttctctgctgcccatgctgcccggggcaaaggacctggggcccagaaggtgatcaagagccagctgaatgtgtcctctgtgtctgagcagaatgcctaccgggccggcctgcagcctgtgtccaagtggcaggcctacggcctgaagggctacccaggcttcatcttcatccccaaccccttcctgcccggctaccagtggcactgggtgaagcagtgcctgaagctgtacagccagaagcccaacgtgtgcaacctggacaagcacatgagcaaggaggagacccaggacctgtgggagcagagcaaggagttcctgcgctacaaggaggccaccaagagaagacccaggagcctgctggagaagctgcgctgggtgacagtgggctaccactacaactgggacagcaagaagtacagcgctgaccactacacccccttccccagcgacctgggcttcctgtctgagcaggtggccgccgcctgtggctttgaggacttccgggcagaggccggcatcctgaactactaccgcctggacagcaccctgggcatccacgtggacagaagtgagctggaccacagcaagcccctgctgtccttctcctttggccagagcgccatcttcctgctgggcggcctgcagagagatgaggcccccacagccatgttcatgcacagcggggacatcatgatcatgagcggcttcagccggctgctgaaccacgctgtgccccgggtgctgcccaaccctgagggggagggcctgccccactgcctggaggcccccctgcctgctgtgctgccccgggacagcatggtggagccctgcagcatggaggactggcaggtgtgtgccagctacctgaagacagcccgggtgaacatgacagtgcggcaggtgctggccacagaccagaacttccccctggagcccattgaagatgagaagagggacatcagcacagagggcttctgccacctggatgaccagaacagcgaggtgaagagggcccgcatcaacccagacagctag

SEQ ID NO: 161147 - DNA, 2594 bp, Artificial Sequence
  derived and/or modified sequence
gggtataggccgcgagatggggaagatggcagcggccgtgggctctgtggcgactctggcgactgagcccggggaggacgcctttcggaaacttttccgcttctaccgtcagagccggcccgggaccgcagacctggaaggggtcatcgacttctcggcggcccacgcagcccgtggcaagggtcctggtgcccaaaaggtgatcaaatctcagctaaatgtgtcttctgtcagtgagcagaatgcatatagagcaggtcttcagcccgtcagcaagtggcaagcctatggactcaaaggctatcctgggtttatttttatcccaaaccccttcctcccaggttaccagtggcactgggtgaaacagtgccttaagttatattcccagaaacctaatgtatgtaacctggacaaacacatgtctaaagaagagacccaagatctgtgggaacagagcaaagagttcctgaggtataaagaagcgactaaacggagaccccgaagtttactggagaaactgcgttgggtgaccgtaggctaccattataactgggacagtaagaaatactcagcagatcattacacacctttcccttctgacctgggtttcctctcagagcaagtagccgctgcctgtggatttgaggatttccgagctgaagcagggatcctgaattactaccgcctggactccacactgggaatccacgtagacagatctgagctagatcactccaaacccttgctgtcattcagctttggacagtccgccatctttctcctgggtggtcttcaaagggatgaggcccccacggccatgtttatgcacagtggtgacatcatgataatgtcgggtttcagccgcctcttgaaccacgcagtccctcgtgtccttccaaatccagaaggggaaggcctgcctcactgcctagaggcacctctccctgctgtcctcccgagagattcaatggtagagccttgttctatggaggactggcaggtgtgtgccagctacttgaagaccgctcgtgttaacatgactgtccgacaggtcctggccacagaccagaatttccctctagaacccatcgaggatgaaaaaagagacatcagtacagaaggtttctgccatctggatgaccagaatagcgaagtaaaacgggccaggataaaccctgacagctgagacttggagatcccatcctttttactcaggcacctgcttaccgtaaatgatcatgttattgtgtattgccgtggacttcagcacccagacaagccaaaaacagagacagggaagaactcattgttgatcacactgttgccttggaacccacgcagaagtaaactcagccactttgctcagagaagtgtttgacatggtctgttcctagttacatgttggctgtaatgtatgttgagaagtcagtccaaggaggtatgttcttccacaacagccttctcagcctctgctatttcctttgaggaaggtagaagtgagtttccatgtttgcagagtatttaaatacctcagattttattaatgagaaatacagtacccctccctccactccatctggtaatttatggtaaaattgtggttctgtgaaccagctattagtctcatcttcttaactccctcaggcatcatcaaattctttgatcttctcttccacctctctggctctcatggaagaatcctttacacatgaaaacaatggaactggaaaatcttgtcttttagaaaagaaattaatcacaactatctctcttgcctaaaagataaatataggtaaacccaaggaaaggggaatttagtttctctacatgtcatttcggtctccaaactccctgttggctttttaatgcaattttaattgttggaataaaaaagtcccaagggtgttttgttactgttttctccatgaataaactcacttgattttaaattaaagatctatatctgtctttggggtttagtctatctgggattaaggtttttttttctgtttttctttgctgtattgttcatgctattgaagccctctagctgtttctgccctacaccattctgctgtgccctaagtattctttgtggctgtctcacagaagagagaacatttcttaatattccagtcactgctgttattgtctgagggtaggcagcttggaaaaatgtaggcaacaccaagttttaatctttatacccccaacaatttgactgactatatcatggtccaggttactttacatttctctggacctcggtttcctcatcataaaatgaagatactgtagactaccatcttcctaaagggatattggtatttgaaagagaattaagtgctcctttctacaaacatgatgtgccaaaattgttttattataagggctctttgaaacatcctaacttccttgtgtggaggactggctggaagcccatttggtacctactgtttgcaatgcatgttattaagtttacatgtctcctctgtcctgctctgccccttttttaaattactggcattgaatattgagttcatatggtaatagcagggtttttaaatgaataaaaattatggatttatctctta

SEQ ID NO: 161148 - DNA, 1170 bp, Artificial Sequence
  derived and/or modified sequence
atgggcaagatggccgccgccgtgggcagcgtggccaccctggccaccgagcctggagaagacgcctttcggaaactttttagattctataggcagtcaagacccgggactgcagatctagaaggagttatcgacttttctgcagcccacgcagcaagaggtaagggtccaggcgcacagaaggtcatcaagagccagcttaatgtgagtagcgttagtgaacagaacgcttaccgggccggtttacaacccgttagcaaatggcaagcgtatgggcttaagggatacccaggttttatcttcatacctaatccgtttcttcccggttaccagtggcattgggtgaagcaatgtctaaagctctacagtcaaaaaccaaacgtctgcaacttggacaagcacatgagcaaggaagagactcaagatctgtgggagcagtcaaaagaattcctaaggtataaagaggctaccaaaagaagacctcgtagcctgctggaaaaattaagatgggtgactgtcggataccactataactgggattctaaaaagtactctgcggaccattacaccccattcccgagcgatctcggctttttgtccgaacaggtggccgcagcttgtggattcgaggacttcagagccgaggccggaatactcaattattaccggctggactccacactgggcatacatgtggaccgtagtgaactcgatcactccaagcctcttctctcgttctctttcggacaaagtgctatttttttgctaggcgggctacagcgcgatgaggcacccacagccatgtttatgcatagtggggacattatgattatgtcaggatttagccggctgttaaaccacgccgtgcctagagtgctcccaaatccagagggagagggacttccccattgcctggaagcacccctccctgcagttttaccaagagactctatggtggaaccgtgtagtatggaagattggcaggtgtgcgcttcctacctgaaaacggctagggtgaatatgaccgtcagacaggttcttgctactgaccagaatttccctttggagcccattgaggacgagaaaagagatatctccactgaggggttttgccacctggacgaccagaactctgaggtcaagagggccaggattaatcctgactcctag

SEQ ID NO: 161149 - DNA, 1170 bp, Artificial Sequence
  derived and/or modified sequence
atgggcaaaatggcagccgcagtgggctctgtggctaccctggccacagagcccggagaggacgcatttagaaagctgttccgcttttaccggcagtctaggccaggcacagcagacctggaaggggtgattgatttttcagccgctcatgccgcaagggggaaggggccaggggctcaaaaggtgataaaaagccagctcaacgtgtctagcgtgtctgagcagaatgcttacagggcgggactacagccagtttcaaagtggcaggcatatgggttaaaaggctatcctgggtttatatttatacctaatccctttttgcctggctaccagtggcattgggttaagcaatgtctgaagctgtacagtcagaagcccaatgtatgtaacctggacaagcatatgtcaaaagaggagacccaggatttatgggaacagagcaaggaattcctgcggtacaaagaggcaactaagagacgccctcgaagtctgctggagaagctgcgctgggtcactgtaggataccattataactgggacagcaagaagtacagcgctgaccactacactcctttcccttctgatttgggattcctctctgaacaagtggccgcagcatgcggattcgaggatttccgcgctgaagccggaatcctcaactactaccgactagatagtacgttagggattcacgtcgatcgctctgagctagaccactctaagcccttactcagctttagttttgggcagagcgccattttcttactgggcggtctgcaaagggacgaagctccaacagccatgtttatgcacagcggcgacattatgatcatgagcggattcagccgtctcttaaatcacgccgtgcccagggttctccccaatcccgaaggcgagggcctgccacactgtctcgaggcgccattgccggcagtactgcccagagacagtatggtagagccatgctcaatggaagattggcaggtctgcgccagctatttgaagaccgccagagtaaacatgacagtgcgacaggtactcgcaaccgatcagaacttccctctggaacccattgaggatgagaagagggatatctctaccgaaggattctgtcacctcgatgatcagaactccgaggtgaagcgggcacgaatcaaccctgactcttag

SEQ ID NO: 161150 - DNA, 1170 bp, Artificial Sequence
  derived and/or modified sequence
atgggcaagatggccgccgccgtgggcagcgtggccaccctggccaccgagcccggcgaggacgccttcagaaagctgttcagattctacagacagagcagacccggcaccgccgacctggagggcgtgatcgacttcagcgccgcccacgccgccagaggcaagggccccggcgcccagaaggtgatcaagagccagctgaacgtgagcagcgtgagcgagcagaacgcctacagagccggcctgcagcccgtgagcaagtggcaggcctacggcctgaagggctaccccggcttcatcttcatccccaaccccttcctgcccggctaccagtggcactgggtgaagcagtgcctgaagctgtacagccagaagcccaacgtgtgcaacctggacaagcacatgagcaaggaggagacccaggacctgtgggagcagagcaaggagttcctgagatacaaggaggccaccaagagaagacccagaagcctgctggagaagctgagatgggtgaccgtgggctaccactacaactgggacagcaagaagtacagcgccgaccactacacccccttccccagcgacctgggcttcctgagcgagcaggtggccgccgcctgcggcttcgaggacttcagagccgaggccggcatcctgaactactacagactggacagcaccctgggcatccacgtggacagaagcgagctggaccacagcaagcccctgctgagcttcagcttcggccagagcgccatcttcctgctgggcggcctgcagagagacgaggcccccaccgccatgttcatgcacagcggcgacatcatgatcatgagcggcttcagcagactgctgaaccacgccgtgcccagagtgctgcccaaccccgagggcgagggcctgccccactgcctggaggcccccctgcccgccgtgctgcccagagacagcatggtggagccctgcagcatggaggactggcaggtgtgcgccagctacctgaagaccgccagagtgaacatgaccgtgagacaggtgctggccaccgaccagaacttccccctggagcccatcgaggacgagaagagagacatcagcaccgagggcttctgccacctggacgaccagaacagcgaggtgaagagagccagaatcaaccccgacagctag

SEQ ID NO: 161151 - protein, 144 aa, Artificial Sequence
  derived and/or modified sequence
MKSQWCRPVAMDLGVYQLRHFSISFLSSLLGTENASVRLDNSSSGASVVAIDNKIEQAMDLVKSHLMYAVREEVEVLKEQIKELIEKNSQLEQENNLLKTLASPEQLAQFQAQLQTGSPPATTQPQGTTQPPAQPASQGSGPTA

SEQ ID NO: 161152 - protein, 41 aa, Artificial Sequence
  derived and/or modified sequence
MKSQWCRPVAMDLGVYQLRHFSISFLSSLLGTENASVRLDN

SEQ ID NO: 161153 - DNA, 1791 bp, Artificial Sequence
  derived and/or modified sequence
gagcccggctgcggatctgggaagcgcctcttcacggcactgggatccgcatctgcctgggatcatcaagccctagaagctgggtttctttaaattagggctgccgttttctgtttctccctgggctgcggaaagccagaagattttatctagcttatacaaggctgctggtgttccctctttttttccacgagggtgtttttggctgcaattgcatgaaatcccaatggtgtagaccagtggcgatggatctaggagtttaccaactgagacatttttcaatttctttcttgtcatccttgctggggactgaaaacgcttctgtgagacttgataatagctcctctggtgcaagtgtggtagctattgacaacaaaatcgagcaagctatggatctagtgaaaagccatttgatgtatgcggtcagagaagaagtggaggtcctcaaagagcaaatcaaagaactaatagagaaaaattcccagctggagcaggagaacaatctgctgaagacactggccagtcctgagcagcttgcccagtttcaggcccagctgcagactggctccccccctgccaccacccagccacagggcaccacacagccccccgcccagccagcatcgcagggctcaggaccaaccgcatagctgcctatgcccccgcagaactggctgctgcgtgtgaactgaacagacggagaagatgtgctagggagaatctgcctccacagtcacccatttcattgctcgctgcgaaagagacgtgagactgacatatgccattatctcttttccagtattaaacactcatatgcttatggcttggagaaatttcttagttgggtgaattaaaggttaatccgagaattagcatggatataccgggacctcatgcagcttggcagatatctgagaaatggtttaattcatgctcaggagctgtgtgcctttccatcccttccggctccctacccctcacttccaagggttctctctcctgcttgcgcttagtgtcctacatggggttgtgaagcgatggagctcctcactggactcgcctctctcctctcctccccccaggaggaacttgaaaggagggtaaaaagactaaaatgagggggaacagagttcactgtacaaatttgacaactgtcaccaaaattcataaaaaacaatagtactgtgcctctttcttctcaaacaatggatgacacaaaactatgagagtgacaaaatggtgacaggtagctgggacctaggctatcttaccatgaaggttgttttgcttattgtatatttgtgtatgtagtgtaactattttgtacaatagaggactgtaactactatttaggttgtacagattgaaatttagttgtttcattggctgtctgaggaggtgtggacttttatatatagatctacataaaaactgctacatgacaaaaaccacacctaaagaaattttaagaatttggcacagttactcactttgtgtaatctgaaatctagctgctgaatacgctgaagtaaatccttgttcactgaagtctttcaattgagctggttgaatactttgaaaaatgctcagttctaactaatgaaatggatttcccagtaggggtttctgcatatcacctgtatagtagttatatgcatatgtttctgtgcatgttctctacacaattgtaaggtgtcactgtatttaactgttgcacttgtcaactttcaataaagcatataaatgttgataaaaaaaaaaaaaaaaaaaaaaaaaaaaaaaaaaaaaaaa

SEQ ID NO: 161154 - DNA, 435 bp, Artificial Sequence
  derived and/or modified sequence
atgaagagccagtggtgcagacccgtggccatggacctgggcgtgtaccagctgagacacttcagcatcagcttcctgagcagcctgctgggcaccgagaacgccagcgtgagactggacaacagcagcagcggcgccagcgtggtggccatcgacaacaagatcgagcaggccatggacctggtgaagagccacctgatgtacgccgtgagagaggaggtggaggtgctgaaggagcagatcaaggagctgatcgagaagaacagccagctggagcaggagaacaacctgctgaagaccctggccagccccgagcagctggcccagttccaggcccagctgcagaccggcagcccccccgccaccacccagccccagggcaccacccagccccccgcccagcccgccagccagggcagcggccccaccgcctag

SEQ ID NO: 161155 - DNA, 126 bp, Artificial Sequence
  derived and/or modified sequence
atgaagagccagtggtgcagacccgtggccatggacctgggcgtgtaccagctgagacacttcagcatcagcttcctgagcagcctgctgggcaccgagaacgccagcgtgagactggacaactag

SEQ ID NO: 161156 - DNA, 435 bp, Artificial Sequence
  derived and/or modified sequence
atgaaatcccagtggtgcaggcccgtggcgatggacttgggcgtgtatcagctccgccacttttctataagtttcttgtcctcactactcggcacggagaacgcttccgtgcggctagacaactcaagcagcggagcatccgtggtcgccattgacaataagattgagcaggctatggatctggtcaagtcccatcttatgtatgcggtgcgcgaggaagttgaagtgctcaaagaacagatcaaagagttgatcgagaagaacagccagctggagcaagagaataacctgcttaagactctggctagccccgagcagctcgcccagttccaggcgcagctgcagacaggtagcccgccagctacgactcaaccgcaaggcacaacccaacccccagcccagcctgccagccaaggctctggcccaacagcatag

SEQ ID NO: 161157 - DNA, 126 bp, Artificial Sequence
  derived and/or modified sequence
atgaagtcacagtggtgccgcccggtcgccatggacctcggagtgtaccagctgagacatttctcaatctcctttttgtctagcctgcttggtacagagaacgcctccgtgaggttggacaattag

SEQ ID NO: 161158 - DNA, 435 bp, Artificial Sequence
  derived and/or modified sequence
atgaagagccagtggtgcaggcctgtggccatggacctgggcgtgtaccagctgcggcacttcagcatctccttcctgagcagcctgctgggcacagaaaatgcctctgtgcggctggacaacagcagcagcggggcctctgtggtggccatcgacaacaagattgagcaggccatggacctggtgaagagccacctgatgtatgctgtgcgggaggaggtggaggtgctgaaggagcagatcaaggagctgattgagaagaacagccagctggagcaggagaacaacctgctgaagaccctggccagccctgagcagctggcccagttccaggcccagctgcagacaggcagccccccagccaccacccagccccagggcaccacccagcccccagcccagcctgccagccagggcagcggccccacagcctag

SEQ ID NO: 161159 - DNA, 126 bp, Artificial Sequence
  derived and/or modified sequence
atgaagagccagtggtgcaggcctgtggccatggacctgggcgtgtaccagctgcggcacttcagcatctccttcctgagcagcctgctgggcacagaaaatgcctctgtgcggctggacaactag

SEQ ID NO: 161160 - DNA, 435 bp, Artificial Sequence
  derived and/or modified sequence
atgaagagccagtggtgccggcccgtggccatggacctgggcgtgtaccaactcagacattttagtatttctttcttatcatctcttctaggcacggaaaacgcatcagttaggttagacaatagcagcagtggcgcctcggttgttgcgattgacaataaaatcgaacaggctatggatttggttaagtctcatctgatgtacgccgtgagggaggaggtagaggtccttaaagagcaaataaaggagctaatcgaaaaaaactcccagctggagcaggagaataatttgcttaaaacgcttgctagcccagaacagcttgcccagttccaggctcaactccaaactggttctccacccgccacgacgcagccccagggaacgacgcagccgcccgctcaacctgcatcccagggatccgggcctaccgcttag

SEQ ID NO: 161161 - DNA, 126 bp, Artificial Sequence
  derived and/or modified sequence
atgaagagccagtggtgccggcccgtggccatggacctgggcgtgtaccagctccgccacttctccatatcattcctgtcatcgctgctcggcaccgagaacgcgtctgtacgcctggacaactag

SEQ ID NO: 161162 - DNA, 435 bp, Artificial Sequence
  derived and/or modified sequence
atgaaaagccagtggtgtcggcctgtggccatggacctgggagtgtatcaattgaggcacttttccatcagtttcttgtctagcctactcggtacagagaatgccagtgttcggctagacaattcgtcatccggtgccagcgtcgttgccatcgacaacaaaattgaacaagccatggaccttgtaaagtctcatcttatgtatgccgtccgcgaggaagtggaggttctgaaggagcagatcaaagaactgatcgagaaaaactcccagcttgaacaagagaacaacctcctgaagacactcgcctctcctgagcaactggcccagttccaggctcagttgcaaactggatcacccccagccaccacccaaccacaggggacgacccagccacctgctcagcctgcttcccagggcagtgggcctacagcttag

SEQ ID NO: 161163 - DNA, 126 bp, Artificial Sequence
  derived and/or modified sequence
atgaagagtcagtggtgtagacccgtcgcaatggatctcggtgtataccagctcaggcacttctcaatttcctttctgagctctcttctcggcaccgagaatgcctccgtgaggctcgacaattag

SEQ ID NO: 161164 - DNA, 1749 bp, Artificial Sequence
  derived and/or modified sequence
tggagcccggctgcggatctgggaagcgcctcttcacggcactgggatccgcatctgcctgggatcatcaagccctagaagctgggtttctttaaattagggctgccgttttctgtttctccctgggctgcggaaagccagaagattttatctagcttatacaaggctgctggtgttccctctttttttccacgagggtgtttttggctgcaattgcatgaaatcccaatggtgtagaccagtggcgatggatctaggagtttaccaactgagacatttttcaatttctttcttgtcatccttgctggggactgaaaacgcttctgtgagacttgataatagctcctctggtgcaagtgtggtagctattgacaacaaaatcgagcaagctatggatctagtgaaaagccatttgatgtatgcggtcagagaagaagtggaggtcctcaaagagcaaatcaaagaactaatagagaaaaattcccagctggagcaggagaacaatctgctgaagacactggccagtcctgagcagcttgcccagtttcaggcccagctgcagactggctccccccctgccaccacccagccacagggcaccacacagccccccgcccagccagcatcgcagggctcaggaccaaccgcatagctgcctatgcccccgcagaactggctgctgcgtgtgaactgaacagacggagaagatgtgctagggagaatctgcctccacagtcacccatttcattgctcgctgcgaaagagacgtgagactgacatatgccattatctcttttccagtattaaacactcatatgcttatggcttggagaaatttcttagttgggtgaattaaaggttaatccgagaattagcatggatataccgggacctcatgcagcttggcagatatctgagaaatggtttaattcatgctcaggagctgtgtgcctttccatcccttccggctccctacccctcacttccaagggttctctctcctgcttgcgcttagtgtcctacatggggttgtgaagcgatggagctcctcactggactcgcctctctcctctcctccccccaggaggaacttgaaaggagggtaaaaagactaaaatgagggggaacagagttcactgtacaaatttgacaactgtcaccaaaattcataaaaaacaatagtactgtgcctctttcttctcaaacaatggatgacacaaaactatgagagtgacaaaatggtgacaggtagctgggacctaggctatcttaccatgaaggttgttttgcttattgtatatttgtgtatgtagtgtaactattttgtacaatagaggactgtaactactatttaggttgtacagattgaaatttagttgtttcattggctgtctgaggaggtgtggacttttatatatagatctacataaaaactgctacatgacaaaaaccacacctaaagaaattttaagaatttggcacagttactcactttgtgtaatctgaaatctagctgctgaatacgctgaagtaaatccttgttcactgaagtctttcaattgagctggttgaatactttgaaaaatgctcagttctaactaatgaaatggatttcccagtaggggtttctgcatatcacctgtatagtagttatatgcatatgtttctgtgcatgttctctacacaattgtaaggtgtcactgtatttaactgttgcacttgtcaactttcaataaagcatataaatgt

SEQ ID NO: 161165 - DNA, 349 bp, Artificial Sequence
  derived and/or modified sequence
aagcttttcctatagtctagtgataatcctgcttaccgctgccggtaagaactagataattgaaatcaagacactcgaagtcttacagtggtgggactgggcatgcccagtagctcagacggttcgggttacaaataggaagctttcgccgttaagcagccgcgggacacagctccggggaccggggtctgactcccttaaacggtgtttttggctgcaattgcatgaaatcccaatggtgtagaccagtggcgatggatctaggagtttaccaactgagacatttttcaatttctttcttgtcatccttgctggggactgaaaacgcttctgtgagacttgataatag

SEQ ID NO: 161166 - protein, 336 aa, Artificial Sequence
  derived and/or modified sequence
MKKEHVLHCQFSAWYPFFRGVTIKSVILPLPQNVKDYLLDDGTLVVSGRDDPPTHSQPDSDDEAEEIQWSDDENTATLTAPEFPEFATKVQEAINSLGGSVFPKLNWSAPRDAYWIAMNSSLKCKTLSDIFLLFKSSDFITRDFTQPFIHCTDDSPDPCIEYELVLRKWCELIPGAEFRCFVKENKLIGISQRDYTQYYDHISKQKEEIRRCIQDFFKKHIQYKFLDEDFVFDIYRDSRGKVWLIDFNPFGEVTDSLLFTWEELISENNLNGDFSEVDAQEQDSPAFRCTNSEVTVQPSPYLSYRLPKDFVDLSTGEDAHKLIDFLKLKRNQQEDD

SEQ ID NO: 161167 - protein, 295 aa, Artificial Sequence
  derived and/or modified sequence
MKKEHVLHCQFSAWYPFFRGVTIKSVILPLPQNVKDYLLDDGTLVVSGRDDPPTHSQPDSDDEAEEIQWSDDENTATLTAPEFPEFATKVQEAINSLGGSVFPKLNWSAPRDAYWIAMNSSLKCKTLSDIFLLFKSSDFITRDFTQPFIHCTDDSPDPCIEYELVLRKWCELIPGAEFRCFVKENKLIVVFDIYRDSRGKVWLIDFNPFGEVTDSLLFTWEELISENNLNGDFSEVDAQEQDSPAFRCTNSEVTVQPSPYLSYRLPKDFVDLSTGEDAHKLIDFLKLKRNQQEDD

SEQ ID NO: 161168 - protein, 144 aa, Artificial Sequence
  derived and/or modified sequence
  misc_feature (1)..(1): Xaa can be any naturally occurring amino acid
XFIHCTDDSPDPCIEYELVLRKWCELIPGAEFRCFVKENKLIGISQRDYTQYYDHISKQKEEIRRCIQDFFKKHIQYKFLDEDFVFDIYRDSRGKVWLIDFNPFGEVTDSLLFTWEELISENNLNGDFSEVDAQEQKRNQQEDD

SEQ ID NO: 161169 - protein, 313 aa, Artificial Sequence
  derived and/or modified sequence
TLVVSGRDDPPTHSQPDSDDEAEEIQWSDDENTATLTAPEFPEFATKVQEAINSLGGSVFPKLNWSAPRDAYWIAMNSSLKCKTLSDIFLLFKSSDFITRDFTQPFIHCTDDSPDPCIEYELVLRKWCELIPGAEFRCFVKENKLIGISQRDYTQYYDHISKQKEEIRRCIQDFFKKHIQYKFLDEDFVFDIYRDSRDSPAFRCTNSEVTVQPSPYLSYRLPKDFVDLSTGEDAHKLIDKSAGGRLMSVLELEKRRPRPTAPGAAHQPQLPADPDAGGPSSVDISHFLYSCTFTWGKKRRDFATCKNNIINRS

SEQ ID NO: 161170 - DNA, 888 bp, Artificial Sequence
  derived and/or modified sequence
atgaagaaggagcacgtgctgcactgccagttcagcgcctggtaccccttcttcagaggcgtgaccatcaagagcgtgatcctgcccctgccccagaacgtgaaggactacctgctggacgacggcaccctggtggtgagcggcagagacgacccccccacccacagccagcccgacagcgacgacgaggccgaggagatccagtggagcgacgacgagaacaccgccaccctgaccgcccccgagttccccgagttcgccaccaaggtgcaggaggccatcaacagcctgggcggcagcgtgttccccaagctgaactggagcgcccccagagacgcctactggatcgccatgaacagcagcctgaagtgcaagaccctgagcgacatcttcctgctgttcaagagcagcgacttcatcaccagagacttcacccagcccttcatccactgcaccgacgacagccccgacccctgcatcgagtacgagctggtgctgagaaagtggtgcgagctgatccccggcgccgagttcagatgcttcgtgaaggagaacaagctgatcgtggtgttcgacatctacagagacagcagaggcaaggtgtggctgatcgacttcaaccccttcggcgaggtgaccgacagcctgctgttcacctgggaggagctgatcagcgagaacaacctgaacggcgacttcagcgaggtggacgcccaggagcaggacagccccgccttcagatgcaccaacagcgaggtgaccgtgcagcccagcccctacctgagctacagactgcccaaggacttcgtggacctgagcaccggcgaggacgcccacaagctgatcgacttcctgaagctgaagagaaaccagcaggaggacgactag

SEQ ID NO: 161171 - DNA, 942 bp, Artificial Sequence
  derived and/or modified sequence
accctggtggtgagcggcagagacgacccccccacccacagccagcccgacagcgacgacgaggccgaggagatccagtggagcgacgacgagaacaccgccaccctgaccgcccccgagttccccgagttcgccaccaaggtgcaggaggccatcaacagcctgggcggcagcgtgttccccaagctgaactggagcgcccccagagacgcctactggatcgccatgaacagcagcctgaagtgcaagaccctgagcgacatcttcctgctgttcaagagcagcgacttcatcaccagagacttcacccagcccttcatccactgcaccgacgacagccccgacccctgcatcgagtacgagctggtgctgagaaagtggtgcgagctgatccccggcgccgagttcagatgcttcgtgaaggagaacaagctgatcggcatcagccagagagactacacccagtactacgaccacatcagcaagcagaaggaggagatcagaagatgcatccaggacttcttcaagaagcacatccagtacaagttcctggacgaggacttcgtgttcgacatctacagagacagcagagacagccccgccttcagatgcaccaacagcgaggtgaccgtgcagcccagcccctacctgagctacagactgcccaaggacttcgtggacctgagcaccggcgaggacgcccacaagctgatcgacaagagcgccggcggcagactgatgagcgtgctggagctggagaagagaagacccagacccaccgcccccggcgccgcccaccagccccagctgcccgccgaccccgacgccggcggccccagcagcgtggacatcagccacttcctgtacagctgcaccttcacctggggcaagaagagaagagacttcgccacctgcaagaacaacatcatcaacagaagctag

SEQ ID NO: 161172 - DNA, 1011 bp, Artificial Sequence
  derived and/or modified sequence
atgaagaaagagcacgttcttcactgccagttcagtgcctggtatcctttctttcgtggcgtcaccattaaaagcgtgattctccccctaccacagaatgtgaaggattacctgctcgacgatggtaccctagtagtgtcaggaagagacgatcctcctacacatagtcaacctgactctgatgatgaagccgaggaaattcaatggtccgacgacgaaaacacagcaactctgacagctccggaatttcccgaattcgctaccaaagttcaggaggccattaacagcctggggggctccgtctttccaaaattaaattggtccgcccccagagacgcctactggatcgcgatgaactccagtctgaaatgcaaaaccctgtctgatatttttttactgtttaagagtagcgactttataacccgcgactttacgcaaccttttatccactgcactgatgattcacctgatccctgtatagagtatgagctggtgcttagaaagtggtgtgagctgatccccggggccgaattcagatgttttgtcaaggagaataaactgattggcataagccaaagggactacacgcagtactacgatcacatcagtaaacagaaagaggaaattagaagatgtatacaggacttctttaagaagcacatccaatataagttcctggatgaggatttcgtgttcgacatttatcgggacagcagagggaaggtttggcttattgattttaatccctttggagaggtgaccgatagcctgctttttacatgggaggaactgatatctgaaaacaaccttaacggtgacttttcggaagtagatgcacaagaacaagattctccggcctttagatgcacgaactccgaggtaactgttcagcctagcccctacctgtcctatcgactgcccaaggactttgtggaccttagtaccggtgaagacgcacacaagctgattgatttcctgaaactgaaaagaaaccaacaggaagatgattag

SEQ ID NO: 161173 - DNA, 888 bp, Artificial Sequence
  derived and/or modified sequence
atgaaaaaagagcatgtccttcactgccagttctcggcatggtacccattcttcagaggcgtgaccatcaagagcgttattctccccctgccccagaatgtgaaagactatctcctggacgacggaacactcgttgtttccggcagggacgaccctcccacacacagccagcctgatagcgacgacgaggccgaagaaatccaatggtcggacgacgaaaacacagccacgctcacggcccctgagttcccagagtttgcaacgaaggtccaagaagcaatcaattctcttggagggtcagtgtttccgaagcttaattggagcgcaccaagggatgcttactggatcgctatgaactcaagtctgaaatgtaagaccctctctgatatatttctcctctttaagtctagcgatttcatcacaagggacttcactcagcctttcatccactgcaccgatgattcccccgacccttgcattgaatatgagctggtcttacgaaaatggtgtgaactgataccaggagccgagtttcggtgttttgtgaaggagaacaaactcatagttgtattcgatatatatcgcgattcacgggggaaggtctggctgattgatttcaaccccttcggtgaggtcaccgactctctcctgtttacctgggaagaacttatttctgagaacaaccttaatggagactttagtgaggtggacgcacaggagcaagactctcctgcctttcgttgcacaaatagcgaggtcactgtgcagccatcaccatacctgtcatatagattgcctaaggacttcgtcgacctgagcaccggggaagacgcacacaagctcattgactttcttaaactcaaaagaaaccagcaggaagacgactag

SEQ ID NO: 161174 - DNA, 942 bp, Artificial Sequence
  derived and/or modified sequence
accctggtggtctcaggtcgggatgatccaccaacacacagtcagcccgactcggatgacgaggctgaagagatccagtggagcgatgacgaaaatacagccactctaaccgctcctgagttcccggaattcgccacaaaggtgcaggaggcaattaactccctcggggggtcggtgttccccaaacttaactggtcagctccacgggacgcatactggatcgcaatgaactccagtctgaagtgtaagactttatcagatatctttctgctgtttaaatccagtgatttcatcactcgagattttacccagccctttatccattgtactgacgacagccccgatccttgcatcgaatacgagttagttctgagaaagtggtgcgagttgatccccggagctgagttcagatgcttcgtcaaggagaacaaattgattggtatatcccagcgcgattatacacagtactacgatcatatctccaagcaaaaggaagaaattcggcgctgcattcaggacttctttaaaaaacatattcagtataagtttctcgacgaggatttcgtctttgatatctatagagacagccgcgactctcccgcattccgctgcacaaattctgaagttaccgtgcagccctcaccttacctctcctatcgcctgcctaaggactttgtcgatctgtcaaccggggaggatgcgcataagttgattgataagtccgcgggcgggcgtctgatgagtgtcctggagctcgaaaaacggagacctcgtcccacagcgccaggagcagcccaccagccgcagttacctgctgatcccgatgccggcggtccatcttccgttgacatctcccactttctttactcctgcacattcacctggggaaagaagaggcgtgacttcgccacatgcaagaataacatcataaatcgtagttag

SEQ ID NO: 161175 - DNA, 1011 bp, Artificial Sequence
  derived and/or modified sequence
atgaagaaggagcacgtgctgcactgccagttcagcgcctggtaccccttcttccggggcgtgaccatcaagagcgtcatcctgcccctgccccagaatgtgaaggactacctgctggatgatggcaccctggtggtgtctggaagagatgacccccccacccacagccagcctgacagtgatgatgaggccgaggagatccagtggagcgatgatgaaaatacagccaccctgacagcccctgagttccctgagtttgccaccaaggtgcaggaggccatcaacagcctgggcggcagcgtcttccccaagctgaactggagcgcccccagagatgcctactggatcgccatgaacagcagcctgaagtgcaagaccctgagtgacatcttcctgctcttcaagagcagtgacttcatcacccgggacttcacccagcccttcatccactgcacagatgacagcccagacccctgcatcgagtatgagctggtgctgaggaagtggtgtgagctgatccctggagctgagttccgctgctttgtgaaggagaacaagctgattggcatcagccagagggactacacccagtactatgaccacatcagcaagcagaaggaggagatccgccgctgcatccaggacttcttcaagaagcacatccagtacaagttcctggatgaggactttgtgtttgacatctacagagacagccggggcaaggtgtggctgattgacttcaacccctttggagaggtgacagacagcctgctcttcacctgggaggagctgatcagcgagaacaacctgaatggagacttcagcgaggtggatgcccaggagcaggacagccctgccttccgctgcaccaacagcgaggtgacagtgcagcccagcccctacctgagctaccgcctgcccaaggactttgtggacctgagcactggagaagatgcccacaagctgattgacttcctgaagctgaagaggaaccagcaggaggatgactag

SEQ ID NO: 161176 - DNA, 888 bp, Artificial Sequence
  derived and/or modified sequence
atgaagaaggagcacgtgctgcactgccagttcagcgcctggtaccccttcttccggggcgtgaccatcaagagcgtcatcctgcccctgccccagaatgtgaaggactacctgctggatgatggcaccctggtggtgtctggaagagatgacccccccacccacagccagcctgacagtgatgatgaggccgaggagatccagtggagcgatgatgaaaatacagccaccctgacagcccctgagttccctgagtttgccaccaaggtgcaggaggccatcaacagcctgggcggcagcgtcttccccaagctgaactggagcgcccccagagatgcctactggatcgccatgaacagcagcctgaagtgcaagaccctgagtgacatcttcctgctcttcaagagcagtgacttcatcacccgggacttcacccagcccttcatccactgcacagatgacagcccagacccctgcatcgagtatgagctggtgctgaggaagtggtgtgagctgatccctggagctgagttccgctgctttgtgaaggagaacaagctgattgtggtgtttgacatctacagagacagccggggcaaggtgtggctgattgacttcaacccctttggagaggtgacagacagcctgctcttcacctgggaggagctgatcagcgagaacaacctgaatggagacttcagcgaggtggatgcccaggagcaggacagccctgccttccgctgcaccaacagcgaggtgacagtgcagcccagcccctacctgagctaccgcctgcccaaggactttgtggacctgagcactggagaagatgcccacaagctgattgacttcctgaagctgaagaggaaccagcaggaggatgactag

SEQ ID NO: 161177 - DNA, 933 bp, Artificial Sequence
  derived and/or modified sequence
gcagcagcggcggcagctggaggatgaagaaggagcatgtgcttcactgccagttctccgcgtggtacccgttcttccgaggcgttaccatcaagagtgtcattcttccacttcctcagaatgtgaaggattatttactcgatgatggaactctggtggtttcaggaagggatgatccaccaacacattctcagccagacagtgatgatgaagcagaagaaatacagtggtctgatgatgagaacacagccacgcttacggcaccagaatttcctgagtttgccactaaagtccaggaagctatcaattccctcgggggcagtgtctttcctaagcttaattggagtgccccaagggatgcgtattggatagcaatgaatagttctctgaaatgtaaaaccctcagcgacatctttctgcttttcaagagttccgatttcatcactcgtgacttcactcagccgtttattcattgtactgatgattctccagatccatgtatagaatatgagctcgttctccgaaaatggtgtgaattgattcctggggctgagtttcgatgttttgtcaaggaaaacaagcttattgttgtgttcgatatatacagagacagtagggggaaggtgtggctcattgactttaatccatttggtgaagtcacagattcactgctgttcacctgggaagaactgatatctgagaacaacttaaacggcgattttagtgaagttgacgctcaagagcaggattccccagctttccgttgcacaaacagtgaagtgacagtccagcccagcccctatttgagttaccggctacccaaggactttgtagacctctctactggggaggacgctcacaagctaatagacttccttaagctgaagagaaatcagcaggaggacgactgatgagcgtactggaactggagaa

SEQ ID NO: 161178 - DNA, 942 bp, Artificial Sequence
  derived and/or modified sequence
accctggtggtgtctggaagagatgacccccccacccacagccagcctgacagtgatgatgaggccgaggagatccagtggagcgatgatgaaaatacagccaccctgacagcccctgagttccctgagtttgccaccaaggtgcaggaggccatcaacagcctgggcggcagcgtcttccccaagctgaactggagcgcccccagagatgcctactggatcgccatgaacagcagcctgaagtgcaagaccctgagtgacatcttcctgctcttcaagagcagtgacttcatcacccgggacttcacccagcccttcatccactgcacagatgacagcccagacccctgcatcgagtatgagctggtgctgaggaagtggtgtgagctgatccctggagctgagttccgctgctttgtgaaggagaacaagctgattggcatcagccagagggactacacccagtactatgaccacatcagcaagcagaaggaggagatccgccgctgcatccaggacttcttcaagaagcacatccagtacaagttcctggatgaggactttgtgtttgacatctacagagacagccgggacagccctgccttccgctgcaccaacagcgaggtgacagtgcagcccagcccctacctgagctaccgcctgcccaaggactttgtggacctgagcactggagaagatgcccacaagctgattgacaagtctgctgggggccgcctgatgtctgtgctggagctggagaagagaagaccccggcccacagcccctggggccgcccaccagccccagctgcctgctgaccctgatgctgggggccccagctctgtggacatcagccacttcctgtacagctgcaccttcacctggggcaagaagagaagagactttgccacctgcaagaacaacatcatcaacagaagctag

SEQ ID NO: 161179 - DNA, 1011 bp, Artificial Sequence
  derived and/or modified sequence
atgaagaaggagcacgtgctgcactgccagttcagcgcctggtaccccttttttaggggagtgacaataaagagtgtcattctacctctcccacaaaacgtgaaagattacctcctggacgatggcaccttggttgtcagcggcagggacgatccacctacccacagtcagcccgacagcgatgacgaggccgaagaaattcaatggagtgatgatgagaataccgctacattgacagctcccgagttcccagaattcgccaccaaagtccaggaagccattaattccctggggggaagcgttttccccaaactgaattggtctgcccctcgggatgcctattggattgccatgaattcctccctgaagtgtaaaaccctctccgacatcttcctgctctttaagtcctctgatttcatcactcgcgacttcacccagccctttatccactgcacagatgattcaccggacccgtgtatagagtatgagctggtgctccggaaatggtgcgaattgatccccggcgcagagttccggtgcttcgttaaggagaacaagttgattggaatctctcagcgcgactacacccagtactacgaccacatttccaagcagaaagaggagatcagacggtgtatccaggacttcttcaaaaagcacatccagtacaaattcctggacgaggatttcgtatttgacatctatagggattcaagaggaaaagtatggttgatcgactttaaccccttcggcgaagtcacagattcactcctgtttacctgggaggaactgatcagcgagaataatctgaatggagacttctcggaagtagacgcccaggagcaggacagtcctgcgttcaggtgcacaaatagcgaagtgacagtccagccgtccccctacctgagttatagactgcctaaggattttgtggacttatccaccggcgaggatgcccacaagctgatagatttcctgaaactgaagaggaatcagcaggaagatgactag

SEQ ID NO: 161180 - DNA, 888 bp, Artificial Sequence
  derived and/or modified sequence
atgaagaaggagcacgtgctgcactgccagttcagcgcctggtacccatttttccggggtgtgactatcaagtcagtgatcctgcctctgccccagaacgtgaaagattacctgctcgacgatggaactcttgtagttagcggacgtgacgacccaccaacgcatagccagcctgactcggacgacgaggcggaagaaatccagtggagtgatgacgagaacaccgctacactgaccgccccagaatttcctgaattcgccaccaaggttcaggaggccatcaattcgctagggggaagcgtgttcccgaagctgaactggtccgctccaagggatgcctactggatagccatgaactcctcactaaagtgcaagacccttagcgacatcttcctgctttttaagagcagcgactttatcaccagggattttacccagccattcattcactgtactgatgatagccctgacccttgcatcgagtacgagttagtcttaaggaaatggtgcgaactcataccaggagcagaattccggtgctttgtgaaggaaaataagctgatcgtggtgttcgatatatatagggactcccgtggaaaggtttggctgatcgactttaatccttttggagaagtgactgactcactgctgtttacctgggaggaactaatcagcgaaaacaacctgaatggtgacttcagcgaggtggatgctcaggagcaggactcccccgcctttcgctgtacgaattctgaggtgacagtgcagccatctccatatctttcttaccggttgcctaaagatttcgtggacctatcaacaggggaggacgcccataagctcattgacttcttgaagttaaagcgcaaccaacaggaggatgactag

SEQ ID NO: 161181 - DNA, 942 bp, Artificial Sequence
  derived and/or modified sequence
accctggtggtgagcggccgggacgacccccccacccacagccagcccgactcagatgatgaagctgaagagatacagtggtccgacgatgagaacacagcaacactcaccgctccagaatttcccgagttcgcgaccaaagtgcaggaggcgatcaattccctgggcggctctgtctttccaaagctgaattggtccgccccacgcgatgcttactggatcgccatgaactcctcgctcaagtgcaagacactgagtgatatttttttgctttttaagtcttcagatttcatcacacgcgacttcactcagccatttattcattgtaccgacgactctcctgatccctgtatcgagtatgagctggtcctgaggaaatggtgcgaactgatacccggggccgagtttcgctgctttgtgaaggagaataagctgattggaattagccagcgcgattatacacagtactatgaccatatatccaaacagaaggaggagatacggaggtgcatacaggacttctttaagaagcacatacagtataagtttttggatgaagattttgtgtttgatatctatagagacagtagagattcaccagcttttagatgtactaactcagaggtaaccgttcaaccctccccgtacctctcctacagacttcctaaagattttgtcgacctgagcacaggagaagacgcacacaaactaatcgataaaagcgcaggtggacggcttatgtcagtcctggaactcgaaaaacgcagacctcggccaacagccccgggagccgctcaccagcctcaactacctgcagacccagacgccggaggaccatcttctgtagacatttcgcactttctgtacagttgcacctttacctggggcaagaagcggagggacttcgctacatgcaagaataacattatcaatcggagttag

SEQ ID NO: 161182 - DNA, 1011 bp, Artificial Sequence
  derived and/or modified sequence
atgaagaaggagcacgtactccattgccaattctcagcatggtatcccttcttccgcggtgtgactatcaagtctgtcattctcccactgccgcagaatgtgaaggattatctgctggacgacggcaccctggtggtgtccggaagggacgatccacctacccacagccaaccagattcggatgacgaggctgaggaaatccaatggtccgacgatgaaaatacagccacactcactgcccctgaattcccagagttcgcaacaaaggtgcaggaggctatcaactctctcggtggctcagtatttcctaaactgaactggtccgcccctcgtgatgcgtattggattgccatgaactccagcttaaaatgcaaaactctatccgatatcttcctcctgtttaagtcttccgattttatcacacgcgatttcacgcagccatttatccattgtactgatgattcaccagatccttgcatagagtatgagttagtgctgcgtaaatggtgcgaacttatccctggtgcggagttccggtgcttcgtgaaggagaacaagctgatcggcattagccagagggattatacccagtattatgaccatatctccaaacaaaaagaagaaattcgaaggtgcatccaagacttctttaagaaacacatccagtataaattcctggatgaggactttgtgtttgatatatacagggattctcgcggaaaggtgtggctgatcgactttaatccattcggagaagtgaccgactctttgcttttcacctgggaggaacttatttctgagaacaatctgaacggggacttctcagaggtggacgctcaagaacaggatagcccagcatttcgctgtacaaatagcgaagtcaccgttcagccttctccttacctatcctatagactaccaaaggattttgtcgacctgtcaaccggggaagacgctcacaagttgatcgattttcttaagttaaaacggaatcaacaggaagacgactag

SEQ ID NO: 161183 - DNA, 888 bp, Artificial Sequence
  derived and/or modified sequence
atgaaaaaagagcacgttctgcactgccaattcagtgcctggtaccctttcttccggggagtgaccatcaaatccgtaatcctcccactgcctcagaacgtgaaggactacttgcttgatgatggcacactggtagtgtcagggagggatgatcctcccacccactcccagcctgattccgatgacgaggctgaggaaatccagtggtctgacgatgagaacactgctaccctaacagctcccgagttcccagagtttgccactaaggtccaggaggctataaacagtctgggcggatcggtttttcccaagttaaattggagtgcccctagggatgcctactggattgctatgaacagttccttaaagtgcaagaccctgagcgacatttttctgctatttaaatccagtgacttcatcacaagggacttcacccaacctttcattcactgtactgacgattcaccggatccctgtatcgaatacgaactggtcctccggaagtggtgtgaactgatccctggggcagagttccgttgctttgtcaaggagaataaactgatcgtcgtgtttgacatttacagggactccaggggtaaggtctggctgatcgatttcaatcctttcggcgaggtgacagacagcctgttatttacttgggaagaattgatcagcgagaacaatttaaatggggacttctctgaagtggacgcccaggaacaggattcgccagcgtttcggtgcacaaatagcgaagtcactgttcagccttcaccctatctgtcttatcgcctgcctaaagactttgtagatctaagcaccggagaagacgctcacaaactgatcgacttcttgaagcttaagcggaatcagcaggaggatgactag

SEQ ID NO: 161184 - DNA, 942 bp, Artificial Sequence
  derived and/or modified sequence
accttggttgtgtcaggtagagacgaccctcccacacactctcaacccgactcagatgacgaggctgaggagatccagtggagcgatgacgaaaataccgccacactcaccgcaccagagttcccggagttcgccacaaaagtgcaagaggctatcaactcactcgggggaagcgtgtttcctaagctgaattggagtgctccgcgagatgcctactggattgccatgaattcttctctcaagtgtaaaaccctatccgatatattcttattattcaagtctagcgacttcatcacacgtgatttcactcagccttttatacactgcactgacgatagtccagatccctgtatcgagtacgagctggtgctgaggaagtggtgtgagttgattccgggagcagaattccgctgtttcgtgaaagaaaataagcttattggcatcagtcagcgagattacacccaatattacgaccacatttctaaacagaaagaggagatcaggagatgtatccaggatttctttaagaagcacatccagtacaaattcctggatgaggacttcgtattcgatatttatagggattccagggactcaccagctttccgatgtacaaactccgaagtgactgtgcagcccagcccctacctgtcgtatcggctgccaaaggacttcgtggacttgtctacaggggaggatgcacacaaactgatcgataagtccgccggtgggagactcatgtccgtgttagaactggagaagaggcggcctcgccctaccgcccctggagcagcccatcagccccagcttcccgctgacccggatgcaggcggtcccagctccgtggatatttcccacttcctctatagctgcacttttacctggggtaagaagaggagggactttgccacgtgcaaaaataacatcatcaacaggtcttag

SEQ ID NO: 161185 - DNA, 991 bp, Artificial Sequence
  derived and/or modified sequence
actctggtggtttcaggaagggatgatccaccaacacattctcagccagacagtgatgatgaagcagaagaaatacagtggtctgatgatgagaacacagccacgcttacggcaccagaatttcctgagtttgccactaaagtccaggaagctatcaattccctcgggggcagtgtctttcctaagcttaattggagtgccccaagggatgcgtattggatagcaatgaatagttctctgaaatgtaaaaccctcagcgacatctttctgcttttcaagagttccgatttcatcactcgtgacttcactcagccgtttattcattgtactgatgattctccagatccatgtatagaatatgagctcgttctccgaaaatggtgtgaattgattcctggggctgagtttcgatgttttgtcaaggaaaacaagcttattggtatttctcaaagagactacacacaatactatgatcatatttctaaacaaaaggaagaaattcgcagatgcatacaagactttttcaagaaacacatacagtacaaattcttagatgaagactttgtgttcgatatatacagagacagtagggattccccagctttccgttgcacaaacagtgaagtgacagtccagcccagcccctatttgagttaccggctacccaaggactttgtagacctctctactggggaggacgctcacaagctaatagacaaatcagcaggaggacgactgatgagcgtactggaactggagaagaggaggccccgccccaccgctccgggagctgctcatcagccgcaacttcctgccgaccctgatgcgggtgggccgagcagtgtggacatcagccactttttatattcatgtacattcacctggggaaaaaaacggagggactttgctacttgtaaaaataacataataaatagatcttaaacataggaaaaccatactgttctgataataaaatgctttctatgaaata

SEQ ID NO: 161186 - DNA, 1542 bp, Artificial Sequence
  derived and/or modified sequence
tgcgtttagggcgaagacggagttgtaaacttcttaaaattcctctctcgacacttcggtaattcctctttcgagactaaagctctttttgtatgcgtgtgtgtcaagcgtatgccccgggattctcctccgcttccttttctcggtcttccttcttgctttagggaccggaagagtccttgaaccaaaatagctcggcgggcacttccggggccggcgcccagagttccgggagggtgcaggcaggagagggaaaggcagcagcggcggcagctggaggatgaagaaggagcatgtgcttcactgccagttctccgcgtggtacccgttcttccgaggcgttaccatcaagagtgtcattcttccacttcctcagaatgtgaaggattatttactcgatgatggaactctggtggtttcaggaagggatgatccaccaacacattctcagccagacagtgatgatgaagcagaagaaatacagtggtctgatgatgagaacacagccacgcttacggcaccagaatttcctgagtttgccactaaagtccaggaagctatcaattccctcgggggcagtgtctttcctaagcttaattggagtgccccaagggatgcgtattggatagcaatgaatagttctctgaaatgtaaaaccctcagcgacatctttctgcttttcaagagttccgatttcatcactcgtgacttcactcagccgtttattcattgtactgatgattctccagatccatgtatagaatatgagctcgttctccgaaaatggtgtgaattgattcctggggctgagtttcgatgttttgtcaaggaaaacaagcttattggtatttctcaaagagactacacacaatactatgatcatatttctaaacaaaaggaagaaattcgcagatgcatacaagactttttcaagaaacacatacagtacaaattcttagatgaagactttgtgttcgatatatacagagacagtagggggaaggtgtggctcattgactttaatccatttggtgaagtcacagattcactgctgttcacctgggaagaactgatatctgagaacaacttaaacggcgattttagtgaagttgacgctcaagagcaggattccccagctttccgttgcacaaacagtgaagtgacagtccagcccagcccctatttgagttaccggctacccaaggactttgtagacctctctactggggaggacgctcacaagctaatagacttccttaagctgaagagaaatcagcaggaggacgactgatgagcgtactggaactggagaagaggaggccccgccccaccgctccgggagctgctcatcagccgcaacttcctgccgaccctgatgcgggtgggccgagcagtgtggacatcagccactttttatattcatgtacattcacctggggaaaaaaacggagggactttgctacttgtaaaaataacataataaatagatcttaaacataggaaaaccatactgttctgataataaaatgctttctatgaaat

SEQ ID NO: 161187 - DNA, 1011 bp, Artificial Sequence
  derived and/or modified sequence
atgaagaaggagcacgtgctgcactgccagttcagcgcctggtaccccttcttcagaggcgtgaccatcaagagcgtgatcctgcccctgccccagaacgtgaaggactacctgctggacgacggcaccctggtggtgagcggcagagacgacccccccacccacagccagcccgacagcgacgacgaggccgaggagatccagtggagcgacgacgagaacaccgccaccctgaccgcccccgagttccccgagttcgccaccaaggtgcaggaggccatcaacagcctgggcggcagcgtgttccccaagctgaactggagcgcccccagagacgcctactggatcgccatgaacagcagcctgaagtgcaagaccctgagcgacatcttcctgctgttcaagagcagcgacttcatcaccagagacttcacccagcccttcatccactgcaccgacgacagccccgacccctgcatcgagtacgagctggtgctgagaaagtggtgcgagctgatccccggcgccgagttcagatgcttcgtgaaggagaacaagctgatcggcatcagccagagagactacacccagtactacgaccacatcagcaagcagaaggaggagatcagaagatgcatccaggacttcttcaagaagcacatccagtacaagttcctggacgaggacttcgtgttcgacatctacagagacagcagaggcaaggtgtggctgatcgacttcaaccccttcggcgaggtgaccgacagcctgctgttcacctgggaggagctgatcagcgagaacaacctgaacggcgacttcagcgaggtggacgcccaggagcaggacagccccgccttcagatgcaccaacagcgaggtgaccgtgcagcccagcccctacctgagctacagactgcccaaggacttcgtggacctgagcaccggcgaggacgcccacaagctgatcgacttcctgaagctgaagagaaaccagcaggaggacgactag

SEQ ID NO: 161188 - protein, 789 aa, Artificial Sequence
  derived and/or modified sequence
MTSFQEVPLQTSNFAHVIFQNVAKSYLPNAHLECHYTLTPYIHPHPKDWVGIFKVGWSTARDYYTFLWSPMPEHYVEGSTVNCVLAFQGYYLPNDDGEFYQFCYVTHKGEIRGASTPFQFRASSPVEELLTMEDEGNSDMLVVTTKAGLLELKIEKTMKEKEELLKLIAVLEKETAQLREQVGRMERELNHEKERCDQLQAEQKGLTEVTQSLKMENEEFKKRFSDATSKAHQLEEDIVSVTHKAIEKETELDSLKDKLKKAQHEREQLECQLKTEKDEKELYKVHLKNTEIENTKLMSEVQTLKNLDGNKESVITHFKEEIGRLQLCLAEKENLQRTFLLTTSSKEDTCFLKEQLRKAEEQVQATRQEVVFLAKELSDAVNVRDRTMADLHTARLENEKVKKQLADAVAELKLNAMKKDQDKTDTLEHELRREVEDLKLRLQMAADHYKEKFKECQRLQKQINKLSDQSANNNNVFTKKTGNQQKVNDASVNTDPATSASTVDVKPSPSAAEADFDIVTKGQVCEMTKEIADKTEKYNKCKQLLQDEKAKCNKYADELAKMELKWKEQVKIAENVKLELAEVQDNYKELKRSLENPAERKMEGQNSQSPQCFKTCSEQNGYVLTLSNAQPVLQYGNPYASQETRDGADGAFYPDEIQRPPVRVPSWGLEDNVVCSQPARNFSRPDGLEDSEDSKEDENVPTAPDPPSQHLRGHGTGFCFDSSFDVHKKCPLCELMFPPNYDQSKFEEHVESHWKVCPMCSEQFPPDYDQQVFERHVQTHFDQNVLNFD

SEQ ID NO: 161189 - DNA, 2370 bp, Artificial Sequence
  derived and/or modified sequence
atgaccagcttccaggaggtgcccctgcagaccagcaacttcgcccacgtgatcttccagaacgtggccaagagctacctgcccaacgcccacctggagtgccactacaccctgaccccctacatccacccccaccccaaggactgggtgggcatcttcaaggtgggctggagcaccgccagagactactacaccttcctgtggagccccatgcccgagcactacgtggagggcagcaccgtgaactgcgtgctggccttccagggctactacctgcccaacgacgacggcgagttctaccagttctgctacgtgacccacaagggcgagatcagaggcgccagcacccccttccagttcagagccagcagccccgtggaggagctgctgaccatggaggacgagggcaacagcgacatgctggtggtgaccaccaaggccggcctgctggagctgaagatcgagaagaccatgaaggagaaggaggagctgctgaagctgatcgccgtgctggagaaggagaccgcccagctgagagagcaggtgggcagaatggagagagagctgaaccacgagaaggagagatgcgaccagctgcaggccgagcagaagggcctgaccgaggtgacccagagcctgaagatggagaacgaggagttcaagaagagattcagcgacgccaccagcaaggcccaccagctggaggaggacatcgtgagcgtgacccacaaggccatcgagaaggagaccgagctggacagcctgaaggacaagctgaagaaggcccagcacgagagagagcagctggagtgccagctgaagaccgagaaggacgagaaggagctgtacaaggtgcacctgaagaacaccgagatcgagaacaccaagctgatgagcgaggtgcagaccctgaagaacctggacggcaacaaggagagcgtgatcacccacttcaaggaggagatcggcagactgcagctgtgcctggccgagaaggagaacctgcagagaaccttcctgctgaccaccagcagcaaggaggacacctgcttcctgaaggagcagctgagaaaggccgaggagcaggtgcaggccaccagacaggaggtggtgttcctggccaaggagctgagcgacgccgtgaacgtgagagacagaaccatggccgacctgcacaccgccagactggagaacgagaaggtgaagaagcagctggccgacgccgtggccgagctgaagctgaacgccatgaagaaggaccaggacaagaccgacaccctggagcacgagctgagaagagaggtggaggacctgaagctgagactgcagatggccgccgaccactacaaggagaagttcaaggagtgccagagactgcagaagcagatcaacaagctgagcgaccagagcgccaacaacaacaacgtgttcaccaagaagaccggcaaccagcagaaggtgaacgacgccagcgtgaacaccgaccccgccaccagcgccagcaccgtggacgtgaagcccagccccagcgccgccgaggccgacttcgacatcgtgaccaagggccaggtgtgcgagatgaccaaggagatcgccgacaagaccgagaagtacaacaagtgcaagcagctgctgcaggacgagaaggccaagtgcaacaagtacgccgacgagctggccaagatggagctgaagtggaaggagcaggtgaagatcgccgagaacgtgaagctggagctggccgaggtgcaggacaactacaaggagctgaagagaagcctggagaaccccgccgagagaaagatggagggccagaacagccagagcccccagtgcttcaagacctgcagcgagcagaacggctacgtgctgaccctgagcaacgcccagcccgtgctgcagtacggcaacccctacgccagccaggagaccagagacggcgccgacggcgccttctaccccgacgagatccagagaccccccgtgagagtgcccagctggggcctggaggacaacgtggtgtgcagccagcccgccagaaacttcagcagacccgacggcctggaggacagcgaggacagcaaggaggacgagaacgtgcccaccgcccccgacccccccagccagcacctgagaggccacggcaccggcttctgcttcgacagcagcttcgacgtgcacaagaagtgccccctgtgcgagctgatgttcccccccaactacgaccagagcaagttcgaggagcacgtggagagccactggaaggtgtgccccatgtgcagcgagcagttcccccccgactacgaccagcaggtgttcgagagacacgtgcagacccacttcgaccagaacgtgctgaacttcgactag

SEQ ID NO: 161190 - DNA, 2370 bp, Artificial Sequence
  derived and/or modified sequence
atgaccagctttcaggaggtgccactccagacctcaaacttcgcacatgtgatcttccagaatgtagcgaaatcctatcttccgaacgcacacctggaatgtcactatacgcttaccccatatatacatccccacccaaaggactgggtcggcatctttaaggttggctggtcaaccgctcgggactattatactttcctctggagccccatgccagaacattacgtggaaggaagcactgtcaattgcgtgctggctttccaaggatactatttaccaaacgatgacggcgaattttatcagttttgttacgtcacccataaaggcgagatcaggggcgctagtactccgttccagttcagagccagcagtccggtggaagaacttttaaccatggaagacgagggaaacagtgacatgctagtcgttacaacaaaggcagggcttttggagttgaaaatcgagaaaactatgaaggagaaggaagaactgctcaaactcattgccgtacttgagaaagagactgcacagctgcgagaacaggtgggaaggatggagagggaactgaatcatgagaaagaacgctgcgatcagctccaagcagagcagaaaggactgaccgaagtgacacagtccctgaagatggagaatgaggagttcaaaaagcgtttcagtgatgcaacctcaaaagctcaccagctggaggaagacattgtatccgtgactcataaggcgatcgaaaaggagacggaactggactctctgaaagacaagctgaaaaaggcccaacatgagcgggagcagctcgagtgtcagcttaaaactgaaaaagacgagaaggaattgtataaagtgcatttgaagaacacagagattgagaatacaaaacttatgtccgaggttcaaacgttgaagaacttggatgggaataaggaaagcgtgatcactcacttcaaggaggagataggacgcttacagctgtgcctggctgagaaggaaaaccttcagaggacttttctccttaccacatcgagtaaggaagacacctgctttctgaaggagcagctgcgtaaagctgaagagcaggttcaagctaccagacaggaggtagtgttcttggcgaaagagctgtccgacgctgtgaatgtgagagataggacgatggcggacttacataccgctcggttggaaaatgaaaaggttaagaaacaactggcggatgccgtagccgaattaaagctgaatgccatgaaaaaggaccaagacaagaccgataccctggagcacgaactgaggagagaagtagaggatctgaaactgagattacagatggccgctgaccactataaggagaagtttaaggagtgccagagactccagaaacagatcaataaattaagcgatcagtctgcgaacaacaataacgtgttcacaaaaaagacaggaaatcagcagaaagtgaacgacgcaagcgtgaacaccgatccagccacctccgcttccactgtggatgtgaaacctagcccttccgcagccgaggccgactttgacatagtgacaaaagggcaggtctgcgagatgactaaggagatagccgacaagacagagaagtacaataagtgcaagcagttgctgcaggatgaaaaagccaagtgtaacaagtacgccgacgaacttgccaagatggaacttaagtggaaggagcaggtgaagatcgctgagaatgtcaagctggaacttgcagaggttcaggataattacaaggaactgaagagatccctcgagaacccagctgaaaggaaaatggagggccagaactctcagtcaccgcagtgctttaagacgtgctccgaacaaaacgggtatgtgctcactcttagtaatgctcagcccgttttacagtatggcaatccttatgccagccaggagaccagggatggcgcggatggagccttctatcctgatgaaatccagcggcctcctgttcgggtgccgtcatggggccttgaagacaacgtcgtgtgtagccagcctgccaggaattttagcagaccagacgggcttgaagacagtgaggacagcaaggaagatgaaaatgtgcctacagcgccagaccctcccagtcagcacctgagagggcatgggaccggcttctgtttcgactcctcctttgacgtccataaaaaatgtccactgtgcgagctcatgttccctcctaattatgaccagagcaagttcgaggaacatgttgagagccattggaaggtgtgtcctatgtgctccgagcaatttccgcccgattacgaccagcaagtgtttgaaagacatgtccagactcatttcgatcagaacgtgctcaacttcgattag

SEQ ID NO: 161191 - DNA, 2370 bp, Artificial Sequence
  derived and/or modified sequence
atgaccagcttccaggaggtgcccctgcagaccagcaactttgcccacgtgatcttccagaatgtggccaagagctacctgcccaatgcccacctggagtgccactacaccctgaccccctacatccacccccaccccaaggactgggtgggcatcttcaaggtgggctggagcacagcccgggactactacaccttcctgtggagccccatgcctgagcactacgtggagggcagcacagtgaactgtgtgctggccttccagggctactacctgcccaatgatgatggagagttctaccagttctgctacgtgacccacaagggggagatccggggggccagcacccccttccagttccgggccagcagccctgtggaggagctgctgaccatggaggatgagggcaacagcgacatgctggtggtgaccaccaaggccggcctgctggagctgaagattgagaagaccatgaaggagaaggaggagctgctgaagctgattgctgtgctggagaaggagacagcccagctgcgggagcaggtgggccgcatggagcgggagctgaaccacgagaaggagcgctgtgaccagctgcaggccgagcagaagggcctgacagaggtgacccagagcctgaagatggagaatgaggagttcaagaagcgcttcagtgatgccaccagcaaggcccaccagctggaggaggacatcgtgtctgtgacccacaaggccatcgagaaggagacagagctggacagcctgaaggacaagctgaagaaggcccagcacgagcgggagcagctggagtgccagctgaagacagagaaggatgagaaggagctgtacaaggtgcacctgaagaacacagaaattgagaacaccaagctgatgtctgaggtgcagaccctgaagaacctggatggcaacaaggagagcgtcatcacccacttcaaggaggagatcggccgcctgcagctgtgcctggccgagaaggagaacctgcagaggaccttcctgctgaccaccagcagcaaagaagacacctgcttcctgaaggagcagctgaggaaggccgaggagcaggtgcaggccacccggcaggaggtggtgttcctggccaaggagctgagtgatgctgtgaatgtgcgggacaggaccatggctgacctgcacacagcccggctggagaatgagaaggtgaagaagcagctggctgatgctgtggccgagctgaagctgaatgccatgaagaaggaccaggacaagacagacaccctggagcacgagctgcggcgggaggtggaggacctgaagctgcggctgcagatggctgctgaccactacaaggagaagttcaaggagtgccagaggctgcagaagcagatcaacaagctgagtgaccagagcgccaacaacaacaacgtgttcaccaagaagacaggcaaccagcagaaggtgaatgatgcctctgtgaacacagatcctgccaccagcgccagcacagtggatgtgaagcccagccccagcgctgctgaggccgactttgacatcgtgaccaagggccaggtgtgtgagatgaccaaggagattgctgacaagacagagaagtacaacaagtgcaagcagctgctgcaggatgagaaggccaagtgcaacaagtatgcagatgagctggccaagatggagctgaagtggaaggagcaggtgaagattgctgaaaatgtgaagctggagctggccgaggtgcaggacaactacaaggagctgaagaggagcctggagaacccagctgagaggaagatggagggccagaacagccagagcccccagtgcttcaagacctgcagcgagcagaatggctacgtgctgaccctgagcaatgcccagcctgtgctgcagtatggcaacccctatgccagccaggagaccagagatggagcagatggagccttctacccagatgagatccagaggcctcctgtgcgggtgcccagctggggcctggaggacaacgtggtgtgcagccagcctgccaggaacttcagcaggccagatggcctggaggacagcgaggacagcaaggaggatgaaaatgtgcccacagccccagacccccccagccagcacctgcggggccacggcaccggcttctgctttgacagcagctttgatgtgcacaagaagtgccccctgtgtgagctgatgttcccccccaactatgaccagagcaagtttgaggagcacgtggagagccactggaaggtgtgccccatgtgcagcgagcagtttcctccagactatgaccagcaggtgtttgagcggcacgtgcagacccactttgaccagaatgtgctgaactttgattag

SEQ ID NO: 161192 - DNA, 2370 bp, Artificial Sequence
  derived and/or modified sequence
atgaccagcttccaggaggtgcccctgcagaccagcaacttcgcccacgtaatctttcagaacgttgccaagagttaccttcctaatgctcatctcgagtgccactacaccctgaccccctacattcatccacaccccaaagattgggtgggaatctttaaggtgggctggtcaaccgctagagactattatacctttttatggtcgccgatgcccgaacattacgtggaaggttctaccgtaaattgcgtgcttgccttccagggctattacttgcctaatgacgacggggagttttatcaattttgttacgtgacccacaagggcgagatccgcggggcttctactccattccagttcagggcctccagtccagtcgaagaactcctgaccatggaagatgaggggaactctgacatgttggtagtgaccacaaaggccggcctgctcgagctaaagatcgaaaaaaccatgaaagagaaggaagagctgttaaaactcattgcagtgctggaaaaagaaaccgcccagttgcgggaacaggtcggacggatggaacgggagctaaatcatgaaaaagaacggtgtgaccagctccaagctgagcagaaggggttgaccgaagtgactcagtcactgaaaatggagaatgaagaattcaaaaagcggttttctgacgccacatcaaaggcccatcagcttgaggaagatattgtatctgtaacccacaaggcgatcgagaaggaaactgagcttgactctttgaaagacaagcttaagaaagcgcagcatgaaagagagcaacttgaatgtcagctgaaaaccgaaaaagatgaaaaagagctatacaaagtgcacctgaaaaacactgagatcgaaaataccaaactaatgagcgaggtccagacacttaaaaatttggatgggaataaggagagcgttattacacacttcaaggaagagattgggaggctgcagctgtgcctagccgaaaaggaaaatctccagagaacctttctgcttacgacttcctctaaagaggatacttgttttcttaaggagcagttgcgcaaagccgaggaacaggtgcaggccacacgtcaagaagtcgtcttcctggctaaagaactgtcagacgcagtaaatgtgcgtgacaggaccatggcagatttacacacagcccgcttggagaatgagaaggtgaagaaacagctggcagacgcagtagccgaactgaagctgaatgccatgaagaaagatcaggacaagaccgatactttggagcacgagctccggagagaggtggaggacctaaagttacgactgcagatggcagcggatcactacaaggagaaatttaaggagtgtcagcggttacaaaagcagattaataaactgtcagaccaatcggctaacaacaacaatgttttcaccaagaaaacaggcaaccagcagaaggtgaacgacgccagtgtgaatactgatcctgctacttcagctagtactgtcgacgtaaagccttcacctagtgcggcagaagcggactttgacattgtcaccaaggggcaagtttgcgaaatgaccaaagagattgcggacaagacagagaaatacaacaagtgcaagcagttgcttcaggacgagaaggctaaatgcaacaaatatgccgacgagttggccaagatggaactcaagtggaaggagcaggtaaaaatagctgagaacgtcaagctggagctcgctgaagtgcaggataactacaaagagctgaagcgtagtctggagaacccggcagaaaggaagatggagggtcagaactcccagtcacctcagtgctttaagacatgtagtgaacagaatggctatgtcttgacattaagcaatgctcagccagtgctgcaatacgggaatccttacgcatcccaagaaaccagagacggtgccgacggggccttctacccagacgaaattcaacgacctccagtaagggttccctcctgggggctcgaggataacgttgtgtgcagccagccggcccggaacttcagccgaccagacggcctggaggacagcgaagatagcaaggaagatgaaaatgtgccaactgcccccgaccctccgtctcagcatttgcgagggcacggaaccggattctgttttgatagctcttttgatgtgcacaagaagtgcccactatgcgagcttatgtttccacccaactacgatcaatccaaatttgaagaacacgtggaaagccactggaaggtttgtccaatgtgctccgaacagtttcctcctgattacgatcagcaggtgtttgagcgacatgtacagacgcattttgatcagaacgtgctaaatttcgattag

SEQ ID NO: 161193 - DNA, 2370 bp, Artificial Sequence
  derived and/or modified sequence
atgacttcattccaggaagttcccttacaaacgagtaatttcgctcacgtgatctttcagaacgtggctaaatcatacctgcctaacgcccatctggagtgccattatacgctgacaccttacatccacccccaccctaaggactgggtgggaatatttaaagtggggtggtccactgccagagattactacacgtttctttggagtcccatgcctgaacactatgtggaggggtccaccgtgaattgcgtactggccttccaaggctactacttgcccaacgatgacggtgaattctaccaattttgctatgtgacgcacaaaggcgagataagaggagcttctacccccttccagttccgagctagttcccctgtcgaggagctgctgaccatggaggacgaggggaacagtgacatgctggtggtgacaacaaaggccggactcctcgagttaaaaatagaaaagaccatgaaagagaaggaggagttactgaaactcattgctgtactggagaaagagaccgcccaactgcgggaacaggttggccgaatggaaagggagctgaaccatgaaaaagagcgttgtgaccagctgcaggcagaacagaagggtcttactgaggtgacccagtctctgaaaatggaaaatgaggagttcaagaagcggttcagtgacgccacctctaaggcccaccagctggaagaagatatcgtgtcagtgacccacaaagccatcgagaaggagaccgagctcgatagcctgaaggacaagctgaaaaaagcccagcacgaacgagagcaactcgagtgtcaactgaaaacagagaaggatgagaaagaactttacaaggtgcatttaaagaacacagaaatcgagaacacgaagctcatgtccgaagtacagaccctcaagaacctggatgggaataaggagtccgtgatcacgcactttaaggaggagatcggcagactccagttgtgcctggctgaaaaggagaatctacagagaacttttctcctcacgaccagttccaaggaagacacctgcttcctgaaggagcaattgagaaaggcagaagagcaggtgcaagctactaggcaggaagtggttttcctggctaaggaactttccgatgccgtgaatgtgcgggaccggactatggccgacctacatacagctcggctggagaacgaaaaggtgaaaaagcagctggccgatgcagtggccgagctgaagcttaatgctatgaagaaagatcaggacaagactgacacactggaacacgaattgcgcagagaagttgaggatctaaaactccgactgcagatggcagccgatcattataaagaaaaatttaaggaatgtcagagactgcagaaacagattaacaaattgtcagatcaaagcgcgaataacaataacgtttttacaaagaaaacaggtaaccagcagaaggttaacgatgcaagcgtgaacacagatcccgctacttccgcgtcaaccgttgatgtcaagccctcgccctccgcggctgaagccgatttcgacatcgtgactaaggggcaagtgtgcgagatgaccaaggagatcgccgataagacagaaaagtataacaaatgtaaacaactcctccaagatgaaaaggccaagtgcaataagtatgctgatgagttagcaaagatggaactgaagtggaaggagcaagttaagatcgctgaaaatgtcaaactcgaacttgctgaagttcaagacaactacaaggaactgaagcgttcgctggagaatccagcggagagaaagatggaaggtcagaattcgcagtccccgcagtgctttaaaacatgcagcgaacagaatgggtatgtgctgaccctttccaacgcccagcctgtgctgcagtatggaaatccctacgcctcacaggagacaagggatggagcggacggggcattttaccccgatgagattcagagacctcctgtccgagtgccttcatgggggcttgaggataacgtggtctgcagccagcctgccagaaacttctcgagacctgatgggctagaagacagtgaggattccaaggaagatgagaacgttcccactgcacccgatcctccctcccagcacctgcggggacacggcacaggcttttgctttgattccagtttcgatgtccataaaaaatgtcccctatgtgaattgatgttcccgccaaactacgatcaatccaaattcgaagagcacgtagagagccactggaaggtttgcccaatgtgcagtgagcaatttcctcccgactacgaccagcaggtatttgagagacacgtccaaactcacttcgaccagaatgtgctcaacttcgattag

SEQ ID NO: 161194 - DNA, 2890 bp, Artificial Sequence
  derived and/or modified sequence
gaagaggttcggcggctgatggcggatcaggatcggaagcctgcgtaactttctcccttgatccgggagtctttccactggattcacaatgacatcctttcaagaagtcccattgcagacttccaactttgcccatgtcatctttcaaaatgtggccaagagttaccttcctaatgcacacctggaatgtcattacaccttaactccatatattcatccacatccaaaagattgggttggtatattcaaggttggatggagtactgctcgtgattattacacgtttttatggtcccctatgcctgaacattatgtggaaggatcaacagtcaattgtgtactagcattccaaggatattaccttccaaatgatgatggagaattttatcagttctgttacgttacccataagggtgaaattcgtggagcaagtacacctttccagtttcgagcttcttctccagttgaagagctgcttactatggaagatgaaggaaattctgacatgttagtggtgaccacaaaagcaggccttcttgagttgaaaattgagaaaaccatgaaagaaaaagaagaactgttaaagttaattgccgttctggaaaaagaaacagcacaacttcgagaacaagttgggagaatggaaagagaacttaaccatgagaaagaaagatgtgaccaactgcaagcagaacaaaagggtcttactgaagtaacacaaagcttaaaaatggaaaatgaagagtttaagaagaggttcagtgatgctacatccaaagcccatcagcttgaggaagatattgtgtcagtaacacataaagcaattgaaaaagaaaccgaattagacagtttaaaggacaaactcaagaaggcacaacatgaaagagaacaacttgaatgtcagttgaagacagagaaggatgaaaaggaactttataaggtacatttgaagaatacagaaatagaaaataccaagcttatgtcagaggtccagactttaaaaaatttagatgggaacaaagaaagcgtgattactcatttcaaagaagagattggcaggctgcagttatgtttggctgaaaaggaaaatctgcaaagaactttcctgcttacaacctcaagtaaagaagatacttgttttttaaaggagcaacttcgtaaagcagaggaacaggttcaggcaactcggcaagaagttgtctttctggctaaagaactcagtgatgctgtcaacgtacgagacagaacgatggcagacctgcatactgcacgcttggaaaacgagaaagtgaaaaagcagttagctgatgcagtggcagaacttaaactaaatgctatgaaaaaagatcaggacaagactgatacactggaacacgaactaagaagagaagttgaagatctgaaactccgtcttcagatggctgcagaccattataaagaaaaatttaaggaatgccaaaggctccaaaaacaaataaacaaactttcagatcaatcagctaataataataatgtcttcacaaagaaaacggggaatcagcagaaagtgaatgatgcttcagtaaacacagacccagccacttctgcctctactgtagatgtaaagccatcaccttctgcagcagaggcagattttgacatagtaacaaaggggcaagtctgtgaaatgaccaaagaaattgctgacaaaacagaaaagtataataaatgtaaacaactcttgcaggatgagaaagcaaaatgcaataaatatgctgatgaacttgcaaaaatggagctgaaatggaaagaacaagtgaaaattgctgaaaatgtaaaacttgaactagctgaagtacaggacaattataaagaacttaaaaggagtctagaaaatccagcagaaaggaaaatggaaggtcagaattcccagagtcctcaatgtttcaaaacatgctcagagcaaaatggttatgttctcacattgtcaaatgcacaaccagttctgcaatatggtaatccttatgcatctcaggaaacaagagatggagcagatggtgctttttacccagatgaaatacaaaggccacctgtcagagtcccctcttggggactggaagacaatgttgtctgcagccagcctgctcgaaactttagtcggcctgatggcttagaggactctgaggatagcaaagaagatgagaatgtgcctactgctcctgatcctccaagtcaacatttacgtgggcatgggacaggcttttgctttgattccagctttgatgttcacaagaagtgtcccctctgtgagttaatgtttcctcctaactatgatcagagcaaatttgaagaacatgttgaaagtcactggaaggtgtgcccgatgtgcagcgagcagttccctcctgactatgaccagcaggtgtttgaaaggcatgtgcagacccattttgatcagaatgttctaaattttgactagttactttttattatgagttaatatagtttagcagtaaaaaaaaaaaaaaaaaccacacctaaaatagaccactgaggagaccatagagcggatgctttcatgcaccctttactgcactttctgaccaggagctactttgagtttggtgttactaggatcagggtcagtctttggcttatcaataaattttaatctctgttaatcttacctgctttaaaaaaaagttcttgtgtgttcgtatctttatttattccctagtttgcagaactgtctgaataaaggatacaaggattatttcaatgttactgcactgaaaaacgtgtatgtattagtgtgctagattatttagcagaatattcacaagtttctgttgaccttgttgattgagcatgactactaaatattatgtaataaaaagcatttgtcataaca

SEQ ID NO: 161195 - protein, 369 aa, Artificial Sequence
  derived and/or modified sequence
MRACISLVLAVLCGLAWAEDHKESEPLPQLEEETEEALASNLYSAPTSCQGRCYEAFDKHHQCHCNARCQEFGNCCKDFESLCSDHEVSHSSDAITKEEIQSISEKIYRADTNKAQKEDIVLNSQNCISPSETRNQVDRCPKPLFTYVNEKLFSKPTYAAFINLLNNYQRATGHGEHFSAQELAEQDAFLREIMKTAVMKELYSFLHHQNRYGSEQEFVDDLKNMWFGLYSRGNEEGDSSGFEHVFSGEVKKGKVTGFHNWIRFYLEEKEGLVDYYSHIYDGPWDSYPDVLAMQFNWDGYYKEVGSAFIGSSPEFEFALYSLCFIARPGKVCQLSLGGYPLAVRTYTWDKSTYGNGKKYIATAYIVSST

SEQ ID NO: 161196 - DNA, 2332 bp, Artificial Sequence
  derived and/or modified sequence
cttcctgaaaggatctggagacaccagctccacaagtcctggtgtctttaaaaggatcagcttgaggaataaggctcgtctgagagctgtgacattcatctgactctagtgaaagtccaacagccactccctttttggcctccaactgggcaccatgagggcctgcatctccctggtattggccgtgctgtgtggcctggcctgggctgaggaccacaaagagtcagagccattgccacagctggaggaagagacagaagaggccctcgccagcaacttgtactcggcacccacctcctgccagggccgctgctacgaagcctttgacaagcaccaccaatgtcactgcaatgcccgctgccaagagtttgggaactgctgcaaggattttgagagcctgtgtagtgaccacgaggtctcccacagcagtgatgccataacaaaagaggagattcagagcatctctgagaagatctacagggcagacaccaacaaagcccagaaggaagacatcgttctcaatagccaaaactgcatctccccgtcagagaccagaaaccaagtggatcgctgcccaaagccactcttcacttatgtcaatgagaagctgttctccaagcccacctatgcagccttcatcaacctcctcaacaactaccagcgggcaacaggccatggggagcacttcagtgcccaggagctggccgagcaggacgccttcctcagagagatcatgaagacagcagtcatgaaggagctctacagcttcctccatcaccagaatcgctatggctcagagcaagagtttgtcgatgacttgaagaacatgtggtttgggctctattcaagaggcaatgaagagggggactcgagtggctttgaacatgtcttctcaggtgaggtaaaaaaaggcaaggttactggcttccataactggatccgcttctacctggaggagaaggagggtctggttgactattacagtcacatctacgatgggccttgggattcttaccccgatgtgctggcaatgcagttcaactgggacggctactataaggaagtgggctctgctttcatcggcagcagccctgagtttgagtttgcactctactccctgtgcttcatcgccaggccaggcaaagtgtgccagttaagcctgggaggatatcccttagctgtccggacatatacctgggacaagtccacctatgggaatggcaagaagtacatcgccacagcctacatagtgtcttccacctaatagaacttcgagccagaaaggggcatgagggctcttgcgagactgaagtgctatcttctctggactagagagaagagggagaggactggaagggatcaccaaatctcaaagcaatgagaagcattcctaaatcccaaagtgcccacatgggaaagagataaaatgtacaaattagaaaaatgtggataaacagtcaaacctttatcctctagaattttggcaatgttgactaagaaacagagtccaagcagagaaggtaggaaccctccatagctctctgccctgatgtgtgggggaactaggaagaagtcctttgacctcaccaggcctcatgcttccctttaatgtaaagggaaggggtttgcccactttcctctttttggggttggtgagagggcaaaccctgatatttttactgtgaaggtgttttcagttgttcttaggaagaacagctgatagaaattcaagattactataatggctgttattatacacagctctgtaaactaccactcagccctgtgttggggtcctcaaagaagtaaggccacagtaatcaagcaagggcctttggttttttccagagttagatcctctcagaacagagtctgggagaactccaatgctgaatggagaagggtaataggttggtgcagtgaatgggctgggggtggggtggccttctccaggcctgagtgtttttgtgtccagctcagtatctgcaacaagaagtttcccacttgtggatgtttagtgcagccacagacttgtattttgatccccaatttttttttgaaagagttctcctcataggaggatgattcagcatcagaagaagaaggaacccatagcttggtgtcattaacataattattttaagccttatccagcagccataatttgaataactctacgagaccagagagactgtagttccctattttaacctcaattatgcatttgtcccccaaccccactgagaactaaatgctgtaccacagagccgggtgtgaactatggtttagaaggttcaagtttccaattaaagtcattgaagaaaacttgaaa

SEQ ID NO: 161197 - DNA, 1110 bp, Artificial Sequence
  derived and/or modified sequence
atgagagcctgcatcagcctggtgctggccgtgctgtgcggcctggcctgggccgaggaccacaaggagagcgagcccctgccccagctggaggaggagaccgaggaggccctggccagcaacctgtacagcgcccccaccagctgccagggcagatgctacgaggccttcgacaagcaccaccagtgccactgcaacgccagatgccaggagttcggcaactgctgcaaggacttcgagagcctgtgcagcgaccacgaggtgagccacagcagcgacgccatcaccaaggaggagatccagagcatcagcgagaagatctacagagccgacaccaacaaggcccagaaggaggacatcgtgctgaacagccagaactgcatcagccccagcgagaccagaaaccaggtggacagatgccccaagcccctgttcacctacgtgaacgagaagctgttcagcaagcccacctacgccgccttcatcaacctgctgaacaactaccagagagccaccggccacggcgagcacttcagcgcccaggagctggccgagcaggacgccttcctgagagagatcatgaagaccgccgtgatgaaggagctgtacagcttcctgcaccaccagaacagatacggcagcgagcaggagttcgtggacgacctgaagaacatgtggttcggcctgtacagcagaggcaacgaggagggcgacagcagcggcttcgagcacgtgttcagcggcgaggtgaagaagggcaaggtgaccggcttccacaactggatcagattctacctggaggagaaggagggcctggtggactactacagccacatctacgacggcccctgggacagctaccccgacgtgctggccatgcagttcaactgggacggctactacaaggaggtgggcagcgccttcatcggcagcagccccgagttcgagttcgccctgtacagcctgtgcttcatcgccagacccggcaaggtgtgccagctgagcctgggcggctaccccctggccgtgagaacctacacctgggacaagagcacctacggcaacggcaagaagtacatcgccaccgcctacatcgtgagcagcacctag

SEQ ID NO: 161198 - DNA, 1110 bp, Artificial Sequence
  derived and/or modified sequence
atgagggcatgtatcagcctcgtattggcagtgctctgtgggctcgcatgggccgaagatcacaaggagagcgaaccacttcctcagctggaggaggaaaccgaggaagcactggcgagcaacctgtattctgcccccacttcatgtcaagggcggtgctacgaggctttcgataagcaccatcagtgtcattgtaacgcacgatgtcaggagtttgggaattgctgtaaggactttgagagcttatgtagcgatcacgaagtgagccattcttcggacgctataaccaaagaagaaatccagtccatcagtgaaaagatttaccgggccgatactaataaagcccaaaaggaagacatagtcctgaactcacagaactgtatctctcccagcgagaccagaaatcaggttgaccgctgtccaaagccactcttcacatacgtcaatgaaaaactattttccaaacctacctacgctgcgttcattaatctcctcaacaactaccaacgggcgactggacatggcgaacacttctccgcacaggaattggccgaacaggatgctttccttagagaaataatgaaaacggcagtcatgaaagagctttactctttcttgcaccaccagaataggtacggttctgaacaggaatttgttgacgacctgaagaacatgtggtttggactgtactccaggggtaacgaggagggcgattcttccgggtttgaacacgtgttcagcggcgaggtaaaaaagggcaaggtgaccgggtttcacaattggattcgtttttaccttgaggaaaaggaaggtcttgtcgactactattcccacatctacgacgggccctgggatagttacccagacgttctggctatgcagttcaactgggacggttactataaagaggtaggatctgcattcattgggagctccccagaattcgaatttgctctatacagcttatgttttatagcccgaccagggaaggtttgtcagctgagcttgggggggtatccactagctgtccgtacctacacctgggacaaatctacatatgggaacggaaaaaagtacattgctaccgcgtatattgtgtcatctacctag

SEQ ID NO: 161199 - DNA, 1110 bp, Artificial Sequence
  derived and/or modified sequence
atgagggcctgcatcagcctggtgctggccgtgctgtgtggcctggcctgggccgaggaccacaaggagagcgagcccctgccccagctggaggaggagacagaggaggccctggccagcaacctgtacagcgcccccaccagctgccagggccgctgctatgaggcctttgacaagcaccaccagtgccactgcaatgcccgctgccaggagtttggaaactgctgcaaggactttgagagcctgtgcagcgaccacgaggtgagccacagcagtgatgccatcaccaaggaggagatccagagcatcagcgagaagatctacagagctgacaccaacaaggcccagaaggaggacatcgtgctgaacagccagaactgcatcagccccagcgagaccaggaaccaggtggaccgctgccccaagcccctcttcacctacgtgaatgagaagctgttcagcaagcccacctatgctgccttcatcaacctgctgaacaactaccagagggccaccggccacggggagcacttcagcgcccaggagctggccgagcaggatgccttcctgcgggagatcatgaagacagctgtgatgaaggagctgtacagcttcctgcaccaccagaacagatatggcagcgagcaggagtttgtggatgacctgaagaacatgtggtttggcctgtacagcagaggaaatgaggagggggacagcagcggctttgagcacgtgttttctggagaggtgaagaagggcaaggtgacaggcttccacaactggatccgcttctacctggaggagaaggagggcctggtggactactacagccacatctatgatggcccctgggacagctacccagatgtgctggccatgcagttcaactgggatggctactacaaggaggtgggcagcgccttcatcggcagcagccctgagtttgaatttgccctgtacagcctgtgcttcatcgcccggcctgggaaggtgtgccagctgagcctgggcggctaccccctggccgtgaggacctacacctgggacaagagcacctatggaaatggcaagaagtacatcgccacagcctacatcgtgagcagcacctag

SEQ ID NO: 161200 - DNA, 1110 bp, Artificial Sequence
  derived and/or modified sequence
atgcgggcctgcatcagcctggtgctggccgtgctgtgcggcctggcctgggccgaggaccacaaggagtctgaacccctcccccagctggaggaagagaccgaagaggctctcgcttccaatctgtattcggcacccacaagttgccaaggccggtgttacgaggctttcgacaaacaccaccagtgtcactgcaacgccaggtgtcaggagttcggcaactgctgtaaagacttcgaatcgctatgctctgaccacgaggtgagtcatagttcagacgccattactaaggaagagatccagagcatctcagagaaaatctacagagcagatacaaataaggcccagaaggaggatattgtgctgaacagtcaaaactgtatctccccgtctgaaacccgtaaccaggtggatcggtgccctaagccgcttttcacttacgttaatgagaagcttttctctaagccgacatatgctgcattcataaatcttttaaacaattatcagcgcgctacaggacacggtgaacatttctcagcacaggagttagcagaacaggatgccttcctacgggagatcatgaaaacagcggtgatgaaagagctgtactcattcctgcaccaccagaataggtatggctctgagcaggaattcgtggacgacctaaagaacatgtggttcgggctctacagtagaggcaatgaggagggcgattcaagtggattcgagcacgtgtttagtggagaagtgaagaaagggaaggtcactggctttcataattggatcaggttctatctggaagaaaaggagggactggtcgattattattcgcacatttatgatggtccctgggactcttaccctgatgtccttgcaatgcagtttaattgggatgggtattacaaggaagtggggtctgcatttattggttcttcaccagagtttgagttcgccctatactctctttgtttcattgctaggccaggcaaagtatgccagctgtctctggggggataccccctggcagttcggacctatacatgggacaagtcaacctatggtaatggtaagaaatatattgcgaccgcttatatcgtgtcatccacctag

SEQ ID NO: 161201 - DNA, 1110 bp, Artificial Sequence
  derived and/or modified sequence
atgcgcgcatgtataagtctggtgctcgccgttttgtgcggactggcctgggccgaagaccacaaggagagcgagccacttccccagctcgaagaagaaacagaggaggcgctggcgagtaacctgtattctgccccaacatcctgccaaggtcggtgctatgaggcgttcgataaacatcaccaatgccattgcaatgccagatgccaggagttcggtaattgctgcaaggacttcgagtctctatgttcggaccacgaggtttctcattcaagtgacgcgattaccaaagaggagatccagagcatttctgagaagatttaccgtgctgacaccaacaaggcccagaaggaagacatcgtactgaactcccagaattgcatctccccgagtgaaactcgcaatcaggtcgaccgatgccccaagccattattcacctatgttaatgagaagctgtttagtaagcccacctacgctgccttcatcaatcttctgaacaattatcaaagggccaccgggcacggcgagcacttttctgcccaggaactggctgaacaggatgctttcctccgcgaaatcatgaagactgcagtgatgaaggagctgtattcattcttgcatcatcagaacagatacggaagtgagcaggagttcgtcgacgatttgaagaatatgtggtttggtctctattcccgtggtaacgaggaaggcgattcctcaggctttgaacacgtttttagcggggaggtcaaaaaaggtaaggtaacagggttccataactggataaggttttacctggaggagaaggagggcctagtcgactactacagtcacatctacgacgggccatgggactcctaccctgacgtcctagctatgcaattcaattgggatggatattacaaggaagtggggtccgcgttcatagggagttctcctgaatttgaatttgccctttatagtctgtgttttatagcacgccctgggaaggtttgtcaactgtccctggggggatatcctcttgctgtccggacctacacatgggataaaagcacatacggaaacggcaagaagtacatagctaccgcttatatcgtcagctccacgtag

SEQ ID NO: 161202 - DNA, 1110 bp, Artificial Sequence
  derived and/or modified sequence
atgcgagcttgcattagtctggtacttgctgtcctgtgcggtctagcctgggctgaggatcacaaagagtcagagcccctgcctcagttagaggaggagacagaagaggctcttgcaagcaatctatactccgctcccacctcttgtcagggaaggtgttatgaggccttcgacaagcaccatcagtgccactgtaatgcccgctgtcaggagttcgggaactgttgcaaagatttcgagtccttatgttcagatcacgaggtgtctcatagctctgacgcaataactaaggaagagatacagtccatctctgagaaaatttatagagccgacaccaacaaagcccaaaaagaggacattgtgctgaactcacaaaattgcataagtccttctgagacccgtaaccaagtagatcgctgccctaagccactcttcacttatgtcaatgagaaactttttagtaaacctacgtatgctgctttcattaacttgctgaataactatcagagggccaccgggcatggcgaacactttagcgcccaggagctggcggagcaggatgcttttctgagggaaatcatgaaaaccgcagtgatgaaagaactttacagctttctgcaccaccagaacagatatggctccgaacaagaatttgtggacgacctaaagaatatgtggtttggcctttactcacgtggaaacgaggagggagattctagtggatttgagcatgtgttctccggggaggtcaaaaagggtaaagtcaccggattccataattggattagattctacctcgaagagaaagagggtttagtggactactactcccatatttacgatggaccttgggatagctacccagatgtactggccatgcagttcaactgggacggatactataaggaggtgggaagtgccttcatcggatcgagcccagaattcgaattcgccttgtattccctttgttttatagctcggcctggcaaggtgtgccagcttagcctgggcggataccctcttgcggtgagaacctacacgtgggataagagcacatacgggaacggcaaaaagtatatagccactgcttacattgtgtcctccacttag

SEQ ID NO: 161203 - DNA, 1110 bp, Artificial Sequence
  derived and/or modified sequence
atgagagcctgtatcagcctcgtccttgcagtactgtgtggacttgcttgggctgaggaccacaaagaatcagaaccactacctcagctggaggaggaaactgaggaagctctcgcttcaaacctttactctgcgcccacttcttgccaggggaggtgttatgaagcgtttgataaacaccatcaatgtcactgtaatgctcggtgtcaagaatttgggaattgttgcaaagactttgagtccctgtgttctgatcatgaagtgtctcactcatcagatgccatcacaaaagaggagatccagagtatctcagagaaaatctacagggccgatacgaacaaggcacagaaagaggatattgtgctgaatagccagaattgtataagtccatccgaaacgcgaaatcaggtggatagatgtcctaagcctttatttacatatgtcaatgagaaattgttcagtaaaccaacatacgccgcttttattaatctcctcaataactaccaacgagccacagggcatggcgagcacttttcagcccaggagctggccgagcaggatgcctttttacgcgagattatgaaaaccgccgtgatgaaggagttatattcattcttgcatcatcagaaccgctacggtagcgaacaggagtttgtcgacgatctgaaaaacatgtggtttggactatattccagaggtaacgaggagggggatagcagcggctttgagcatgtctttagtggggaggtgaaaaaaggcaaagttacaggatttcacaactggatacgcttctacctagaagagaaagaggggctggttgactattactcacacatatacgacggcccgtgggatagttatcctgatgttttagcaatgcagtttaactgggacgggtactacaaggaagtgggctcagcttttatcggtagctcacctgagtttgagtttgcgttatattcactctgctttattgctagacccggaaaagtctgtcaactgtccctaggaggatacccactggccgtgagaacctacacctgggataaatccacttacggtaacgggaaaaagtatatcgccaccgcttacatcgttagctcaacgtag

SEQ ID NO: 161204 - protein, 213 aa, Artificial Sequence
  derived and/or modified sequence
MSVELEEALPVTTAEGMAKKVTKAGGSAALSPSKKRKNSKKKNQPGKYSQLVVETIRRLGERNGSSLAKIYTEAKKVPWFDQQNGRTYLKYSIKALVQNDTLLQVKGTGANGSFKLNRKKLEGGGERRGAPAAATAPAPTAHKAKKAAPGAAGSRRADKKPARGQKPEQRSHKKGAGAKKDKGGKAKKTAAAGGKKVKKAAKPSVPKVPKGRK

SEQ ID NO: 161205 - DNA, 642 bp, Artificial Sequence
  derived and/or modified sequence
atgtccgtcgaactcgaagaagccctccccgtgacaaccgccgaggggatggccaagaaagtgacaaaagctgggggctccgccgccttaagtccgtctaagaagcgaaagaacagcaaaaagaaaaatcagccaggtaaatatagccagttagtagttgagacgattcgtagactgggcgagcggaatggaagttccctggccaaaatctatacagaggccaaaaaggtgccatggtttgaccagcagaatggcaggacatacttgaaatattcaattaaagcattggtgcaaaacgacacactgttacaagtaaagggaactggggctaacggttcgtttaaattaaatcggaagaagctggagggagggggagagagacggggcgcccccgccgccgcaaccgcaccagccccgaccgctcacaaagctaagaaagctgcacctggagctgccggatctaggagagctgataagaaacccgctagaggccagaaacctgagcagcgaagccataagaaaggagccggagcaaagaaggataagggaggcaaagccaagaagactgcagccgccggaggcaaaaaggtgaagaaagctgcaaagccctccgtgccaaaggttccaaagggcagaaagtag

SEQ ID NO: 161206 - DNA, 642 bp, Artificial Sequence
  derived and/or modified sequence
atgtctgtggagctggaggaggccctgcctgtgaccacagctgagggcatggccaagaaggtgaccaaggccggcggcagcgctgccctgagccccagcaagaagaggaagaacagcaagaagaagaaccagcccgggaagtacagccagctggtggtggagaccatccggcggctgggggagagaaatggcagcagcctggccaagatctacacagaggccaagaaggtgccctggtttgaccagcagaatggccgcacctacctgaagtacagcatcaaggccctggtgcagaatgacaccctgctgcaggtgaagggcaccggggccaacggcagcttcaagctgaacaggaagaagctggagggcggcggggagaggagaggagccccagctgctgccacagccccagcccccacagcccacaaggccaagaaggccgcccctggagctgctggcagcagaagagctgacaagaagccagcccggggccagaagccagagcagaggagccacaagaagggggccggggccaagaaggacaagggcggcaaggccaagaagacagctgctgctgggggcaagaaggtgaagaaggccgccaagcccagcgtgcccaaggtgcccaagggcaggaagtag

SEQ ID NO: 161207 - DNA, 642 bp, Artificial Sequence
  derived and/or modified sequence
atgagcgtggagctggaggaggccctgcccgtgaccaccgccgaggggatggctaagaaggttaccaaggctgggggctctgccgcactgagtccttccaagaaaaggaagaacagcaaaaagaagaatcagcccgggaagtacagccagctcgtggttgagacaattcggaggctgggggagcgcaatggatcatccctcgccaagatttataccgaagctaaaaaagtgccctggttcgaccagcagaacggccgcacctacctaaagtattccatcaaggccctggtgcagaacgacacactgcttcaggtgaagggcactggagctaacgggtcattcaaactgaacagaaagaagctggaaggtgggggcgaacgtcgaggggcccccgctgcggcaaccgccccagccccaacagctcacaaggctaagaaggccgctccgggcgctgccggctctcgtcgagccgacaaaaaacctgctagagggcaaaagccggagcagcgaagtcacaagaagggagccggggcgaagaaagacaaaggaggtaaagccaagaaaactgctgccgccggcggaaagaaggttaagaaggccgccaagcccagcgtacctaaagtaccaaagggccgcaagtag

SEQ ID NO: 161208 - DNA, 642 bp, Artificial Sequence
  derived and/or modified sequence
atgtccgtagaacttgaggaggctctgcccgtgacaaccgccgaaggcatggctaagaaggtgacaaaagccggtggctccgcggcactatccccctcaaaaaaacgaaagaacagcaagaagaaaaatcagcccggaaagtactcccagctggtggtggaaacaattcgcaggttgggtgaacgcaacggcagcagtctggccaaaatatataccgaggctaagaaagtgccttggttcgatcagcaaaacggtagaacgtacttaaagtatagcattaaagcactggtgcagaacgatacactgcttcaagttaagggtaccggggctaacgggtcttttaagctaaatcggaagaagctggaagggggtggggaacgtcgcggagctcccgctgccgctaccgcaccggctcccactgctcacaaggctaaaaaggcggcacccggagccgcaggctctaggagagctgataaaaagccggcaaggggacaaaaacctgaacagaggtcacacaagaaaggagccggagccaagaaggacaaggggggtaaagctaaaaagaccgccgcagctgggggtaaaaaggttaaaaaggccgcaaagccttccgtgcccaaggtgccaaaggggaggaagtag

SEQ ID NO: 161209 - DNA, 1506 bp, Artificial Sequence
  derived and/or modified sequence
cgcgcacgcccagcgagttccagaggcgccagtggaagctgcggcggcggtgtctcgcgttcggcgggatttctcttcgctccggctcggcctaggtctacgtccccagctccagccgccggctcggactcggtctctgacccccaactcggtcccctagtccggccccggctccgggccccccaaccctcgctccggcccggcccggcccccaccccagccctgccgcccggccccaggcccggccgcggccgctcccgcctggagccgccgcgcgcccccagcccccctgcaccccctcggcccctcgccttcctcttcccggcgcggccccccggcttccgcgcgccgcccgccaccaatcctcttgctaccatgtccgtggagctcgaggaggccctgccagtgacgaccgccgagggaatggccaagaaggtgaccaaggctggcggctcggcggcgttgtccccatctaagaagaggaagaatagcaagaagaagaaccagccgggcaagtacagccagctggtggtggagaccatccgtaggctgggcgagcgcaacggctcgtcgctggccaagatctacaccgaggccaagaaggttccgtggttcgaccagcagaatgggcgcacctacctcaagtactcgatcaaggcgctggtgcagaacgacacgcttctgcaggtgaagggcaccggcgccaacggttccttcaagctcaaccgcaagaagctggagggcggcggggagcggcgcggagccccggcggccgccaccgccccggcccccaccgcgcacaaagcgaagaaggcagccccgggcgcggccggctcccggcgcgcggacaagaagcccgccaggggccagaagccggagcagcgctcgcacaagaagggcgctggcgccaagaaggacaaaggcggcaaggccaagaagacggcggccgccgggggcaagaaggtgaagaaggcggccaagcccagcgtccccaaagtgcccaagggccgcaagtgagcgtgtcggccggtcagagcggccggcgtgggcttttcggtgtttttgtttttctaccccaagtgacgtagattttgtacggctcacgccggccggggccgcgaggcctggtctgagcctcagggaggggccccgggtcctctcagtctttcccctcccccaacgatgtagcgtttttcgttgtttgctttaggtttttgaaacagccccggcgacgcctctattggctctcggccttggcaacggccgtcgtcatggttactggcccctaggcgccgatggccgaggccgcgcctgcccaccgggcggggtcgctggttggccgggcccaggcgcgcggggacgcggaggccgcgcatcctttcccagctccccaccctccttgcctttgggtgcgcgacaaacaatcgctccgggctcagggctgcgcggctcttcccttcattccatgggcctttttttgggcacaataaagcgtttaaacctttc

SEQ ID NO: 161210 - DNA, 642 bp, Artificial Sequence
  derived and/or modified sequence
atgagcgtggagctggaggaggccctgcccgtgaccaccgccgagggcatggccaagaaggtgaccaaggccggcggcagcgccgccctgagccccagcaagaagagaaagaacagcaagaagaagaaccagcccggcaagtacagccagctggtggtggagaccatcagaagactgggcgagagaaacggcagcagcctggccaagatctacaccgaggccaagaaggtgccctggttcgaccagcagaacggcagaacctacctgaagtacagcatcaaggccctggtgcagaacgacaccctgctgcaggtgaagggcaccggcgccaacggcagcttcaagctgaacagaaagaagctggagggcggcggcgagagaagaggcgcccccgccgccgccaccgcccccgcccccaccgcccacaaggccaagaaggccgcccccggcgccgccggcagcagaagagccgacaagaagcccgccagaggccagaagcccgagcagagaagccacaagaagggcgccggcgccaagaaggacaagggcggcaaggccaagaagaccgccgccgccggcggcaagaaggtgaagaaggccgccaagcccagcgtgcccaaggtgcccaagggcagaaagtag

SEQ ID NO: 161211 - protein, 441 aa, Artificial Sequence
  derived and/or modified sequence
MLSSVMAPLWACILVAAGILATDTHHPQDSALYHLSKQLLQKYHKEVRPVYNWTKATTVYLDLFVHAILDVDAENQILKTSVWYQEVWNDEFLSWNSSMFDEIREISLPLSAIWAPDIIINEFVDIERYPDLPYVYVNSSGTIENYKPIQVVSACSLETYAFPFDVQNCSLTFKSILHTVEDVDLAFLRSPEDIQHDKKAFLNDSEWELLSVSSTYSILQSSAGGFAQIQFNVVMRRHPLVYVVSLLIPSIFLMLVDLGSFYLPPNCRARIVFKTSVLVGYTVFRVNMSNQVPRSVGSTPLIGHFFTICMAFLVLSLAKSIVLVKFLHDEQRGGQEQPFLCLRGDTDADRPRVEPRAQRAVVTESSLYGEHLAQPGTLKEVWSQLQSISNYLQTQDQTDQQEAEWLVLLSRFDRLLFQSYLFMLGIYTITLCSLWALWGGV

SEQ ID NO: 161212 - DNA, 1326 bp, Artificial Sequence
  derived and/or modified sequence
atgctttcctcagtgatggcccctctgtgggcctgtatcctggtggccgcaggtatccttgctaccgacacccaccacccgcaggacagcgcattgtaccacctgagcaaacagttactgcaaaagtatcataaagaggtacgtcctgtttataattggaccaaagccacaactgtatatctggacctgttcgtgcatgccatattagacgttgatgcagagaaccagatcctaaagacgtccgtctggtaccaggaggtgtggaacgatgaatttctcagttggaattcgagcatgttcgacgaaatcagggaaattagtctcccactcagcgccatctgggcaccagacattattattaacgagtttgtcgatatcgagcggtatcccgacctgccttacgtttacgtgaactcaagcgggaccattgagaactataagcccattcaagtagtgtcagcttgtagcctcgaaacgtatgctttcccattcgacgtccagaactgttcgttgactttcaagagcatcctgcacacagttgaagacgtggatttagcttttcttcgaagcccagaagatatccagcacgataaaaaagcttttcttaacgatagcgagtgggaattgctgagcgtgagtagtacatactctatactccaatccagcgccggcgggttcgcacagatacaatttaatgtggtgatgcgccgtcacccgctggtctacgtggtgagcctcctgatcccatccatttttctcatgctcgtggatctggggtcgttttaccttcctcctaattgcagagccaggattgtcttcaaaactagtgtgctggtcggatacactgtctttcgggttaacatgtccaatcaagtgcccagatctgtaggctccaccccgcttatagggcactttttcactatttgtatggccttcctggtgctgtccctcgctaagtctattgtgttagtcaaatttctccacgacgaacagagggggggccaggagcagccgttcctctgtttgcgaggcgatacagatgccgaccggcccagggtggaaccccgggcacagcgcgctgtagtgaccgagagtagcttatatggtgagcacctagcacagcctgggacactcaaggaagtctggtcgcagctgcaatcaatttccaactacctgcagacacaagatcaaaccgatcagcaggaagctgaatggctggttttgctgagcaggtttgaccggctgctctttcagtcgtatttgtttatgctagggatctacacaatcactctgtgcagcctgtgggccttatggggcggcgtgtag

SEQ ID NO: 161213 - DNA, 1326 bp, Artificial Sequence
  derived and/or modified sequence
atgctgagctctgtgatggcccccctgtgggcctgcatcctggtggccgccggcatcctggccacagacacccaccacccccaggacagcgccctgtaccacctgagcaagcagctgctgcagaagtaccacaaggaggtgcggcctgtgtacaactggaccaaggccaccaccgtgtacctggacctgtttgtgcacgccatcctggatgtggatgctgagaaccagatcctgaagacctctgtgtggtaccaggaggtgtggaatgatgagttcctgtcctggaacagctccatgtttgatgagatccgggagatcagcctgcccctgagcgccatctgggccccagacatcatcatcaatgaatttgtggacatcgagcgctacccagacctgccctacgtgtatgtgaacagcagcggcaccatcgagaactacaagcccatccaggtggtgtctgcctgcagcctggagacctacgccttcccctttgatgtgcagaactgcagcctgaccttcaagagcatcctgcacacagtggaggatgtggacctggccttcctgcggagccctgaggacatccagcacgacaagaaggccttcctgaatgattctgagtgggagctgctgtctgtgagcagcacctacagcatcctgcagagcagcgctgggggctttgcccagatccagttcaacgtggtgatgaggaggcaccccctggtgtatgtggtgtccctgctgatccccagcatcttcctgatgctggtggacctgggcagcttctacctgccccccaactgccgggccagaattgtgttcaagacctctgtgctggtgggctacaccgtcttccgggtgaacatgagcaaccaggtgcccaggtctgtgggcagcacccccctcatcggccacttcttcaccatctgcatggccttcctggtgctgagcctggccaagagcatcgtgctggtgaagttcctgcatgatgagcagagaggaggccaggagcagcccttcctgtgcctgcggggggacacagatgctgaccggccccgggtggagccccgggcccagagagctgtggtgacagagagcagcctgtatggagagcacctggcccagcccggcaccctgaaggaggtgtggagccagctgcagagcatcagcaactacctgcagacccaggaccagacagaccagcaggaggccgagtggctggtgctgctgagcagatttgaccggctgctcttccagagctacctgttcatgctgggcatctacaccatcaccctgtgcagcctgtgggccctgtggggcggcgtgtag

SEQ ID NO: 161214 - DNA, 1326 bp, Artificial Sequence
  derived and/or modified sequence
atgctgagcagcgtgatggcccccctgtgggcctgcatcctggtggccgccggcatcctggcgaccgacacacatcaccctcaggattcagccctttaccacttaagtaagcagctcctgcagaaataccataaagaagtgaggcccgtctataattggaccaaggccacaactgtgtacctcgacctgtttgtgcacgccatactggacgtcgacgccgagaaccagatcctcaagacaagcgtatggtaccaagaggtgtggaatgacgagtttctgagctggaatagctccatgttcgatgaaatccgtgaaatatccctccccttgtctgcgatttgggcccctgacataatcatcaatgagtttgtggatattgagaggtaccccgatctgccttacgtctacgtcaattcttcaggaaccatcgagaactataaacctatccaagtggtctccgcttgcagcctcgagacgtatgctttccctttcgacgtccagaactgtagtctgacctttaaatcaattctacacaccgtggaggatgttgatttggcattcctgcgatcgcctgaggatattcaacatgacaagaaggccttcctaaacgattctgaatgggaactgttaagtgtctcttctacgtactcaatcctgcagtccagtgctggaggcttcgctcagatccagtttaacgttgttatgcgcaggcatccactggtgtacgttgtgagcttgctgatcccaagcattttccttatgctggtggacctcggctcattctacttaccccctaactgcagggcccgtattgtcttcaaaacgtccgtgctggtggggtatacggttttcagggtgaacatgagtaaccaggttcccagatcagtcggttcgactcccctgattggtcatttcttcaccatttgtatggcatttcttgtgctgagcttggccaagagcatagtgctggtgaaatttctgcacgacgagcagcgggggggacaggagcagcctttcctttgtctccggggtgatacagatgctgataggcctcgggtagaacctagggcacagcgggcggtggtcacagagtcatcactgtatggcgagcatctggcccagccagggactcttaaagaggtctggtcccagttgcagtcaatttctaactatctccagacacaagaccagacagatcagcaggaagcggaatggctggttctgcttagccgcttcgataggctgctgttccagtcctacctcttcatgttgggaatttacaccatcactctttgttccctctgggctctgtgggggggggtttag

SEQ ID NO: 161215 - DNA, 1326 bp, Artificial Sequence
  derived and/or modified sequence
atgctttcatctgtgatggccccactgtgggcctgcatcctggtagccgcaggcatcctggctacagacacgcatcatccacaggattcagccttatatcatttgagcaagcaactgttgcaaaagtatcacaaggaggtgagaccagtttacaattggacgaaggcaacaacggtgtatctcgatctgtttgtccacgccattctcgatgttgatgccgagaaccagattttaaagacttccgtttggtaccaggaggtgtggaacgacgaatttctgagctggaactcctccatgttcgatgaaatccgtgagatctcactccccttgagcgctatttgggctcctgatatcatcattaatgaattcgtagatattgaaagataccctgacttaccatatgtctatgttaacagttctggaacaatcgagaattacaagcctattcaggtcgtgtccgcatgctcactggaaacatacgccttccctttcgatgttcaaaattgcagcttgaccttcaaatctatcctgcatactgtcgaagacgtagacttggcctttctgcgtagtcctgaggatatccaacatgacaaaaaggccttcctcaatgactccgagtgggagttactgagcgttagcagcacgtactcaatcctgcagtcaagtgcaggcggatttgctcagattcagtttaatgtagtgatgcgaagacatccacttgtttacgttgttagcctgttgattcctagcatctttctcatgctggttgacctggggtccttttacctgcctccaaattgtcgtgctcgtattgtctttaagaccagcgtcctggtcggttataccgtgttccgggttaatatgtccaaccaggtccctcggtcagtgggttctactcccttgatcggtcactttttcacaatttgcatggctttccttgtgctttcgcttgcgaagtcaatcgttcttgtgaaattccttcacgatgaacaaaggggaggccaagagcaaccttttttatgtcttagaggagacacagacgcagaccgaccaagagttgaaccacgagcccagcgcgctgtggtgaccgagtctagcctttacggcgaacacttggcccagcccggaacattaaaagaggtctggtcccagctgcagagtatttccaactacctgcagactcaggaccagaccgaccagcaggaagcggagtggctggttctcctgagccgttttgacagattgctgttccagagctacctgttcatgcttggtatatacaccatcacactatgctcactttgggccctctgggggggtgtttag

SEQ ID NO: 161216 - DNA, 2011 bp, Artificial Sequence
  derived and/or modified sequence
acggtctgatcttggggcagaaccaaagggagaagttaagggatttcatgacggcatcaattccaaaacatttgcatggtgctggtattgcctttggtcccactgagtgtttacaaaatagcaccagtaaggatagcatcaactggcaaacggagaaggaggagaacagagtggagaggaaccctgttaggagaaattgagcggcattccatctggtaggcaagtttgcatttctcctttttgggatctgcccaggaatgttgtcaagtgtaatggctcccctgtgggcctgcatcctggtggctgcaggaattctagccacagatacacatcatccccaggattctgctctgtatcatctcagcaagcagctattacagaaatatcataaagaagtgagacctgtttacaactggaccaaggccaccacagtctacctggacctgttcgtccatgctatattggatgtggatgcagagaatcaaatattaaagacaagtgtatggtaccaagaggtctggaatgatgaatttttatcctggaactccagcatgtttgatgagattagagagatctccctacctctaagtgccatctgggcccccgatatcatcatcaatgagtttgtggacattgaaagataccctgaccttccctatgtttatgtgaactcatctgggaccattgagaactataagcccatccaggtggtctctgcgtgcagtttagagacatatgcttttccatttgatgtccagaattgcagcctgaccttcaagagcattctgcatacagtggaagacgtagacctggcctttctgaggagcccagaagacattcagcatgacaaaaaggcgtttttgaatgacagtgagtgggaacttctatctgtgtcctccacatacagcatcctgcagagcagcgctggaggatttgcacagattcagtttaatgtggtgatgcgcaggcaccccctggtctatgtcgtgagtctgctgattcctagcatctttctcatgctggtggacctggggagcttctacctgccacccaactgccgagccaggattgtgttcaagaccagtgtgctggtgggctacaccgtcttcagggtcaacatgtccaaccaggtgccacggagtgtagggagcacccctctgattgggcacttcttcaccatctgcatggccttcttggttctcagcttagctaagtccatcgtgttggtcaaattcctccatgatgagcagcgtggtggacaggagcagcccttcttgtgccttcgaggggacaccgatgctgacaggcctagagtggaacccagggcccaacgtgctgtggtaacagagtcctcgctgtatggagagcacctggcccagccaggaaccctgaaggaagtctggtcgcagcttcaatctatcagcaactacctccaaactcaggaccagacagaccaacaggaggcagagtggctggtcctcctgtcccgctttgaccgactgctcttccaaagctaccttttcatgctggggatctacaccatcactctgtgctccctctgggcactgtggggcggcgtgtgaagactgaagtgttcttcagtaattgtgctggcacttaggagagagaggagggggaataatagtgggttaaaaagctttctgggtcgggtgtggtggttcttgcctatagtcccagtgctttgggaggccatagcaggaggattgcttgagcccaggagttcgagaccagccagagcaacatagtgagaccacatctctaccagtaaataaataaataaataaataaataaataaataaataaatagctgggcatagtggctcatgcctgtactctcagctacttgggaggttgaggtgggaggattgcttgagcccaggatttcaaggctgcagtgagccatgattgcaccactgcaccccagcctgggtgacagagcaagaccctgtctcaaaaaaaataaaataaaaggctttctgccttcattgc

SEQ ID NO: 161217 - DNA, 1326 bp, Artificial Sequence
  derived and/or modified sequence
atgctgagcagcgtgatggcccccctgtgggcctgcatcctggtggccgccggcatcctggccaccgacacccaccacccccaggacagcgccctgtaccacctgagcaagcagctgctgcagaagtaccacaaggaggtgagacccgtgtacaactggaccaaggccaccaccgtgtacctggacctgttcgtgcacgccatcctggacgtggacgccgagaaccagatcctgaagaccagcgtgtggtaccaggaggtgtggaacgacgagttcctgagctggaacagcagcatgttcgacgagatcagagagatcagcctgcccctgagcgccatctgggcccccgacatcatcatcaacgagttcgtggacatcgagagataccccgacctgccctacgtgtacgtgaacagcagcggcaccatcgagaactacaagcccatccaggtggtgagcgcctgcagcctggagacctacgccttccccttcgacgtgcagaactgcagcctgaccttcaagagcatcctgcacaccgtggaggacgtggacctggccttcctgagaagccccgaggacatccagcacgacaagaaggccttcctgaacgacagcgagtgggagctgctgagcgtgagcagcacctacagcatcctgcagagcagcgccggcggcttcgcccagatccagttcaacgtggtgatgagaagacaccccctggtgtacgtggtgagcctgctgatccccagcatcttcctgatgctggtggacctgggcagcttctacctgccccccaactgcagagccagaatcgtgttcaagaccagcgtgctggtgggctacaccgtgttcagagtgaacatgagcaaccaggtgcccagaagcgtgggcagcacccccctgatcggccacttcttcaccatctgcatggccttcctggtgctgagcctggccaagagcatcgtgctggtgaagttcctgcacgacgagcagagaggcggccaggagcagcccttcctgtgcctgagaggcgacaccgacgccgacagacccagagtggagcccagagcccagagagccgtggtgaccgagagcagcctgtacggcgagcacctggcccagcccggcaccctgaaggaggtgtggagccagctgcagagcatcagcaactacctgcagacccaggaccagaccgaccagcaggaggccgagtggctggtgctgctgagcagattcgacagactgctgttccagagctacctgttcatgctgggcatctacaccatcaccctgtgcagcctgtgggccctgtggggcggcgtgtag

SEQ ID NO: 161218 - protein, 353 aa, Artificial Sequence
  derived and/or modified sequence
MAMTLLEDWCRGMDVNSQRALLVWGIPVNCDEAEIEETLQAAMPQVSYRMLGRMFWREENAKAALLELTGAVDYAAIPREMPGKGGVWKVLFKPPTSDAEFLERLHLFLAREGWTVQDVARVLGFQNPTPTPGPEMPAEMLNYILDNVIQPLVESIWYKRLTLFSGRDIPGPGEETFDPWLEHTNEVLEEWQVSDVEKRRRLMESLRGPAADVIRILKSNNPAITTAECLKALEQVFGSVESSRDAQIKFLNTYQNPGEKLSAYVIRLEPLLQKVVEKGAIDKDNVNQARLEQVIAGANHSGAIRRQLWLTGAGEGPAPNLFQLLVQIREEEAKEEEEEAEATLLQLGLEGHF

SEQ ID NO: 161219 - DNA, 1062 bp, Artificial Sequence
  derived and/or modified sequence
atggccatgaccctgctggaggactggtgcagaggcatggacgtgaacagccagagagccctgctggtgtggggcatccccgtgaactgcgacgaggccgagatcgaggagaccctgcaggccgccatgccccaggtgagctacagaatgctgggcagaatgttctggagagaggagaacgccaaggccgccctgctggagctgaccggcgccgtggactacgccgccatccccagagagatgcccggcaagggcggcgtgtggaaggtgctgttcaagccccccaccagcgacgccgagttcctggagagactgcacctgttcctggccagagagggctggaccgtgcaggacgtggccagagtgctgggcttccagaaccccacccccacccccggccccgagatgcccgccgagatgctgaactacatcctggacaacgtgatccagcccctggtggagagcatctggtacaagagactgaccctgttcagcggcagagacatccccggccccggcgaggagaccttcgacccctggctggagcacaccaacgaggtgctggaggagtggcaggtgagcgacgtggagaagagaagaagactgatggagagcctgagaggccccgccgccgacgtgatcagaatcctgaagagcaacaaccccgccatcaccaccgccgagtgcctgaaggccctggagcaggtgttcggcagcgtggagagcagcagagacgcccagatcaagttcctgaacacctaccagaaccccggcgagaagctgagcgcctacgtgatcagactggagcccctgctgcagaaggtggtggagaagggcgccatcgacaaggacaacgtgaaccaggccagactggagcaggtgatcgccggcgccaaccacagcggcgccatcagaagacagctgtggctgaccggcgccggcgagggccccgcccccaacctgttccagctgctggtgcagatcagagaggaggaggccaaggaggaggaggaggaggccgaggccaccctgctgcagctgggcctggagggccacttctag

SEQ ID NO: 161220 - DNA, 1062 bp, Artificial Sequence
  derived and/or modified sequence
atggcaatgacactcctggaagattggtgtcgcggcatggatgttaacagccaacgtgcgcttctagtttggggaattcccgttaattgcgacgaagctgagatcgaagagaccctgcaggccgccatgccgcaggtgtcctaccgcatgctggggaggatgttctggagggaagagaacgcaaaagctgcgctgctggagctgaccggagccgtagattatgccgcaatcccaagagaaatgcccggaaaggggggggtgtggaaggtgctcttcaagcctccaacctctgacgccgagtttctggagaggctgcatctgtttttggcacgggaagggtggacagtccaggacgtcgcacgtgtgttgggttttcagaacccgacccctacaccgggacccgagatgcctgccgaaatgctgaattatattctcgacaatgtcattcagccactagtggagagtatttggtataaacgcctgacattattttcggggagggatatccccggccccggagaagaaaccttcgacccgtggctggagcacacaaacgaggtcctggaggagtggcaggtctcagacgttgaaaagcgcaggagactgatggaatctcttcggggccctgccgccgatgttatcaggatactaaaatccaataatcccgctatcacgactgctgaatgtctcaaggcgctggagcaagttttcggctctgtggagtcttcccgcgacgcccaaataaagttcttaaacacatatcagaatccaggagagaagctcagcgcttacgtgatcaggctggagccattgcttcagaaagtcgtagagaagggtgcaatcgacaaggataacgtgaaccaggctcgattagaacaggtgattgctggagccaaccactcaggggcaatccgcaggcagctgtggttgaccggggctggtgaggggccagctcctaacctgttccaattgctggtgcagatacgggaggaagaggcaaaggaagaagaggaggaggctgaggcaactttgctccagctgggcttagagggccatttctag

SEQ ID NO: 161221 - DNA, 1062 bp, Artificial Sequence
  derived and/or modified sequence
atggccatgaccctgctggaggactggtgccggggcatggatgtgaacagccagagggccctgctggtgtggggcatccctgtgaactgtgatgaagctgagattgaggagaccctgcaggccgccatgccccaggtgtcctacaggatgctgggccgcatgttctggagagaagaaaatgccaaggccgccctgctggagctgactggagctgtggactatgctgccatcccccgggagatgcctgggaagggcggcgtgtggaaggtgctcttcaagccacccaccagtgatgctgagttcctggagcggctgcacctgttcctggcccgggagggctggacagtgcaggatgtggcccgggtgctgggcttccagaaccccacccccaccccaggccctgagatgcctgctgagatgctgaactacatcctggacaacgtcatccagcccctggtggagagcatctggtacaagaggctgaccctcttcagcggccgggacatccctggccctggagaggagacctttgacccctggctggagcacaccaatgaggtgctggaggagtggcaggtgtctgatgtggagaagagaagaaggctgatggagagcctgcggggccctgctgctgatgtgatccgcatcctgaagagcaacaacccagccatcaccacagctgagtgcctgaaggccctggagcaggtgtttggatctgtggagagcagcagagatgcccagatcaagttcctgaacacctaccagaaccctggagagaagctgagcgcctacgtgatccggctggagcccctgctgcagaaggtggtggagaagggggccatcgacaaggacaacgtgaaccaggcccggctggagcaggtgattgctggggccaaccacagcggggccatccggcggcagctgtggctgactggagctggggagggccctgcccccaacctcttccagctgctggtgcagatccgggaggaggaggccaaggaggaggaggaggaggccgaggccaccctgctgcagctgggcctggagggccacttctag

SEQ ID NO: 161222 - DNA, 1062 bp, Artificial Sequence
  derived and/or modified sequence
atggccatgaccctgctggaggactggtgccggggcatggacgtgaactctcaacgcgccctcctcgtgtgggggatccctgtgaactgcgacgaagccgagattgaggaaaccctccaagcagcaatgccgcaagtgagttataggatgttgggccgaatgttctggagagaagaaaacgcgaaggctgcattgttggagcttactggggcggtggactacgccgctattccacgagagatgcccgggaagggaggagtctggaaggtgctgttcaaacctcccacatctgacgccgaatttctcgaaagattgcatctctttctagcgagggaaggctggactgtgcaggacgtcgcccgggtgttgggattccagaacccgacaccgaccccaggacctgagatgccggccgaaatgctgaactacatcctggataacgtgatacagcccctggtagaatctatctggtacaagcgcctaacgctgttctcaggaagggatattcccgggccaggtgaggaaaccttcgacccttggctggaacacacaaacgaggtgctagaggagtggcaggtgtcagatgtggagaagagacgaaggctaatggagagcctgagaggccccgctgcagatgtgatcagaatcctaaaaagcaataacccggcaattacaaccgctgagtgcctgaaggccctcgaacaagtttttggatcggtggaatccagccgggatgcgcagatcaagttcctgaatacctaccagaatccaggggaaaagctgagcgcatatgttatcaggttagagcccctgcttcagaaggtcgtcgagaagggtgcgatcgataaagataatgtgaaccaggccaggctagagcaggtgattgccggggctaatcattcaggggccattagacggcaactgtggcttactggagctggtgagggccctgctcctaacctgtttcaattgctcgtccagattcgagaggaggaggctaaagaggaggaggaagaggctgaggccacgctgctgcagcttgggttggagggccacttctag

SEQ ID NO: 161223 - DNA, 2635 bp, Artificial Sequence
  derived and/or modified sequence
ggggcggacgccgctcgccggctggccccatcctccactgcagcagtaacgtcgcggcgggttgcgggtaggactggacgccagagcagccgcgcagcgcctgaaccgctgcgggccgccgcggccgccccttcccaccctcgcctctgctgtctccagcctcgcttctccgactttcctgctcctctgctgccttcgtttctggtcctcggccgtcctcgccgcccgcccagaggagtccccgcgcccgccaagaagccgctttccgctggcccgcagccgccgcgacttcggcacagtttctccctctggctagtctcccaaacggccgctcctcgcccgcgggaagaccaggctgcgaccgcgaacgcccgatcctctccaggagccgcagcgagcgcccggcggccacgccccgcgaccacaccccggcggctctcggcccagcgcgcctgccttcgccgcccgccgtcgctcctcgcccgctgcacgacgacgcgacgcccctgctgcaggcggcggacccgaccggacccagacccagacgcaagatggcgacggccgcgtgactgcctcagcgtccccgagctcggctccgagtgcacctacggactgactgtgggggcagagaagggcgagatcaggactctgtctttgttaatcgtgactgcatgaaggtcgcctccctcgggcctacttggtgggagtgtctggtattgttctaaggccaggagcacggtgagccacagtctgttggtagaatttggcgtcttgatagttgagaaaatggcgatgacactgttggaagactggtgccgggggatggatgtgaactcccagagagctctgttagtctggggcatcccagtgaactgtgatgaggctgaaatcgaagagaccctccaggctgcgatgccccaggtctcctaccgaatgcttgggagaatgttctggagggaagaaaatgcgaaagcagccttattagagctcactggcgctgtagattacgccgcgatccccagggagatgccgggcaaaggaggggtctggaaagtgttatttaagcccccaacttctgatgctgaatttttagaaagattgcacctcttcctagctagagaggggtggaccgtgcaagatgttgcccgtgtccttgggtttcagaaccctactccgaccccgggcccagagatgccagcagagatgctaaactatattttggataatgttattcagcctcttgttgagtccatatggtacaagaggctgacacttttctcggggagggacatcccagggcctggagaggaaacctttgatccctggctggagcacactaatgaggtcctagaggagtggcaggtgtccgatgtagaaaagaggcggcggttgatggagagtcttagaggccccgccgctgatgttattcgcatccttaagtccaacaaccccgcgataaccactgccgaatgcctgaaggcgcttgagcaggtgtttgggagcgttgagagctctagggatgcccagatcaaatttctgaacacttatcagaacccgggagaaaaattgtctgcttatgtcattcgtctggagcctctgctacagaaggtggtagagaagggggccattgataaagataatgtgaaccaggcccgcctagagcaggtcattgccggggccaaccacagcggggccatccgaaggcagctgtggcttaccggggctggggaagggccagccccaaacctctttcagttgctggtgcagatccgtgaggaggaagccaaggaggaggaggaggaggctgaggccacccttctgcagttaggcctggaagggcacttctgagtgccaggaaaggcagctttagtgcagacctagatcacagctacttttcttgtccctgtggggtcttacagatgtgtctctgagtagtaaaggcttagccttgttctgttttgttgttttttggaggggaaggttagtcaggcctgagtattcatgtaacattctaaaattgtgccagcgagcaccgtgaacgactgcaatgcaagcgggtcttgctggctaaaatgccaggtaaagggttggttggacacagcgcttagtgcacgctgtcatcatggacatcataatcagttgtgaaaaacacgcgaacctatgacacttcttattccacactgaatgtgaaattgcatgttcagatgtttactacgaggcctggctcacaggaagtgttcagtaaaagtatgcactgttagattactgataacgcggatagatttttgtttaccataaattgttccagatttatattaatggaaggaagtgtgcatttattagctattactcaactttacaatgcaaacatcttatttctcatctttaaacatgtcgaccagtttaattgaaaagtattctgagactgcaaaatggggtgttaaaaaatactgcagttacggagctgtgtaaaccagtttctcattgcataagatacagatgtaaattgcatggagaggttgatatgcacctgtacagtaattcactcccccatttcacatctttgtcagagaatagttcttgttcatactgagtgttctaaatttgaagttatatatacaaattaaaatatttt

SEQ ID NO: 161224 - DNA, 1062 bp, Artificial Sequence
  derived and/or modified sequence
atggcaatgacgctcctagaggattggtgcaggggaatggatgtcaattcccaacgtgcgctgctggtatggggcatacctgtgaattgcgatgaggccgagatagaagaaaccttacaagccgcaatgccgcaggtctcctataggatgcttgggcgaatgttctggagggaagagaatgccaaagccgctctgcttgaactgactggcgcagtggactatgccgcaataccgcgagagatgccaggcaagggcggtgtgtggaaggtcctgttcaaacctcccaccagcgacgctgaatttttggagcgccttcacctttttctcgcgagggaaggatggacggtccaagacgttgcaagagtcctcggtttccagaacccaaccccaacccccggacccgaaatgccagccgagatgctgaactatatcctggataacgtgatccagccactcgtggaatccatttggtacaagcggctgaccctgttctccggccgagacataccgggaccaggagaggagacttttgacccttggctggaacacacaaatgaggtgctcgaggagtggcaggtgtcagatgtggagaaacggaggagactgatggagagccttagggggccagcagccgacgtcattaggatcttgaaaagcaacaaccccgcaatcaccacagctgaatgtcttaaggccttggagcaagtgttcggctcagtcgagtcctcgcgcgatgcacagataaaatttctaaatacatatcagaaccctggcgaaaagctgtcagcatacgtgatccgcttggaacctctccttcaaaaagtggtggagaaaggagctattgataaagacaacgtgaaccaggctaggctagaacaagttatcgccggagctaaccactctggagccatcagacggcagttgtggctcactggggctggtgaaggccctgcccctaacctgtttcaacttctggtccagatacgggaagaagaagccaaggaggaggaggaggaagcggaagctacactgctgcagctcggtctggagggtcatttttag

SEQ ID NO: 161225 - protein, 1143 aa, Artificial Sequence
  derived and/or modified sequence
MAVPARTCGASRPGPARTARPWPGCGPHPGPGTRRPTSGPPRPLWLLLPLLPLLAAPGASAYSFPQQHTMQHWARRLEQEVDGVMRIFGGVQQLREIYKDNRNLFEVQENEPQKLVEKVAGDIESLLDRKVQALKRLADAAENFQKAHRWQDNIKEEDIVYYDAKADAELDDPESEDVERGSKASTLRLDFIEDPNFKNKVNYSYAAVQIPTDIYKGSTVILNELNWTEALENVFMENRRQDPTLLWQVFGSATGVTRYYPATPWRAPKKIDLYDVRRRPWYIQGASSPKDMVIIVDVSGSVSGLTLKLMKTSVCEMLDTLSDDDYVNVASFNEKAQPVSCFTHLVQANVRNKKVFKEAVQGMVAKGTTGYKAGFEYAFDQLQNSNITRANCNKMIMMFTDGGEDRVQDVFEKYNWPNRTVRVFTFSVGQHNYDVTPLQWMACANKGYYFEIPSIGAIRINTQEYLDVLGRPMVLAGKEAKQVQWTNVYEDALGLGLVVTGTLPVFNLTQDGPGEKKNQLILGVMGIDVALNDIKRLTPNYTLGANGYVFAIDLNGYVLLHPNLKPQTTNFREPVTLDFLDAELEDENKEEIRRSMIDGNKGHKQIRTLVKSLDERYIDEVTRNYTWVPIRSTNYSLGLVLPPYSTFYLQANLSDQILQVKYFEFLLPSSFESEGHVFIAPREYCKDLNASDNNTEFLKNFIELMEKVTPDSKQCNNFLLHNLILDTGITQQLVERVWRDQDLNTYSLLAVFAATDGGITRVFPNKAAEDWTENPEPFNASFYRRSLDNHGYVFKPPHQDALLRPLELENDTVGILVSTAVELSLGRRTLRPAVVGVKLDLEAWAEKFKVLASNRTHQDQPQKCGPNSHCEMDCEVNNEDLLCVLIDDGGFLVLSNQNHQWDQVGRFFSEVDANLMLALYNNSFYTRKESYDYQAACAPQPPGNLGAAPRGVFVPTVADFLNLAWWTSAAAWSLFQQLLYGLIYHSWFQADPAEAEGSPETRESSCVMKQTQYYFGSVNASYNAIIDCGNCSRLFHAQRLTNTNLLFVVAEKPLCSQCEAGRLLQKETHSDGPEQCELVQRPRYRRGPHICFDYNATEDTSDCGRGASFPPSLGVLVSLQLLLLLGLPPRPQPQVLVHASRRL

SEQ ID NO: 161226 - DNA, 3432 bp, Artificial Sequence
  derived and/or modified sequence
atggccgtgccggcccggacctgtggggcctccagacccgggcccgccagaaccgctcggccctggccgggatgcggaccacaccctggtccgggcaccaggcgaccgacatctggtccaccgagacccctctggctcttactgcccctcctaccactcctcgccgctcccggggcatccgcttattccttccctcaacaacataccatgcagcactgggcgcgaagactcgagcaagaagtggacggtgtaatgcgcatatttggtggtgtgcagcagctgagggaaatttacaaagataacaggaacctgtttgaagtccaagagaatgaaccccagaagttggtggagaaggtagcgggcgacattgaatctctgttggatcgaaaggtgcaggctcttaagcgactggccgacgccgccgaaaattttcagaaggcacaccgctggcaagataacatcaaagaggaagacatcgtgtattacgatgctaaagccgacgctgaattggatgaccctgagtctgaagacgtggagcgcggctccaaggcatccaccctgcggttggacttcatcgaggatccgaacttcaagaataaagtgaactacagctacgccgctgtccaaatccctaccgacatctacaaaggctctactgtgatactcaacgaattgaactggaccgaggctctcgagaatgtctttatggagaatcgcaggcaagatccaactctgctgtggcaggtctttggcagtgctaccggcgtgacccgctattacccagccacaccttggcgggccccaaagaaaatcgacctgtatgatgttaggcgacgcccctggtatattcaaggggcctcaagcccaaaggatatggtgataatcgtggatgtgagcggctctgtctcgggcctaaccttgaagctgatgaaaactagtgtctgcgagatgcttgatacgttgtcagacgatgattatgtgaatgtggcctctttcaatgaaaaagcgcaacctgtgagctgctttacacatctcgttcaggccaacgtgcgaaacaagaaagtgttcaaggaggccgtgcagggcatggttgccaagggtacgacgggatacaaagcagggtttgagtatgcgttcgatcagctgcagaacagcaacatcacacgcgccaattgcaataaaatgattatgatgtttaccgacggcggtgaagacagggtccaggacgtcttcgaaaaatacaattggcccaacaggaccgttcgcgtgtttacattttccgtcgggcagcataattatgacgtgacaccacttcagtggatggcttgtgctaacaaaggctactacttcgaaatcccttccattggagcaattagaataaatacacaggaatatctggatgtccttggtcggcccatggtcctggcaggtaaggaggcaaaacaggttcagtggaccaacgtctacgaagacgccctcgggttgggattagtggtaactggcaccctgccagtgtttaatctcactcaggacggacctggggaaaagaagaaccagctgatcctcggcgtgatgggcattgacgtcgcactgaacgacataaaaaggctgacccctaattatactctcggtgccaatggctacgtcttcgctattgatctgaatggatatgtgctcctgcaccccaatttgaagccgcagacaaccaacttccgcgaacctgtgacacttgattttcttgatgccgaacttgaggatgagaataaggaagagatccgccgatccatgattgacggaaacaaaggccacaagcaaattagaacactcgtgaagagcctagacgaacgatacatcgacgaggtgacccgcaactacacctgggtgcctattcggtctacgaactacagcttgggactggtactgcccccctacagtaccttctacctgcaggccaatctatctgatcagatcctccaagtgaagtactttgagttcttgttaccttcttcctttgagtcagaaggtcatgtcttcattgccccccgggagtattgtaaagatctcaatgcctccgataacaacacagagtttttgaaaaactttatcgagctaatggaaaaggtgacgcctgacagcaagcagtgtaacaacttcctccttcacaacttgatcctcgacactggcattactcagcagcttgtggagagggtgtggagagaccaggacttgaacacatacagtcttctggcggtcttcgcagctactgacggtggtatcacacgggtgttccctaataaggcagcagaggactggaccgaaaaccctgagccatttaatgcaagcttttatcggcgatcattggataatcacggatatgtgttcaagcccccacatcaagacgccctcttaaggcctctcgagttggaaaacgataccgtgggaattttggtgagtacagctgtggagctgtctctgggccggcggacactccggcccgcagtagtcggtgtcaagctagatctggaagcgtgggcagaaaagttcaaggtgctagcgagcaaccgaactcaccaggaccagccccagaaatgtggcccaaactcacactgtgagatggattgcgaagtcaataatgaagacttgctctgcgtgctaatcgacgatggaggttttctggtcctatccaaccagaatcaccagtgggaccaggtcggtcgcttcttctccgaagtggacgctaacctcatgttagctctgtacaataattcattctatacaaggaaggagagttatgactatcaggccgcatgcgcaccccagccgcctggtaatctcggtgccgctcctcggggcgtgtttgtgcccacagtggcagacttcctcaatctggcctggtggactagtgcagctgcctggtctctattccaacaactcttatacggtctgatataccacagctggtttcaagcggatccagcagaggccgaagggagccccgagacaagagaatcctcttgtgtgatgaaacagacgcaatactatttcgggtccgtgaacgcgagctataatgctatcatcgactgcgggaattgctctcgcttgtttcatgctcagcgcctgacaaacactaacctattgttcgttgtagctgagaaacccttatgctctcagtgtgaagccgggcgtctcttacagaaggagacccacagtgacgggcccgagcaatgcgagctcgtccagaggcctcgttatcgccgggggcctcatatttgctttgattacaatgctacagaggacacttcagattgcgggagaggcgcaagtttcccaccgtcattaggggtgctcgtctccctgcaactcctactcctgttggggctgcccccccgaccacaaccccaggtcctggtgcacgcaagccgtcgcttgtag

SEQ ID NO: 161227 - DNA, 3432 bp, Artificial Sequence
  derived and/or modified sequence
atggctgtgcctgcccggacctgtggggccagcaggcctggccctgccaggacagcccggccctggccaggctgcggcccccaccctggccctggcacccggcggcccaccagcggccccccccggcccctgtggctgctgctgcccctgctgcccctgctggccgcccctggggccagcgcctacagcttcccccagcagcacaccatgcagcactgggcccggcggctggagcaggaggtggatggagtgatgaggatctttggaggagtgcagcagctgcgggagatctacaaggacaacagaaacctgtttgaggtgcaggagaatgagccccagaagctggtggagaaggtggccggggacatcgagagcctgctggacaggaaggtgcaggccctgaagaggctggctgatgctgctgagaacttccagaaggcccaccgctggcaggacaacatcaaggaggaggacatcgtgtactatgatgccaaggcagatgctgagctggatgatcctgagagtgaagatgtggagcggggcagcaaggccagcaccctgcggctggacttcatcgaggaccccaacttcaagaacaaggtgaactacagctatgctgctgtgcagatccccacagacatctacaagggcagcaccgtcatcctgaatgagctgaactggacagaggccctggagaatgtgttcatggagaacagacggcaggaccccaccctgctgtggcaggtgtttggcagcgccaccggggtgacccgctactacccagccaccccctggagggcccccaagaagattgacctgtatgatgtgagaagaagaccctggtacatccagggcgccagcagccccaaggacatggtgatcatcgtggatgtgtctggctctgtgtctggcctgaccctgaagctgatgaagacctctgtgtgtgagatgctggacaccctgagtgatgatgattatgtgaatgtggccagcttcaatgagaaggcccagcctgtgtcctgcttcacccacctggtgcaggccaacgtgaggaacaagaaggtgttcaaggaggccgtgcagggcatggtggccaagggcaccaccggctacaaggccggctttgaatatgcctttgaccagctgcagaacagcaacatcacccgggccaactgcaacaagatgatcatgatgttcacagatggaggagaggacagagtgcaggatgtgtttgagaagtacaactggcccaacagaacagtgcgggtcttcaccttctctgtgggccagcacaactatgatgtgacccccctgcagtggatggcctgtgccaacaagggctactactttgagatccccagcattggagccatccgcatcaacacccaggagtacctggatgtgctgggccggcccatggtgctggccggcaaggaggccaagcaggtgcagtggaccaacgtgtatgaagatgccctgggcctgggcctggtggtgacaggcaccctgcccgtcttcaacctgacccaggacggccctggagagaagaagaaccagctgatcctgggcgtgatgggcattgatgtggccctgaatgacatcaagaggctgacccccaactacaccctgggcgccaacggctacgtgtttgccatcgacctgaatggctacgtgctgctgcaccccaacctgaagccccagaccaccaacttccgggagcctgtgaccctggacttcctggatgctgagctggaggatgagaacaaggaggagatcagaagatccatgattgatggcaacaagggccacaagcagatccgcaccctggtgaagagcctggatgagcgctacattgatgaggtgaccaggaactacacctgggtgcccatccgcagcaccaactacagcctgggcctggtgctgcccccctacagcaccttctacctgcaggccaacctgagtgaccagatcctgcaggtgaagtactttgagttcctgctgcccagcagctttgaaagtgagggccacgtgttcatcgccccccgggagtactgcaaggacctgaatgccagtgacaacaacacagagttcctgaagaacttcatcgagctgatggagaaggtgaccccagacagcaagcagtgcaacaacttcctgctgcacaacctgatcctggacaccggcatcacccagcagctggtggagcgggtgtggagggaccaggacctgaacacctacagcctgctggccgtgtttgctgccacagatggcggcatcaccagggtcttccccaacaaggctgctgaggactggacagaaaatcctgagcccttcaatgccagcttctaccgccgcagcctggacaaccacggctacgtgttcaagccaccccaccaggatgccctgctgcggcccctggagctggagaatgacacagtgggcatcctggtgtccacagctgtggagctgagcctgggccgccgcaccctgcggcctgctgtggtgggcgtgaagctggacctggaggcctgggccgagaagttcaaggtgctggccagcaacagaacccaccaggaccagccccagaagtgtggccccaacagccactgtgagatggactgtgaggtgaacaatgaagacctgctgtgtgtgctgattgatgatggcggcttcctggtgctgagcaaccagaaccaccagtgggaccaggtgggccgcttcttcagcgaggtggatgccaacctgatgctggccctgtacaacaacagcttctacaccaggaaggagagctatgactaccaggccgcctgtgccccccagcccccaggcaacctgggcgccgccccccggggcgtgtttgtgcccaccgtggccgacttcctgaacctggcctggtggaccagcgctgctgcctggagcctcttccagcagctgctgtatggcctcatctaccacagctggttccaggccgaccctgctgaggccgagggcagccctgagacccgggagagcagctgtgtgatgaagcagacccagtactactttggatctgtgaatgccagctacaatgccatcatcgactgtggcaactgcagccgcctcttccacgcccagaggctgaccaacaccaacctgctgtttgtggtggccgagaagcccctgtgcagccagtgtgaggccggccgcctgctgcagaaggagacccacagtgatggccctgagcagtgtgagctggtgcagaggccccgctacagaagaggcccccacatctgctttgactacaatgccacagaggacaccagtgactgtggccgcggggccagcttcccccccagcctgggcgtgctggtgtccctgcagctgctgctgctgctgggcctgcccccccggccccagccccaggtgctggtgcacgccagccggcggctgtag

SEQ ID NO: 161228 - DNA, 3432 bp, Artificial Sequence
  derived and/or modified sequence
atggccgtgcccgcccggacctgcggcgccagccggcccggccccgctagaaccgcccgcccctggcctggctgcgggcctcaccccggtcccggaaccaggaggcccactagcggccctcccagacctctgtggctgctactgcctctgctaccgctgctggcggcccctggagccagtgcttactcctttccccagcagcacaccatgcagcattgggcgaggagattggagcaggaagtggatggggtaatgcgcattttcggcggtgtgcagcagctgagggagatctataaagacaatcggaacctgtttgaggtccaggaaaacgaaccgcagaagctggtagagaaagttgccggggacatcgaaagcctacttgatcggaaggtgcaggccctcaaacgcttagctgatgccgccgagaactttcagaaagcccaccgatggcaggataacataaaagaggaggacatcgtgtactatgacgccaaagccgacgccgaactcgacgatcccgaatctgaggatgtcgaaagaggttccaaggcaagcactctgagattggattttatcgaagaccccaacttcaaaaacaaagttaactatagctacgctgctgtccaaataccaaccgacatctataagggctcaacagttattttgaatgagcttaactggactgaggccctcgagaacgtgtttatggagaatcggcggcaggatcctacattactctggcaggtattcggttcagctaccggagtcacccggtactatcccgccacaccctggcgggcacccaagaagatcgatctatacgacgtccggcggcgtccgtggtacattcagggagcttcctctcctaaggacatggtcataattgtggatgtgtccgggagcgtaagcggactcaccctcaagctgatgaaaacttccgtctgtgaaatgctggataccttaagcgatgacgactacgttaacgtcgcctccttcaatgaaaaggcccagccagtcagctgcttcacacatctggtccaagcaaacgtaaggaacaagaaagtgttcaaagaagcggtgcagggaatggtagccaaggggaccactggatacaaagccggtttcgagtatgccttcgaccagctgcagaacagcaatattactcgcgccaattgcaataaaatgatcatgatgtttaccgacgggggggaggatagagttcaagatgtgttcgaaaagtataattggcccaaccgcactgttagggtattcaccttctccgtcggtcagcacaattacgacgtgacacctctgcagtggatggcatgtgcaaataagggttattactttgagatcccgagcatcggcgccattaggataaacacccaggaatatctcgacgtcctcggccggcctatggttctcgcggggaaggaggctaagcaagtccagtggaccaatgtgtacgaggacgctctggggctaggcctggtcgtgacaggcaccttacctgtcttcaatcttactcaggatggaccaggtgagaagaaaaatcaattgatcctgggcgttatggggattgatgtcgctcttaatgacattaagcgcctcacccccaattatacactgggtgcgaatgggtacgtgttcgccattgacctcaatgggtatgtgctgttacacccgaaccttaaacctcagacaacaaacttcagagaacccgtgacgctagattttctcgacgcagaattggaggatgagaacaaggaagagattagaaggtctatgattgacggtaacaagggtcataagcagatccgtacactggtgaaaagtttggatgaacgttatattgacgaagtgacacggaattatacgtgggtgccaatcaggagtacaaattatagcctgggcctggtgcttcctccctacagcaccttctatctccaagctaacctgagcgaccagatactccaggtgaagtactttgagtttctgctcccttccagtttcgagtctgaaggacacgtgttcatcgcccccagagagtactgtaaggatctgaacgcatcggataacaatacagaatttctgaaaaatttcatcgaactgatggaaaaagtgaccccagactcaaagcagtgcaacaactttctgctgcataacctcattctcgacacgggaattacccagcagctggtggaacgcgtatggcgggatcaggaccttaacacgtattccctcctggctgtgtttgccgccacggatggtggtattactcgcgtgtttccaaacaaggccgcagaagactggactgagaatccagagccttttaatgctagcttctaccgcaggtctctcgataatcatgggtatgtcttcaagcctccgcatcaggacgcattgttgcggccattggaattggaaaacgatactgtgggtatcctggtgtccaccgcagtggaactctcactgggacgtagaacactcaggcccgctgttgttggcgtgaaactagaccttgaggcctgggcggaaaagtttaaggtgctagcctccaaccgcacacaccaggatcaaccccaaaaatgtggaccgaacagccactgtgagatggattgtgaggtgaacaacgaagacctcctatgcgtgctaatagatgatggaggtttcttggtgctctccaaccagaatcaccagtgggatcaagtgggccgattcttttccgaagtcgacgcgaacctcatgttggccttatacaacaatagtttttacacacggaaagagagttatgattatcaagccgcctgtgctccacaacctcctgggaacctgggtgctgcccccagaggggtttttgtccctaccgtggccgattttttgaatctggcctggtggacttccgcggctgcttggagtcttttccagcagctgctgtacggcctgatctatcacagctggttccaggccgatcctgccgaggctgagggaagtcccgagacccgagaatcttcatgcgtgatgaaacagactcagtattattttgggtccgttaatgcttcttataatgctatcatcgactgcggaaactgtagtcgattgttccacgcgcagcgcctgacaaataccaacctcctgttcgtggtggccgagaagccactctgctcacagtgcgaggccggacgcctcttgcagaaggagacgcactctgatggaccggaacagtgtgaactagtgcagagaccacgttaccgacggggaccccatatctgcttcgactataacgcaacagaggatacttctgattgtggtcggggcgcaagtttccccccctcactcggcgtgctggtgtccctgcagcttctgttactgcttggcttacctcctagacctcagccgcaggtcttggtgcacgcaagccgacggctttag

SEQ ID NO: 161229 - DNA, 3432 bp, Artificial Sequence
  derived and/or modified sequence
atggcagtgcccgctagaacctgcggtgcgagtagacctgggcctgctcgcacagcgagaccatggccaggatgcgggcctcaccctggtccagggaccagaaggccaactagtggcccaccacgcccactgtggttacttctgccattactgccactgctcgcagcaccgggagcctccgcctactcttttccccaacagcacaccatgcagcactgggcacggagactggagcaggaagtggatggggtaatgagaatcttcggtggagtgcagcaactcagagagatctacaaggataatcgaaatctgtttgaagtgcaggaaaacgagccccagaaactggtggaaaaagttgcaggggatattgaatccctgctggacaggaaagtccaagcactcaaaaggttagccgacgctgctgagaatttccagaaggctcatcgctggcaggacaatataaaggaggaagatattgtgtactacgacgcgaaggcagacgccgagctggacgaccctgagagcgaggatgttgagaggggctcaaaagccagcacgcttaggctcgacttcatcgaggatccaaactttaagaacaaagtcaactatagctacgcagcagtgcagattcctactgatatatacaaaggctcaaccgtgatcctgaatgagctgaactggaccgaagcactggagaacgtgtttatggagaaccgtaggcaggacccaaccctgctatggcaggtttttggaagcgctactggcgtgactcgctattaccccgctaccccttggagagcgccaaagaagatagacctttacgacgtacgaaggagaccttggtacatccagggggcatcgagtcccaaagacatggtcattattgtggacgtgagtggctcagttagcggcttgaccctgaagttaatgaaaacctccgtgtgtgaaatgttagacaccctatcagatgatgactatgtgaacgtcgcctctttcaacgagaaggctcagcctgttagctgtttcactcatcttgtgcaggctaatgtgcggaacaaaaaggtattcaaggaggcagtgcagggaatggttgccaagggcactaccggttacaaagcagggttcgagtacgcttttgaccaactccagaattctaacattacaagagcgaactgtaacaagatgattatgatgtttacagatggaggggaggatcgggtccaggacgtttttgagaaatataattggcccaatagaactgtgagagtgtttaccttctcagtggggcaacacaattatgacgtgacacctctccagtggatggcttgcgcaaataagggttactattttgaaatcccttcgatcggggcaattagaatcaacactcaggaatatctggatgtcctcggcaggccaatggtcttggccggaaaggaggctaagcaggtgcagtggaccaacgtgtacgaggatgcgcttgggttaggcctcgtggtcaccggcactctacctgttttcaacctgactcaggatggccctggcgaaaaaaagaaccagcttatcctcggagtgatggggatcgatgttgcactcaacgacatcaagaggttaacgcccaattatacgttgggcgcaaacggctatgtgtttgcaatcgacctaaacggttacgtcctcttgcaccctaaccttaaacctcaaacgacgaattttcgggaacctgtaacactggacttcctcgatgcagaactggaggatgagaacaaggaggagatccgcagatccatgatcgacggaaataaagggcacaagcaaattagaacactcgtgaagtccctggacgagaggtatatagacgaggtgactcgcaactatacttgggttccaatacggtcgacaaattattcattgggcctcgtgctcccaccctactcaactttctatttacaggctaatctctccgatcagattctccaagttaagtacttcgagtttcttctcccttcttcctttgagagcgagggacacgtgtttatcgccccaagggagtactgtaaggacctgaacgcttctgataacaacaccgagtttctaaagaacttcatcgagctaatggaaaaagtcacacccgactctaaacagtgtaacaatttcttactccacaatctgattctagatacgggaatcactcagcagctggtggagcgcgtttggagagaccaggacctgaatacatactctctgctggcagtttttgcggcaaccgatggcggaatcacccgggttttccccaacaaggcggctgaagactggacagagaatcccgaaccattcaacgcatctttctataggaggtcattggacaaccatggttacgtctttaaaccaccacaccaggatgccctgctgcgccctttggagctggagaatgatactgtcggtatccttgtgtctactgcggtggaactgtcgctgggtcgcagaactttacgcccagctgtggtgggcgtgaagttagacctggaggcatgggctgagaagttcaaggtcctggcctctaacagaacacaccaggatcagcctcagaagtgtgggccaaactcccactgcgagatggactgtgaggttaataacgaggatctcttatgcgtgctgatcgacgacggcggattcctcgtgctatcaaaccagaatcatcagtgggaccaggtcggtcgcttcttcagtgaagtggacgcaaatctgatgctcgcgctctacaacaacagcttttatacacgaaaggagagctatgattaccaagctgcttgtgccccacagcctccgggaaatctgggagccgcaccacgaggcgtgtttgtgcctaccgtggccgacttccttaatctggcttggtggacaagcgcagcagcctggtctctgttccaacagctgctgtacggtctaatctaccattcgtggttccaggcggacccagccgaggctgagggtagtccggaaacgcgggagtcaagttgcgtgatgaaacagacccaatattactttggcagcgtaaatgcaagttacaacgcgatcatagattgcggtaattgctcacgcctttttcacgcgcagcggctgacaaatactaacctgctgtttgtcgtcgccgaaaagcctctgtgtagccagtgcgaagccggacggttactacagaaagagactcacagcgacggccctgagcaatgcgagttagtccagcgcccaaggtaccgcagaggcccacatatttgctttgattacaacgcaaccgaggacacttcagactgtggcaggggggcatcattccccccttcactaggcgtgctagtcagcttacagctgctgttgctgctaggactgcccccacggccacagccgcaagtactagtgcatgcctctcgacgattgtag

SEQ ID NO: 161230 - DNA, 5206 bp, Artificial Sequence
  derived and/or modified sequence
atggcggtgccggctcggacctgcggcgcctctcggcccggcccagcgcggactgcgcgcccctggcccggctgcggcccccaccctggccccggcacccggcgcccgacgtccgggcccccgcgcccgctgtggctgctgctgccgcttctaccgctgctcgccgcccccggcgcctctgcctacagcttcccccagcagcacacgatgcagcactgggcccggcgtctggagcaggaggtcgacggcgtgatgcggatttttggaggcgtccagcagctccgtgagatttacaaggacaaccggaacctgttcgaggtacaggagaatgagcctcagaagttggtggagaaggtggcaggggacattgagagccttctggacaggaaggtgcaggccctgaagagactggctgatgctgcagagaacttccagaaagcacaccgctggcaggacaacatcaaggaggaagacatcgtgtactatgacgccaaggctgacgctgagctggacgaccctgagagtgaggatgtggaaagggggtctaaggccagcaccctaaggctggacttcatcgaggacccaaacttcaagaacaaggtcaactattcatacgcggctgtacagatccctacggacatctacaaaggctccactgtcatcctcaatgagctcaactggacagaggccctggagaatgtgttcatggaaaaccgcagacaagaccccacactgctgtggcaggtcttcggcagcgccacaggagtcactcgctactacccggccaccccgtggcgagcccccaagaagatcgacctgtacgatgtccgaaggagaccctggtatatccagggggcctcgtcacccaaagacatggtcatcatcgtggatgtgagtggcagtgtgagcggcctgaccctgaagctgatgaagacatctgtctgcgagatgctggacacgctgtctgatgatgactatgtgaatgtggcctcgttcaacgagaaggcacagcctgtgtcatgcttcacacacctggtgcaggccaatgtgcgcaacaagaaggtgttcaaggaagctgtgcagggcatggtggccaagggcaccacaggctacaaggccggctttgagtatgcctttgaccagctgcagaactccaacatcactcgggccaactgcaacaagatgatcatgatgttcacggatggtggtgaggaccgcgtgcaggacgtctttgagaagtacaattggccaaaccggacggtgcgcgtgtttactttctccgtggggcagcataactatgacgtcacaccgctgcagtggatggcctgtgccaacaaaggctactattttgagatcccttccatcggagccatccgcatcaacacacaggaatatctagatgtgttgggcaggcccatggtgctggcaggcaaggaggccaagcaggtgcagtggaccaacgtgtatgaggatgcactgggactggggttggtggtaacagggaccctccctgttttcaacctgacacaggatggccctggggaaaagaagaaccagctgatcctgggcgtgatgggcattgacgtggctctgaatgacatcaagaggctgacccccaactacacgcttggagccaacggctatgtgtttgccattgacctgaacggctacgtgttgctgcaccccaatctcaagccccagaccaccaacttccgggagcctgtgactctggacttcctggatgcggagctagaggatgagaacaaggaagagatccgtcggagcatgattgatggcaacaagggccacaagcagatcagaacgttggtcaagtccctggatgagaggtacatagatgaggtgacacggaactacacctgggtgcctataaggagcactaactacagcctggggctggtgctcccaccctacagcaccttctacctccaagccaatctcagtgaccagatcctgcaggtcaagtattttgagttcctgctccccagcagctttgagtctgaaggacacgttttcattgctcccagagagtactgcaaggacctgaatgcctcagacaacaacaccgagttcctgaaaaactttattgagctcatggagaaagtgactccagactccaagcagtgcaacaacttccttctgcacaacctgatcttggacacgggcatcacgcagcagctggtagagcgtgtgtggagggaccaggatctcaacacgtacagcctactggccgtgttcgctgccacagacggtggcatcacccgagtcttccccaacaaggcagctgaggactggacagagaaccctgagcccttcaatgccagcttctaccgccgcagcctggataaccacggttatgtcttcaagcccccacaccaggatgccctgttaaggccgctggagctggagaatgacactgtgggcatcctcgtcagcacagctgtggagctcagcctaggcaggcgcacactgaggccagcagtggtgggcgtcaagctggacctagaggcttgggctgagaagttcaaggtgctagccagcaaccgtacccaccaagaccagcctcagaagtgcggccccaacagccactgtgagatggactgcgaggttaacaatgaggacttactctgtgtcctcattgatgatggaggattcctggtgctgtcaaaccagaaccatcagtgggaccaggtgggcaggttcttcagtgaggtggatgccaacctgatgctggcactctacaataactccttctacacccgcaaggagtcctatgactatcaggcagcctgtgcccctcagccccctggcaacctgggtgctgcaccccggggtgtctttgtgcccaccgttgcagatttccttaacctggcctggtggacctctgctgccgcctggtccctgttccagcagcttctctacggcctcatctaccacagctggttccaagcagaccccgcggaggccgaggggagccccgagacgcgcgagagcagctgcgtcatgaaacagacccagtactacttcggctcggtaaacgcctcctacaacgccatcatcgactgcggaaactgctccaggctgttccacgcgcagagactgaccaacaccaatcttctctttgtggtggccgagaagccgctgtgcagccagtgcgaggctggccggctgctgcagaaggagacgcactcggacggcccggagcagtgtgagctagtgcagagaccgcgataccggagaggcccgcacatctgcttcgactacaacgcgacagaagatacctcagactgtggccgcggggcctccttcccgccgtcgctgggcgtcctggtctccctgcaactgctgctcctcctgggcctgccgccccggccgcagcctcaagtcctcgtccacgcctctcgccgcctctgagcaccctgccccaccccacctccactcccacctcacccggcctcttcgcctttcccaccctcctgccccacactccccgccttagagcctcgtccctccctcactgaaggacctgagctggccaggccctgagagtctggtctgcgccttgggatggggagtcccaaagcgggacgccgcaggtgtttggcacccaaatcacatctcacctccgaactgttcaagtgtccccagacccttcttgcctgctgggctccccccagtgggatgggacagggaggccacacgcactggtgccaaaaccaggcctctgctgccgcccttcctggaggctgcctatgttgggggggaccctgcctcagctgacccggcctctctgccccacccaagcccaaacttggtttctgtgagaatagtggaggaaggtgagatggccagtttgaagcctgtgcctcccagcttaaatcctagcaggagagaggctctggggcagcccccatgggctcctgcccctttcaggcctacagccacatccccaagcccaccaggtgtcaggatagtcacagtgataccagttcagacactaccccatatacacctggaacattgaggatggaaactggactcacattcgacataccccactgggcacacgcacaaacacacacactatggggtggggtgggtgtaggggcttacaaagccttacacagggcgaggggttggtgggagggttggcacctgcacactccatctcctgctcaccacctgcctctaatctgagctgcagcctggctggtcctcccatttctaaagctgaatgtcaaacagtgccaaatgctggggcagggggtgaagaaccctctgtcccacccctagccaccagtgtcctccaagtgccccctcacctctccaggtgctcattgtaaccatttctcactagtgtcaggcccccagtgggaccacatgccactgcctgcacctttcggcagaggaacccccaccagacatcaccctttgccttagcaggggtgactttgtctctcctggctgggccatccttccgccaatctggcccttacacactcaggcctgtgcccactccctatctccttcccacccctacacacacactccctgcttgcaggaggccaaactgtccctcccttgctgaacacacacacacacacacacacacaggtggggactgggcacagctcttcacaccattcattctggtcatttcccccaaaggcatcccagcctgggggccagtggggaactgagggcaaggggatatagtgatggggctcagatggactgggaggagggggagggtgatgcattaattaatggcttcgttaattaatgtcatgttgcttgtcgctttctcagtgtgtgtgtgtggtccatgcccactgctggtgccagggtgggtgtccatgtgcacccggcctggatgccagctgtgtccttcgggggcgtgcgtgtaactgtagtgtagtcaggtgctcaatggagaatataaacatatacagaaaaatatatattttaagtttaaaaaacagaaaaacagacaaaacaatccccatcaggtagctgtctaacccccagctgggtctaatccttctcattacccacccgacctggctgcccctcaccttgggctgggggactggggggccatttccttttctctgccctttttttgttgttctattttgtacagacaagttggaaaaacaacagcgacaaaaaagtcaagaaactttgt

SEQ ID NO: 161231 - DNA, 3432 bp, Artificial Sequence
  derived and/or modified sequence
atggccgtgcccgccagaacctgcggcgccagcagacccggccccgccagaaccgccagaccctggcccggctgcggcccccaccccggccccggcaccagaagacccaccagcggcccccccagacccctgtggctgctgctgcccctgctgcccctgctggccgcccccggcgccagcgcctacagcttcccccagcagcacaccatgcagcactgggccagaagactggagcaggaggtggacggcgtgatgagaatcttcggcggcgtgcagcagctgagagagatctacaaggacaacagaaacctgttcgaggtgcaggagaacgagccccagaagctggtggagaaggtggccggcgacatcgagagcctgctggacagaaaggtgcaggccctgaagagactggccgacgccgccgagaacttccagaaggcccacagatggcaggacaacatcaaggaggaggacatcgtgtactacgacgccaaggccgacgccgagctggacgaccccgagagcgaggacgtggagagaggcagcaaggccagcaccctgagactggacttcatcgaggaccccaacttcaagaacaaggtgaactacagctacgccgccgtgcagatccccaccgacatctacaagggcagcaccgtgatcctgaacgagctgaactggaccgaggccctggagaacgtgttcatggagaacagaagacaggaccccaccctgctgtggcaggtgttcggcagcgccaccggcgtgaccagatactaccccgccaccccctggagagcccccaagaagatcgacctgtacgacgtgagaagaagaccctggtacatccagggcgccagcagccccaaggacatggtgatcatcgtggacgtgagcggcagcgtgagcggcctgaccctgaagctgatgaagaccagcgtgtgcgagatgctggacaccctgagcgacgacgactacgtgaacgtggccagcttcaacgagaaggcccagcccgtgagctgcttcacccacctggtgcaggccaacgtgagaaacaagaaggtgttcaaggaggccgtgcagggcatggtggccaagggcaccaccggctacaaggccggcttcgagtacgccttcgaccagctgcagaacagcaacatcaccagagccaactgcaacaagatgatcatgatgttcaccgacggcggcgaggacagagtgcaggacgtgttcgagaagtacaactggcccaacagaaccgtgagagtgttcaccttcagcgtgggccagcacaactacgacgtgacccccctgcagtggatggcctgcgccaacaagggctactacttcgagatccccagcatcggcgccatcagaatcaacacccaggagtacctggacgtgctgggcagacccatggtgctggccggcaaggaggccaagcaggtgcagtggaccaacgtgtacgaggacgccctgggcctgggcctggtggtgaccggcaccctgcccgtgttcaacctgacccaggacggccccggcgagaagaagaaccagctgatcctgggcgtgatgggcatcgacgtggccctgaacgacatcaagagactgacccccaactacaccctgggcgccaacggctacgtgttcgccatcgacctgaacggctacgtgctgctgcaccccaacctgaagccccagaccaccaacttcagagagcccgtgaccctggacttcctggacgccgagctggaggacgagaacaaggaggagatcagaagaagcatgatcgacggcaacaagggccacaagcagatcagaaccctggtgaagagcctggacgagagatacatcgacgaggtgaccagaaactacacctgggtgcccatcagaagcaccaactacagcctgggcctggtgctgcccccctacagcaccttctacctgcaggccaacctgagcgaccagatcctgcaggtgaagtacttcgagttcctgctgcccagcagcttcgagagcgagggccacgtgttcatcgcccccagagagtactgcaaggacctgaacgccagcgacaacaacaccgagttcctgaagaacttcatcgagctgatggagaaggtgacccccgacagcaagcagtgcaacaacttcctgctgcacaacctgatcctggacaccggcatcacccagcagctggtggagagagtgtggagagaccaggacctgaacacctacagcctgctggccgtgttcgccgccaccgacggcggcatcaccagagtgttccccaacaaggccgccgaggactggaccgagaaccccgagcccttcaacgccagcttctacagaagaagcctggacaaccacggctacgtgttcaagcccccccaccaggacgccctgctgagacccctggagctggagaacgacaccgtgggcatcctggtgagcaccgccgtggagctgagcctgggcagaagaaccctgagacccgccgtggtgggcgtgaagctggacctggaggcctgggccgagaagttcaaggtgctggccagcaacagaacccaccaggaccagccccagaagtgcggccccaacagccactgcgagatggactgcgaggtgaacaacgaggacctgctgtgcgtgctgatcgacgacggcggcttcctggtgctgagcaaccagaaccaccagtgggaccaggtgggcagattcttcagcgaggtggacgccaacctgatgctggccctgtacaacaacagcttctacaccagaaaggagagctacgactaccaggccgcctgcgccccccagccccccggcaacctgggcgccgcccccagaggcgtgttcgtgcccaccgtggccgacttcctgaacctggcctggtggaccagcgccgccgcctggagcctgttccagcagctgctgtacggcctgatctaccacagctggttccaggccgaccccgccgaggccgagggcagccccgagaccagagagagcagctgcgtgatgaagcagacccagtactacttcggcagcgtgaacgccagctacaacgccatcatcgactgcggcaactgcagcagactgttccacgcccagagactgaccaacaccaacctgctgttcgtggtggccgagaagcccctgtgcagccagtgcgaggccggcagactgctgcagaaggagacccacagcgacggccccgagcagtgcgagctggtgcagagacccagatacagaagaggcccccacatctgcttcgactacaacgccaccgaggacaccagcgactgcggcagaggcgccagcttcccccccagcctgggcgtgctggtgagcctgcagctgctgctgctgctgggcctgccccccagaccccagccccaggtgctggtgcacgccagcagaagactgtag

SEQ ID NO: 161232 - protein, 737 aa, Artificial Sequence
  derived and/or modified sequence
MEVEQEQRRRKVEAGRTKLAHFRQRKTKGDSSHSEKKTAKRKGSAVDASVQEESPVTKEDSALCGGGDICKSTSCDDTPDGAGGAFAAQPEDCDGEKREDLEQLQQKQVNDHPPEQCGMFTVSDHPPEQHGMFTVGDHPPEQRGMFTVSDHPPEQRGMFTISDHQPEQRGMFTVSDHTPEQRGIFTISDHPAEQRGMFTKECEQECELAITDLESGREDEAGLHQSQAVHGLELEALRLSLSNMHTAQLELTQANLQKEKETALTELREMLNSRRAQELALLQSRQQHELELLREQHAREKEEVVLRCGQEAAELKEKLQSEMEKNAQIVKTLKEDWESEKDLCLENLRKELSAKHQSEMEDLQNQFQKELAEQRAELEKIFQDKNQAERALRNLESHHQAAIEKLREDLQSEHGRCLEDLEFKFKESEKEKQLELENLQASYEDLKAQSQEEIRRLWSQLDSARTSRQELSELHEQLLARTSRVEDLEQLKQREKTQHESELEQLRIYFEKKLRDAEKTYQEDLTLLQQRLQGAREDALLDSVEVGLSCVGLEEKPEKGRKDHVDELEPERHKESLPRFQAELEESHRHQLEALESPLCIQHEGHVSDRCCVETSALGHEWRLEPSEGHSQELPWVHLQGVQDGDLEADTERAARVLGLETEHKVQLSLLQTELKEEIELLKIENRNLYGKLQHETRLKDDLEKVKHNLIEDHQKELNNAKQKTELMKQEFQRKET

SEQ ID NO: 161233 - protein, 3336 aa, Artificial Sequence
  derived and/or modified sequence
MEVEQEQRRRKVEAGRTKLAHFRQRKTKGDSSHSEKKTAKRKGSAVDASVQEESPVTKEDSALCGGGDICKSTSCDDTPDGAGGAFAAQPEDCDGEKREDLEQLQQKQVNDHPPEQCGMFTVSDHPPEQHGMFTVGDHPPEQRGMFTVSDHPPEQHGMFTVSDHPPEQRGMFTISDHQPEQRGMFTVSDHTPEQRGIFTISDHPAEQRGMFTKECEQECELAITDLESGREDEAGLHQSQAVHGLELEALRLSLSNMHTAQLELTQANLQKEKETALTELREMLNSRRAQELALLQSRQQHELELLREQHAREKEEVVLRCGQEAAELKEKLQSEMEKNAQIVKTLKEDWESEKDLCLENLRKELSAKHQSEMEDLQNQFQKELAEQRAELEKIFQDKNQAERALRNLESHHQAAIEKLREDLQSEHGRCLEDLEFKFKESEKEKQLELENLQASYEDLKAQSQEEIRRLWSQLDSARTSRQELSELHEQLLARTSRVEDLEQLKQREKTQHESELEQLRIYFEKKLRDAEKTYQEDLTLLQQRLQGAREDALLDSVEVGLSCVGLEEKPEKGRKDHVDELEPERHKESLPRFQAELEESHRHQLEALESPLCIQHEGHVSDRCCVETSALGHEWRLEPSEGHSQELPWVHLQGVQDGDLEADTERAARVLGLETEHKVQLSLLQTELKEEIELLKIENRNLYGKLQHETRLKDDLEKVKHNLIEDHQKELNNAKQKTELMKQEFQRKETDWKVMKEELQREAEEKLTLMLLELREKAESEKQTIINKFELREAEMRQLQDQQAAQILDLERSLTEQQGRLQQLEQDLTSDDALHCSQCGREPPTAQDGELAALHVKEDCALQLMLARSRFLEERKEITEKFSAEQDAFLQEAQEQHARELQLLQERHQQQLLSVTAELEARHQAALGELTASLESKQGALLAARVAELQTKHAADLGALETRHLSSLDSLESCYLSEFQTIREEHRQALELLRADFEEQLWKKDSLHQTILTQELEKLKRKHEGELQSVRDHLRTEVSTELAGTVAHELQGVHQGEFGSEKKTALHEKEETLRLQSAQAQPFHQEEKESLSLQLQKKNHQVQQLKDQVLSLSHEIEECRSELEVLQQRRERENREGANLLSMLKADVNLSHSERGALQDALRRLLGLFGETLRAAVTLRSRIGERVGLCLDDAGAGLALSTAPALEETWSDVALPELDRTLSECAEMSSVAEISSHMRESFLMSPESVRECEQPIRRVFQSLSLAVDGLMEMALDSSRQLEEARQIHSRFEKEFSFKNEETAQVVRKHQELLECLKEESAAKAELALELHKTQGTLEGFKVETADLKEVLAGKEDSEHRLVLELESLRRQLQQAAQEQAALREECTRLWSRGEATATDAEAREAALRKEVEDLTKEQSETRKQAEKDRSALLSQMKILESELEEQLSQHRGCAKQAEAVTALEQQVASLDKHLRNQRQFMDEQAAEREHEREEFQQEIQRLEGQLRQAAKPQPWGPRDSQQAPLDGEVELLQQKLREKLDEFNELAIQKESADRQVLMQEEEIKRLEEMNINIRKKVAQLQEEVEKQKNIVKGLEQDKEVLKKQQMSSLLLASTLQSTLDAGRCPEPPSGSPPEGPEIQLEVTQRALLRRESEVLDLKEQLEKMKGDLESKNEEILHLNLKLDMQNSQTAVSLRELEEENTSLKVIYTRSSEIEELKATIENLQENQKRLQKEKAEEIEQLHEVIEKLQHELSLMGPVVHEVSDSQAGSLQSELLCSQAGGPRGQALQGELEAALEAKEALSRLLADQERRHSQALEALQQRLQGAEEAAELQLAELERNVALREAEVEDMASRIQEFEAALKAKEATIAERNLEIDALNQRKAAHSAELEAVLLALARIRRALEQQPLAAGAAPPELQWLRAQCARLSRQLQVLHQRFLRCQVELDRRQARRATAHTRVPGAHPQPRMDGGAKAQVTGDVEASHDAALEPVVPDPQGDLQPVLVTLKDAPLCKQEGVMSVLTVCQRQLQSELLLVKNEMRLSLEDGGKGKEKVLEDCQLPKVDLVAQVKQLQEKLNRLLYSMTFQNVDAADTKSLWPMASAHLLESSWSDDSCDGEEPDISPHIDTCDANTATGGVTDVIKNQAIDACDANTTPGGVTDVIKNWDSLIPDEMPDSPIQEKSECQDMSLSSPTSVLGGSRHQSHTAEAGPRKSPVGMLDLSSWSSPEVLRKDWTLEPWPSLPVTPHSGALSLCSADTSLGDRADTSLPQTQGPGLLCSPGVSAAALALQWAESPPADDHHVQRTAVEKDVEDFITTSFDSQETLSSPPPGLEGKADRSEKSDGSGFGARLSPGSGGPEAQTAGPVTPASISGRFQPLPEAMKEKEVRPKHVKALLQMVRDESHQILALSEGLAPPSGEPHPPRKEDEIQDISLHGGKTQEVPTACPDWRGDLLQVVQEAFEKEQEMQGVELQPRLSGSDLGGHSSLLERLEKIIREQGDLQEKSLEHLRLPDRSSLLSEIQALRAQLRMTHLQNQEKLQHLRTALTSAEARGSQQEHQLRRQVELLAYKVEQEKCIAGDLQKTLSEEQEKANSVQKLLAAEQTVVRDLKSDLCESRQKSEQLSRSLCEVQQEVLQLRSMLSSKENELKAALQELESEQGKGRALQSQLEEEQLRHLQRESQSAKALEELRASLETQRAQSSRLCVALKHEQTAKDNLQKELRIEHSRCEALLAQERSQLSELQKDLAAEKSRTLELSEALRHERLLTEQLSQRTQEACVHQDTQAHHALLQKLKEEKSRVVDLQAMLEKVQQQALHSQQQLEAEAQKHCEALRREKEVSATLKSTVEALHTQKRELRCSLEREREKPAWLQAELEQSHPRLKEQEGRKAARRSAEARQSPAAAEQWRKWQRDKEKLRELELQRQRDLHKIKQLQQTVRDLESKDEVPGSRLHLGSARRAAGSDADHLREQQRELEAMRQRLLSAARLLTSFTSQAVDRTVNDWTSSNEKAVMSLLHTLEELKSDLSRPTSSQKKMAAELQFQFVDVLLKDNVSLTKALSTVTQEKLELSRAVSKLEKLLKHHLQKGCSPSRSERSAWKPDETAPQSSLRRPDPGRLPPAASEEAHTSNVKMEKLYLHYLRAESFRKALIYQKKYLLLLIGGFQDSEQETLSMIAHLGVFPSKAERKITSRPFTRFRTAVRVVIAILRLRFLVKKWQEVDRKGALAQGKAPRPGPRARQPQSPPRTRESPPTRDVPSGHTRDPARGRRLAAAASPHSGGRATPSPNSRLERSLTASQDPEHSLTEYIHHLEVIQQRLGGVLPDSTSKKSCHPMIKQ

SEQ ID NO: 161234 - DNA, 2214 bp, Artificial Sequence
  derived and/or modified sequence
atggaggtggagcaggaacaacgccggagaaaagttgaggctggacggacaaaactggcccactttcggcagcgaaagacaaaaggggattctagccattcagagaaaaagacggccaaaagaaaggggtctgcggttgatgctagcgtgcaggaggaatctcctgtcacaaaggaggactccgccctctgcggggggggagatatctgtaagtcgaccagttgcgacgacaccccagacggcgctggcggagccttcgctgcgcagccggaggactgcgacggggagaagagagaggatcttgagcagcttcagcagaagcaggtgaacgaccaccctccagagcaatgtgggatgttcaccgtttcggatcaccctcccgagcaacacggcatgttcacggtgggcgaccaccctcccgaacaacgggggatgtttacagtatccgatcatcctcctgaacagagggggatgtttacaataagtgatcatcagcccgagcagcgtgggatgttcacggtgtctgaccacacacctgaacagagagggatattcacaatcagtgaccatcccgccgagcaacgaggcatgtttactaaggaatgcgagcaggaatgtgaactggccataacagatctggagtccggacgtgaggatgaagcagggcttcatcagtcacaagccgtccatggactcgagctggaagcccttcggttaagcctgtctaatatgcatactgcccagctagaactgacacaggccaatcttcagaaagaaaaagagacagccctgaccgagttacgggagatgttgaatagccggcgtgcccaggaacttgcccttctacaaagccggcagcaacacgaactagagctgctgagggagcagcacgcccgggaaaaagaggaagtggtccttcgatgcggccaggaagccgctgagctaaaagagaagctgcaatccgaaatggaaaagaatgcccagatcgtgaagactctcaaggaagactgggaatctgaaaaggatctttgtctcgaaaatctgaggaaggaactgagtgctaaacaccagtccgagatggaagatctgcaaaaccagttccaaaaggaactagccgagcagagagcggagttggagaaaatcttccaggataagaaccaagccgaacgggccctgcggaaccttgagtctcaccaccaggccgccatcgagaagcttcgcgaggacctgcagtccgaacacgggcgatgcctcgaggacttggaattcaagtttaaggaatccgagaaagagaagcagctggaactagaaaatctgcaggcttcatacgaggatttgaaggcgcagtcccaggaggagatccgtaggctgtggtctcaactggattcagcccgaacctccaggcaggagctctccgagctccatgagcaactgcttgcaagaacttcgcgtgtggaagatctcgaacagctgaaacagcgcgaaaaaacccagcacgagagtgagctggaacaattaaggatttactttgaaaagaaattgagggacgctgaaaaaacttaccaggaagatttgaccctgctccaacaacgacttcagggcgcccgggaggacgcgctgttagactctgtggaagtgggactaagttgtgttggactggaagaaaagcctgagaaaggccgaaaagaccatgtggacgagttagagcccgagagacataaggaatccctgccccgttttcaggcggagctggaggagtcccaccggcaccagctggaggccctggaatctcccctctgcattcagcatgaagggcacgtgtctgaccgatgttgtgttgagacaagcgccctgggtcacgaatggcgtttagagccctcagagggacactctcaggaacttccatgggttcatctacagggggtgcaagatggggacctggaagcggataccgagagggcagctcgggtgctggggcttgaaaccgaacacaaagttcagctgtcactgttgcagaccgaattgaaagaagagattgagttactaaaaatagagaacagaaatttatatgggaaacttcaacacgaaaccagactgaaagatgacctcgagaaggtgaaacataatctgatcgaggatcaccagaaagagcttaataatgctaagcagaagactgaattgatgaaacaggaattccagcggaaagaaacatag

SEQ ID NO: 161235 - DNA, 10011 bp, Artificial Sequence
  derived and/or modified sequence
atggaggtcgaacaggagcagaggcggaggaaggttgaagcggggcggacgaaactggcccactttcggcagcgcaagactaaaggagattcatctcactccgaaaagaagacagccaagcggaaaggcagcgcagtagacgccagcgttcaggaagagtcgccagtcaccaaggaggacagcgccctgtgcggcggaggggatatttgcaaaagcacttcctgtgacgacacccctgatggggcgggcggggcgtttgccgcccagccagaagactgtgatggggagaagcgcgaggatcttgaacagctgcagcagaagcaggttaacgaccatccccctgagcagtgtggcatgtttaccgtcagcgatcaccccccagaacagcatggtatgtttactgtgggcgaccacccccccgagcagcgcggtatgtttaccgttagcgaccaccctcccgagcagcatggaatgttcactgtaagtgatcatcccccagagcagcgcggaatgtttacaatttccgatcaccagcctgagcagagagggatgttcaccgtaagcgatcataccccagagcagagagggatttttaccatctctgaccatccggccgaacaaagagggatgtttacgaaggagtgtgaacaagaatgcgaactggccattactgatcttgaatccggacgcgaagacgaggcaggactgcatcaaagccaggctgttcatgggctcgaactcgaagcactccgcctgtccttgagcaacatgcacaccgcccagctggagctgactcaggcaaacctacagaaggagaaagagaccgcacttacggaacttagggaaatgctcaatagccgcagggctcaagaactggccttgcttcagtctcggcaacagcacgaactggaactacttcgcgagcagcacgcccgtgagaaagaggaggttgtactgaggtgcggccaggaggccgcagaactgaaagaaaaactgcagtccgagatggagaagaacgcccagatcgtcaaaactttgaaggaggattgggaaagcgagaaggatttatgtcttgagaaccttcggaaagagttaagcgccaagcaccagtccgaaatggaagatctccagaaccagttccagaaggagttggctgaacaacgcgccgaattagaaaaaattttccaagacaagaaccaggctgaacgcgcactgcggaatctggaatcacatcaccaggcagccattgagaagctaagggaggacctgcagagtgagcacggacggtgcttggaggatttggagttcaagtttaaagagtctgagaaggaaaaacagctggagctagaaaacctccaggcctcttacgaagacctcaaggctcaatctcaggaggagataagacgcctgtggtcgcagcttgatagcgcccggacgtctcgccaggaactttccgaattgcacgagcaattactggcaagaaccagtcgagtggaagatctcgaacagttgaagcaaagagaaaaaacccaacacgagagcgaactcgagcaattacgaatctattttgagaagaagctacgggatgctgagaaaacctaccaagaggacctcactctcctccagcagcgcttgcagggtgctagggaagatgctttactggattcagttgaggttggactgagctgcgttggcttagaagaaaagcccgagaagggacggaaggaccacgtagatgagctcgagccagaacggcacaaggagagtttgcccagatttcaggccgagctcgaagaaagccacaggcatcagcttgaggctctagagagtccactgtgcatccagcacgaggggcatgtttccgatcgatgttgtgttgaaacatccgctcttgggcacgaatggagactcgagccttcagagggacattcccaggagctaccctgggtgcatctccagggagtgcaggatggcgacctggaagccgacactgaaagagctgcccgggtgcttggtcttgagaccgagcacaaggttcaactcagcttgctgcagacagaactgaaagaggagattgagttattgaagatcgagaatcggaacctatatggaaaactacaacatgagacccgcttgaaggacgacctcgagaaggtcaaacacaatcttatcgaggaccatcagaaggagctgaataatgcgaagcagaaaactgagctgatgaaacaggaatttcagcggaaagagactgattggaaggtcatgaaggaagagctccaacgggaggcagaagaaaagcttactctgatgctgctggagctacgagagaaagctgagagtgagaaacagactatcattaacaaatttgagcttagagaggccgaaatgcgccagctgcaagaccaacaggccgcacaaatactggatctggaaaggtctttgaccgaacagcaaggacgcttgcagcagcttgagcaggatcttacgagcgacgatgctctccattgctcacaatgtgggcgtgagccgcctacagctcaagatggtgagctggccgcactgcacgtcaaggaggattgtgccctccagcttatgctggcccgcagtcgatttctcgaggagcgcaaggaaataacggagaagttttctgcggaacaggacgcattcctccaggaagcacaggagcagcacgcccgcgaactacagctcctgcaggagcggcatcagcagcagctgctgtccgtgaccgctgagctcgaggccaggcaccaggctgctctgggtgagctgaccgcttcactggagagcaagcagggcgcactcctcgcagccagggtggcggaactacagactaaacatgcagctgatctcggggccctggaaaccaggcacctgagcagcttagattccttggagagttgttacctgtccgaatttcaaacaatccgcgaggagcacaggcaggcgctagagcttttgcgggctgactttgaagaacagctgtggaagaaggattctctgcaccagacaatcctcacgcaggaactggaaaagttaaagcgcaagcacgagggagagttgcagagcgttcgcgatcatttgagaaccgaagtctccaccgaactcgctggcacagtggctcatgaactacaaggagtgcatcagggagagtttggttctgagaagaagaccgctctccacgaaaaggaggagaccttgcggctgcagtccgctcaagctcaaccatttcaccaggaggagaaggaaagcctctcgttacagttacagaagaaaaaccaccaggttcagcagttaaaggatcaggtgctgtctttaagccatgagatcgaagagtgcagatctgagctagaagtcttacaacagcgccgggagcgggagaatagggagggtgcaaatctgttaagcatgctgaaagcagacgtgaacctgagccacagcgaacggggtgcactgcaggatgcattgcgaaggcttctcggtctctttggcgagacactgagggctgcagtgacacttcgatcccgtatcggcgaaagggtcggtttgtgtctggacgacgcaggggccggacttgcccttagtacagcacccgctctggaagaaacttggagcgatgtggcactgcccgaacttgatagaacgctctccgaatgcgccgaaatgtcatcagtggcagagatttcatcacatatgcgggagtccttcttgatgagccccgagtccgttagagaatgcgaacagcccatacgccgcgttttccagagtctaagtctggccgtcgatggtctgatggagatggccttagatagctcacgacagcttgaggaggccagacagatccatagtcgattcgagaaggagttctcattcaagaacgaggaaacagcccaagtggtgcgcaagcaccaggagttgttagaatgtctgaaggaagaaagcgcagctaaggcagaactggcactcgagctgcataaaacccaaggaacgctggagggcttcaaggttgagactgccgacctcaaggaagtgctagcaggcaaagaggactccgagcaccgcctagtcctcgagctagagagtctccggcggcagctgcagcaggcagctcaggagcaggccgctctcagggaggaatgcacgagactgtggagtagaggggaggcaaccgccaccgatgccgaggcaagggaagcagcacttaggaaggaagtggaggatcttaccaaggagcagagtgagacaaggaaacaggcagagaaagataggtctgccctgctgagtcagatgaaaattttggaatccgaactagaggagcaactatcccaacaccgcgggtgtgctaagcaggcagaagccgtgaccgcacttgagcagcaagtcgcctctctagacaaacatcttaggaaccagagacagtttatggatgagcaagcagcggaaagggagcacgagagagaggaatttcagcaggagattcaaaggttagaaggacagctcaggcaagctgctaaaccccagccctggggaccccgtgattcacagcaagcacccctcgatggagaggttgaattgctccaacagaagctcagggaaaagcttgacgaatttaacgaactggccatccagaaggagtctgcagatcgccaggtgttaatgcaggaagaggagatcaagagactggaagaaatgaatataaacataagaaaaaaagtagcccagttacaggaggaagttgagaaacagaagaatatagttaagggactggagcaggataaggaagtgctcaagaagcagcagatgtcaagtctgctcctagcctctaccctgcagagcaccctggacgcaggaaggtgcccagaacccccgagcggctctccccctgagggaccggagatacagctggaggtgacccagcgcgcactgttgaggagggagtcggaggtcctcgatttaaaggagcagctggaaaaaatgaaaggagatctggaatctaaaaatgaggagattctgcaccttaacttaaagctggacatgcagaactcacaaaccgcggtctcactacgggagctcgaggaggaaaatactagcctgaaggtgatatatacccgaagctctgaaatcgaggagctaaaggccacgatcgagaacctccaggaaaatcaaaagcgtttgcagaaagagaaagcagaagaaatagaacaactgcacgaggtgatagagaaactgcaacatgagttgtcactcatggggccagtcgtccacgaagtctcagattcgcaagcaggttctcttcagagtgaactcctgtgttcccaggctggagggcctagagggcaggcactgcagggcgagctcgaggcagctctcgaagcgaaggaagcattgagtagactgctggccgatcaagagcggagacattcccaggccctggaagccctccagcagcgtctgcagggggctgaggaggcagcagagcttcaattggccgaattggagcggaacgtggccctacgtgaagccgaagtcgaagacatggcatcccggatccaggagttcgaagccgctctcaaggccaaggaagctactatcgccgagagaaaccttgaaattgatgccctcaatcagcggaaagcggctcactccgccgaactagaggccgtcctgctagctcttgccagaatccgccgggcgttggagcagcagcctctggccgccggagctgcacccccagaactccaatggctcagggcacaatgcgccagactctcgaggcagcttcaagtcctccaccagcgcttccttaggtgccaggtggaattagataggaggcaggcaaggagagccacagcacacacccgtgtgccaggtgcccacccccaaccccggatggatggcggggccaaggctcaggtaactggggacgtggaagcaagtcatgacgcagccctggagccggtggtcccagatccacagggcgacctccagcctgtcctcgtcaccttgaaagatgccccactgtgtaaacaggaaggagttatgtcagttttgactgtgtgtcaacgccagctacaaagtgagctgctgctcgtgaaaaacgaaatgagactttcgctagaggatgggggcaagggaaaagagaaggtcctggaagattgccaacttccgaaagttgatctggtggctcaggtgaaacaactccaggaaaaactaaacaggcttctatactcaatgactttccagaatgtggacgctgcagacaccaagagtctgtggcctatggccagcgcccatctgctggagagctcatggagcgatgattcctgcgacggggaggagccggatatctcgccccatattgatacttgtgacgcaaacacagcaacaggtggagtgacggacgtgatcaaaaaccaggctattgatgcatgtgatgccaacacaacacccggaggtgttactgatgtgatcaaaaactgggacagcttaatacctgacgaaatgcccgattccccgattcaggaaaagtctgaatgccaggacatgtccttaagttcacccacatcggtgctcgggggatctagacaccagagccatacagcagaggccggaccccgaaagagtccagtgggaatgcttgacctgtctagttggagctccccagaagtgttgaggaaagattggacactcgagccttggccaagcctacctgtgactccacattccggcgcattgtctctgtgctccgctgatacctccctgggggatcgcgctgacacttcgttgcctcagactcaaggcccaggcctgctctgtagcccaggtgtgtccgctgctgccctcgcgttacagtgggccgaaagcccccctgcagatgaccatcatgtgcagcgaacagctgtggagaaagatgtggaagacttcatcacgacaagctttgactcccaagagaccctctcaagtcctccacccggcttggagggtaaggcagacaggagcgagaagtcagatggcagcggcttcggcgccagattgagccccggcagtggcggtcctgaggcacagacagccggccctgtgacccccgcttcaatatccggcagattccagccattgccagaagctatgaaagagaaagaagttagaccaaagcacgtgaaggctttattgcaaatggtgcgggatgagtcacatcagatcctggccctgtccgaagggttggctcccccatcaggcgaaccacacccacctaggaaggaagatgaaattcaagacatcagtctccacggaggcaagacacaggaagtgcccaccgcttgtccggactggaggggcgatctgttgcaggtcgtgcaggaggcattcgaaaaggagcaggaaatgcagggtgtggagcttcaacctcggctctccggttccgacctggggggccattcctcattattagaacgcctggagaagattatccgggaacagggtgacctccaggaaaagtctttagaacaccttaggttacccgaccggagcagtcttctgtcggagattcaggctctgagagctcagcttagaatgacgcacctccaaaatcaggaaaagctgcaacacttgcgcacggccttgacaagcgccgaggcacggggatcccagcaagaacatcagttgcgccgacaggtggaactgctggcatacaaggtagagcaagagaagtgtatagccggtgacctgcagaaaaccctgtctgaggagcaagagaaggctaactcagttcagaagctgctggctgccgagcaaacagtagtgcgggatcttaaaagcgatctgtgcgagtctagacagaaaagtgagcagctgtcgagatccctgtgcgaggtgcagcaggaggtgctccagttgcgctcgatgctgtcctccaaggagaatgaactaaaagccgcccttcaggagcttgagtcagagcaggggaaaggccgggccctgcagagtcagttagaggaggagcagctacgccacctgcagcgggagtcccagtccgcgaaagcccttgaggaactgcgcgcctccttggaaacccagcgcgcacagagcagtaggctgtgcgtggctctgaaacatgagcagaccgccaaggacaatctacagaaggagctccgcatcgaacattctaggtgtgaagccttactggcccaggagagaagccagcttagtgaactccagaaagacctagcagccgagaaatcccgcactctggagttgtcagaggctctgaggcatgaaaggctcctgacagagcagctgtcccaacggacacaggaagcatgtgtgcatcaggacacccaggctcatcacgctctactgcagaaattaaaagaagaaaagtcccgggttgtcgatctgcaggccatgctagaaaaggtacagcagcaggcccttcactcacaacagcagctcgaggctgaggcgcagaagcattgtgaagccctccgccgggaaaaagaggtttctgccactctgaaatctacagtggaggccctgcacacacagaagagggagctgcgttgcagcctcgaaagggagcgcgagaaaccagcatggctccaggcagaactcgaacaaagccatcctcggttgaaagaacaggaagggaggaaggccgccagacgatctgccgaagctcggcaatcccccgcagccgcagagcagtggaggaagtggcagcgggacaaggagaagctgagagaactagagctgcaacggcagcgagacctgcacaaaatcaaacagctgcagcagacggtgcgggacctggaatccaaggacgaggtgcccggtagcagattgcatctcgggtcggctcgacgggcagcaggtagcgacgccgaccacctgagggagcagcaaagagagttggaagcaatgcgccaacggctcctctctgccgcgaggctcctgacatcatttaccagtcaggccgttgatagaacggtgaacgattggacctcttccaacgaaaaggccgtaatgtcactgctgcacacattggaagaactgaagagcgacctttctcgcccaaccagctctcagaagaagatggcagccgagctgcaattccaattcgtggacgtactcctcaaggacaacgtatccctgacgaaagccctgagtactgtaacccaggaaaagttggagctctcccgagctgtgtcaaaactcgagaaattgctcaagcatcatctccagaaaggatgttcgcccagccgaagtgaacgcagcgcctggaagccagacgagaccgccccccagtcatctctgaggcggccagaccctggacggctcccacctgctgcttcggaagaggcccatacgtccaacgtgaagatggagaagctttatctgcactacttgcgtgccgaatcgttccggaaagccttaatatatcagaagaaatatcttctgctccttattggtgggttccaggacagcgagcaggaaactttaagcatgatagcacacttgggagtcttcccttcgaaggccgagcgcaaaatcacaagcaggcctttcacccgttttcggacagctgttcgcgttgtcattgcgattctgcgattgaggtttctcgtgaaaaaatggcaagaggtagatcgcaagggtgccttggcccagggtaaagcccctaggcctggacctagagctcgacaaccacagtctccgcctaggactcgggaatcacctcctaccagagatgtgccgtccggtcacaccagggaccccgcccgaggaaggaggttggctgccgcggcgtctcctcacagcggcggcagagctactcccagtcctaatagtcgcctggagaggagcctgacggccagtcaggacccagagcactcactcactgaatatatacatcacttggaggtaatccagcagagacttggcggtgtgcttccagatagcacctcaaagaagtcctgtcaccccatgatcaaacagtag

SEQ ID NO: 161236 - DNA, 2214 bp, Artificial Sequence
  derived and/or modified sequence
atggaggtggagcaggagcagaggaggaggaaggtggaggccggccgcaccaagctggcccacttccggcagaggaagaccaagggggacagcagccacagcgagaagaagacagccaagaggaagggcagcgctgtggatgcctctgtgcaggaggagagccctgtgaccaaggaggacagcgccctgtgtggcggcggggacatctgcaagagcaccagctgtgatgacaccccagatggagctgggggcgcctttgctgcccagcctgaggactgtgatggagagaagcgggaggacctggagcagctgcagcagaagcaggtgaatgaccaccccccagagcagtgtggcatgttcaccgtgtctgaccaccccccagagcagcacggcatgttcaccgtgggggaccaccccccagagcagaggggcatgttcaccgtgtctgaccaccccccagagcagaggggcatgttcaccatcagtgaccaccagcctgagcagaggggcatgttcaccgtgtctgaccacaccccagagcagaggggcatcttcaccatcagtgaccaccctgctgagcagaggggcatgttcaccaaggaatgtgagcaggagtgtgagctggccatcacagacctggagagcggccgggaggatgaagctggcctgcaccagagccaggccgtgcacggcctggagctggaggccctgcggctgagcctgagcaacatgcacacagcccagctggagctgacccaggccaacctgcagaaggagaaggagacagccctgacagagctgcgggagatgctgaacagccggcgggcccaggagctggccctgctgcagagccggcagcagcacgagctggagctgctgcgggagcagcacgcccgggagaaggaggaggtggtgctgcgctgtggccaggaggccgctgagctgaaggagaagctgcagagcgagatggagaagaatgcccagatcgtgaagaccctgaaggaggactgggagagcgagaaggacctgtgcctggagaacctgaggaaggagctgagcgccaagcaccagagcgagatggaggacctgcagaaccagttccagaaggagctggccgagcagagagctgagctggagaagatcttccaggacaagaaccaggccgagcgggccctgaggaacctggagagccaccaccaggccgccatcgagaagctgcgggaggacctgcagagcgagcacggccgctgcctggaggacctggagttcaagttcaaggagagcgagaaggagaagcagctggagctggagaacctgcaggccagctatgaggacctgaaggcccagagccaggaggagatccggcggctgtggagccagctggacagcgcccggaccagccggcaggagctgtctgagctgcacgagcagctgctggcccggaccagccgggtggaggacctggagcagctgaagcagcgggagaagacccagcatgaaagtgagctggagcagctgcgcatctactttgagaagaagctgagagatgctgagaagacctaccaggaggacctgaccctgctgcagcagaggctgcagggcgccagagaagatgccctgctggacagcgtggaggtgggcctgagctgtgtgggcctggaggagaagccagagaagggcaggaaggaccacgtggatgagctggagcctgagcggcacaaggagagcctgccccgcttccaggccgagctggaggagagccaccgccaccagctggaggccctggagagccccctgtgcatccagcacgagggccacgtgtctgaccgctgctgcgtggagaccagcgccctgggccacgagtggaggctggagcccagcgagggccacagccaggagctgccctgggtgcacctgcagggcgtgcaggatggagacctggaggccgacacagagcgggccgcccgggtgctgggcctggagacagagcacaaggtgcagctgagcctgctgcagacagagctgaaggaggagattgagctgctgaagattgaaaatagaaacctgtatggcaagctgcagcacgagacccggctgaaggatgacctggagaaggtgaagcacaacctgattgaggaccaccagaaggagctgaacaatgccaagcagaagacagagctgatgaagcaggagttccagaggaaggagacctag

SEQ ID NO: 161237 - DNA, 10011 bp, Artificial Sequence
  derived and/or modified sequence
atggaggtggagcaggagcagaggaggaggaaggtggaggccggccgcaccaagctggcccacttccggcagaggaagaccaagggggacagcagccacagcgagaagaagacagccaagaggaagggcagcgctgtggatgcctctgtgcaggaggagagccctgtgaccaaggaggacagcgccctgtgtggcggcggggacatctgcaagagcaccagctgtgatgacaccccagatggagctgggggcgcctttgctgcccagcctgaggactgtgatggagagaagcgggaggacctggagcagctgcagcagaagcaggtgaatgaccaccccccagagcagtgtggcatgttcaccgtgtctgaccaccccccagagcagcacggcatgttcaccgtgggggaccaccccccagagcagaggggcatgttcaccgtgtctgaccaccccccagagcagcacggcatgttcaccgtgtctgaccaccccccagagcagaggggcatgttcaccatcagtgaccaccagcctgagcagaggggcatgttcaccgtgtctgaccacaccccagagcagaggggcatcttcaccatcagtgaccaccctgctgagcagaggggcatgttcaccaaggaatgtgagcaggagtgtgagctggccatcacagacctggagagcggcagagaagatgaggccggcctgcaccagagccaggccgtgcacggcctggagctggaggccctgcggctgagcctgagcaacatgcacacagcccagctggagctgacccaggccaacctgcagaaggagaaggagacagccctgacagagctgcgggagatgctgaacagcagaagagcccaggagctggccctgctgcagagccggcagcagcacgagctggagctgctgcgggagcagcacgcccgggagaaggaggaggtggtgctgcgctgtggccaggaggccgctgagctgaaggagaagctgcagagcgagatggagaagaatgcccagatcgtgaagaccctgaaggaggactgggagagcgagaaggacctgtgcctggagaacctgaggaaggagctgagcgccaagcaccagagcgagatggaggacctgcagaaccagttccagaaggagctggccgagcagagagctgagctggagaagatcttccaggacaagaaccaggccgagcgggccctgaggaacctggagagccaccaccaggccgccatcgagaagctgcgggaggacctgcagagcgagcacggccgctgcctggaggacctggagttcaagttcaaggagagcgagaaggagaagcagctggagctggagaacctgcaggccagctatgaggacctgaaggcccagagccaggaggagatccggcggctgtggagccagctggacagcgcccggaccagccggcaggagctgtctgagctgcacgagcagctgctggcccggaccagccgggtggaggacctggagcagctgaagcagcgggagaagacccagcacgagagcgagctggagcagctgcgcatctactttgagaagaagctgagagatgctgagaagacctaccaggaggacctgaccctgctgcagcagaggctgcagggcgcccgggaggatgccctgctggacagcgtggaggtgggcctgagctgtgtgggcctggaggagaagccagagaagggcaggaaggaccacgtggatgagctggagcctgagcggcacaaggagagcctgccccgcttccaggccgagctggaggagagccaccgccaccagctggaggccctggagagccccctgtgcatccagcacgagggccacgtgtctgaccgctgctgcgtggagaccagcgccctgggccacgagtggaggctggagcccagcgagggccacagccaggagctgccctgggtgcacctgcagggcgtgcaggatggagacctggaggccgacacagaaagagctgcccgggtgctgggcctggagacagagcacaaggtgcagctgagcctgctgcagacagagctgaaggaggagattgagctgctgaagattgagaacagaaacctgtatggcaagctgcagcacgagacccggctgaaggatgacctggagaaggtgaagcacaacctgattgaggaccaccagaaggagctgaacaatgccaagcagaagacagagctgatgaagcaggagttccagaggaaggagacagactggaaggtgatgaaggaggagctgcagcgggaggccgaggagaagctgaccctgatgctgctggagctgcgggagaaggccgagagcgagaagcagaccatcatcaacaagtttgagctgcgggaggccgagatgaggcagctgcaggaccagcaggccgcccagatcctggacctggagaggagcctgacagagcagcagggccgcctgcagcagctggagcaggacctgaccagtgatgatgccctgcactgcagccagtgtggccgggagcccccaacagcccaggatggagagctggccgccctgcacgtgaaggaggactgtgccctgcagctgatgctggcccggagccgcttcctggaggagaggaaggagatcacagagaagttctctgctgagcaggatgccttcctgcaggaggcccaggagcagcacgcccgggagctgcagctgctgcaggagcggcaccagcagcagctgctgtctgtgacagctgagctggaggcccggcaccaggccgccctgggggagctgacagccagcctggagagcaagcagggcgccctgctggccgcccgggtggccgagctgcagaccaagcacgccgctgacctgggcgccctggagaccaggcacctgagcagcctggacagcctggagagctgctacctgtctgagttccagaccatccgggaggagcaccggcaggccctggagctgctgcgggctgactttgaggagcagctgtggaagaaggacagcctgcaccagaccatcctgacccaggagctggagaagctgaagaggaagcatgaaggagagctgcagagcgtgcgggaccacctgaggacagaggtgtccacagagctggccggcaccgtggcccacgagctgcagggcgtgcaccagggcgagtttggcagcgagaagaagacagccctgcacgagaaggaggagaccctgcggctgcagagcgcccaggcccagcccttccaccaggaggagaaggagagcctgagcctgcagctgcagaagaagaaccaccaggtgcagcagctgaaggaccaggtgctgagcctgagccatgaaattgaggagtgccgctctgagctggaggtgctgcagcagaggcgggagagagaaaatcgggagggcgccaacctgctgtccatgctgaaggcagatgtgaacctgagccacagcgagcggggggccctgcaggatgccctgcggcggctgctgggcctgtttggagagaccctgcgggctgctgtgaccctgcggagcagaattggagagcgggtgggcctgtgcctggatgatgctggggccggcctggccctgagcacagccccagccctggaggagacctggagcgatgtggccctgcctgagctggacaggaccctgtctgaatgtgccgagatgagctctgtggccgagatcagcagccacatgagggagagcttcctgatgagccctgagagcgtgagagaatgtgagcagcccatcagaagagtcttccagagcctgagcctggccgtggatggcctgatggagatggccctggacagcagccggcagctggaggaggcccggcagatccacagcagatttgagaaggagttctccttcaagaatgaggagacagcccaggtggtgaggaagcaccaggagctgctggagtgcctgaaggaggagagcgctgccaaggccgagctggccctggagctgcacaagacccagggcaccctggagggcttcaaggtggagacagctgacctgaaggaggtgctggccggcaaggaggacagcgagcaccggctggtgctggagctggagagcctgcggcggcagctgcagcaggccgcccaggagcaggccgccctgcgggaggagtgcacccggctgtggagcagaggagaggccacagccacagatgctgaggcccgggaggccgccctgaggaaggaggtggaggacctgaccaaggagcagagcgagaccaggaagcaggccgagaaggacagaagtgccctgctgagccagatgaagatcctggagagcgagctggaggagcagctgagccagcaccggggctgtgccaagcaggccgaggccgtgacagccctggagcagcaggtggccagcctggacaagcacctgaggaaccagaggcagttcatggatgagcaggccgctgagcgggagcacgagcgggaggagttccagcaggagatccagaggctggagggccagctgcggcaggccgccaagccccagccctggggcccccgggacagccagcaggcccccctggatggagaggtggagctgctgcagcagaagctgcgggagaagctggatgagttcaatgagctggccatccagaaggagagcgctgaccggcaggtgctgatgcaggaggaggagatcaagaggctggaggagatgaacatcaacatcaggaagaaggtggcccagctgcaggaggaggtggagaagcagaagaacatcgtgaagggcctggagcaggacaaggaggtgctgaagaagcagcagatgagcagcctgctgctggccagcaccctgcagagcaccctggatgctggccgctgcccagagccccccagcggcagccccccagagggccctgagatccagctggaggtgacccagagggccctgctgcggcgggagagcgaggtgctggacctgaaggagcagctggagaagatgaagggggacctggagagcaagaatgaggagatcctgcacctgaacctgaagctggacatgcagaacagccagacagctgtgtccctgcgggagctggaggaggagaacaccagcctgaaggtgatctacaccaggagcagcgagattgaggagctgaaggccaccatcgagaacctgcaggagaaccagaagaggctgcagaaggagaaggccgaggagattgagcagctgcatgaagtcatcgagaagctgcagcacgagctgagcctgatgggccctgtggtgcatgaggtgtctgacagccaggccggcagcctgcagagcgagctgctgtgcagccaggccggcggcccccggggccaggccctgcagggcgagctggaggccgccctggaggccaaggaggccctgagccggctgctggccgaccaggagaggaggcacagccaggccctggaggccctgcagcagaggctgcagggcgctgaggaggccgctgagctgcagctggccgagctggagagaaatgtggccctgcgggaggccgaggtggaggacatggccagccgcatccaggagtttgaagctgccctgaaggccaaggaggccaccatcgccgagaggaacctggagattgatgccctgaaccagaggaaggccgcccacagcgctgagctggaggccgtgctgctggccctggcccgcatccggcgggccctggagcagcagcccctggccgccggggccgcccctcctgagctgcagtggctgcgggcccagtgtgcccggctgagccggcagctgcaggtgctgcaccagcgcttcctgcgctgccaggtggagctggaccggcggcaggcccggcgggccacagcccacaccagggtgcctggggcccacccccagcccaggatggatggaggagccaaggcccaggtgactggagatgtggaggccagccatgatgctgccctggagcctgtggtgcctgacccccagggcgacctgcagcctgtgctggtgaccctgaaggatgcccccctgtgcaagcaggagggcgtgatgtctgtgctgactgtgtgccagaggcagctgcagagcgagctgctgctggtgaagaatgagatgaggctgagcctggaggatggcggcaagggcaaggagaaggtgctggaggactgccagctgcccaaggtggacctggtggcccaggtgaagcagctgcaggagaagctgaaccggctgctgtacagcatgaccttccagaatgtggatgctgctgacaccaagagcctgtggcccatggccagcgcccacctgctggagagctcctggagcgatgacagctgtgatggagaggagccagacatcagcccccacatcgacacctgtgatgccaacacagccactggaggagtgacagatgtgatcaagaaccaggccattgatgcctgtgatgccaacaccacccctgggggcgtgacagatgtgatcaagaactgggacagcctcatcccagatgagatgccagacagccccatccaggagaagtctgagtgccaggacatgagcctgagcagccccacctctgtgctgggcggcagccgccaccagagccacacagctgaggccggccccaggaagagccctgtgggcatgctggacctgagctcctggagcagccctgaggtgctgaggaaggactggaccctggagccctggcccagcctgcctgtgaccccccacagcggggccctgagcctgtgcagcgctgacaccagcctgggggacagagctgacaccagcctgccccagacccagggccctggcctgctgtgcagccctggggtgtctgctgctgccctggccctgcagtgggccgagagccccccagcagatgaccaccacgtgcagaggacagctgtggagaaggatgtggaggacttcatcaccaccagctttgacagccaggagaccctgagcagccccccacctggcctggagggcaaggctgacagaagtgagaagagtgatggcagcggctttggagcccggctgagccctggcagcggcggccctgaggcccagacagctggccctgtgaccccagccagcatcagcggccgcttccagcccctgcctgaggccatgaaggagaaggaggtgcggcccaagcacgtgaaggccctgctgcagatggtgagagatgagagccaccagatcctggccctgtctgagggcctggcccctccttctggagagccccacccccccaggaaggaggatgagatccaggacatcagcctgcatggaggcaagacccaggaggtgcccacagcctgcccagactggaggggggacctgctgcaggtggtgcaggaggcctttgagaaggagcaggagatgcagggcgtggagctgcagccccggctgagcggcagtgacctgggcggccacagcagcctgctggagcggctggagaagatcatccgggagcagggcgacctgcaggagaagagcctggagcacctgcggctgcctgacaggagcagcctgctgtctgagatccaggccctgcgggcccagctgaggatgacccacctgcagaaccaggagaagctgcagcacctgaggacagccctgaccagcgctgaggcccggggcagccagcaggagcaccagctgcggcggcaggtggagctgctggcctacaaggtggagcaggagaagtgcatcgccggggacctgcagaagaccctgtctgaggagcaggagaaggccaacagcgtgcagaagctgctggccgctgagcagacagtggtgcgggacctgaagagtgacctgtgtgagagccggcagaagtctgagcagctgagccgcagcctgtgtgaggtgcagcaggaggtgctgcagctgcgctccatgctgagcagcaaagaaaatgagctgaaggccgccctgcaggagctggagagcgagcagggcaagggccgggccctgcagagccagctggaggaggagcagctgcggcacctgcagcgggagagccagagcgccaaggccctggaggagctgcgggccagcctggagacccagagggcccagagcagccggctgtgtgtggccctgaagcatgagcagacagccaaggacaacctgcagaaggagctgcgcatcgagcacagccgctgtgaggccctgctggcccaggagaggagccagctgtctgagctgcagaaggacctggccgctgagaagagcaggaccctggagctgtctgaggccctgcggcatgagcggctgctgacagagcagctgagccagaggacccaggaggcctgtgtgcaccaggacacccaggcccaccacgccctgctgcagaagctgaaggaggagaagagccgggtggtggacctgcaggccatgctggagaaggtgcagcagcaggccctgcacagccagcagcagctggaggccgaggcccagaagcactgtgaggccctgcggcgggagaaggaggtgtctgccaccctgaagagcacagtggaggccctgcacacccagaagcgggagctgcgctgcagcctggagcgggagcgggagaagccagcctggctgcaggccgagctggagcagagccacccccggctgaaggagcaggagggcaggaaggccgcccggcgctctgctgaggcccggcagagccctgctgctgctgagcagtggaggaagtggcagagggacaaggagaagctgcgggagctggagctgcagaggcagagggacctgcacaagatcaagcagctgcagcagacagtgcgggacctggagagcaaggatgaggtgcccggcagccggctgcacctgggcagcgcccggcgggctgctggcagtgatgctgaccacctgcgggagcagcagcgggagctggaggccatgaggcagaggctgctgtctgctgcccggctgctgaccagcttcaccagccaggccgtggacagaacagtgaatgactggaccagcagcaatgagaaggctgtgatgagcctgctgcacaccctggaggagctgaagagtgacctgagccggcccaccagcagccagaagaagatggctgctgagctgcagttccagtttgtggatgtgctgctgaaggacaacgtgtccctgaccaaggccctgagcacagtgacccaggagaagctggagctgagcagagctgtgtccaagctggagaagctgctgaagcaccacctgcagaagggctgcagccccagccgctctgagaggtctgcctggaagccagatgaaacagccccccagagcagcctgcggcggccagaccccggccgcctgcccccagctgccagcgaggaggcccacaccagcaatgtgaagatggagaagctgtacctgcactacctgcgggcagagagcttcaggaaggccctgatctaccagaagaagtacctgctgctgctgattggaggcttccaggacagcgagcaggagaccctgtccatgattgcccacctgggcgtcttccccagcaaggccgagaggaagatcaccagccggcccttcacccgcttcagaacagctgtgcgggtggtgattgccatcctgcggctgcgcttcctggtgaagaagtggcaggaggtggacaggaagggggccctggcccagggcaaggcccccaggcctggcccccgggcccggcagccccagagcccccccaggacccgggagagcccccccaccagagatgtgcccagcggccacacccgggaccctgcccggggccgccgcctggccgccgccgccagcccccacagcggcggccgggccacccccagccccaacagccggctggagaggagcctgacagccagccaggaccctgagcacagcctgacagagtacatccaccacctggaggtgatccagcagaggctgggcggcgtgctgcctgacagcaccagcaagaagagctgccaccccatgatcaagcagtag

SEQ ID NO: 161238 - DNA, 2214 bp, Artificial Sequence
  derived and/or modified sequence
atggaggtggagcaggagcagcggcggcggaaggtggaggccggcagaactaaactggcccactttaggcagaggaaaaccaagggggacagcagccactcggagaagaagaccgccaaaagaaaggggtctgcagtggacgctagcgtgcaggaggagtcacccgttactaaagaggacagcgcactgtgtggggggggggacatttgtaagagcacttcatgcgacgacacccccgatggggcgggcggggcctttgccgctcagcctgaggattgcgatggagagaagcgggaggacttggagcagctacagcagaaacaagtgaacgatcaccccccagagcagtgcgggatgtttaccgtgagtgatcacccaccggagcagcacggcatgttcaccgtcggggaccacccacccgagcagaggggcatgtttactgtctctgatcacccccccgaacagcgagggatgtttaccatttctgatcatcaaccggaacaacggggcatgtttacggtctccgatcatacgcccgagcagcgcggaattttcacaatcagcgaccatcctgccgaacaaagggggatgttcacgaaggaatgcgaacaagaatgtgaacttgctattactgacttagagagtgggagagaagatgaggcgggtctacatcagagccaagccgtgcatggcctcgagcttgaggccctgagattgagtctctccaacatgcacactgcacagctggagctgacacaggcaaacctccagaaagagaaggagactgctttaacggaacttcgcgagatgcttaactcaagacgcgctcaagaattggcactgctccagagccggcagcagcatgaacttgaactgctgcgcgagcagcacgctcgcgaaaaagaggaagtcgtgctgcgctgcggacaggaagccgctgagctgaaggagaagctgcagtctgagatggagaagaacgctcagattgttaagacactaaaggaagactgggaaagtgaaaaagacctttgccttgagaacctcagaaaggaactgagcgccaaacaccagagtgagatggaagatctccaaaaccagtttcagaaggagctcgccgagcagcgcgcagaactggagaagatctttcaagacaagaaccaggctgagcgcgccttaaggaatctggagagccaccatcaggccgccatcgaaaagttaagggaggacttgcaatccgagcatggcaggtgtcttgaagacttggaattcaagttcaaggagtcagagaaagagaagcagcttgaactggagaatttgcaggcctcctacgaggatctgaaggcacagtctcaggaggagatcagaagactgtggtcacagctcgattccgcgaggacctctaggcaggagctatccgaactgcatgagcagctgttggctcgcacctccagagtcgaggatcttgagcagcttaaacagcgtgaaaagacacaacacgagagcgaacttgagcagctaagaatatatttcgaaaaaaagctccgggatgccgagaagacatatcaggaagacctgaccctgctgcaacagcgcttgcagggcgccagggaggatgctctgctggatagcgtcgaggtgggcctgtcatgtgttggactcgaggaaaagccagagaagggccgtaaagaccatgtcgatgaactggagcccgaaaggcataaggagagcctgcctagatttcaagccgaactggaggagagccataggcaccagctcgaagctttggaaagtccgctgtgtatccagcacgagggccacgtatccgaccggtgctgcgttgagaccagtgccctcggccatgaatggcgccttgaacctagtgagggccatagtcaggagctgccttgggtgcacctgcagggcgtgcaggacggtgacctggaggccgatacggagcgcgcggcacgagtactgggtctggaaacggagcacaaggtgcagctcagccttctgcaaacagagctgaaagaggaaattgagctcctcaagatcgagaaccggaatctgtacggtaagctgcagcatgaaacaaggcttaaggacgatttggagaaggtcaagcataaccttatcgaagatcaccagaaagaacttaacaatgccaagcagaaaactgagctcatgaagcaagagttccagcgcaaagagacctag

SEQ ID NO: 161239 - DNA, 10011 bp, Artificial Sequence
  derived and/or modified sequence
atggaggtggagcaggagcagcggcggcggaaggtggaggccggcagaacgaaattggcccatttccgacagcgtaaaacgaaaggggacagttctcattcagaaaaaaaaaccgctaagaggaagggcagcgccgtcgacgcatcggtgcaggaggagtcccccgtgacgaaggaggatagtgcactgtgtggaggaggtgacatatgcaaatctacaagctgcgacgacactccagacggagctggaggggctttcgcagcacagcccgaagactgtgatggtgagaaacgggaagatctggaacaactgcagcagaagcaggttaacgaccatccacctgagcagtgcggcatgtttacagtgagcgaccacccccctgaacagcacggcatgttcacagtgggagatcacccccccgagcagagaggtatgttcacagtctccgatcacccacctgagcagcacgggatgttcaccgtgagcgaccaccccccagagcaaagagggatgttcacaatctctgatcatcagccggagcagcgtggaatgttcacagtgagtgatcatacacctgagcagaggggcatcttcaccatttccgaccaccccgctgaacagcgcggtatgttcactaaagagtgcgaacaggagtgtgagctagccattaccgacctggaatcaggtcgcgaggatgaagccggactgcatcaaagccaagcagtccacggtctcgagcttgaagctttaaggctttcattgtctaacatgcataccgcgcaactggagctgacacaggcgaaccttcagaaggaaaaggagaccgcgctgactgagctccgagaaatgcttaacagtcgacgcgcacaggagctcgccctgctgcaaagccgccagcagcacgagctggagcttcttcgcgagcagcacgcacgcgagaaagaagaagtggtgctgagatgtggccaagaggctgccgagctgaaggaaaaactccagtccgagatggaaaaaaacgcacagatcgtcaaaacactaaaggaggattgggagtctgagaaggacttgtgtctggagaacctgcggaaagagctgtccgcaaagcatcagagtgaaatggaggatttgcagaatcagtttcagaaagagcttgctgagcagagagcagaactcgaaaaaatttttcaggacaaaaaccaggccgaacgagctctccgcaatcttgaatcgcaccaccaagccgccattgagaagcttcgggaagacctacaaagtgaacatggaaggtgcctcgaggacttggagtttaagtttaaggagagcgagaaagagaagcaactcgagctggaaaatctgcaggcctcgtatgaggatttaaaagctcaatctcaggaggaaattagacgtctttggagccagttggatagtgccaggactagccggcaggaattaagtgaactgcacgagcagctcctggccagaacctcgagggtggaggatctagaacagctaaaacagcgcgagaagacacagcatgaatcagagctcgaacaactccggatctacttcgagaaaaagctacgggacgccgaaaaaacctatcaagaggacctgaccctcctgcagcagaggctgcagggagcgcgcgaagacgcactgctagactcagtggaggtcggactctcatgtgtgggactcgaagagaagccggaaaaggggcggaaggatcatgtggacgagctggagccggagagacataaggagagcctccctcgcttccaggccgaactggaggaaagccacagacaccagctggaagcgctggagagccctctctgcattcaacacgagggccacgttagcgatcgatgttgcgtagaaactagtgcgctaggacatgaatggcggcttgagccatcagagggccattcacaagaacttccttgggtacaccttcagggggtacaggacggagatttggaggccgacacagagagagccgccagagtgctcggcctggaaactgagcataaggtgcagctgagcctcctccaaaccgagctgaaggaggaaattgaactgctgaaaatcgagaacagaaacctatacggaaaactgcaacacgagacccgactgaaagatgatctcgagaaggtgaaacataacctgatcgaggatcatcagaaagagctgaacaatgccaaacagaaaacagagctgatgaagcaagaattccagcgaaaagaaaccgattggaaagttatgaaggaggaactccagcgggaggctgaagagaaactgactctgatgctcctcgaactcagagagaaagcagagtcagaaaagcagactatcataaacaagttcgaactgcgtgaggccgagatgaggcagttgcaggaccaacaggctgcacaaatattggatctggagcgctccctgaccgagcaacagggccgtcttcaacagcttgagcaggatctgaccagcgatgacgctctgcattgtagtcagtgcggtagggagcctccaactgcccaagacggagagttagccgcacttcacgtaaaggaggactgtgctttacagctgatgttagcccgctctagattcctcgaagagagaaaagagataactgaaaagttctcggccgaacaggacgcatttctgcaagaggcccaggagcagcatgcgcgcgagctccagcttctccaggaacggcaccaacagcagctgctgtccgtgaccgcagagctggaggcccggcaccaggccgccctcggggagcttactgcctccctggagtcgaagcagggcgccttgctggctgcgagagtggctgaacttcaaaccaagcacgctgccgatttgggcgctctggagactcgccacttgagcagccttgattccctggagagttgctacctaagcgagttccagaccattagggaagagcaccggcaggcactggaactgcttagagcagactttgaggaacagctgtggaaaaaggattctctgcaccagaccatacttacacaggaactggagaagctgaaacgcaagcacgaaggggaattacagtccgtacgggatcacctgcgtactgaagtgtcaaccgagctggcaggaaccgtggcccatgaactgcaaggggtgcaccagggcgaatttgggagtgaaaagaagaccgctctccacgagaaggaggagactctgagattgcagtctgctcaggcccagcccttccatcaagaagagaaggagagcctgagcctccaactgcaaaaaaagaaccatcaggttcagcagctgaaggaccaagttctgtcactgtcacatgagattgaagaatgcaggtccgaactggaggtgttacagcagaggcgcgaacgagaaaatagggagggggccaaccttttgagtatgctcaaagcagatgtgaatctgagccactcagagagaggcgcactgcaggacgcactgagacggctgcttgggttgtttggagagaccctgagggctgccgtcactctgcgatctcgcatcggcgaacgggtagggctgtgtctggacgacgccggcgccggtttggcactcagtacggctcctgcactcgaagagacttggtctgacgtagcactgccagagctcgacaggactctttcagaatgcgcggagatgtcaagcgtggcagagatttcttctcacatgcgagaatctttcctgatgagtcctgagtccgttcgcgaatgtgaacagcccattcggcgagttttccagagcttatcccttgccgtggatggactgatggagatggcgctcgactccagccggcagcttgaggaggcccgacagatacatagtagatttgagaaagagttctccttcaaaaatgaggaaacagcccaggttgtccgcaagcatcaggagctcctggagtgcttgaaggaagagtcggccgcaaaggctgagctcgccttggaactgcacaagactcaggggacactagaggggtttaaggtggagacagccgaccttaaagaggtcctggccgggaaagaagatagcgagcacagattggtgctggagctagagtcactgaggagacagttacagcaggccgcccaggagcaggcagccctgagggaggagtgtactagactgtggagccgcggtgaagcaacagcgactgacgccgaagctcgagaggccgcgctcaggaaagaggtcgaagatctaacaaaagagcagagcgaaacccgcaagcaggcagagaaagataggagcgctttactctcccagatgaagattcttgaaagtgagctcgaggagcagctgagccagcatcgtggatgcgcgaagcaagctgaggcagtaaccgccttggaacagcaggtcgcatccctcgataagcaccttaggaaccagcgccagttcatggatgagcaggctgctgaaagggaacacgaaagggaggagtttcaacaggagatccagcgcctggagggtcaattgcggcaggcggcaaagccccagccctggggacccagggacagtcaacaggcgcctctagatggcgaggtcgagctcctgcagcagaaactgagggaaaaacttgacgagttcaacgaactggcaatccaaaaggagagcgccgatcgccaagtcctgatgcaggaggaggaaattaaaagactggaagagatgaatatcaacatcaggaaaaaggtggcacagttacaagaagaagtcgagaagcaaaaaaatatagttaagggcctcgaacaggacaaagaagtgttgaagaaacagcagatgtctagtttgcttttagccagcacgctccagagcactctggatgctggtcgatgtcccgagcctccatccgggtccccaccggagggtccagaaattcagctcgaagtgacgcagcgcgccctgttgcgtagggagtcagaggtcctcgacttgaaggaacagctggaaaagatgaagggcgatctcgagtccaagaatgaagaaattcttcacctgaacctcaaactggacatgcagaattcacagactgccgtaagtctccgggagctcgaggaggagaatacctcactgaaagtgatttacacacggtcttcggagatagaggagctgaaagccactatcgagaatttacaagaaaaccagaagcgcctgcagaaagaaaaagcagaggagattgagcagttacatgaggtgattgaaaagctacaacacgaactctctcttatggggcccgtggtacacgaagtgtctgacagtcaggcagggtctctccagtctgaattactgtgttcacaggctgggggccctcgcggacaggccttgcagggcgagctggaggctgcgcttgaagcaaaagaggccctttctagactgcttgccgaccaggagaggaggcactcacaggccctggaagccctgcagcagagactccagggcgctgaggaggcggcagaattacagctggctgaacttgagcgcaatgtcgctctgcgtgaggcagaagtcgaagatatggcatcacgaatccaggagttcgaggcagctctgaaggccaaggaagccaccattgccgaaaggaacctggaaattgatgccttgaatcaacgcaaggccgcgcactctgccgagctcgaggccgtgctgctcgcgctggcgagaatcagacgcgcccttgaacaacagcccctggccgccggagctgcgcctccagagctgcagtggctccgggctcaatgcgcacgcctaagtagacagctacaggtgcttcaccagagattcctgaggtgtcaggttgagctagaccgacgtcaagcccgtcgcgcaaccgcacacaccagagtaccaggagcacatcctcagcctcgcatggacggaggcgccaaggcacaggttaccggagacgtcgaggccagccacgacgcggcattggaaccagtcgtacccgacccccaaggagacctgcagcctgtgctggttaccctcaaagacgcgccgctatgtaagcaggagggtgttatgtccgtgctgaccgtgtgtcagcggcagttgcagtctgaactcttgttagtgaagaacgagatgagactttccctagaggacggcggcaagggcaaggagaaggtgcttgaggactgtcagttacccaaggtggatctagtcgcacaagttaagcaactgcaagagaagttaaaccggctactttatagcatgacctttcagaatgttgatgccgcggacaccaagagcctgtggccgatggccagcgcgcatttgctcgagagctcttggtcggatgacagttgcgatggtgaagaaccagatatatcgccccacatcgatacctgtgatgccaacacggccacagggggcgtgaccgatgtgataaagaatcaagccatcgacgcgtgcgacgcgaatacaactcccggaggagtgactgacgtaattaagaattgggattctctcatacccgacgagatgccggattccccgatccaagagaaaagcgaatgtcaggatatgagcctctccagtccaacttccgtcctcgggggctcacgccaccagtctcatacagcagaagccgggcctcgcaaatcccccgtgggcatgcttgatctctctagttggagcagcccagaagtcctcaggaaagattggacactggagccatggcctagcttgccagtgacaccgcatagcggggctctttctctctgttcagctgacacaagtctgggtgaccgggccgacacaagtttgccacagacacagggacccgggcttctctgttctccaggggtcagtgctgcagctctagccttgcagtgggcagaatctcctcccgccgacgatcaccacgtgcagagaaccgccgtggaaaaagacgtggaagatttcatcacaaccagctttgatagccaggagaccctttccagcccaccaccgggtctcgaggggaaggcagataggtcagaaaagtccgacggctcgggatttggggcacgcctttctccgggcagcggtgggcccgaagcacagacggccggccctgtgacccctgcttccatttctgggcggttccagcccctgcccgaggcgatgaaggaaaaagaggttaggcctaagcatgtgaaagcgcttctgcagatggttagggatgaaagccaccagatcttggccctctcagaagggctggcccccccatccggcgagccgcatcccccacgtaaggaagatgagatccaggacatcagcctccatggggggaaaacccaagaggtccctaccgcctgtcccgattggcggggggacttgctacaggtcgtccaggaggccttcgagaaggagcaggaaatgcagggggtggagctacagccccgacttagtgggagtgatctgggtgggcacagcagtctgttagaaaggttagagaagattatccgggaacagggagatttgcaggagaagagccttgagcacctgagactccccgatagatcatcccttttaagcgaaattcaggcactgcgcgcccagctcaggatgacacatctacagaatcaggagaaattacagcatctacgcaccgccctcacctccgccgaagcccggggctctcagcaggaacatcagctgaggcggcaggttgagttgctggcgtacaaagtagaacaggagaaatgcatagcaggtgatttgcaaaagactcttagcgaggaacaggaaaaagctaacagcgtgcagaagctactcgctgccgaacagactgtagtgagagacctgaagagtgacctgtgtgagtcccggcagaaaagtgaacagctgagcagatctctgtgcgaggtacagcaggaggtcttgcagctgcggtctatgcttagcagcaaggaaaacgaacttaaggctgctctgcaggagctcgagagcgaacagggcaaaggcagagcgttgcagtcacagctggaagaagaacagctcagacatctgcaaagggagtcacagtctgctaaggccctcgaggagctgcgcgcctctctggagactcagagagcccagagcagccgcctgtgtgtggccctcaagcatgagcagactgcaaaggataacttgcagaaagagctaaggatcgaacactctcgatgcgaagcactcctggctcaggaaagatcacaactgagcgagctccagaaagatttagccgcagaaaagtccagaactcttgaactttcggaggctctgcgtcacgaacgattgctcaccgagcagttatctcaacgaacccaggaagcgtgcgtgcatcaggacacacaggcgcatcacgctctccttcagaaacttaaagaagaaaagtctagggtagtggatctgcaggccatgctcgaaaaggtgcagcagcaggccttgcatagccagcagcaactggaggctgaggcgcaaaaacactgcgaggcgctgaggagggagaaggaagtttccgccaccctcaagtcaacagtggaggctctgcacacccaaaagagggagctccggtgttcacttgaacgtgaaagagaaaaacccgcttggctgcaggccgagcttgagcaaagccatccacgcctgaaagagcaggaaggtcgcaaagctgcccggcgctcagccgaggccaggcaaagtccagccgctgccgagcagtggcgaaaatggcagcgtgacaaggagaagctaagggagctggagctacaaagacagagggacctccacaaaataaaacaattgcagcagaccgtgcgggacctggagtccaaggacgaagtccctggatcccgcttacatctgggttccgcacgccgcgccgcaggaagtgacgctgaccatttacgagagcagcagcgagaattggaagctatgcgacagagattactcagcgccgcccgactgctaacatcctttacttcacaggccgttgataggaccgtcaatgattggacctcctccaatgaaaaggctgtaatgagcctccttcacaccctggaagagctgaagtcggatctgtctcgccctacttccagtcagaagaaaatggctgctgaattacaattccagttcgttgacgtgctgctgaaagacaacgtatccctgacgaaagctttaagcacggtcacacaggagaaattggagctgtccagagctgtgagcaaactggaaaagctgctcaagcaccacctccagaaggggtgctcaccaagcagatcagagcggtctgcttggaaacctgatgagaccgctccacagtcgagtcttcgccggcctgaccccggaaggcttccccctgccgcaagcgaggaagcgcacacgagcaacgtgaaaatggaaaaactgtacttacattacctcagggcggagagctttcgaaaagctctcatttatcagaagaagtacttactattgttgattggcgggttccaggactctgaacaagagactctctcaatgattgctcatctgggcgtttttccgtcaaaggccgaacggaagattacctctaggcccttcacccggtttcgtaccgctgtgcgtgtagttattgctattctacgactgcgttttctcgtcaagaaatggcaagaagtggaccgcaagggagcgctagcccagggcaaggcacccagacccgggccacgggctcgtcagccccagtcaccacctcggacccgcgaatcccctccaacccgcgacgtgccatctggccacacgcgagatccagcccggggtaggcggctagccgccgccgcgagcccacactcaggcggccgggctaccccctctcccaacagcaggttggagcgtagcctgacggcaagccaggaccccgagcactcattgacagaatatattcaccatctggaggtcatacagcaacggctggggggagtgctcccagactccacaagtaagaaatcttgtcatcccatgatcaaacagtag

SEQ ID NO: 161240 - DNA, 2296 bp, Artificial Sequence
  derived and/or modified sequence
cgcgggggagggagtgtaaatagagcgaaggctgctctgtgtcagccccgtcaccgccgggcggcccgcgcggagtctgagggagatggaagttgagcaagagcagcggcgcagaaaggtggaggccgggaggacgaagcttgctcacttccgacagagaaaaacaaaaggtgacagttcgcattcggagaaaaagacggcgaagaggaagggctcggctgtcgatgcgtctgtccaggaggagagtccggtaaccaaggaggacagcgcactctgtggaggaggggacatttgcaaaagcacatcatgtgacgacacccctgatggggcaggaggggcctttgcagctcagccggaggactgtgatggagagaagagagaggacttggaacagctgcagcagaagcaagtcaatgaccatcctccagagcagtgtgggatgttcacagtcagtgaccacccaccagaacagcatgggatgttcacagtcggtgaccacccaccagaacagcgtgggatgttcacagtcagtgaccacccaccagaacagcgtgggatgttcacaatcagtgaccaccaaccggaacagcgtgggatgttcacagtcagtgaccacacaccagaacagcgtgggatcttcacaatcagtgaccacccagcagaacagcgtgggatgttcacaaaggagtgtgaacaagaatgtgaacttgccattactgacctggagagcggccgtgaagatgaggctggcctgcatcagagtcaggccgtgcatggccttgagctggaggcgctgcgcctgagtctgagcaacatgcacacggcgcagctggagctgacacaggccaacctccagaaggagaaggagacggcattgacggagctgcgggagatgctcaacagccggcgtgcccaggagctggccctgctacagagcaggcagcagcacgagctggagctcctcagggagcagcacgcacgggagaaggaggaggtggtgctcaggtgtggacaggaagcagctgagctgaaggagaagttacaatcagaaatggagaaaaacgcccagatagtaaagaccctgaaggaagattgggaatctgaaaaagatttatgtttagaaaatctacgcaaagaactgtctgcaaagcatcaatcagaaatggaggatttacaaaaccagtttcagaaagaattggcagaacagagagctgagttggagaagatttttcaagacaaaaaccaggctgaacgggcccttaggaacctggagagtcatcatcaagcagccattgagaagttacgtgaagacctgcagtccgagcacggccggtgtttagaagacttggagttcaagttcaaagagagcgagaaagaaaaacagctggagttagagaatcttcaagcatcatatgaagacctgaaggcacaatcacaagaagagatcaggcgcttgtggtcccagcttgattctgccaggaccagtagacaggaattgagtgagctacatgagcaactcctggcgcgcacctctcgtgtggaagatttagaacagctgaagcagcgagaaaaaacccagcatgagtccgaactggagcaactgaggatttattttgaaaagaagttaagggatgctgagaaaacttaccaagaagacctaaccctgttacagcagaggctgcagggggcgagggaagatgctcttctggactctgtggaagttgggttgtcctgtgtgggtttagaagagaaacctgagaaaggaagaaaagatcacgttgatgaactcgagcctgagcgacataaggagagcctgccacgcttccaggcggagttagaagaaagccacaggcaccagctggaagcgctggagtctcccctctgcatccagcacgaggggcatgtctcagacagatgctgcgtagagacttcagcattgggacacgagtggcgtctggaaccctctgaagggcacagccaagagcttccctgggtgcatctccagggtgtgcaggacggggacttggaggccgacacagagcgggcagccagagtcttgggtctggaaactgagcacaaggtgcaactttcgcttcttcagactgagctcaaagaagaaattgaactcctaaaaatagaaaatagaaatttgtatgggaagttgcagcatgaaactcgtctgaaggacgatttggagaaggtaaaacacaatctaattgaagaccaccagaaggaactaaataatgctaagcaaaagactgagctgatgaaacaggaattccaaagaaaagaaacg

SEQ ID NO: 161241 - DNA, 10560 bp, Artificial Sequence
  derived and/or modified sequence
gcggggggagggcgagcccaagcgcgggggagggagtgtaaatagagcgaaggctgctctgtgtcagccccgtcaccgccgggcggcccgcgcggagtctgagggagatggaagttgagcaagagcagcggcgcagaaaggtggaggccgggaggacgaagcttgctcacttccgacagagaaaaacaaaaggtgacagttcgcattcggagaaaaagacggcgaagaggaagggctcggctgtcgatgcgtctgtccaggaggagagtccggtaaccaaggaggacagcgcactctgtggaggaggggacatttgcaaaagcacatcatgtgacgacacccctgatggggcaggaggggcctttgcagctcagccggaggactgtgatggagagaagagagaggacttggaacagctgcagcagaagcaagtcaatgaccatcctccagagcagtgtgggatgttcacagtcagtgaccacccaccagaacagcatgggatgttcacagtcggtgaccacccaccagaacagcgtgggatgttcacagtcagtgaccacccaccagaacagcatgggatgttcacagtcagtgaccacccaccagaacagcgtgggatgttcacaatcagtgaccaccaaccggaacagcgtgggatgttcacagtcagtgaccacacaccagaacagcgtgggatcttcacaatcagtgaccacccagcagaacagcgtgggatgttcacaaaggagtgtgaacaagaatgtgaacttgccattactgacctggagagcggccgtgaagatgaggctggcctgcatcagagtcaggccgtgcatggccttgagctggaggcgctgcgcctgagtctgagcaacatgcacacggcgcagctggagctgacacaggccaacctccagaaggagaaggagacggcattgacggagctgcgggagatgctcaacagccggcgtgcccaggagctggccctgctacagagcaggcagcagcacgagctggagctcctcagggagcagcacgcacgggagaaggaggaggtggtgctcaggtgtggacaggaagcagctgagctgaaggagaagttacaatcagaaatggagaaaaacgcccagatagtaaagaccctgaaggaagattgggaatctgaaaaagatttatgtttagaaaatctacgcaaagaactgtctgcaaagcatcaatcagaaatggaggatttacaaaaccagtttcagaaagaattggcagaacagagagctgagttggagaagatttttcaagacaaaaaccaggctgaacgggcccttaggaacctggagagtcatcatcaagcagccattgagaagttacgtgaagacctgcagtccgagcacggccggtgtttagaagacttggagttcaagttcaaagagagcgagaaagaaaaacagctggagttagagaatcttcaagcatcatatgaagacctgaaggcacaatcacaagaagagatcaggcgcttgtggtcccagcttgattctgccaggaccagtagacaggaattgagtgagctacatgagcaactcctggcgcgcacctctcgtgtggaagatttagaacagctgaagcagcgagaaaaaacccagcatgagtccgaactggagcaactgaggatttattttgaaaagaagttaagggatgctgagaaaacttaccaagaagacctaaccctgttacagcagaggctgcagggggcgagggaagatgctcttctggactctgtggaagttgggttgtcctgtgtgggtttagaagagaaacctgagaaaggaagaaaagatcacgttgatgaactcgagcctgagcgacataaggagagcctgccacgcttccaggcggagttagaagaaagccacaggcaccagctggaagcgctggagtctcccctctgcatccagcacgaggggcatgtctcagacagatgctgcgtagagacttcagcattgggacacgagtggcgtctggaaccctctgaagggcacagccaagagcttccctgggtgcatctccagggtgtgcaggacggggacttggaggccgacacagagcgggcagccagagtcttgggtctggaaactgagcacaaggtgcaactttcgcttcttcagactgagctcaaagaagaaattgaactcctaaaaatagaaaatagaaatttgtatgggaagttgcagcatgaaactcgtctgaaggacgatttggagaaggtaaaacacaatctaattgaagaccaccagaaggaactaaataatgctaagcaaaagactgagctgatgaaacaggaattccaaagaaaagaaacggactggaaagttatgaaggaggagctacagcgggaagctgaggagaagttaacattgatgctacttgaactgagagaaaaggctgaatccgagaaacagaccatcataaacaagtttgagcttcgagaagctgaaatgaggcagcttcaggaccaacaggcagcccagatcctggatctggagaggtccttgacggagcagcagggccgcctgcagcagctggaacaggacctcacttcagacgacgccctgcattgcagccagtgtgggcgggagccgcccacagcccaggacggggagcttgctgcgctccacgtgaaggaagactgcgccctgcagctgatgctggcccggagcaggtttttagaggaacgtaaagagatcaccgagaaattcagtgcggaacaagatgccttcctgcaggaggcccaggagcagcatgcccgtgagctgcagctcctccaggagagacaccagcagcagctcctgtcagtgacggcggagctcgaggccagacaccaggccgcgttgggcgagctgacagcctccttagagagcaagcagggggctctgctggctgcacgtgtggccgaactgcagacaaaacacgctgccgacctcggcgctctggagaccagacatctgtccagccttgattctttggaatcctgttacctctctgaatttcagaccatccgtgaggagcacaggcaggccctagagctcttacgagcagactttgaggaacaactgtggaaaaaggactctcttcaccaaacgattttgactcaagagttggagaaactgaagcggaaacacgaaggggagctacagtctgtgcgggaccacctgcgaaccgaagtgagcacagagctcgccggaaccgtggctcacgagctgcagggagtgcaccagggtgaatttggaagtgaaaagaaaactgctttgcatgaaaaagaggagacacttcggcttcagagtgcacaggcacagccttttcaccaagaggagaaagagtctttgtctctgcagcttcaaaagaagaatcaccaagtccagcagctgaaagaccaggttttatccttaagtcacgagatagaagagtgccgctccgagttggaggtgctgcagcagaggcgggagcgggagaaccgggaaggcgcaaacctcctctccatgctcaaggccgacgtcaacctgtcccacagcgaaagaggggccctccaggacgccctgcgcaggctgctgggtttgtttggagagacgctgagggcagccgtcaccctgaggagccggatcggggagcgcgtggggctctgcctggatgacgcgggcgcaggcctggccctgtcgacagctccggcgctggaggagacatggtctgatgtggccctcccggagttggacagaactttgtctgaatgtgcagagatgtcttccgtggctgaaattagcagccacatgcgtgaaagctttctcatgagcccagaaagtgtgcgggagtgtgagcagcccatccggagggtcttccagagcctcagcctggccgtggacggcctcatggagatggccctggactccagcaggcagctggaagaagcacgccaaattcattctcgttttgaaaaagaatttagttttaagaatgaggagacagcacaggttgtcaggaagcaccaggagctgctggagtgtttgaaggaggagagcgcagcaaaggcagagctggcgctggagctgcacaagactcagggtacccttgagggattcaaggtggagacagcagatctgaaggaggtgctggccgggaaggaggattccgagcaccgtctggtgctggagctggagagcctgagacggcagctgcagcaggcggcccaggagcaggcggcgctgagggaggagtgcacccgtctgtggagtcggggggaggccacagccacggacgccgaggccagagaagctgctctccggaaggaagtggaggatctgaccaaagaacagtcggagaccaggaagcaggctgagaaggaccgctcagccctgctctcccagatgaagattttggagtctgagttagaagaacagctgtctcagcatcgcgggtgtgccaagcaggcggaggccgtcactgccctggaacagcaggtggcatctctggacaagcatttgcgcaaccagcggcaattcatggatgagcaggcagccgagcgggagcacgagcgcgaggagttccagcaggagattcagaggctggaggggcagctccgccaggcggccaagccgcagccctggggccctcgcgacagccagcaggcgccgctggatggagaggttgagttgttacaacaaaagttgagagaaaagttggatgaatttaatgaattggctatacagaaagagtcggcagatagacaagtgttaatgcaggaagaagaaattaaacgtctggaggagatgaacatcaacatcaggaaaaaagtggcccagctccaggaagaagtggaaaaacagaaaaacatcgtgaaagggctggaacaggataaagaggtgttaaagaaacagcagatgagtagcttgcttctggcgtccacgttgcagtctacactagatgcaggcagatgtcccgagcctccttcgggcagccctcctgagggtccagaaatacagttagaggtgacacagagagcactcctgcggcgcgagagcgaggttttggacttaaaagaacagctagaaaagatgaaaggtgacttagaaagtaaaaatgaagaaatactacatctgaacttaaaattggacatgcagaacagccagactgctgtcagcctcagagaacttgaggaagagaacacgagcttgaaggtcatatataccagaagttctgagattgaagagctgaaagccactattgaaaatctgcaagagaatcagaaacgattacaaaaggagaaagcagaggaaattgaacaactccatgaagtcattgagaagctgcagcacgagctgtccctcatggggcctgtggtgcacgaagtcagcgacagtcaggctggcagtctgcagagcgagctgctctgctcccaggccgggggccctcgtgggcaggccctacagggcgagctcgaggctgcgctggaagccaaggaggccctgagccggctgctggctgaccaggagcgcaggcacagccaggccctggaggccctgcagcagcgcctccagggcgcagaggaggctgcggagctacagctggctgagctggagcgcaatgtagccctcagggaggctgaggtcgaagacatggcctcccggatccaggagttcgaagcggccctgaaagcaaaggaagcgacgattgccgagagaaatttagaaatcgacgctctgaaccagcggaaggcggcccactctgccgagctggaggccgtcctgttggccttggcccgcatccgccgcgccctggagcagcagcccctggcagccggggcggcgcctcccgagctgcagtggctccgagcgcagtgtgcccgcctcagccgccagctgcaggtgctgcaccagcggttcctgaggtgccaggtggagctggacaggcggcaggcccgcagagccacagctcacacacgggtgcccggggcccacccacagcctcgcatggatggtggcgccaaggcccaggtcaccggcgacgtggaggcctcccatgatgctgctttggagccggttgtccctgacccacagggtgatctgcagcctgtcctggtgacgttgaaggatgcacctctctgcaagcaagaaggcgtgatgtcagtgctcaccgtctgccagaggcagctgcagtcggagctgctcttggtgaaaaatgaaatgcgcctgagtctggaggacggcggcaagggtaaagaaaaagtactggaagattgtcagctgccgaaggtcgatctcgtagctcaggtgaaacagcttcaggaaaaactgaaccgtttgctgtattccatgaccttccagaatgtggatgctgccgacaccaaatctctgtggcccatggcctcagcacacctgttggagagcagctggagtgatgattcctgtgacggagaagagcctgacatatcaccccacatagacacatgtgatgccaatacagccacggggggtgtaactgatgttatcaaaaatcaggccatagacgcgtgtgatgccaatacaaccccagggggtgtaactgatgttatcaaaaattgggattccttgataccagatgaaatgccagattctcccattcaagaaaaatcagaatgtcaggacatgtctctttcttcaccgaccagcgtacttggtggctcccgccaccagagccacactgcagaggctgggccccggaagagcccggtcgggatgctggacctgtcttcctggagctcccctgaggtcctcaggaaggactggaccctggagccctggcccagcctccccgtgacaccccactcaggagccctgagcctgtgcagtgccgacacatccctgggggacagggcggacacctcgctgccacagacccaggggccggggctgctttgttccccaggcgtgtctgcagcagcgctggcactgcagtgggccgagtctccgccggctgacgaccaccatgtgcagaggacggctgtggagaaagatgtcgaagattttatcacaacatcctttgattctcaagaaacattaagttcacctcctcctggattagaaggaaaagctgatagaagtgagaaaagtgacggctcgggttttggagcaagactgagcccggggtcaggaggccctgaggctcaaactgctggtcctgtgacccctgcttccatctctggaaggtttcagccgctgccggaagccatgaaggagaaggaagtgcgtccgaagcacgtgaaggctttactgcagatggtgcgtgacgagagccaccagatcctggcgctgtcagaaggccttgcacccccaagcggcgagccacacccaccccggaaggaagacgagatacaggacatctcgctccatgggggaaagacgcaggaagtgcccaccgcgtgccccgattggagaggggaccttctgcaggttgtgcaagaggcctttgaaaaagagcaggagatgcagggggttgagctgcagccccgactcagtggctcagatctggggggtcacagctccctgctcgaaaggctggagaagatcatccgtgagcagggagacctgcaggaaaagtccctggagcatcttcgcttgccggaccggagcagcctgctgtccgagatccaggcgctgcgtgcccagctgcgcatgacgcacctgcagaaccaggagaagctgcagcacttgcgcacggcgctgacaagcgcagaggcgcgcgggagccagcaggagcaccagctgcgcaggcaggttgaactgctggcttataaagtagagcaggagaagtgcattgctggtgacttgcagaagacgctgagtgaagagcaagagaaggcaaacagcgtgcagaagctcctggcggcggagcagactgtagtgcgagatttgaagtccgacctctgtgagagcaggcagaagagcgaacagctgtcccggtccctctgcgaggtgcagcaggaggtcctccagctgagatccatgctgagcagtaaggagaacgagctgaaggccgcgcttcaggagctggagagtgagcaggggaaggggcgtgccctgcagagccagctggaggaggagcagctgcggcacctgcagagggagagccagagtgccaaggccctggaggagctgcgggcgtctttggagacacagcgtgctcagagcagtcgactctgcgtggcactgaaacacgagcagacggccaaggacaacctgcagaaggagctgcgtatcgagcactcacgctgcgaggccttgctggctcaggagcggagccagctctctgagctccagaaggaccttgcggctgagaagagccgcaccctggagctgtcagaggccttgcggcacgagcggctcctgaccgagcagctgagccagaggacacaggaggcttgcgtgcaccaggacacacaggcccatcacgctctgctgcagaagctgaaggaggagaagtcccgggtggtggacttgcaagcgatgcttgaaaaggtgcagcagcaagccctgcattctcagcagcagcttgaggctgaggctcagaagcactgtgaggcgctcaggagagagaaggaggtaagtgccacactgaagtcgacggtggaagccctgcacacccaaaaacgagagctgagatgctctctggagagagagagggagaaaccagcgtggttgcaggcagaattagagcagtcacacccacggttgaaagagcaagaaggacgcaaggctgcgaggaggagcgcggaggccaggcagagcccagcggctgcggagcagtggaggaagtggcagagagacaaggagaagctgcgagaattagaactgcagcgtcagcgtgacttgcataagatcaagcagcttcagcagacagtgagagacctggagtcgaaggacgaggtgcctggcagccgcctccacctaggttctgcccgcagggctgccggctcggatgcggaccacctccgggaacagcagcgagagctggaggcgatgaggcagcggctgctctctgccgcccggcttctcaccagcttcaccagccaggccgtggacaggacagttaatgattggacgtcatccaatgagaaagcagtgatgtctttactgcacacgttggaggagctgaagtctgacttgagcaggcccacctcctcccagaaaaaaatggcagcagagctgcagttccagtttgtggacgtcctgctgaaagacaatgtttccctcacaaaagcgctcagcacggtgacccaggagaagctggagctgagcagagccgtgtctaagcttgagaagttgctgaagcaccatctgcagaagggctgcagcccaagcaggtcggaaaggtctgcttggaagccagacgaaacggctccacagagttccctgaggcgcccagaccccggccggcttccaccagctgccagcgaggaagcacacaccagcaatgtcaagatggaaaaattgtacctgcattacttgagagcagagagctttagaaaagctctgatttatcaaaagaagtatcttttgctgttgattggtggattccaggattctgaacaagaaacactctccatgattgcccatttgggggtatttccttccaaagcagaacggaaaatcacatctcgtcctttcaccaggttccgcacggccgtcagggtggtcattgcaatattaagattacgttttttggttaagaaatggcaagaagtagatcggaaaggagctctggcacaaggcaaagcccctcgcccagggccccgagcacgacagccgcagtctccacccagaaccagagagtcccccccaacccgggatgtaccctctggccacaccagggaccctgccagaggccgcagactggcagcagcagcctccccacacagtgggggaagagccactccatccccaaattcaagattagaaagatccctgactgcttctcaagatccagaacattccttgacagagtatattcaccatttagaagtgatccagcaaagattgggaggggtactaccagattctacttcaaagaaatcctgccacccgatgattaaacagtgaataaaatgtcatggctctttcctgcgacaattctatttgaggaaaagatttgtttttcccttttcccaaggaagctcgtgggacagcatgggcactactcttcatgtgcggtgacaccagcccccagatgccttgaattaagtgtcctcacctttatgcatgactgcaaagccagctggagcattttctatggagcctccgtatgttttaggcccatgaccttcgtgaggtgacgggcactcactcccatgagccctggctgtgtgctgttgtgtgcctatcggcagatccatccttcctgcctccaaggaggatacacagagaatggcttcctgttgttttgtttattttcttaacgtgtacagatggaaacttcatttaaaaataaaaacaaaacaactcaaaaaggaataaaatttaatcactgttttgtttgtgaata

SEQ ID NO: 161242 - DNA, 2214 bp, Artificial Sequence
  derived and/or modified sequence
atggaagttgagcaagagcagaggagacgtaaggtggaagccggtcgaaccaagttagcccactttcggcagcgcaagaccaagggagattctagccacagtgaaaaaaaaacagctaagcgaaaaggtagcgccgtcgatgcttccgtacaggaagagagccccgttaccaaggaagactccgcgctgtgtggagggggtgacatatgcaagtcaaccagttgcgatgacacacccgacggcgcaggtggcgcattcgctgctcagccagaagactgtgacggcgagaagagagaggatctggagcagctgcagcaaaaacaggttaatgatcaccctccggagcagtgtggcatgttcacagtctcagatcacccaccggaacagcacgggatgtttaccgtcggcgatcacccccctgaacagagaggtatgttcaccgtcagcgatcatccacctgaacagcgaggtatgtttaccattagtgaccaccaacctgagcagcggggaatgttcaccgtttctgaccatacaccggaacagcgcggtatttttaccatcagcgatcacccagctgaacagcgaggcatgtttacgaaagagtgcgagcaggagtgtgagctggcaattaccgacttagagagcggacgcgaagacgaagccggtcttcatcagagtcaggccgtgcacgggctggagctggaagcgctccggctgtccctgtccaacatgcacacagcacagctggagctgacacaggctaatctacagaaagagaaagagacagctctcaccgaactgagagagatgctgaattccagacgggcacaggagctcgctttactgcagagtaggcagcagcacgagctggaactactgcgcgaacagcacgcacgggagaaggaagaggtcgtactaagatgtgggcaggaagccgctgaactgaaggaaaagttgcagagcgaaatggagaaaaacgctcagatagtcaaaaccctgaaggaggactgggagagtgagaaagatctgtgtctcgaaaatcttaggaaagagctgtcagcaaagcatcagagtgaaatggaggacctgcaaaaccagttccagaaggagctggcagagcagagggctgagctggaaaagattttccaggataagaatcaggctgagagagcactccgaaacctggagagccatcaccaggccgctatcgagaaattgcgcgaagaccttcagtctgagcatgggagatgcctggaagacttggagttcaagttcaaggagagcgagaaagaaaagcagctggaactggagaacttgcaggcctcttacgaagatctcaaagcccagagtcaagaggagattaggcgtctatggagtcagctagacagcgcccgaacctcaagacaagaactctccgagctccacgagcagctcctggctagaaccagccgtgtggaggacctagaacagctcaagcaacgggaaaagacccaacatgagtccgaactggagcagctgagaatttactttgaaaaaaaactgcgcgacgcggagaagacatatcaggaggatctgaccctgctgcagcagcggctccagggcgctcgcgaggatgccttactggactcagttgaagtcggcctttcatgcgtgggcctcgaggaaaaaccagagaaaggtaggaaagaccacgtcgacgagctggaacccgagagacataaagaaagcttgcctagattccaggccgaacttgaggagtcccatcgacaccaacttgaagcactggaatcacctttatgtattcagcatgaaggccacgttagcgacagatgttgcgtcgagacgagcgcgttgggccacgaatggagacttgagccctctgaggggcactctcaagaacttccctgggtccatctgcagggcgtgcaggacggcgatctggaggccgacactgagcgggctgccagagtgctgggactggaaaccgaacacaaggtacagctttcactgctgcaaaccgagttgaaagaggagatcgagctgcttaagatcgaaaaccggaacctatacggaaagttgcagcatgagacaaggcttaaagatgaccttgaaaaggtaaaacataatttgatcgaagaccatcagaaagaacttaacaatgcaaagcagaaaaccgagctgatgaagcaggagtttcaacgcaaagagacatag

SEQ ID NO: 161243 - DNA, 10010 bp, Artificial Sequence
  derived and/or modified sequence
atggaggtggaacaggagcagcgaaggcggaaggtagaggcagggaggactaaactggcccacttcaggcagcgaaaaaccaagggcgactcctcccactcggagaaaaagaccgctaagagaaaaggctccgcagtggatgctagcgtgcaggaagagtctccggtgactaaggaggactcagctctatgtggaggtggcgatatatgtaaatcaacttcttgtgacgacactcctgatggtgcagggggtgcattcgccgcacagccagaggactgcgatggcgaaaagcgggaagacctggaacaactccagcagaagcaggtgaatgaccatcctccagagcagtgtggaatgttcacggttagcgaccatccgccagagcagcacggcatgtttaccgtcggagatcacccaccggagcagaggggaatgtttaccgtgtcagaccacccgccagaacagcatggcatgtttacggtttccgatcaccccccagagcagcgagggatgttcactataagcgatcatcagcccgagcagaggggtatgtttactgtgagcgatcacaccccagaacagagaggcatcttcacaatctccgaccacccagccgaacaacggggtatgtttacaaaagaatgtgaacaggagtgtgaactggctatcacagatttggagagtggacgtgaggatgaagcgggactgcaccagtcacaggccgtgcacggtctggaactcgaggctcttcgtctgagcttgtctaacatgcatacagcccagctggaactgacacaggcaaacctccaaaaagagaaggaaacagcactgaccgagctgcgggagatgctcaacagccgacgggcacaagagctggccctcctgcagagccgccagcagcacgaactggaactgctgagagagcaacatgctcgcgaaaaagaggaagttgtgttacgatgcgggcaggaagctgcggagctgaaggaaaaactgcaatcagagatggaaaaaaacgcccagatcgttaagaccctgaaggaggattgggaaagcgagaaggacctgtgcctggagaacctgcgaaaagagctgagcgccaagcatcagagcgagatggaagatttgcaaaaccagttccaaaaagaattggctgaacagcgagccgagctggagaagatctttcaggataaaaaccaggcagagagagccttaagaaatctcgaatctcaccatcaggcagccattgaaaaactgagggaagatttgcaaagtgagcacgggagatgtctggaagatctagagtttaagttcaaggaatctgagaaagaaaagcaactggaactggaaaatttgcaggcttcctatgaggacctgaaagctcagagtcaggaggagattaggcgcctatggtcccagttggattctgcccgaacatctcgtcaggaactaagtgagcttcacgagcaactgctggccagaacatctagagtcgaggaccttgagcagttgaagcaacgtgaaaagacacagcacgaatccgaattagagcagctgaggatctactttgaaaaaaaactgcgggacgccgaaaagacctatcaagaggacttaactctcttacaacaaaggctgcagggcgcaagagaagacgcccttctggactcagttgaagtaggactgagctgcgtcggtctagaggaaaaaccagagaaggggaggaaggaccatgtagatgaattggagcccgagcgccacaaggagtctctgcccagatttcaggcagagcttgaagaaagccacaggcaccaattggaggccctcgagagcccactatgcattcaacacgaagggcatgtgtcagacaggtgttgtgtcgagacgtcagctctgggccacgagtggcgtctggaaccctcagagggacacagtcaggaattgccatgggtgcatcttcagggcgtacaagacggcgacctagaggcggatacagagcgcgctgccagggtactcggtctcgaaaccgagcacaaggtccaactctcccttcttcagacggagttgaaggaggaaatagagctcctgaaaattgagaaccgcaatttgtacggtaagttgcagcacgaaacccgcctcaaagacgacctggagaaggtgaagcacaacctgatagaagaccaccagaaagaactcaacaacgcgaaacagaagaccgaactgatgaaacaagaattccagcgaaaggagaccgactggaaagtgatgaaggaagagctgcaaagagaagctgaggagaagctcacattgatgctgctggagctgcgggaaaaggccgagtcagagaagcaaactatcattaataaatttgagctccgcgaggccgaaatgagacagctgcaagatcagcaggccgctcaaattctggacttagaaaggagtctgaccgaacagcagggaaggcttcagcagctggagcaggatctaacttcagacgatgcgttgcactgttctcaatgtggacgtgaacctcctaccgcccaagacggtgaactcgccgcactgcatgtgaaggaggactgtgccttgcagctgatgctggctcgatcccgctttctcgaagaacgcaaagagatcaccgagaagttcagcgctgagcaggatgcctttctgcaggaggcccaggaacaacatgcaagagaattacagctgctccaggagaggcaccagcagcagctcctttccgtgacagcagagctggaagccagacatcaggccgctcttggcgagctgaccgctagtctggagtcaaaacagggtgctctgctggctgcgagggtcgccgaattgcagaccaagcacgccgcagacctgggcgctctcgaaactcggcacctgtcatcccttgactctctcgaatcgtgttatttgtcagagtttcagacaattagggaggagcatcgacaggctttagagctcctgcgggctgacttcgaggagcagctttggaaaaaggatagcttgcaccagacaatcctgacgcaggagttagagaagttgaaaagaaagcatgagggagagctgcagtccgtgcgggaccatcttcgtacggaagtcagtacagagttagcaggcactgtggcacacgagctgcagggggtccatcagggcgagttcggttccgagaagaaaacagctctgcatgagaaggaggaaacacttcgcttgcagtcagctcaggcgcagccttttcaccaggaggaaaaggagtctctgtccctgcagctccagaaaaagaatcaccaggtccagcagctaaaagaccaggtgctcagcttaagtcatgagattgaagagtgtcgaagcgagctagaagtgttacagcagcggagagaaagagagaacagggaaggggcaaatttgctcagcatgctcaaggccgacgtgaatctctctcactcggagcgcggagccctacaagatgcacttcgacggctgctcgggctgttcggagaaacccttcgggcagccgtgaccctccggagtcgcataggcgagagggtggggctgtgtctcgatgatgcaggggcaggtctggccttgagcacggctcctgccctcgaagaaacgtggtccgacgtggccctgccagaattggatcgaacgctttccgaatgcgccgagatgtcctccgtcgcagaaatttcatcacacatgagagagagctttctaatgtcacctgaatcggttcgggagtgcgaacagcccatcagacgggtttttcagtcactgagcctggccgtggatggtttgatggaaatggcgctggactcctctcgccagctggaagaagccagacagatccactcacgctttgaaaaggagttttctttcaaaaatgaggagaccgctcaggtggtgcgcaaacaccaggaactgctggagtgtttgaaggaggaaagcgcagctaaggccgaactggcgttggaacttcataagactcagggaacgctagaagggttcaaagtggagactgccgacctcaaggaagtgctggctggcaaggaggacagtgagcatcgactggttctggagctggagtcattaaggcgtcagcttcagcaggctgctcaagagcaagctgctctgagagaggagtgtactcggctctggtctaggggagaggccaccgcaaccgatgccgaagctcgtgaagccgcactcagaaaggaggtggaggacctgacgaaagagcaatcagagacccggaagcaggcagagaaagacaggtctgccctcctttcgcagatgaaaatcctagaatccgagctcgaagaacaactgagtcagcacagaggctgcgccaaacaggccgaagccgtgactgcattggagcaacaagtcgcttctcttgacaagcacttgcggaaccagcggcagttcatggacgaacaggccgcagagcgagaacacgaacgtgaggagtttcagcaggaaattcaaaggctggaagggcagctgcgacaggctgccaaaccacagccgtggggcccacgggacagtcaacaggcaccgcttgacggcgaggtagagcttttacagcagaagcttagggaaaagctggatgaattcaatgagctcgcaatccagaaggagtctgccgaccggcaggtgctgatgcaggaagaggagatcaaaaggctggaggagatgaatatcaatatcaggaagaaggttgcccagctgcaggaagaggtggagaagcagaagaatattgtgaaagggcttgagcaggacaaagaggtattgaagaagcaacagatgtcaagcctgttattggcaagtactctgcagtctaccctcgacgcagggagatgtcccgaacctcccagcggaagtccgccagaagggcctgaaattcagctcgaggtgacccaacgggcactcctaaggagggaaagcgaagtgcttgacctgaaagaacaactagagaaaatgaagggcgacctcgagtctaagaatgaggaaattttgcacctgaatctcaaactcgacatgcagaactctcagacggccgtctcactgcgcgagctggaagaggagaacaccagcctgaaagtaatctacactcgaagcagtgagatcgaggagctcaaggcaacaatcgagaatctccaggagaatcagaagaggctgcagaaggagaaagctgaggaaattgaacagctgcacgaggtcatagagaaattacagcacgagctgagcttgatgggacccgttgtccacgaggtgtcagacagccaggcaggatcgctgcagagcgaattactgtgtagccaggcaggcggaccccgtgggcaggcactgcaaggcgagctggaagctgcccttgaggcaaaggaggcactgtccagattacttgcggaccaagaacgtagacacagtcaggcactggaggctctacagcagaggctccagggcgcagaggaagccgctgagctacagctcgcggaacttgagaggaacgtggcgttaagagaagctgaggtggaagatatggcatcacgtatccaggagttcgaagcggctttgaaagcaaaggaggccaccatcgcggagcggaacttggagatagatgcactgaatcagcgcaaggctgcccattccgcagagctcgaagccgtcctcctggctctggcacggattagacgggcactggaacagcagcctctggctgccggtgctgctcctccagaactgcagtggctgagggcccagtgtgccagactctcccggcagctgcaggttcttcaccaaaggtttttgcgatgccaggtggaactggacagacggcaggccaggcgggctactgcccatacacgcgtgccaggagctcacccacagcctcggatggatggaggcgctaaggcccaggtgacaggagatgtagaggcctcccatgacgcagccctggagcctgtggtgccagacccacagggagacctccagcccgtgctggtgacactaaaagatgctccattgtgcaagcaggaaggcgtgatgtccgtcctgaccgtgtgtcaaaggcagctgcaatcagagctgttactggttaaaaacgagatgagattgtcattagaagacgggggaaaaggcaaggaaaaggtacttgaggactgtcagttgcccaaagtggacctcgtcgcccaggtcaagcaattgcaggagaaattaaaccgccttttgtactccatgactttccaaaatgtagatgctgctgatactaaaagcttgtggcctatggcaagcgctcatctgctcgaatcaagctggtccgacgactcttgcgatggcgaggaacccgatatatcgcctcatatcgacacatgcgatgctaatacagctaccggaggagtgaccgacgtgatcaagaaccaggcgattgacgcatgtgatgccaacaccacgcccggaggcgttacggacgttatcaagaattgggattccctgattcctgatgagatgccagacagccccatccaagagaagtccgagtgtcaggatatgtcgctgtcatcgcctaccagtgtactgggcggttcacgccaccagtcacatactgcagaagcgggtcccaggaagtccccggtgggcatgctcgatctttcaagctggtcgagccctgaggtgctgaggaaggactggactctcgagccctggcccagtttgcccgtgacaccccactccggcgctttgagcctgtgtagcgctgataccagccttggtgatagagcagatacaagtctgccacagactcaagggcctggacttttgtgtagtccgggagtgagtgctgctgccctcgctctgcaatgggccgaatctccacccgctgatgaccatcacgtacagcggacagcagtcgagaaggacgtcgaggatttcatcaccacatctttcgattcgcaggagactttatccagcccccctcccggtctcgaaggcaaggccgaccgttccgaaaagagcgatggaagtggattcggggctagactcagccctggttcagggggtccagaggcccaaactgctggaccagtcactcctgctagcatttcagggagatttcagccattgcctgaggctatgaaagaaaaggaagtgaggccaaaacatgtgaaggccctactccagatggtgagggacgagtcccatcaaatcctcgcactctccgagggactggctcccccttcgggagaaccacatcctccccgtaaggaggacgagatacaggacatttcactgcacgggggaaagacccaggaagtacccactgcatgtcccgactggagaggggacttgctgcaggtggtccaggaggccttcgagaaggaacaggagatgcagggcgttgaactgcagccgcgtctcagtggaagcgacctcggtggacactcctcgttgctggaacgacttgaaaaaattatcagagaacaaggagacctccaggagaaaagccttgagcatctgcgtttgccggatcgcagctcgcttctgtctgagatccaggccctcagagcccagctgaggatgacacatctacagaaccaggaaaaactgcagcatttacggacggcattaaccagcgcagaggctcggggttcacagcaggagcatcaattacggcgacaagtcgagctgttggcatacaaagtcgaacaagagaaatgcatagctggagacctgcagaaaacactgtctgaagaacaagagaaagcaaactctgtgcagaagcttctggccgcagagcagacagtcgtccgcgacctgaagtccgatttatgcgaaagtcggcagaaatccgagcagctgtcaagatcactttgcgaagtgcagcaggaggtattgcagctcaggtcaatgttgtcgtccaaggagaatgagttgaaggctgctctccaggagctggagagtgagcaagggaaaggcagagcactccagtctcagttggaagaggaacagctgagacaccttcagcgggaatctcagagtgcaaaagctcttgaggaactgagggcatccctcgagactcaacgggcacaaagttcccgactgtgtgtcgcgctaaagcatgagcagacagccaaggacaacctgcagaaggaactgcggatcgaacattcacgctgtgaggcactcctcgctcaagaacgatcacagctgtcagaactgcagaaggaccttgccgcagagaagtcccggaccctcgagctgagtgaggctctgaggcacgagcgcctattgacagaacaactttcacagcgaacgcaagaggcttgcgtgcatcaagacacgcaggcacatcatgctctacttcagaaactcaaggaggagaaaagcagagtggtcgatctgcaggccatgctggagaaagttcagcaacaggcgctgcatagtcaacagcaactcgaagccgaggcccagaagcattgtgaagctctgagaagagagaaggaggtgagcgccaccctgaagtccactgtggaggctctccacacccagaagcgggagttgagatgcagtctcgaacgagagcgggaaaagccagcctggctccaggccgagctggaacaaagtcatccacggttaaaagagcaagagggcaggaaagccgctaggcgctcagctgaggcgcgtcagagccccgcagcggctgagcagtggagaaagtggcagagagacaaggagaagttacgggaactcgaactgcagagacagagggacttacataaaattaaacagctgcagcagacagtcagggatctggagagtaaggatgaggtgccaggaagtcggttgcatctgggctccgcaaggagggctgctggatccgacgcggaccatctccgagagcagcagcgcgagctggaagcgatgaggcagcggttactgtctgctgctaggctgctaacctccttcacctctcaggccgtcgatcgcacagtcaatgactggaccagcagcaatgagaaagctgtcatgagtttgctccacacactggaggagctgaagagcgaccttagtagacccacatcgtcacaaaagaagatggccgctgagcttcaattccagtttgtggacgtccttctgaaggacaacgtcagtctgacgaaggcactgagcacggtcacacaggagaaactagagctgtcccgggctgtgtctaagctcgaaaagttgcttaagcaccaccttcagaagggttgtagtccttctcgcagcgagcgctcagcatggaaacctgatgagacggccccacagagtagcctccgccgtcctgaccccggaagactcccaccagctgcaagcgaggaagcccacactagtaatgtcaagatggagaaactttatctgcactatctccgggctgaatcctttaggaaggccctgatttatcagaagaaatatctgcttttattaatcgggggatttcaagacagtgagcaggagaccctgtcaatgatagcacacctgggtgttttccccagcaaagcagagcgcaagattaccagccgccctttcaccaggtttaggacagccgtccgcgtggtgatcgctatattgcgactcagatttctagttaaaaaatggcaagaagtggacaggaagggcgcactcgcccaggggaaggcgcctcgccctggccctcgggctcgccagccacagagcccgcctaggacccgcgagtctccgcctactcgagacgtgccatctgggcacacacgggatcctgcccgtggacggcgactggcagcagccgcatcgccacactccggaggacgggctactcctagccccaatagccgattggagcggtctcttacagcaagtcaggaccccgagcactccctgacagagtatatccaccatttggaggtaatccagcagaggctagggggtgttctgcccgactcgacctccaagaagtcgtgtcatccaatgataaaacaata

SEQ ID NO: 161244 - DNA, 2214 bp, Artificial Sequence
  derived and/or modified sequence
atggaggtggagcaggagcagagaagaagaaaggtggaggccggcagaaccaagctggcccacttcagacagagaaagaccaagggcgacagcagccacagcgagaagaagaccgccaagagaaagggcagcgccgtggacgccagcgtgcaggaggagagccccgtgaccaaggaggacagcgccctgtgcggcggcggcgacatctgcaagagcaccagctgcgacgacacccccgacggcgccggcggcgccttcgccgcccagcccgaggactgcgacggcgagaagagagaggacctggagcagctgcagcagaagcaggtgaacgaccacccccccgagcagtgcggcatgttcaccgtgagcgaccacccccccgagcagcacggcatgttcaccgtgggcgaccacccccccgagcagagaggcatgttcaccgtgagcgaccacccccccgagcagagaggcatgttcaccatcagcgaccaccagcccgagcagagaggcatgttcaccgtgagcgaccacacccccgagcagagaggcatcttcaccatcagcgaccaccccgccgagcagagaggcatgttcaccaaggagtgcgagcaggagtgcgagctggccatcaccgacctggagagcggcagagaggacgaggccggcctgcaccagagccaggccgtgcacggcctggagctggaggccctgagactgagcctgagcaacatgcacaccgcccagctggagctgacccaggccaacctgcagaaggagaaggagaccgccctgaccgagctgagagagatgctgaacagcagaagagcccaggagctggccctgctgcagagcagacagcagcacgagctggagctgctgagagagcagcacgccagagagaaggaggaggtggtgctgagatgcggccaggaggccgccgagctgaaggagaagctgcagagcgagatggagaagaacgcccagatcgtgaagaccctgaaggaggactgggagagcgagaaggacctgtgcctggagaacctgagaaaggagctgagcgccaagcaccagagcgagatggaggacctgcagaaccagttccagaaggagctggccgagcagagagccgagctggagaagatcttccaggacaagaaccaggccgagagagccctgagaaacctggagagccaccaccaggccgccatcgagaagctgagagaggacctgcagagcgagcacggcagatgcctggaggacctggagttcaagttcaaggagagcgagaaggagaagcagctggagctggagaacctgcaggccagctacgaggacctgaaggcccagagccaggaggagatcagaagactgtggagccagctggacagcgccagaaccagcagacaggagctgagcgagctgcacgagcagctgctggccagaaccagcagagtggaggacctggagcagctgaagcagagagagaagacccagcacgagagcgagctggagcagctgagaatctacttcgagaagaagctgagagacgccgagaagacctaccaggaggacctgaccctgctgcagcagagactgcagggcgccagagaggacgccctgctggacagcgtggaggtgggcctgagctgcgtgggcctggaggagaagcccgagaagggcagaaaggaccacgtggacgagctggagcccgagagacacaaggagagcctgcccagattccaggccgagctggaggagagccacagacaccagctggaggccctggagagccccctgtgcatccagcacgagggccacgtgagcgacagatgctgcgtggagaccagcgccctgggccacgagtggagactggagcccagcgagggccacagccaggagctgccctgggtgcacctgcagggcgtgcaggacggcgacctggaggccgacaccgagagagccgccagagtgctgggcctggagaccgagcacaaggtgcagctgagcctgctgcagaccgagctgaaggaggagatcgagctgctgaagatcgagaacagaaacctgtacggcaagctgcagcacgagaccagactgaaggacgacctggagaaggtgaagcacaacctgatcgaggaccaccagaaggagctgaacaacgccaagcagaagaccgagctgatgaagcaggagttccagagaaaggagacctag

SEQ ID NO: 161245 - DNA, 10011 bp, Artificial Sequence
  derived and/or modified sequence
atggaggtggagcaggagcagagaagaagaaaggtggaggccggcagaaccaagctggcccacttcagacagagaaagaccaagggcgacagcagccacagcgagaagaagaccgccaagagaaagggcagcgccgtggacgccagcgtgcaggaggagagccccgtgaccaaggaggacagcgccctgtgcggcggcggcgacatctgcaagagcaccagctgcgacgacacccccgacggcgccggcggcgccttcgccgcccagcccgaggactgcgacggcgagaagagagaggacctggagcagctgcagcagaagcaggtgaacgaccacccccccgagcagtgcggcatgttcaccgtgagcgaccacccccccgagcagcacggcatgttcaccgtgggcgaccacccccccgagcagagaggcatgttcaccgtgagcgaccacccccccgagcagcacggcatgttcaccgtgagcgaccacccccccgagcagagaggcatgttcaccatcagcgaccaccagcccgagcagagaggcatgttcaccgtgagcgaccacacccccgagcagagaggcatcttcaccatcagcgaccaccccgccgagcagagaggcatgttcaccaaggagtgcgagcaggagtgcgagctggccatcaccgacctggagagcggcagagaggacgaggccggcctgcaccagagccaggccgtgcacggcctggagctggaggccctgagactgagcctgagcaacatgcacaccgcccagctggagctgacccaggccaacctgcagaaggagaaggagaccgccctgaccgagctgagagagatgctgaacagcagaagagcccaggagctggccctgctgcagagcagacagcagcacgagctggagctgctgagagagcagcacgccagagagaaggaggaggtggtgctgagatgcggccaggaggccgccgagctgaaggagaagctgcagagcgagatggagaagaacgcccagatcgtgaagaccctgaaggaggactgggagagcgagaaggacctgtgcctggagaacctgagaaaggagctgagcgccaagcaccagagcgagatggaggacctgcagaaccagttccagaaggagctggccgagcagagagccgagctggagaagatcttccaggacaagaaccaggccgagagagccctgagaaacctggagagccaccaccaggccgccatcgagaagctgagagaggacctgcagagcgagcacggcagatgcctggaggacctggagttcaagttcaaggagagcgagaaggagaagcagctggagctggagaacctgcaggccagctacgaggacctgaaggcccagagccaggaggagatcagaagactgtggagccagctggacagcgccagaaccagcagacaggagctgagcgagctgcacgagcagctgctggccagaaccagcagagtggaggacctggagcagctgaagcagagagagaagacccagcacgagagcgagctggagcagctgagaatctacttcgagaagaagctgagagacgccgagaagacctaccaggaggacctgaccctgctgcagcagagactgcagggcgccagagaggacgccctgctggacagcgtggaggtgggcctgagctgcgtgggcctggaggagaagcccgagaagggcagaaaggaccacgtggacgagctggagcccgagagacacaaggagagcctgcccagattccaggccgagctggaggagagccacagacaccagctggaggccctggagagccccctgtgcatccagcacgagggccacgtgagcgacagatgctgcgtggagaccagcgccctgggccacgagtggagactggagcccagcgagggccacagccaggagctgccctgggtgcacctgcagggcgtgcaggacggcgacctggaggccgacaccgagagagccgccagagtgctgggcctggagaccgagcacaaggtgcagctgagcctgctgcagaccgagctgaaggaggagatcgagctgctgaagatcgagaacagaaacctgtacggcaagctgcagcacgagaccagactgaaggacgacctggagaaggtgaagcacaacctgatcgaggaccaccagaaggagctgaacaacgccaagcagaagaccgagctgatgaagcaggagttccagagaaaggagaccgactggaaggtgatgaaggaggagctgcagagagaggccgaggagaagctgaccctgatgctgctggagctgagagagaaggccgagagcgagaagcagaccatcatcaacaagttcgagctgagagaggccgagatgagacagctgcaggaccagcaggccgcccagatcctggacctggagagaagcctgaccgagcagcagggcagactgcagcagctggagcaggacctgaccagcgacgacgccctgcactgcagccagtgcggcagagagccccccaccgcccaggacggcgagctggccgccctgcacgtgaaggaggactgcgccctgcagctgatgctggccagaagcagattcctggaggagagaaaggagatcaccgagaagttcagcgccgagcaggacgccttcctgcaggaggcccaggagcagcacgccagagagctgcagctgctgcaggagagacaccagcagcagctgctgagcgtgaccgccgagctggaggccagacaccaggccgccctgggcgagctgaccgccagcctggagagcaagcagggcgccctgctggccgccagagtggccgagctgcagaccaagcacgccgccgacctgggcgccctggagaccagacacctgagcagcctggacagcctggagagctgctacctgagcgagttccagaccatcagagaggagcacagacaggccctggagctgctgagagccgacttcgaggagcagctgtggaagaaggacagcctgcaccagaccatcctgacccaggagctggagaagctgaagagaaagcacgagggcgagctgcagagcgtgagagaccacctgagaaccgaggtgagcaccgagctggccggcaccgtggcccacgagctgcagggcgtgcaccagggcgagttcggcagcgagaagaagaccgccctgcacgagaaggaggagaccctgagactgcagagcgcccaggcccagcccttccaccaggaggagaaggagagcctgagcctgcagctgcagaagaagaaccaccaggtgcagcagctgaaggaccaggtgctgagcctgagccacgagatcgaggagtgcagaagcgagctggaggtgctgcagcagagaagagagagagagaacagagagggcgccaacctgctgagcatgctgaaggccgacgtgaacctgagccacagcgagagaggcgccctgcaggacgccctgagaagactgctgggcctgttcggcgagaccctgagagccgccgtgaccctgagaagcagaatcggcgagagagtgggcctgtgcctggacgacgccggcgccggcctggccctgagcaccgcccccgccctggaggagacctggagcgacgtggccctgcccgagctggacagaaccctgagcgagtgcgccgagatgagcagcgtggccgagatcagcagccacatgagagagagcttcctgatgagccccgagagcgtgagagagtgcgagcagcccatcagaagagtgttccagagcctgagcctggccgtggacggcctgatggagatggccctggacagcagcagacagctggaggaggccagacagatccacagcagattcgagaaggagttcagcttcaagaacgaggagaccgcccaggtggtgagaaagcaccaggagctgctggagtgcctgaaggaggagagcgccgccaaggccgagctggccctggagctgcacaagacccagggcaccctggagggcttcaaggtggagaccgccgacctgaaggaggtgctggccggcaaggaggacagcgagcacagactggtgctggagctggagagcctgagaagacagctgcagcaggccgcccaggagcaggccgccctgagagaggagtgcaccagactgtggagcagaggcgaggccaccgccaccgacgccgaggccagagaggccgccctgagaaaggaggtggaggacctgaccaaggagcagagcgagaccagaaagcaggccgagaaggacagaagcgccctgctgagccagatgaagatcctggagagcgagctggaggagcagctgagccagcacagaggctgcgccaagcaggccgaggccgtgaccgccctggagcagcaggtggccagcctggacaagcacctgagaaaccagagacagttcatggacgagcaggccgccgagagagagcacgagagagaggagttccagcaggagatccagagactggagggccagctgagacaggccgccaagccccagccctggggccccagagacagccagcaggcccccctggacggcgaggtggagctgctgcagcagaagctgagagagaagctggacgagttcaacgagctggccatccagaaggagagcgccgacagacaggtgctgatgcaggaggaggagatcaagagactggaggagatgaacatcaacatcagaaagaaggtggcccagctgcaggaggaggtggagaagcagaagaacatcgtgaagggcctggagcaggacaaggaggtgctgaagaagcagcagatgagcagcctgctgctggccagcaccctgcagagcaccctggacgccggcagatgccccgagccccccagcggcagcccccccgagggccccgagatccagctggaggtgacccagagagccctgctgagaagagagagcgaggtgctggacctgaaggagcagctggagaagatgaagggcgacctggagagcaagaacgaggagatcctgcacctgaacctgaagctggacatgcagaacagccagaccgccgtgagcctgagagagctggaggaggagaacaccagcctgaaggtgatctacaccagaagcagcgagatcgaggagctgaaggccaccatcgagaacctgcaggagaaccagaagagactgcagaaggagaaggccgaggagatcgagcagctgcacgaggtgatcgagaagctgcagcacgagctgagcctgatgggccccgtggtgcacgaggtgagcgacagccaggccggcagcctgcagagcgagctgctgtgcagccaggccggcggccccagaggccaggccctgcagggcgagctggaggccgccctggaggccaaggaggccctgagcagactgctggccgaccaggagagaagacacagccaggccctggaggccctgcagcagagactgcagggcgccgaggaggccgccgagctgcagctggccgagctggagagaaacgtggccctgagagaggccgaggtggaggacatggccagcagaatccaggagttcgaggccgccctgaaggccaaggaggccaccatcgccgagagaaacctggagatcgacgccctgaaccagagaaaggccgcccacagcgccgagctggaggccgtgctgctggccctggccagaatcagaagagccctggagcagcagcccctggccgccggcgccgccccccccgagctgcagtggctgagagcccagtgcgccagactgagcagacagctgcaggtgctgcaccagagattcctgagatgccaggtggagctggacagaagacaggccagaagagccaccgcccacaccagagtgcccggcgcccacccccagcccagaatggacggcggcgccaaggcccaggtgaccggcgacgtggaggccagccacgacgccgccctggagcccgtggtgcccgacccccagggcgacctgcagcccgtgctggtgaccctgaaggacgcccccctgtgcaagcaggagggcgtgatgagcgtgctgaccgtgtgccagagacagctgcagagcgagctgctgctggtgaagaacgagatgagactgagcctggaggacggcggcaagggcaaggagaaggtgctggaggactgccagctgcccaaggtggacctggtggcccaggtgaagcagctgcaggagaagctgaacagactgctgtacagcatgaccttccagaacgtggacgccgccgacaccaagagcctgtggcccatggccagcgcccacctgctggagagcagctggagcgacgacagctgcgacggcgaggagcccgacatcagcccccacatcgacacctgcgacgccaacaccgccaccggcggcgtgaccgacgtgatcaagaaccaggccatcgacgcctgcgacgccaacaccacccccggcggcgtgaccgacgtgatcaagaactgggacagcctgatccccgacgagatgcccgacagccccatccaggagaagagcgagtgccaggacatgagcctgagcagccccaccagcgtgctgggcggcagcagacaccagagccacaccgccgaggccggccccagaaagagccccgtgggcatgctggacctgagcagctggagcagccccgaggtgctgagaaaggactggaccctggagccctggcccagcctgcccgtgaccccccacagcggcgccctgagcctgtgcagcgccgacaccagcctgggcgacagagccgacaccagcctgccccagacccagggccccggcctgctgtgcagccccggcgtgagcgccgccgccctggccctgcagtgggccgagagcccccccgccgacgaccaccacgtgcagagaaccgccgtggagaaggacgtggaggacttcatcaccaccagcttcgacagccaggagaccctgagcagccccccccccggcctggagggcaaggccgacagaagcgagaagagcgacggcagcggcttcggcgccagactgagccccggcagcggcggccccgaggcccagaccgccggccccgtgacccccgccagcatcagcggcagattccagcccctgcccgaggccatgaaggagaaggaggtgagacccaagcacgtgaaggccctgctgcagatggtgagagacgagagccaccagatcctggccctgagcgagggcctggccccccccagcggcgagccccacccccccagaaaggaggacgagatccaggacatcagcctgcacggcggcaagacccaggaggtgcccaccgcctgccccgactggagaggcgacctgctgcaggtggtgcaggaggccttcgagaaggagcaggagatgcagggcgtggagctgcagcccagactgagcggcagcgacctgggcggccacagcagcctgctggagagactggagaagatcatcagagagcagggcgacctgcaggagaagagcctggagcacctgagactgcccgacagaagcagcctgctgagcgagatccaggccctgagagcccagctgagaatgacccacctgcagaaccaggagaagctgcagcacctgagaaccgccctgaccagcgccgaggccagaggcagccagcaggagcaccagctgagaagacaggtggagctgctggcctacaaggtggagcaggagaagtgcatcgccggcgacctgcagaagaccctgagcgaggagcaggagaaggccaacagcgtgcagaagctgctggccgccgagcagaccgtggtgagagacctgaagagcgacctgtgcgagagcagacagaagagcgagcagctgagcagaagcctgtgcgaggtgcagcaggaggtgctgcagctgagaagcatgctgagcagcaaggagaacgagctgaaggccgccctgcaggagctggagagcgagcagggcaagggcagagccctgcagagccagctggaggaggagcagctgagacacctgcagagagagagccagagcgccaaggccctggaggagctgagagccagcctggagacccagagagcccagagcagcagactgtgcgtggccctgaagcacgagcagaccgccaaggacaacctgcagaaggagctgagaatcgagcacagcagatgcgaggccctgctggcccaggagagaagccagctgagcgagctgcagaaggacctggccgccgagaagagcagaaccctggagctgagcgaggccctgagacacgagagactgctgaccgagcagctgagccagagaacccaggaggcctgcgtgcaccaggacacccaggcccaccacgccctgctgcagaagctgaaggaggagaagagcagagtggtggacctgcaggccatgctggagaaggtgcagcagcaggccctgcacagccagcagcagctggaggccgaggcccagaagcactgcgaggccctgagaagagagaaggaggtgagcgccaccctgaagagcaccgtggaggccctgcacacccagaagagagagctgagatgcagcctggagagagagagagagaagcccgcctggctgcaggccgagctggagcagagccaccccagactgaaggagcaggagggcagaaaggccgccagaagaagcgccgaggccagacagagccccgccgccgccgagcagtggagaaagtggcagagagacaaggagaagctgagagagctggagctgcagagacagagagacctgcacaagatcaagcagctgcagcagaccgtgagagacctggagagcaaggacgaggtgcccggcagcagactgcacctgggcagcgccagaagagccgccggcagcgacgccgaccacctgagagagcagcagagagagctggaggccatgagacagagactgctgagcgccgccagactgctgaccagcttcaccagccaggccgtggacagaaccgtgaacgactggaccagcagcaacgagaaggccgtgatgagcctgctgcacaccctggaggagctgaagagcgacctgagcagacccaccagcagccagaagaagatggccgccgagctgcagttccagttcgtggacgtgctgctgaaggacaacgtgagcctgaccaaggccctgagcaccgtgacccaggagaagctggagctgagcagagccgtgagcaagctggagaagctgctgaagcaccacctgcagaagggctgcagccccagcagaagcgagagaagcgcctggaagcccgacgagaccgccccccagagcagcctgagaagacccgaccccggcagactgccccccgccgccagcgaggaggcccacaccagcaacgtgaagatggagaagctgtacctgcactacctgagagccgagagcttcagaaaggccctgatctaccagaagaagtacctgctgctgctgatcggcggcttccaggacagcgagcaggagaccctgagcatgatcgcccacctgggcgtgttccccagcaaggccgagagaaagatcaccagcagacccttcaccagattcagaaccgccgtgagagtggtgatcgccatcctgagactgagattcctggtgaagaagtggcaggaggtggacagaaagggcgccctggcccagggcaaggcccccagacccggccccagagccagacagccccagagcccccccagaaccagagagagcccccccaccagagacgtgcccagcggccacaccagagaccccgccagaggcagaagactggccgccgccgccagcccccacagcggcggcagagccacccccagccccaacagcagactggagagaagcctgaccgccagccaggaccccgagcacagcctgaccgagtacatccaccacctggaggtgatccagcagagactgggcggcgtgctgcccgacagcaccagcaagaagagctgccaccccatgatcaagcagtag

SEQ ID NO: 161246 - protein, 500 aa, Artificial Sequence
  derived and/or modified sequence
MSNSVPLLCFWSLCYCFAAGSPVPFGPEGRLEDKLHKPKATQTEVKPSVRFNLRTSKDPEHEGCYLSVGHSQPLEDCSFNMTAKTFFIIHGWTMSGIFENWLHKLVSALHTREKDANVVVVDWLPLAHQLYTDAVNNTRVVGHSIARMLDWLQEKDDFSLGNVHLIGYSLGAHVAGYAGNFVKGTVGRITGLDPAGPMFEGADIHKRLSPDDADFVDVLHTYTRSFGLSIGIQMPVGHIDIYPNGGDFQPGCGLNDVLGSIAYGTITEVVKCEHERAVHLFVDSLVNQDKPSFAFQCTDSNRFKKGICLSCRKNRCNSIGYNAKKMRNKRNSKMYLKTRAGMPFRVYHYQMKIHVFSYKNMGEIEPTFYVTLYGTNADSQTLPLEIVERIEQNATNTFLVYTEEDLGDLLKIQLTWEGASQSWYNLWKEFRSYLSQPRNPGRELNIRRIRVKSGETQRKLTFCTEDPENTSISPGRELWFRKCRDGWRMKNETSPTVELP

SEQ ID NO: 161247 - DNA, 1503 bp, Artificial Sequence
  derived and/or modified sequence
atgagcaactcggtgccattgctttgcttttggtccctctgttattgttttgctgccggctcccccgtcccattcggacctgagggacggttggaggataagctccataaacctaaagctacccagacagaagtgaaacctagcgttcgttttaatttgcggacctccaaagacccggaacacgagggttgctacctctcagtggggcacagccagccactcgaagactgtagttttaatatgactgctaagacattcttcatcattcatggttggaccatgagcgggatcttcgaaaactggcttcataagctggttagcgcacttcatacgcgggaaaaggacgcgaacgtggtggtcgtcgactggttaccacttgcgcatcagctctacaccgacgctgtcaacaatacaagagtggtgggccatagcatcgctcggatgctggattggctccaggagaaggacgatttctcactcggtaacgtccacctgatcggttattcactgggcgctcatgtggccggttacgcagggaacttcgtaaaggggaccgttgggcgcattacgggacttgatccagccggaccaatgttcgagggggccgatatacataagaggttaagccctgatgatgcagacttcgttgacgtattgcacacctacacccggagtttcggattaagcataggaatccagatgcctgtggggcatatcgacatttacccgaacggtggagacttccagcccggttgtggacttaacgacgtcctcggcagcattgcctacggtaccatcaccgaggtcgtaaaatgtgaacacgagagagcagtgcatctgttcgtagatagtttggtgaatcaagataagcctagttttgcgttccagtgcaccgattcaaacaggttcaagaaagggatatgtctgagttgtaggaaaaatcgctgcaactccattggctacaatgctaagaagatgcgcaacaagaggaacagcaagatgtatctgaagactagagctggtatgccatttcgtgtgtaccactatcagatgaaaatccacgtgttcagctacaaaaacatgggtgagattgagcccacattctatgtgacactgtacgggacgaacgccgatagtcagacactgccactggagattgtcgagcgcattgagcagaacgctacaaatacctttctcgtgtacactgaggaagacctcggggatctcctgaaaattcagctgacatgggaaggcgcgtcccagtcatggtataacctgtggaaggagtttcgatcctacctctcgcagccacgaaaccccggtcgtgagcttaatatacgccgcattcgcgttaaatctggggagacccagcgaaaactcaccttttgcaccgaagaccccgagaacacctccatctctcccggaagggaattgtggttccgcaagtgcagggatggatggcgaatgaagaacgaaacctcacctacagtggagctgccttag

SEQ ID NO: 161248 - DNA, 1503 bp, Artificial Sequence
  derived and/or modified sequence
atgagcaacagcgtgcccctgctgtgcttctggagcctgtgctactgctttgctgctggcagccctgtgccctttggacctgagggccgcctggaggacaagctgcacaagcccaaggccacccagacagaggtgaagcccagcgtgcgcttcaacctgcggaccagcaaggaccctgagcacgagggctgctacctgtctgtgggccacagccagcccctggaggactgcagcttcaacatgacagccaagaccttcttcatcatccacggctggaccatgagcggcatctttgagaactggctgcacaagctggtgtctgccctgcacacccgggagaaggatgccaacgtggtggtggtggactggctgcccctggcccaccagctgtacacagatgctgtgaacaacaccagggtggtgggccacagcatcgccaggatgctggactggctgcaggagaaggatgacttcagcctgggcaatgtgcacctgattggctacagcctgggcgcccacgtggccggctacgccggcaactttgtgaagggcaccgtgggccgcatcaccggcctggaccctgctggccccatgtttgaaggagctgacatccacaagaggctgagcccagatgatgctgactttgtggatgtgctgcacacctacaccaggagctttggcctgagcatcggcatccagatgcctgtgggccacatcgacatctaccccaacggcggggacttccagcccggctgcggcctgaatgatgtgctgggcagcatcgcctacggcaccatcacagaggtggtgaagtgtgagcacgagagagctgtgcacctgtttgtggacagcctggtgaaccaggacaagcccagctttgccttccagtgcacagacagcaaccgcttcaagaagggcatctgcctgagctgcaggaagaaccgctgcaacagcatcggctacaatgccaagaagatgaggaacaagaggaacagcaagatgtacctgaagacccgggccggcatgcccttccgggtgtaccactaccagatgaagatccacgtgttctcctacaagaacatgggagaaattgagcccaccttctacgtgaccctgtatggcaccaatgctgacagccagaccctgcccctggagatcgtggagcgcatcgagcagaatgccaccaacaccttcctggtgtacacagaggaggacctgggggacctgctgaagatccagctgacctgggagggcgccagccagagctggtacaacctgtggaaggagttccgcagctacctgagccagcccaggaaccctggccgggagctgaacatccgccgcatccgggtgaagtctggagagacccagaggaagctgaccttctgcacagaagatcctgagaacaccagcatcagccctggccgggagctgtggttcaggaagtgcagagatggctggaggatgaagaatgagaccagccccaccgtggagctgccctag

SEQ ID NO: 161249 - DNA, 4141 bp, Artificial Sequence
  derived and/or modified sequence
agcagcgagtccttgcctcccggcggctcaggacgagggcagatctcgttctggggcaagccgttgacactcgctccctgccaccgcccgggctccgtgccgccaagttttcattttccaccttctctgcctccagtcccccagcccctggccgagagaagggtcttaccggccgggattgctggaaacaccaagaggtggtttttgttttttaaaacttctgtttcttgggagggggtgtggcggggcaggatgagcaactccgttcctctgctctgtttctggagcctctgctattgctttgctgcggggagccccgtaccttttggtccagagggacggctggaagataagctccacaaacccaaagctacacagactgaggtcaaaccatctgtgaggtttaacctccgcacctccaaggacccagagcatgaaggatgctacctctccgtcggccacagccagcccttagaagactgcagtttcaacatgacagctaaaacctttttcatcattcacggatggacgatgagcggtatctttgaaaactggctgcacaaactcgtgtcagccctgcacacaagagagaaagacgccaatgtagttgtggttgactggctccccctggcccaccagctttacacggatgcggtcaataataccagggtggtgggacacagcattgccaggatgctcgactggctgcaggagaaggacgatttttctctcgggaatgtccacttgatcggctacagcctcggagcgcacgtggccgggtatgcaggcaacttcgtgaaaggaacggtgggccgaatcacaggtttggatcctgccgggcccatgtttgaaggggccgacatccacaagaggctctctccggacgatgcagattttgtggatgtcctccacacctacacgcgttccttcggcttgagcattggtattcagatgcctgtgggccacattgacatctaccccaatgggggtgacttccagccaggctgtggactcaacgatgtcttgggatcaattgcatatggaacaatcacagaggtggtaaaatgtgagcatgagcgagccgtccacctctttgttgactctctggtgaatcaggacaagccgagttttgccttccagtgcactgactccaatcgcttcaaaaaggggatctgtctgagctgccgcaagaaccgttgtaatagcattggctacaatgccaagaaaatgaggaacaagaggaacagcaaaatgtacctaaaaacccgggcaggcatgcctttcagagtttaccattatcagatgaaaatccatgtcttcagttacaagaacatgggagaaattgagcccaccttttacgtcaccctttatggcactaatgcagattcccagactctgccactggaaatagtggagcggatcgagcagaatgccaccaacaccttcctggtctacaccgaggaggacttgggagacctcttgaagatccagctcacctgggagggggcctctcagtcttggtacaacctgtggaaggagtttcgcagctacctgtctcaaccccgcaaccccggacgggagctgaatatcaggcgcatccgggtgaagtctggggaaacccagcggaaactgacattttgtacagaagaccctgagaacaccagcatatccccaggccgggagctctggtttcgcaagtgtcgggatggctggaggatgaaaaacgaaaccagtcccactgtggagcttccctgagggtgcccgggcaagtcttgccagcaaggcagcaagacttcctgctatccaagcccatggaggaaagttactgctgaggacccacccaatggaaggattcttctcagccttgaccctggagcactgggaacaactggtctcctgtgatggctgggactcctcgcgggaggggactgcgctgctatagctcttgctgcctctcttgaatagctctaactccaaacctctgtccacacctccagagcaccaagtccagatttgtgtgtaagcagctgggtgcctggggcctctcgtgcacactggattggtttctcagttgctgggcgagcctgtactctgcctgacgaggaacgctggctccgaagaggccctgtgtagaaggctgtcagctgctcagcctgctttgagcctcagtgagaagtccttccgacaggagctgactcatgtcaggatggcaggcctggtatcttgctcgggccctagctgttggggttctcatgggttgcactgaccatactgcttacgtcttagccattccgtcctgctccccagctcactctctgaagcacacatcattggctttcctatttttctgttcattttttaattgagcaaatgtctattgaacacttaaaattaattagaatgtggtaatggacatattactgagcctctccatttggaacccagtggagttgggatttctagaccctctttctgtttggatggtgtatgtgtatatgcatggggaaaggcacctggggcctgggggaggctataggatataagcattagggaccctgaggctttaagtggtttctatttcttcttagttattatgtgccaccttcttagttattatgtgccacctcccctatgagtgacgtgtttgatcactagcagaatagcaagcagagtatcattcatgctggggccagaatgatggccggttgccagatataactgctttggagcaaatctcttctgtttagagagatagaagttatgacatatgtaatacacatctgtgtacacagaaaccggcacctgccagacagagctggttctaagatttaatacagtgctttttttcctctttgaaatattttactttaataccagtgccttttcttgttgaacttcttggaaaagccaccaattctagatcttgatttgaattaatacacacaatatctgagacacttacacttttcaaaagatttgtgtatgcattgcctaattagagtagggggagaagggcaactattattatccctattttacaaaactgaggcttagtgaggttcagccacatgcctagacttatatactagttagtggtgcagccagggagaggactcagatttcctggaggcaaagtctatctctgaaactccatgaagacttttgcagccagttcccaccaatatgccccagacgtgagacaaacaaggacttttttttttatatagagccatccataaaatcctaagcccttttattaatgtataaccaggagaacatctgtgccaacggttggactttttatggctgagattcgggaggaagtgtgacaccaagcaggagaggaagaatgattttctttgtacttaggttttctaaggacattgttttaatctgtatcgtgccaaagttgtatcactgttaaacttctgaagacataaccagttgagtcttatttcaagatatgttctcaagccaattgtgtgcttctcttgtttctgtgattgctttctagccaaagcgaagcttgtacaggttgagtatcccttatccaaaatgcttggaaccagaagtgtttcaaattttagattattttcagattttggaatgtttgcatatacataatgagatattttgggaataggacccgagcctaaacacaaaattcattgatgtgtcagttacaccttatccacatagcctgagggtaattttatacgatattttaaatagttgtgtacatgaagcatggtttgtggtaacttatgtgaggggttttcccattttttgtcttgttggtgctcaaaaagttttggattttggagcatttcggattttggatttttggattagggttgctcaacccatattattggctgtacatcctggtcacttctgacttctgtttttactaatggaagctttgcaaattgaattctcagtgagttgtatatttatacacctggcttgaagccttaattgtatataatgatgctttttaaaaaatgctatttggaagactatttatttctcgtgtatataatgtatataaaaaaatatggttagtgtttacctaaggttaaccaatttcaagattaaaatttttaaatagtaaaataataaaaaattataaagttcttaa

SEQ ID NO: 161250 - DNA, 1503 bp, Artificial Sequence
  derived and/or modified sequence
atgagcaacagcgtgcccctgctgtgcttctggagcctgtgctactgcttcgctgccggctcgccggtaccttttggcccagaaggccggctcgaagacaaactccacaagcccaaagcgacccaaacggaagtgaagcccagcgtccggttcaacctccgcactagcaaagaccctgaacacgagggctgctacttgtctgtgggccactcccagcccttggaagattgttctttcaacatgactgcaaaaacatttttcatcatccacgggtggactatgtctggaatcttcgagaactggctgcacaaactggtgtcagcattgcacactagggaaaaggacgcaaacgtggttgtggtggactggctgccactggcacatcagttatatacagatgcggtgaacaacacacgtgtcgtaggccacagcatagcccgcatgttggattggttgcaggagaaggacgactttagtctcggaaatgtgcaccttatcggttactctctgggagcacacgtcgccggatatgctggaaactttgtcaagggtaccgtgggcaggataacagggcttgaccctgccggacccatgtttgaaggcgctgacatccacaaacgcctgagtcccgacgacgcagacttcgtcgatgtgctccatacctataccagatcattcggcctttccattggaattcaaatgcccgttgggcatattgacatataccctaacggaggagatttccaaccaggatgtggtcttaacgacgtgctcggatccattgcctacggaactatcaccgaggtggtgaaatgcgaacacgagcgagccgtacatctgttcgtggattcccttgtgaaccaggacaagcccagcttcgcgttccagtgcacagattctaatcgatttaaaaaaggaatatgcctgtcgtgtcgcaaaaaccgctgcaattctatcgggtacaatgcaaaaaagatgcgcaacaagcgcaactctaaaatgtatcttaagacccgcgcagggatgccctttagggtgtaccactaccagatgaaaattcacgtcttttcctacaagaacatgggagaaattgaacccactttttatgttacgctgtatgggactaacgctgatagccagacgctaccgctggagatcgtagaacggatcgagcaaaacgctaccaatacgttcctagtttacacagaagaagatttgggggatctgcttaagatccagctaacctgggaaggggcctcacaaagctggtataacctctggaaagaatttaggagctatctgtcccagccacggaaccccggccgcgagcttaacatcaggcggatcagagtgaagagcggagaaacgcagcgcaagctcactttttgtaccgaggatcccgagaacaccagtatttctcccggacgcgagctgtggttccgaaagtgtcgcgatggatggcgcatgaaaaacgagacgtctccaaccgtggaactcccctag

SEQ ID NO: 161251 - DNA, 1503 bp, Artificial Sequence
  derived and/or modified sequence
atgtccaacagtgtgcctcttctctgtttctggagcctgtgctattgtttcgccgcaggcagtccggttccttttgggccagagggtcggctggaggataagctgcacaagccaaaggccacacagaccgaagtcaaaccttcagtccgattcaacctgagaacatctaaagatccagagcatgagggttgctatctctccgtaggccattctcagcctttggaagactgtagttttaacatgaccgccaagaccttttttattatccacggctggacaatgagtggaatttttgaaaactggcttcacaaactggtctccgccttacacactagggagaaggatgccaacgtggtagtggtcgactggctccctctcgcccaccagctctataccgacgccgttaacaacacacgagtggtaggccacagtattgccaggatgttggattggctgcaggagaaggacgatttctccctggggaacgtccatctcatcggctactcactaggagcccacgtggcagggtatgccggaaacttcgtgaagggtacagtggggagaatcaccggtctcgacccagccggaccaatgtttgagggggcagacatccacaaacggctgagccctgacgacgccgacttcgtggacgtcctacacacttatacccgatctttcggcctgtctattggaatccagatgcctgtgggacacattgacatttacccgaatgggggagattttcagcctgggtgtgggctcaatgacgtattgggatctattgcttatggcactataacagaggtcgtcaagtgtgagcacgaacgcgctgtacatttgtttgtcgatagtctcgtcaatcaagataagccatctttcgcttttcagtgcactgattcaaaccgctttaagaaaggcatctgcctcagctgccgtaaaaataggtgtaactctataggatacaatgccaagaagatgagaaacaaacgcaacagtaagatgtatctgaaaactagggcgggaatgcctttcagagtttatcactaccagatgaaaattcacgttttttcctataagaacatgggggagatcgaacccacattttacgtgaccctttatggtactaatgcggactcacagacccttcctttagaaattgtagagaggatcgaacagaatgctacaaatactttcctcgtgtacacagaggaagacctgggcgatcttctgaagatccagctgacttgggagggcgcttcccaatcatggtacaacctgtggaaggaattccgaagttatctctcacagccccgaaatccagggcgtgagctcaatattagaagaatccgcgtcaaatccggcgaaacccagaggaagctgactttttgtacggaagacccggaaaatacttccatttccccaggacgagagctctggtttcggaagtgtagggatgggtggcgcatgaaaaatgaaacaagccctaccgtggagctcccctag

SEQ ID NO: 161252 - DNA, 1503 bp, Artificial Sequence
  derived and/or modified sequence
atgagcaacagcgtgcccctgctgtgcttctggagcctgtgctactgcttcgccgccggcagccccgtgcccttcggccccgagggcagactggaggacaagctgcacaagcccaaggccacccagaccgaggtgaagcccagcgtgagattcaacctgagaaccagcaaggaccccgagcacgagggctgctacctgagcgtgggccacagccagcccctggaggactgcagcttcaacatgaccgccaagaccttcttcatcatccacggctggaccatgagcggcatcttcgagaactggctgcacaagctggtgagcgccctgcacaccagagagaaggacgccaacgtggtggtggtggactggctgcccctggcccaccagctgtacaccgacgccgtgaacaacaccagagtggtgggccacagcatcgccagaatgctggactggctgcaggagaaggacgacttcagcctgggcaacgtgcacctgatcggctacagcctgggcgcccacgtggccggctacgccggcaacttcgtgaagggcaccgtgggcagaatcaccggcctggaccccgccggccccatgttcgagggcgccgacatccacaagagactgagccccgacgacgccgacttcgtggacgtgctgcacacctacaccagaagcttcggcctgagcatcggcatccagatgcccgtgggccacatcgacatctaccccaacggcggcgacttccagcccggctgcggcctgaacgacgtgctgggcagcatcgcctacggcaccatcaccgaggtggtgaagtgcgagcacgagagagccgtgcacctgttcgtggacagcctggtgaaccaggacaagcccagcttcgccttccagtgcaccgacagcaacagattcaagaagggcatctgcctgagctgcagaaagaacagatgcaacagcatcggctacaacgccaagaagatgagaaacaagagaaacagcaagatgtacctgaagaccagagccggcatgcccttcagagtgtaccactaccagatgaagatccacgtgttcagctacaagaacatgggcgagatcgagcccaccttctacgtgaccctgtacggcaccaacgccgacagccagaccctgcccctggagatcgtggagagaatcgagcagaacgccaccaacaccttcctggtgtacaccgaggaggacctgggcgacctgctgaagatccagctgacctgggagggcgccagccagagctggtacaacctgtggaaggagttcagaagctacctgagccagcccagaaaccccggcagagagctgaacatcagaagaatcagagtgaagagcggcgagacccagagaaagctgaccttctgcaccgaggaccccgagaacaccagcatcagccccggcagagagctgtggttcagaaagtgcagagacggctggagaatgaagaacgagaccagccccaccgtggagctgccctag

SEQ ID NO: 161253 - protein, 1711 aa, Artificial Sequence
  derived and/or modified sequence
MSAKVRLKKLEQLLLDGPWRNESALSVETLLDVLVCLYTECSHSALRRDKYVAEFLEWAKPFTQLVKEMQLHREDFEIIKVIGRGAFGEVAVVKMKNTERIYAMKILNKWEMLKRAETACFREERDVLVNGDCQWITALHYAFQDENHLYLVMDYYVGGDLLTLLSKFEDKLPEDMARFYIGEMVLAIDSIHQLHYVHRDIKPDNVLLDVNGHIRLADFGSCLKMNDDGTVQSSVAVGTPDYISPEILQAMEDGMGKYGPECDWWSLGVCMYEMLYGETPFYAESLVETYGKIMNHEERFQFPSHVTDVSEEAKDLIQRLICSRERRLGQNGIEDFKKHAFFEGLNWENIRNLEAPYIPDVSSPSDTSNFDVDDDVLRNTEILPPGSHTGFSGLHLPFIGFTFTTESCFSDRGSLKSIMQSNTLTKDEDVQRDLEHSLQMEAYERRIRRLEQEKLELSRKLQESTQTVQSLHGSSRALSNSNRDKEIKKLNEEIERLKNKIADSNRLERQLEDTVALRQEREDSTQRLRGLEKQHRVVRQEKEELHKQLVEASERLKSQAKELKDAHQQRKLALQEFSELNERMAELRAQKQKVSRQLRDKEEEMEVATQKVDAMRQEMRRAEKLRKELEAQLDDAVAEASKERKLREHSENFCKQMESELEALKVKQGGRGAGATLEHQQEISKIKSELEKKVLFYEEELVRREASHVLEVKNVKKEVHDSESHQLALQKEILMLKDKLEKSKRERHNEMEEAVGTIKDKYERERAMLFDENKKLTAENEKLCSFVDKLTAQNRQLEDELQDLAAKKESVAHWEAQIAEIIQWVSDEKDARGYLQALASKMTEELEALRSSSLGSRTLDPLWKVRRSQKLDMSARLELQSALEAEIRAKQLVQEELRKVKDANLTLESKLKDSEAKNRELLEEMEILKKKMEEKFRADTGLKLPDFQDSIFEYFNTAPLAHDLTFRTSSASEQETQAPKPEASPSMSVAASEQQEDMARPPQRPSAVPLPTTQALALAGPKPKAHQFSIKSFSSPTQCSHCTSLMVGLIRQGYACEVCSFACHVSCKDGAPQVCPIPPEQSKRPLGVDVQRGIGTAYKGHVKVPKPTGVKKGWQRAYAVVCDCKLFLYDLPEGKSTQPGVIASQVLDLRDDEFSVSSVLASDVIHATRRDIPCIFRVTASLLGAPSKTSSLLILTENENEKRKWVGILEGLQSILHKNRLRNQVVHVPLEAYDSSLPLIKAILTAAIVDADRIAVGLEEGLYVIEVTRDVIVRAADCKKVHQIELAPREKIVILLCGRNHHVHLYPWSSLDGAEGSFDIKLPETKGCQLMATATLKRNSGTCLFVAVKRLILCYEIQRTKPFHRKFNEIVAPGSVQCLAVLRDRLCVGYPSGFCLLSIQGDGQPLNLVNPNDPSLAFLSQQSFDALCAVELESEEYLLCFSHMGLYVDPQGRRARAQELMWPAAPVACSCSPTHVTVYSEYGVDVFDVRTMEWVQTIGLRRIRPLNSEGTLNLLNCEPPRLIYFKSKFSGAVLNVPDTSDNSKKQMLRTRSKRRFVFKVPEEERLQQRREMLRDPELRSKMISNPTNFNHVAHMGPGDGMQVLMDLPLSAVPPSQEERPGPAPTNLARQPPSRNKPYISWPSSGGSEPSVTVPLRSMSDPDQDFDKEPDSDSTKHSTPSNSSNPSGPPSPNSPHRSQLPLEGLEQPACDT

SEQ ID NO: 161254 - DNA, 5136 bp, Artificial Sequence
  derived and/or modified sequence
atgtctgccaaagttcgacttaaaaaattggaacagctgctcctggatggcccctggagaaatgagagcgctctgtccgtggagacacttctggatgtgctggtctgcttgtacacagaatgcagtcatagtgcactccgcagggacaaatacgttgcggagttcctggaatgggcaaaacccttcacacagctggtcaaagaaatgcaactgcatagagaggacttcgagattattaaggtgatcggccgcggcgcctttggcgaggtagccgtggttaaaatgaagaataccgagagaatttacgccatgaaaatacttaataaatgggagatgcttaagagagctgaaactgcatgtttccgtgaggagcgcgatgtgctggtgaacggagactgccagtggattaccgctctccattacgcctttcaggacgaaaaccacctgtacctggttatggactattatgtggggggtgacctgttgacactgctttcaaagttcgaggacaagcttccagaggacatggctcggttctatataggtgaaatggttcttgctatagatagcatacaccaactacattatgtgcatcgagacattaagccagacaacgtcctcttagatgtcaatggacatatccgtctggcagactttggcagctgtcttaaaatgaatgacgatggaaccgtccaatcatcggttgctgtgggaacgcctgactatatttctcctgaaatccttcaagcaatggaagacgggatgggtaagtatggacctgaatgtgactggtggagcttgggcgtttgcatgtacgaaatgctttacggcgagacccccttttacgccgaatctcttgtggagacatacggaaagatcatgaaccatgaggagagattccagttcccatcccacgtgaccgatgtatcagaagaagccaaggatctcatccaaagactgatctgttctagggagagacggcttggacaaaacggcattgaagacttcaagaagcacgcctttttcgaaggtctgaactgggagaatatccgcaatctagaagccccatatatccccgatgtgagtagcccctccgataccagcaatttcgacgtggatgatgatgtgctgcgcaacaccgagatcctcccgcctggcagccatactgggttctctggtctgcacctcccatttatcggcttcacttttaccactgagtcctgcttctccgaccgcggcagcctgaaaagtattatgcagagcaatactctgaccaaggacgaggatgtgcagcgcgacctcgagcattccctgcagatggaggcatatgaaagacggattcgccggctcgagcaggaaaaactggagcttagtcggaaattacaagaatcgacacagacggtgcaaagcctccacggctccagcagggccctgtcaaactccaaccgcgacaaagagataaagaaactgaacgaggagatagaacgacttaagaacaagattgctgatagtaacaggctggaacggcagttagaagacaccgtcgccctgcggcaggaacgtgaagacagtactcagaggctgaggggccttgaaaagcaacaccgagttgttcggcaagagaaagaagaactccataagcagctcgtggaggccagcgagaggctgaagagccaggcaaaagagctgaaggatgcccatcagcagcggaagcttgcactccaagagttctcagagttaaacgaaaggatggcggagcttcgagcccagaaacaaaaggtgtctcgccaactacgggataaggaggaagaaatggaagtcgctacccagaaggtagacgcaatgaggcaggaaatgcgccgagccgagaaattgaggaaggaactggaagcccagttggatgacgcggtagccgaagcttccaaggaacgcaaactccgcgaacactccgagaatttctgcaagcagatggagagcgagctcgaagcactgaaggtaaagcaggggggaagaggtgctggcgcaactcttgaacaccagcaggagatctcaaagataaaatccgagctcgaaaagaaggtcctattttatgaggaagaactggtgaggagagaggcctcgcatgtgttagaggtgaaaaatgtgaaaaaggaagttcatgactctgaaagccaccagctggccctgcagaaggagattcttatgctgaaagacaagctggaaaagtctaagcgcgagcgacataatgaaatggaagaggccgtaggcaccataaaagacaaatatgagcgagagagggcaatgctgtttgatgagaacaaaaaactgacagccgagaatgagaaactgtgttcttttgtggataaactcactgcacagaacagacagttagaagacgaactgcaggatctagccgcaaaaaaggaatccgtcgctcactgggaggcacaaatcgctgagattatccagtgggtttcagatgaaaaagatgcccgagggtatctgcaggctcttgcttccaaaatgactgaggagctcgaagccttacgtagttctagcctggggtcccgcacgctggaccccctttggaaggtgcgacggtcgcagaaactggatatgtcagctaggctcgagttacagtccgctctggaggccgaaatcagggccaagcagttggtccaggaagagctgcgtaaggtgaaagacgcaaacctcacccttgaatctaagctgaaggatagcgaggctaagaaccgcgagctgttggaagaaatggaaatccttaaaaaaaagatggaagagaagtttagggccgacactggcttgaagctgcccgacttccaggattccatatttgagtatttcaacaccgcgccactggcccacgatctcaccttccggacctcaagtgcttcggagcaagagactcaggcccccaagcctgaagccagcccatcaatgtccgtggccgctagcgagcaacaagaggacatggcccgaccacctcagagaccatctgccgttcccctacctacaactcaggctttagcccttgccgggcccaagccgaaggcccatcagttctccatcaagtcattcagctcccccactcagtgctcgcactgtacaagcctcatggtgggattgatcaggcagggatacgcatgcgaagtttgcagcttcgcatgtcatgtgtcctgcaaggacggcgcaccgcaggtgtgccccatccctccagagcagtccaaacgcccattgggcgtggatgtccagcggggcatcggtaccgcttataaaggccacgtcaaggtccccaaaccaacaggagtgaaaaaagggtggcagcgagcctacgctgtcgtgtgtgactgtaaactttttctctatgacttgcccgagggcaagtctacccagccaggtgtcatcgcaagccaggtgctggatctgcgggatgatgagttcagtgttagtagtgttttagccagcgatgttatccacgcaactcggagagatattccctgcattttccgcgttaccgcttctctgctgggggcacctagcaagactagttccctactcatcttgacagaaaatgagaacgaaaaacgcaaatgggtagggatccttgaaggcctccagtcaattttgcacaaaaatcgcctgaggaatcaggttgtccacgttccactggaggcatacgacagtagcctccctctcatcaaagccatcctaaccgccgctatcgtagacgccgataggattgccgtcgggttggaagaaggactgtatgtcatcgaagttacgagggacgtgatcgttagagccgctgactgtaaaaaagtgcatcaaatcgagctcgcgcctcgggagaagatagtgatccttctctgtggccgtaaccaccacgtgcacctctatccctggtcttcactcgacggggctgagggatcctttgatataaagttgccggagactaagggttgccagttgatggccacggcgacactgaagagaaattctgggacctgtctgttcgtagcagtcaaaagactgatcctgtgctacgaaatccaacgcacaaagcccttccacaggaaattcaatgaaatcgtcgctccaggcagcgttcagtgtctagcggtgttgcgtgatagactatgcgtgggatacccaagcggcttttgcctgctgtcgatacagggcgacgggcaacctctcaacttggtgaatccaaacgatcccagcctagctttcctctctcagcagtccttcgatgctttgtgtgctgtggagttagagagcgaggaatacctgctgtgtttttcgcacatgggcctttatgtggatccacagggccgcagagcccgagcccaagagctgatgtggcccgccgcacccgtggcctgctcctgtagccccacacatgttaccgtatactccgagtatggtgtcgatgtattcgacgtgcggaccatggaatgggtgcagactattggcctgcgcaggatccgccctcttaattccgagggaaccttgaacttactaaactgcgagccccctcgcctgatatacttcaagtccaagttctccggcgccgtgctcaatgtacccgatacaagcgataattccaagaagcagatgttaaggacacgaagtaagcgccggtttgtgttcaaggtccctgaagaagaaaggctgcaacagcgcagggagatgctgagggacccggagttaagaagtaagatgatctccaaccctactaactttaatcacgtggcccacatgggtccaggcgatggcatgcaggtgttgatggacctgccccttagtgctgttcctccctcacaggaagagcggcccggccctgccccgactaacctggccaggcagccgccgtcaagaaacaagccatacatcagttggccatcaagcggcggttctgagccctctgtaaccgtgcctttaagatccatgtccgatcccgatcaggatttcgataaagaaccagattcagactctacgaagcactctacaccttccaattcgagcaatccctccgggccccccagccctaactcacctcaccgctcacagctgcccctcgaagggctggaacaaccagcctgtgatacctag

SEQ ID NO: 161255 - DNA, 5136 bp, Artificial Sequence
  derived and/or modified sequence
atgtctgccaaggtgcggctgaagaagctggagcagctgctgctggatggcccctggagaaatgaaagtgccctgtctgtggagaccctgctggatgtgctggtgtgcctgtacacagagtgcagccacagcgccctgcggcgggacaagtatgtggccgagttcctggagtgggccaagcccttcacccagctggtgaaggagatgcagctgcaccgggaggactttgagatcatcaaggtgattggccgcggggcctttggagaggtggccgtggtgaagatgaagaacacagagcgcatctatgccatgaagatcctgaacaagtgggagatgctgaagagagctgagacagcctgcttccgggaggagagagatgtgctggtgaatggagactgccagtggatcacagccctgcactacgccttccaggatgagaaccacctgtacctggtgatggactactacgtgggcggggacctgctgaccctgctgagcaagtttgaggacaagctgcctgaggacatggcccgcttctacatcggggagatggtgctggccatcgacagcatccaccagctgcactacgtgcaccgggacatcaagccagacaacgtgctgctggatgtgaatggccacatccggctggccgactttggcagctgcctgaagatgaatgatgatggcaccgtgcagagctctgtggccgtgggcaccccagactacatcagccctgagatcctgcaggccatggaggatggcatgggcaagtatggcccagaatgtgactggtggagcctgggcgtgtgcatgtatgagatgctgtatggagagacccccttctatgcagagagcctggtggagacctacggcaagatcatgaaccacgaggagcgcttccagttccccagccacgtgacagatgtgtctgaggaggccaaggacctgatccagaggctcatctgcagccgggagcggcggctgggccagaatggaattgaggacttcaagaagcacgccttctttgagggcctgaactgggagaacatccggaacctggaggccccctacatcccagatgtgagcagccccagcgacaccagcaactttgatgtggatgatgatgtgctgaggaacacagagatcctgcccccaggcagccacacaggcttcagcggcctgcacctgcccttcatcggcttcaccttcaccacagagagctgcttcagtgaccggggcagcctgaagagcatcatgcagagcaacaccctgaccaaggatgaagatgtgcagagggacctggagcacagcctgcagatggaggcctatgaaagacgcatccggcggctggagcaggagaagctggagctgagcaggaagctgcaggagagcacccagacagtgcagagcctgcacggcagcagccgggccctgagcaacagcaacagagacaaggagatcaagaagctgaatgaggagattgaaaggctgaagaacaagattgctgacagcaaccggctggagcggcagctggaggacacagtggccctgcggcaggagcgggaggacagcacccagaggctgcggggcctggagaagcagcaccgggtggtgcggcaggagaaggaggagctgcacaagcagctggtggaggccagcgagcggctgaagagccaggccaaggagctgaaggatgcccaccagcagaggaagctggccctgcaggagttcagcgagctgaatgaaagaatggccgagctgcgggcccagaagcagaaggtgtcccggcagctgcgggacaaggaggaggagatggaggtggccacccagaaggtggatgccatgaggcaggagatgagaagagctgagaagctgaggaaggagctggaggcccagctggatgatgctgtggccgaggccagcaaggagaggaagctgcgggagcacagcgagaacttctgcaagcagatggagagcgagctggaggccctgaaggtgaagcagggcggcagaggagctggggccaccctggagcaccagcaggagatcagcaagatcaagtctgagctggagaagaaggtgctcttctatgaggaggagctggtgagaagagaggccagccacgtgctggaggtgaagaatgtgaagaaggaggtgcatgacagcgagagccaccagctggccctgcagaaggagatcctgatgctgaaggacaagctggagaagagcaagcgggagcggcacaatgagatggaggaggccgtgggcaccatcaaggacaagtatgaaagagagcgggccatgctgtttgatgagaacaagaagctgacagcagaaaatgagaagctgtgcagctttgtggacaagctgacagcccagaaccggcagctggaggatgagctgcaggacctggccgccaagaaggagagcgtggcccactgggaggcccagattgctgagatcatccagtgggtgtctgatgagaaggatgcccggggctacctgcaggccctggccagcaagatgacagaggagctggaggccctgcggagcagcagcctgggcagcaggaccctggaccccctgtggaaggtgcggcgcagccagaagctggacatgtctgcccggctggagctgcagagcgccctggaggccgagatccgggccaagcagctggtgcaggaggagctgaggaaggtgaaggatgccaacctgaccctggagagcaagctgaaggacagcgaggccaagaaccgggagctgctggaggagatggagatcctgaagaagaagatggaggagaagttccgggctgacaccggcctgaagctgcctgacttccaggacagcatctttgagtacttcaacacagcccccctggcccatgacctgaccttccgcaccagcagcgccagcgagcaggagacccaggcccccaagccagaggccagccccagcatgtctgtggccgccagcgagcagcaggaggacatggcccggcccccccagaggcccagcgctgtgcccctgcccaccacccaggccctggccctggccggccccaagcccaaggcccaccagttcagcatcaagagcttcagcagccccacccagtgcagccactgcaccagcctgatggtgggcctcatccggcagggctacgcctgtgaggtgtgcagctttgcctgccacgtgtcctgcaaggatggagccccccaggtgtgccccatccccccagagcagagcaagaggcccctgggcgtggatgtgcagaggggcatcggcacagcctacaagggccacgtgaaggtgcccaagcccaccggggtgaagaagggctggcagagggcctatgctgtggtgtgtgactgcaagctgttcctgtatgacctgcctgagggcaagagcacccagcccggggtcatcgccagccaggtgctggacctgagagatgatgagttctctgtgtcctctgtgctggccagtgatgtgatccacgccacccggcgggacatcccctgcatcttccgggtgacagccagcctgctgggcgcccccagcaagaccagcagcctgctgatcctgacagaaaatgaaaatgagaagaggaagtgggtgggcatcctggagggcctgcagagcatcctgcacaagaaccggctgaggaaccaggtggtgcacgtgcccctggaggcctatgacagcagcctgcccctcatcaaggccatcctgacagctgccatcgtggatgctgacagaattgctgtgggcctggaggagggcctgtatgtgattgaggtgaccagagatgtgattgtgcgggctgctgactgcaagaaggtgcaccagatcgagctggccccccgggagaagatcgtcatcctgctgtgtggcaggaaccaccacgtgcacctgtacccctggagcagcctggatggagctgagggcagctttgacatcaagctgcctgagaccaagggctgccagctgatggccacagccaccctgaagaggaacagcggcacctgcctgtttgtggccgtgaagaggctcatcctgtgctatgagatccagaggaccaagcccttccacaggaagttcaatgagatcgtggcccctggctctgtgcagtgcctggccgtgctgcgggaccggctgtgtgtgggctaccccagcggcttctgcctgctgagcatccagggagatggccagcccctgaacctggtgaaccccaatgaccccagcctggccttcctgagccagcagagctttgatgccctgtgtgctgtggagctggagagcgaggagtacctgctgtgcttcagccacatgggcctgtatgtggacccccagggcagaagagcccgggcccaggagctgatgtggccagctgcccctgtggcctgcagctgcagccccacccacgtgacagtgtacagtgaatatggagtggatgtgtttgatgtgaggaccatggagtgggtgcagaccatcggcctgcggcgcatccggcccctgaacagcgagggcaccctgaacctgctgaactgtgagccccccaggctcatctacttcaagagcaagttcagcggggctgtgctgaatgtgcctgacaccagtgacaacagcaagaagcagatgctgcggaccaggagcaagagaagatttgtgttcaaggtgcctgaggaggagcggctgcagcagaggcgggagatgctgcgggaccctgagctgcggagcaagatgatcagcaaccccaccaacttcaaccacgtggcccacatgggccctggagatggcatgcaggtgctgatggacctgcccctgtctgctgtgccccccagccaggaggagcggcccggccctgcccccaccaacctggcccggcagccccccagcaggaacaagccctacatctcctggcccagcagcggcggcagcgagcccagcgtgacagtgcccctgcgctccatgtctgaccctgaccaggactttgacaaggagccagacagcgacagcaccaagcacagcacccccagcaacagcagcaaccccagcggcccccccagccccaacagcccccacaggagccagctgcccctggagggcctggagcagcctgcctgtgacacctag

SEQ ID NO: 161256 - DNA, 5136 bp, Artificial Sequence
  derived and/or modified sequence
atgagcgccaaggtgcggctgaagaagctggagcagctgctgctggacggcccgtggaggaacgaatcagccctgagcgtggaaactctgctggatgtgttggtgtgtctgtacacggagtgtagccacagtgccttacggagggacaaatacgttgctgaatttcttgaatgggcaaaaccctttactcaactagtcaaggaaatgcagctgcacagggaggacttcgaaattatcaaggtcatcggtaggggggcattcggcgaggtggccgtggtgaagatgaagaacaccgagaggatatacgccatgaaaatccttaacaagtgggaaatgctcaaacgtgctgaaacagcctgcttcagagaggaacgcgacgtactcgttaatggggattgtcagtggatcactgccctccattacgcttttcaggacgaaaatcacctgtacctggtgatggactattatgtcggcggggaccttcttacccttctatccaagtttgaggacaagctgccagaagacatggcgcgtttttatattggagaaatggtactggccatcgattctatccaccagttacactatgtgcaccgtgacatcaagcctgacaatgtgctccttgacgtgaacgggcatatacgacttgcggacttcggctcatgtctgaaaatgaatgatgatggaacggtgcaaagctctgtcgccgtcgggacacccgactacatctctcccgaaatcctgcaggcaatggaagatggcatgggcaaatatggacctgaatgtgactggtggagcctaggagtgtgtatgtacgagatgctatacggcgaaacccccttttacgctgagtcactcgtcgagacgtacggtaagatcatgaatcacgaagaaaggtttcaatttccttcccacgtgaccgacgtgagtgaagaggctaaggacctgatccagcggctgatttgttctcgagaacgtcgtctgggtcaaaacgggatcgaggattttaagaagcatgccttcttcgaaggtctgaattgggaaaacattcgcaatctggaagctccttatatccctgatgttagctctcccagcgacacctcaaacttcgatgtcgatgacgatgtactgagaaacacagagatccttcctcccggcagtcatacaggctttagtggtcttcacctcccattcattgggtttaccttcacaaccgaatcatgcttttccgatcgcggctccttgaagtccatcatgcagagtaatacattgacaaaagacgaggatgtgcagcgggacctggaacactccctccagatggaagcctatgaaagacgaatcaggagattggagcaggagaaactggagctttcaagaaagttacaagagtcaacacaaaccgtgcagtctctgcacggtagtagccgagccctgtctaactccaaccgggacaaggagattaaaaaattgaacgaagaaatcgagagattgaagaataaaattgcagatagcaataggctagagaggcagctcgaggacacagtggcactgagacaggagcgagaggacagcacccagcgtcttagaggcctggagaagcagcaccgtgtggtgcgccaagagaaggaggagctccacaagcaattggttgaggcctcagaaaggctgaagtcacaagcgaaggagctcaaagatgcccatcagcaacgtaagttagctttacaggaattttccgagctgaatgaaaggatggctgagctgagggcacagaaacagaaagtcagtagacagttaagagacaaggaggaggaaatggaggtcgcaacccagaaagttgatgcaatgagacaggagatgcgacgcgcagaaaaattacggaaggaacttgaagcccagcttgacgacgccgtcgccgaggcctcgaaagaacgcaaactccgagagcattctgaaaatttttgcaaacagatggagagtgagctggaggcccttaaggtgaaacagggaggacggggcgctggcgctaccctggaacaccagcaggagatctccaagatcaaatcggagctcgaaaaaaaggtcctgttttatgaagaggagctggtcaggcgtgaggctagtcacgtgcttgaagtgaagaacgttaagaaggaggtccatgatagcgagtcccatcagctggccttacagaaggagatcctcatgctgaaagataagctggagaagagcaagagagaacggcacaatgaaatggaagaggccgtggggacgattaaggacaaatatgagcgtgaacgtgcaatgttgtttgatgagaataaaaagctcactgccgagaacgagaaattatgctcattcgtggacaagctcacggctcagaaccgccaactggaagacgagcttcaggatttagccgccaaaaaggagtcggttgctcattgggaagctcagatagcggagataatccaatgggttagcgatgaaaaagatgcccgcggttatctgcaggcactggctagcaaaatgaccgaagagctggaggctctgagaagttcctctcttggctcccggaccctggaccctctgtggaaagtgagaaggtcccagaagttagacatgtcagccagactagagctgcagtctgctctcgaagctgagatccgggcaaaacagctagttcaagaggaattgagaaaggtaaaggacgccaatttgaccttagaaagcaagcttaaggattcagaagctaagaatcgcgagctcctggaggaaatggaaattctgaaaaaaaaaatggaggagaagtttagagcggacacgggccttaaattaccagactttcaggactcaatatttgaatatttcaacacggctcctttagcccacgatcttacatttcggacttctagcgccagtgaacaagaaacccaagcccctaagcccgaggcttcacccagtatgtctgttgctgccagtgaacagcaggaggatatggcaagaccccctcagcgcccttctgctgtgcctctgccaacgactcaggctctagctctcgccggacccaaaccaaaggcacatcaatttagtattaaatctttttcctccccgactcaatgttcccactgcacaagccttatggttggtcttatccggcagggctacgcctgcgaggtctgcagcttcgcctgccacgttagttgcaaagacggggctcctcaggtgtgtcccattcctcctgaacaaagcaagcgaccccttggcgtggatgtacaacgcggcataggtaccgcttacaaggggcacgtgaaagtgccaaagccgacaggtgtcaagaagggatggcagagggcctacgccgtcgtttgtgattgcaaactcttcttgtacgatcttcccgagggcaagtcaactcaacccggagtcatagcctcacaggtcctggatttacgggacgatgaattctcagtctcttctgtactggccagcgatgtcattcacgctacacggagagacataccgtgcatcttccgcgtcaccgccagcctgctaggggcccccagcaagacatcaagccttctgattctgaccgaaaacgagaatgagaagcgaaaatgggtgggcattctcgagggcttacagagtatcctgcataaaaataggctgaggaatcaggtcgtacacgtaccactcgaggcctacgactcttccttgccccttatcaaagcgatactgaccgccgccatcgtggacgccgatagaatcgccgtgggcctagaggaggggctgtacgtcatcgaggtgaccagagacgtgattgtcagagccgccgactgtaaaaaggtgcaccaaatcgagctagctccacgggagaaaatcgtaattctcctctgtggcagaaatcatcacgttcacttgtacccttggagctctctcgatggcgctgaaggctcttttgacatcaagctaccagagaccaaggggtgccagttgatggccactgcgacacttaagcgaaactccggaacttgtctgttcgtcgcggtgaagcgcctaatcctgtgctacgaaatacagcggacaaaaccatttcaccgcaagtttaacgagatcgttgcaccaggctctgtacagtgtctggctgtgctcagagataggctgtgtgtggggtaccctagcgggttttgcctgctgagtatccagggcgacgggcagccgttgaacctcgtaaaccctaacgacccctcactagcttttctctcacaacaaagttttgacgctttatgcgcagtggagctcgaatctgaagagtacttgctttgcttctctcacatgggcttatacgtcgacccacagggacggagggctcgtgcgcaggagctgatgtggcccgctgcacctgtggcatgctcttgctcacccacgcacgtgactgtgtactcagagtacggcgttgatgttttcgatgtgagaaccatggaatgggttcagaccatcggcctgcgtcgcatccggcccctgaactccgagggaaccctcaacctcctaaattgtgagccgcctagactgatatattttaagagcaagtttagtggagcagtcctgaacgttccagacacctctgacaattcgaagaaacaaatgcttagaacacgcagtaaaagaaggttcgtcttcaaggtccccgaggaggaacggttgcaacagagacgggaaatgttgagggaccccgagctgcgcagtaaaatgatcagtaatcctactaatttcaatcatgtcgcgcacatgggccctggtgatggaatgcaggtccttatggacctgcccttatctgctgtcccgcctagtcaggaggaaaggccaggccccgcaccaacgaatctggcgcgccagcctccatcgagaaataagccctacatctcctggccctcttctggaggctctgagccctctgtcactgtgccgctacgcagcatgtcagatcctgaccaggatttcgacaaggagccggactccgacagtaccaaacattccacccctagcaattcctcgaatccctctggacccccaagtcctaacagcccgcaccggagccagttgcccctggagggactggagcagcccgcctgcgacacctag

SEQ ID NO: 161257 - DNA, 5135 bp, Artificial Sequence
  derived and/or modified sequence
atgagtgctaaggttaggttgaagaagctagagcagctcctgttagacggtccatggagaaacgagtctgctctgagcgttgagaccctactagatgtgttagtgtgcctttacaccgagtgcagccattctgcgctgcggagagataagtatgtcgccgagtttttggagtgggcaaagccatttacacagctcgtcaaggaaatgcagctccatagagaggactttgagataattaaggtgatcggacgaggtgccttcggggaagttgccgtggtaaagatgaaaaacactgagagaatttacgctatgaaaatactcaacaagtgggaaatgctgaagagggcagagactgcctgcttcagagaagagcgagatgtgctggtgaacggagactgtcagtggataaccgcactccattacgcctttcaggatgaaaaccatctgtatctagtcatggactactatgtgggcggagacttgctgacattgctcagcaagttcgaagataagttgcctgaagatatggctcgcttttatattggtgagatggtcctcgccattgattccattcaccagctgcattatgtccacagggacataaagccagataatgtgttgctcgacgtgaacggacacattagacttgccgactttggctcctgcttaaagatgaacgatgatggaaccgtccagtctagcgttgccgtgggaacgcccgactacatatcacccgagatactgcaggccatggaggatgggatgggtaagtatggcccagaatgcgactggtggagtttgggcgtctgcatgtatgagatgctctacggtgagacacctttctacgcagagagcttggtcgagacatacggcaagatcatgaaccacgaggagaggtttcagttccctagtcacgtgactgacgtgtcggaagaggccaaagacttgattcagcgattgatttgttcccgcgaacgtagactcggccaaaatggaatcgaggatttcaaaaagcatgcctttttcgaaggtctgaactgggagaacattcgcaacctcgaggccccttatatccccgacgttagcagtcctagcgatacctcaaattttgatgtggatgatgatgtactacgtaataccgagattcttccccctggaagccacacagggttctcaggcctgcacctccctttcattggttttacattcacaaccgagtcctgcttctctgaccggggatctctgaaatccattatgcagagtaatactctaacaaaggatgaagatgttcaacgcgacctggagcactcgctgcagatggaagcttacgaaaggcgcattagaaggctcgaacaggaaaaactagagctgtccagaaagctccaagaatccacccaaactgtgcagtcattacatgggagtagcagagcgctttcgaactccaaccgggacaaggaaattaagaaactaaatgaggaaattgagcggctcaaaaataagatagctgacagcaacaggctggagcgtcaactggaggatacagtggctctgcgccaggaaagagaggactcaacacagcggctgaggggtttagagaagcagcatagagttgtgcggcaggaaaaggaggagctgcacaaacaacttgtggaggctagtgaaagactgaagtctcaggccaaagaacttaaagatgcacaccaacaacgtaagctggccctgcaggaattctccgagttaaacgagcggatggctgagctgagagcacagaagcagaaagtctctaggcaactgagggataaggaagaggagatggaggtcgctacgcaaaaggtggacgccatgcgccaggagatgagaagagctgaaaagctcagaaaagagcttgaggcgcaactcgacgacgctgtggccgaggcaagtaaagagcgcaagttgcgcgagcatagtgagaatttctgtaagcaaatggagtcagagctggaagccttgaaggtaaagcaagggggacgaggagctggcgctaccttggaacatcagcaggaaatttccaagatcaaatccgaactggagaagaaggtcttgttctacgaggaagagttagtgagacgcgaggcctcacatgtgttggaggttaagaatgtgaagaaagaagtccacgacagcgagagccatcagctcgctttgcaaaaagagattctgatgctgaaagataaactggagaagtctaagcgcgagagacacaacgaaatggaggaggcggtaggaacaataaaggataagtatgagcgcgagagagctatgctttttgatgagaacaagaagctgaccgcagagaatgaaaagttatgttccttcgtggataagctgactgcacagaatagacagctcgaagacgagctccaggacctggcagctaaaaaagaatcagtggcacactgggaagcacaaatcgcagagatcatccaatgggtgtctgatgagaaggacgctcggggttatctgcaggcactggcttccaagatgactgaggagctggaagcattgagatcgtcctctcttggctcgaggacacttgatcctctctggaaagtgaggagatctcagaagctggatatgtccgccagactggaactgcagagtgctttggaagccgaaattcgcgctaagcagctggtccaggaagagttgagaaaagtgaaggacgccaacttaacactggagagcaaactgaaagactctgaggccaagaacagagagctgcttgaggaaatggaaatcctcaagaagaaaatggaggaaaaattccgggctgacacgggcctaaagttacccgacttccaggactctattttcgaatactttaacaccgcgccattagctcacgacctgacgttcaggaccagcagcgcttctgagcaggagacccaagcccctaaacctgaggctagcccgagcatgtccgtcgcagcatctgagcagcaagaggacatggcacgacccccacagaggccctctgcagtccccctgcccaccactcaagccctggctctggccggacccaaaccaaaggcccaccagtttagcatcaaatcattttcctcaccaacacaatgcagccattgcacatctctgatggttggtttgatccgacagggatatgcgtgtgaggtttgctcctttgcctgccacgttagctgtaaagatggcgcaccgcaagtgtgtcctattccgcctgaacagtcaaaaagacctctaggggtcgacgtgcagcgcggaatcggcacagcttataagggacacgtgaaagtccctaaacccacaggtgttaagaaaggctggcagagagcctacgccgtcgtctgtgactgcaagttgtttctgtacgatttgcctgaggggaagagcacgcagccgggtgtcatcgcttcccaagttcttgacctccgagacgacgaatttagcgtgagtagcgtgctggctagcgacgttattcacgccacccggcgagatatcccctgcatctttagagtgacggcctcactgttaggcgcaccatcaaagacttccagtttgttgattctgacagaaaacgagaatgaaaaaagaaaatgggtggggatcctcgagggcctccagtccatcctgcacaaaaaccggcttagaaaccaggtagtgcatgttccactggaagcttatgatagctcactgccacttataaaggcaattctaacagcggctatcgttgatgcagatcgcatcgccgttgggctggaagagggtctctatgtgattgaagtgaccagagacgttatagtccgcgcagccgattgcaaaaaagtccatcagatcgaactggccccaagagaaaaaatcgtcattctgctctgcgggaggaaccatcacgtgcacctttatccctggtcgtcactggatggcgctgaggggagtttcgatattaaactgccagaaaccaagggctgtcagctaatggctacagcaactctgaagcggaattctggcacatgtctgtttgtggcagtcaaaaggctaatattgtgttacgaaattcagcgcactaaaccgtttcatcgaaagttcaatgaaatcgttgcacctggctccgtgcaatgcctggctgtgctgcgcgacaggctgtgtgtgggctaccccagcgggttttgtttgctctcaatccagggagatggacaacccctgaacttagttaacccaaacgatccgtccctagcttttttgagccaacagagttttgacgcactgtgcgcggtagagcttgagtccgaggaatacctcctgtgcttcagccatatggggttgtatgttgaccctcagggcagaagggcgagggctcaggagttgatgtggcccgctgctccggtggcttgttcatgtagcccaacacacgtgaccgtgtattctgaatatggagtggatgtgtttgatgttaggaccatggagtgggtccagacgattggcctccgcaggatccggcctctcaacagtgagggcaccctcaatctcctcaattgtgaaccacctcgactcatctactttaagtctaagtttagcggagcggtcctcaatgtgcccgatacctcggataacagcaagaagcagatgctgcggacaagaagtaagagaaggtttgtgtttaaagtgcccgaagaagaacgcctgcagcagagacgggaaatgcttcgcgaccctgagcttagaagtaaaatgatctctaatcctaccaattttaaccacgtggctcatatgggccctggtgatggcatgcaagtgttgatggatctgcccttatcggcagttcctccaagccaggaggaaaggccgggacccgcacccacaaacctggcccgtcagccaccttctcgcaataaaccttatattagttggccatctagcggaggctccgaaccatccgtcactgtgcccttgcggagcatgagcgaccctgaccaagacttcgacaaagaaccggactccgattctacgaaacactctaccccttctaactcttcaaaccccagcgggccaccaagtcccaattccccccatagaagtcaactcccccttgagggcctggagcaacctgcctgtgatactta

SEQ ID NO: 161258 - DNA, 6758 bp, Artificial Sequence
  derived and/or modified sequence
gggcggggctgagggcggcgggggcgggccgcccgagctgggagggcggcggcgccgaggggaggagagcggcccatggacccgcggggcccggcgccccagactctgcgccgtcgggacggagcccaagatgtcggcctaggccggggcgcgacgacgcggacggggcggcgaggaggcgccgctgctgccggggctcgcagccgccgagcccccgagggcgcgccctgacggactggccgagccggcggtgagaggccggcgcgtcgggagcgggccgcgcggcaccatgtcggccaaggtgcggctcaagaagctggagcagctgctcctggacgggccctggcgcaacgagagcgccctgagcgtggaaacgctgctcgacgtgctcgtctgcctgtacaccgagtgcagccactcggccctgcgccgcgacaagtacgtggccgagttcctcgagtgggctaaaccatttacacagctggtgaaagaaatgcagcttcatcgagaagactttgaaataattaaagtaattggaagaggtgcttttggtgaggttgctgttgtcaaaatgaagaatactgaacgaatttatgcaatgaaaatcctcaacaagtgggagatgctgaaaagagcagagaccgcgtgcttccgagaggagcgcgatgtgctggtgaacggcgactgccagtggatcaccgcgctgcactacgcctttcaggacgagaaccacctgtacttagtcatggattactatgtgggtggtgatttactgaccctgctcagcaaatttgaagacaagcttccggaagatatggcgaggttctacattggtgaaatggtgctggccattgactccatccatcagcttcattacgtgcacagagacattaaacctgacaatgtccttttggacgtgaatggtcatatccgcctggctgactttggatcatgtttgaagatgaatgatgatggcactgtgcagtcctccgtggccgtgggcacacctgactacatctcgccggagatcctgcaggcgatggaggacggcatgggcaaatacgggcctgagtgtgactggtggtctctgggtgtctgcatgtatgagatgctctatggagaaacgccgttttatgcggagtcactcgtggagacctatgggaagatcatgaaccatgaagagcgattccagttcccatcccatgtcacggatgtatctgaagaagcgaaggacctcatccagagactgatctgcagtagagaacgccggctggggcagaatggaatagaggatttcaaaaagcatgcgttttttgaaggtctaaattgggaaaatatacgaaacctagaagcaccttatattcctgatgtgagcagtccctctgacacatccaacttcgacgtggatgacgacgtgctgagaaacacggaaatattacctcctggttctcacacaggcttttctggattacatttgccattcattggttttacattcacaacggaaagctgtttttctgatcgaggctctctgaagagcataatgcagtccaacacattaaccaaagatgaggatgtgcagcgggacctggagcacagcctgcagatggaagcttacgagaggaggattcggaggctggaacaggagaagctggagctgagcaggaagctgcaagagtccacccagaccgtgcagtccctccacggctcatctcgggccctcagcaattcaaaccgagataaagaaatcaaaaagctaaatgaagaaatcgaacgcttgaagaataaaatagcagattcaaacaggctcgagcgacagcttgaggacacagtggcgcttcgccaagagcgtgaggactccacgcagcggctgcgggggctggagaagcagcaccgcgtggtccggcaggagaaggaggagctgcacaagcaactggttgaagcctcagagcggttgaaatcccaggccaaggaactcaaagatgcccatcagcagcgaaagctggccctgcaggagttctcggagctgaacgagcgcatggcagagctccgtgcccagaagcagaaggtgtcccggcagctgcgagacaaggaggaggagatggaggtggccacgcagaaggtggacgccatgcggcaggaaatgcggagagctgagaagctcaggaaagagctggaagctcagcttgatgatgctgttgctgaggcctccaaggagcgcaagcttcgtgagcacagcgagaacttctgcaagcaaatggaaagcgagctggaggccctcaaggtgaagcaaggaggccggggagcgggtgccaccttagagcaccagcaagagatttccaaaatcaaatccgagctggagaagaaagtcttattttatgaagaggaattggtcagacgtgaggcctcccatgtgctagaagtgaaaaatgtgaagaaggaggtgcatgattcagaaagccaccagctggccctgcagaaagaaatcttgatgttaaaagataagttagaaaagtcaaagcgagaacggcataacgagatggaggaggcagtaggtacaataaaagataaatacgaacgagaaagagcgatgctgtttgatgaaaacaagaagctaactgctgaaaatgaaaagctctgttcctttgtggataaactcacagctcaaaatagacagctggaggatgagctgcaggatctggcagccaagaaggagtcagtggcccactgggaagctcagattgcggaaatcattcagtgggtcagtgacgagaaagatgcccggggttaccttcaagctcttgcttccaagatgaccgaagagctcgaggctttgaggagttctagtctggggtcaagaacactggacccgctgtggaaggtgcgccgcagccagaagctggacatgtccgcgcggctggagctgcagtcggccctggaggcggagatccgggccaagcagcttgtccaggaggagctcaggaaggtcaaggacgccaacctcaccttggaaagcaaactaaaggattccgaagccaaaaacagagaattattagaagaaatggaaattttgaagaaaaagatggaagaaaaattcagagcagatactgggctcaaacttccagattttcaggattccatttttgagtatttcaacactgctcctcttgcacatgacctgacatttagaaccagctcagctagtgagcaagaaacacaagctccgaagccagaagcgtccccgtcgatgtctgtggctgcatcagagcagcaggaggacatggctcggcccccgcagaggccatccgctgtgccgttgcccaccacgcaggccctggctctggctggaccgaagccaaaagctcaccagttcagcatcaagtccttctccagccctactcagtgcagccactgcacctccctgatggttgggctgatccggcagggctacgcctgcgaggtgtgttcctttgcttgccacgtgtcctgcaaagacggtgccccccaggtgtgcccaatacctcccgagcagtccaagaggcctctgggcgtggacgtgcagcgaggcatcggaacagcctacaaaggccatgtcaaggtcccaaagcccacgggggtgaagaagggatggcagcgcgcatatgcagtcgtctgtgactgcaagctcttcctgtatgatctgcctgaaggaaaatccacccagcctggtgtcattgcgagccaagtcttggatctcagagatgacgagttttccgtgagctcagtcctggcctcagatgtcattcatgctacacgccgagatattccatgtatattcagggtgacggcctctctcttaggtgcaccttctaagaccagctcgctgctcattctgacagaaaatgagaatgaaaagaggaagtgggttgggattctagaaggactccagtccatccttcataaaaaccggctgaggaatcaggtcgtgcatgttcccttggaagcctacgacagctcgctgcctctcatcaaggccatcctgacagctgccatcgtggatgcagacaggattgcagtcggcctagaagaagggctctatgtcatagaggtcacccgagatgtgatcgtccgtgccgctgactgtaagaaggtacaccagatcgagcttgctcccagggagaagatcgtaatcctcctctgtggccggaaccaccatgtgcacctctatccgtggtcgtcccttgatggagcggaaggcagctttgacatcaagcttccggaaaccaaaggctgccagctcatggccacggccacactcaagaggaactctggcacctgcctgtttgtggccgtgaaacggctgatcctttgctatgagatccagagaacgaagccattccacagaaagttcaatgagattgtggctcccggcagcgtgcagtgcctggcggtgctcagggacaggctctgtgtgggctacccttctgggttctgcctgctgagcatccagggggacgggcagcctctaaacctggtaaatcccaatgacccctcgcttgcgttcctctcacaacagtcttttgatgccctttgtgctgtggagctcgaaagcgaggagtacctgctttgcttcagccacatgggactgtacgtggacccgcaaggccggagggcacgcgcgcaggagctcatgtggcctgcggctcctgtcgcctgtagttgcagccccacccacgtcacggtgtacagcgagtatggcgtggacgtctttgatgtgcgcaccatggagtgggtgcagaccatcggcctgcggaggataaggcccctgaactctgaaggcaccctcaacctcctcaactgcgagcctccacgcttgatctacttcaagagcaagttctcgggagcggttctcaacgtgccggacacctccgacaacagcaagaagcagatgctgcgcaccaggagcaaaaggcggttcgtcttcaaggtcccagaggaagagagactgcagcagaggcgagagatgcttagagacccagaattgagatccaaaatgatatccaacccaaccaacttcaaccacgtggcccacatgggcccaggcgacggcatgcaggtgctcatggacctgcctctgagtgctgtgcccccctcccaggaggaaaggccgggccccgctcccaccaacctggctcgccagcctccatccaggaacaagccctacatctcgtggccctcatcaggtggatcggagcctagcgtgactgtgcctctgagaagtatgtctgatccagaccaggactttgacaaagagcctgattcggactccaccaaacactcaactccatcgaatagctccaaccccagcggcccaccgagccccaactccccccacaggagccagctccccctcgaaggcctggagcagccggcctgtgacacctgaagccgccagctcgccacaggggccagggagctggagatggcctccagcgtcagtgccaagactgagcgggccctccagtgttgtccaaggaaatgtagaatcactttgtagatatggagatgaagaagacaaatctttattataatattgatcagttttatgccgcattgttcgtggcagtagaccacatctgttcgtctgcacagctgtgaggcgatgctgttccatctgcacatgaaggacccccatacagcctgtctcccacccctgacaacccgagagggcatatggggccctgccaacaccacttcctcagcagaaacccgtcatgacgcggctgcttcggaagcagacatctggggacacagcctcagtacccagtcttttccctagttcctgaaactttcctaggaccttaagagaatagtaggaggtcctatagcattcccagtgtcactagaattttgaagacaggaaagtggaggttagtctgtggcctttttttcatttagccattgcacagtcagctgcagaagtcctgctgaccacctagtcatggacaaaggcccaggaccagtgacaccctgcgtccctgtgtgcattaagttcattctgggtcgcagccatgaagtgtcaccagtatctactactgtgaagtcagctgtgctgttttccattcgcttccacggcttctgcctcctgccataaaaccagcgagtgtcgtggtgcaggcaggccctgtggcctgctgggctgagggaagtcagagccccagggcgccacgaagcagccactgggataccccaccccgccccgccctgcccgcccccccccccaccagtcctgcccccgcatggagcccccgtgattagtagcccgtatgatcacgtagacccacccaacacactcctgcacactggccccggcccacggcacagcaatcccctgcgcgtggatttcacctcaccctttgtaccagatgttgagtgaccagctctgtggccctgtgtcgtcagaggcttgtgattaactgtggcggcagacacagcttgtccacagcttgggccaggcttcccctgtcctcccaccggtcggctgcttggcaaggctgttcaggacgtgcacttccccaagtcggcactgagtggcccagcaccgcctagccctgccaccccactgccctcctgggccttctgctggatgggcacctggggggttctggtttttacttttttaatgtaagtctcagtctttgtaattaattattgaattgtgagaacatttttgaacaatttacctgtcaataaagcagaagacggcagttttaaagttc

SEQ ID NO: 161259 - DNA, 5136 bp, Artificial Sequence
  derived and/or modified sequence
atgagcgccaaggtgagactgaagaagctggagcagctgctgctggacggcccctggagaaacgagagcgccctgagcgtggagaccctgctggacgtgctggtgtgcctgtacaccgagtgcagccacagcgccctgagaagagacaagtacgtggccgagttcctggagtgggccaagcccttcacccagctggtgaaggagatgcagctgcacagagaggacttcgagatcatcaaggtgatcggcagaggcgccttcggcgaggtggccgtggtgaagatgaagaacaccgagagaatctacgccatgaagatcctgaacaagtgggagatgctgaagagagccgagaccgcctgcttcagagaggagagagacgtgctggtgaacggcgactgccagtggatcaccgccctgcactacgccttccaggacgagaaccacctgtacctggtgatggactactacgtgggcggcgacctgctgaccctgctgagcaagttcgaggacaagctgcccgaggacatggccagattctacatcggcgagatggtgctggccatcgacagcatccaccagctgcactacgtgcacagagacatcaagcccgacaacgtgctgctggacgtgaacggccacatcagactggccgacttcggcagctgcctgaagatgaacgacgacggcaccgtgcagagcagcgtggccgtgggcacccccgactacatcagccccgagatcctgcaggccatggaggacggcatgggcaagtacggccccgagtgcgactggtggagcctgggcgtgtgcatgtacgagatgctgtacggcgagacccccttctacgccgagagcctggtggagacctacggcaagatcatgaaccacgaggagagattccagttccccagccacgtgaccgacgtgagcgaggaggccaaggacctgatccagagactgatctgcagcagagagagaagactgggccagaacggcatcgaggacttcaagaagcacgccttcttcgagggcctgaactgggagaacatcagaaacctggaggccccctacatccccgacgtgagcagccccagcgacaccagcaacttcgacgtggacgacgacgtgctgagaaacaccgagatcctgccccccggcagccacaccggcttcagcggcctgcacctgcccttcatcggcttcaccttcaccaccgagagctgcttcagcgacagaggcagcctgaagagcatcatgcagagcaacaccctgaccaaggacgaggacgtgcagagagacctggagcacagcctgcagatggaggcctacgagagaagaatcagaagactggagcaggagaagctggagctgagcagaaagctgcaggagagcacccagaccgtgcagagcctgcacggcagcagcagagccctgagcaacagcaacagagacaaggagatcaagaagctgaacgaggagatcgagagactgaagaacaagatcgccgacagcaacagactggagagacagctggaggacaccgtggccctgagacaggagagagaggacagcacccagagactgagaggcctggagaagcagcacagagtggtgagacaggagaaggaggagctgcacaagcagctggtggaggccagcgagagactgaagagccaggccaaggagctgaaggacgcccaccagcagagaaagctggccctgcaggagttcagcgagctgaacgagagaatggccgagctgagagcccagaagcagaaggtgagcagacagctgagagacaaggaggaggagatggaggtggccacccagaaggtggacgccatgagacaggagatgagaagagccgagaagctgagaaaggagctggaggcccagctggacgacgccgtggccgaggccagcaaggagagaaagctgagagagcacagcgagaacttctgcaagcagatggagagcgagctggaggccctgaaggtgaagcagggcggcagaggcgccggcgccaccctggagcaccagcaggagatcagcaagatcaagagcgagctggagaagaaggtgctgttctacgaggaggagctggtgagaagagaggccagccacgtgctggaggtgaagaacgtgaagaaggaggtgcacgacagcgagagccaccagctggccctgcagaaggagatcctgatgctgaaggacaagctggagaagagcaagagagagagacacaacgagatggaggaggccgtgggcaccatcaaggacaagtacgagagagagagagccatgctgttcgacgagaacaagaagctgaccgccgagaacgagaagctgtgcagcttcgtggacaagctgaccgcccagaacagacagctggaggacgagctgcaggacctggccgccaagaaggagagcgtggcccactgggaggcccagatcgccgagatcatccagtgggtgagcgacgagaaggacgccagaggctacctgcaggccctggccagcaagatgaccgaggagctggaggccctgagaagcagcagcctgggcagcagaaccctggaccccctgtggaaggtgagaagaagccagaagctggacatgagcgccagactggagctgcagagcgccctggaggccgagatcagagccaagcagctggtgcaggaggagctgagaaaggtgaaggacgccaacctgaccctggagagcaagctgaaggacagcgaggccaagaacagagagctgctggaggagatggagatcctgaagaagaagatggaggagaagttcagagccgacaccggcctgaagctgcccgacttccaggacagcatcttcgagtacttcaacaccgcccccctggcccacgacctgaccttcagaaccagcagcgccagcgagcaggagacccaggcccccaagcccgaggccagccccagcatgagcgtggccgccagcgagcagcaggaggacatggccagacccccccagagacccagcgccgtgcccctgcccaccacccaggccctggccctggccggccccaagcccaaggcccaccagttcagcatcaagagcttcagcagccccacccagtgcagccactgcaccagcctgatggtgggcctgatcagacagggctacgcctgcgaggtgtgcagcttcgcctgccacgtgagctgcaaggacggcgccccccaggtgtgccccatcccccccgagcagagcaagagacccctgggcgtggacgtgcagagaggcatcggcaccgcctacaagggccacgtgaaggtgcccaagcccaccggcgtgaagaagggctggcagagagcctacgccgtggtgtgcgactgcaagctgttcctgtacgacctgcccgagggcaagagcacccagcccggcgtgatcgccagccaggtgctggacctgagagacgacgagttcagcgtgagcagcgtgctggccagcgacgtgatccacgccaccagaagagacatcccctgcatcttcagagtgaccgccagcctgctgggcgcccccagcaagaccagcagcctgctgatcctgaccgagaacgagaacgagaagagaaagtgggtgggcatcctggagggcctgcagagcatcctgcacaagaacagactgagaaaccaggtggtgcacgtgcccctggaggcctacgacagcagcctgcccctgatcaaggccatcctgaccgccgccatcgtggacgccgacagaatcgccgtgggcctggaggagggcctgtacgtgatcgaggtgaccagagacgtgatcgtgagagccgccgactgcaagaaggtgcaccagatcgagctggcccccagagagaagatcgtgatcctgctgtgcggcagaaaccaccacgtgcacctgtacccctggagcagcctggacggcgccgagggcagcttcgacatcaagctgcccgagaccaagggctgccagctgatggccaccgccaccctgaagagaaacagcggcacctgcctgttcgtggccgtgaagagactgatcctgtgctacgagatccagagaaccaagcccttccacagaaagttcaacgagatcgtggcccccggcagcgtgcagtgcctggccgtgctgagagacagactgtgcgtgggctaccccagcggcttctgcctgctgagcatccagggcgacggccagcccctgaacctggtgaaccccaacgaccccagcctggccttcctgagccagcagagcttcgacgccctgtgcgccgtggagctggagagcgaggagtacctgctgtgcttcagccacatgggcctgtacgtggacccccagggcagaagagccagagcccaggagctgatgtggcccgccgcccccgtggcctgcagctgcagccccacccacgtgaccgtgtacagcgagtacggcgtggacgtgttcgacgtgagaaccatggagtgggtgcagaccatcggcctgagaagaatcagacccctgaacagcgagggcaccctgaacctgctgaactgcgagccccccagactgatctacttcaagagcaagttcagcggcgccgtgctgaacgtgcccgacaccagcgacaacagcaagaagcagatgctgagaaccagaagcaagagaagattcgtgttcaaggtgcccgaggaggagagactgcagcagagaagagagatgctgagagaccccgagctgagaagcaagatgatcagcaaccccaccaacttcaaccacgtggcccacatgggccccggcgacggcatgcaggtgctgatggacctgcccctgagcgccgtgccccccagccaggaggagagacccggccccgcccccaccaacctggccagacagccccccagcagaaacaagccctacatcagctggcccagcagcggcggcagcgagcccagcgtgaccgtgcccctgagaagcatgagcgaccccgaccaggacttcgacaaggagcccgacagcgacagcaccaagcacagcacccccagcaacagcagcaaccccagcggcccccccagccccaacagcccccacagaagccagctgcccctggagggcctggagcagcccgcctgcgacacctag

SEQ ID NO: 161260 - protein, 1084 aa, Artificial Sequence
  derived and/or modified sequence
MSSQSHPDGLSGRDQPVELLNPARVNHMPSTVDVATALPLQVAPSAVPMDLRLDHQFSLPVAEPALREQQLQQELLALKQKQQIQRQILIAEFQRQHEQLSRQHEAQLHEHIKQQQEMLAMKHQQELLEHQRKLERHRQEQELEKQHREQKLQQLKNKEKGKESAVASTEVKMKLQEFVLNKKKALAHRNLNHCISSDPRYWYGKTQHSSLDQSSPPQSGVSTSYNHPVLGMYDAKDDFPLRKTASEPNLKLRSRLKQKVAERRSSPLLRRKDGPVVTALKKRPLDVTDSACSSAPGSGPSSPNNSSGSVSAENGIAPAVPSIPAETSLAHRLVAREGSAAPLPLYTSPSLPNITLGLPATGPSAGTAGQQDAERLTLPALQQRLSLFPGTHLTPYLSTSPLERDGGAAHSPLLQHMVLLEQPPAQAPLVTGLGALPLHAQSLVGADRVSPSIHKLRQHRPLGRTQSAPLPQNAQALQHLVIQQQHQQFLEKHKQQFQQQQLQMNKIIPKPSEPARQPESHPEETEEELREHQALLDEPYLDRLPGQKEAHAQAGVQVKQEPIESDEEEAEPPREVEPGQRQPSEQELLFRQQALLLEQQRIHQLRNYQASMEAAGIPVSFGGHRPLSRAQSSPASATFPVSVQEPPTKPRFTTGLVYDTLMLKHQCTCGSSSSHPEHAGRIQSIWSRLQETGLRGKCECIRGRKATLEELQTVHSEAHTLLYGTNPLNRQKLDSKKLLGSLASVFVRLPCGGVGVDSDTIWNEVHSAGAARLAVGCVVELVFKVATGELKNGFAVVRPPGHHAEESTPMGFCYFNSVAVAAKLLQQRLSVSKILIVDWDVHHGNGTQQAFYSDPSVLYMSLHRYDDGNFFPGSGAPDEVGTGPGVGFNVNMAFTGGLDPPMGDAEYLAAFRTVVMPIASEFAPDVVLVSSGFDAVEGHPTPLGGYNLSARCFGYLTKQLMGLAGGRIVLALEGGHDLTAICDASEACVSALLGNELDPLPEKVLQQRPNANAVRSMEKVMEIHSKYWRCLQRTTSTAGRSLIEAQTCENEEAETVTAMASLSVGVKPAEKRPDEEPMEEEPPL

SEQ ID NO: 161261 - protein, 29 aa, Artificial Sequence
  derived and/or modified sequence
MSSQSHPDGLSGRDQPVELLNPARVNHMP

SEQ ID NO: 161262 - DNA, 8980 bp, Artificial Sequence
  derived and/or modified sequence
ggaggttgtggggccgccgccgcggagcaccgtccccgccgccgcccgagcccgagcccgagcccgcgcacccgcccgcgccgccgccgccgccgcccgaacagcctcccagcctgggcccccggcggcgccgtggccgcgtcccggctgtcgccgcccgagcccgagcccgcgcgccggcgggtggcggcgcaggctgaggagatgcggcgcggagcgccggagcagggctagagccggccgccgccgcccgccgcggtaagcgcagccccggcccggcgcccgcgggccattgtccgccgcccgccccgcgccccgcgcagcctgcaggccttggagcccgcggcaggtggacgccgccggtccacacccgccccgcgcgcggccgtgggaggcgggggccagcgctggccgcgcgccgtgggacccgccggtccccagggccgcccggccccttctggacctttccacccgcgccgcgaggcggcttcgcccgccggggcgggggcgcgggggtgggcacggcaggcagcggcgccgtctcccggtgcggggcccgcgccccccgagcaggttcatctgcagaagccagcggacgcctctgttcaacttgtgggttacctggctcatgagaccttgccggcgaggctcggcgcttgaacgtctgtgacccagccctcaccgtcccggtacttgtatgtgttggtgggagtttggagctcgttggagctatcgtttccgtggaaattttgagccatttcgaatcacttaaaggagtggacattgctagcaatgagctcccaaagccatccagatggactttctggccgagaccagccagtggagctgctgaatcctgcccgcgtgaaccacatgcccagcacggtggatgtggccacggcgctgcctctgcaagtggccccctcggcagtgcccatggacctgcgcctggaccaccagttctcactgcctgtggcagagccggccctgcgggagcagcagctgcagcaggagctcctggcgctcaagcagaagcagcagatccagaggcagatcctcatcgctgagttccagaggcagcacgagcagctctcccggcagcacgaggcgcagctccacgagcacatcaagcaacaacaggagatgctggccatgaagcaccagcaggagctgctggaacaccagcggaagctggagaggcaccgccaggagcaggagctggagaagcagcaccgggagcagaagctgcagcagctcaagaacaaggagaagggcaaagagagtgccgtggccagcacagaagtgaagatgaagttacaagaatttgtcctcaataaaaagaaggcgctggcccaccggaatctgaaccactgcatttccagcgaccctcgctactggtacgggaaaacgcagcacagttcccttgaccagagttctccaccccagagcggagtgtcgacctcctataaccacccggtcctgggaatgtacgacgccaaagatgacttccctcttaggaaaacagcttctgaaccgaatctgaaattacggtccaggctaaagcagaaagtggccgaaagacggagcagccccctgttacgcaggaaagacgggccagtggtcactgctctaaaaaagcgtccgttggatgtcacagactccgcgtgcagcagcgccccaggctccggacccagctcacccaacaacagctccgggagcgtcagcgcggagaacggtatcgcgcccgccgtccccagcatcccggcggagacgagtttggcgcacagacttgtggcacgagaaggctcggccgctccacttcccctctacacatcgccatccttgcccaacatcacgctgggcctgcctgccaccggcccctctgcgggcacggcgggccagcaggacgccgagagactcacccttcccgccctccagcagaggctctcccttttccccggcacccacctcactccctacctgagcacctcgcccttggagcgggacggaggggcagcgcacagccctcttctgcagcacatggtcttactggagcagccgccggcacaagcacccctcgtcacaggcctgggagcactgcccctccacgcacagtccttggttggtgcagaccgggtgtccccctccatccacaagctgcggcagcaccgcccactggggcggacccagtcggccccgctgccccagaacgcccaggctctgcagcacctggtcatccagcagcagcatcagcagtttctggagaaacacaagcagcagttccagcagcagcaactgcagatgaacaagatcatccccaagccaagcgagccagcccggcagccggagagccacccggaggagacggaggaggagctccgtgagcaccaggctctgctggacgagccctacctggaccggctgccggggcagaaggaggcgcacgcacaggccggcgtgcaggtgaagcaggagcccattgagagcgatgaggaagaggcagagcccccacgggaggtggagccgggccagcgccagcccagtgagcaggagctgctcttcagacagcaagccctcctgctggagcagcagcggatccaccagctgaggaactaccaggcgtccatggaggccgccggcatccccgtgtccttcggcggccacaggcctctgtcccgggcgcagtcctcacccgcgtctgccaccttccccgtgtctgtgcaggagccccccaccaagccgaggttcacgacaggcctcgtgtatgacacgctgatgctgaagcaccagtgcacctgcgggagtagcagcagccaccccgagcacgccgggaggatccagagcatctggtcccgcctgcaggagacgggcctccggggcaaatgcgagtgcatccgcggacgcaaggccaccctggaggagctacagacggtgcactcggaagcccacaccctcctgtatggcacgaaccccctcaaccggcagaaactggacagtaagaaacttctaggctcgctcgcctccgtgttcgtccggctcccttgcggtggtgttggggtggacagtgacaccatatggaacgaggtgcactcggcgggggcagcccgcctggctgtgggctgcgtggtagagctggtcttcaaggtggccacaggggagctgaagaatggctttgctgtggtccgcccccctggacaccatgcggaggagagcacgcccatgggcttttgctacttcaactccgtggccgtggcagccaagcttctgcagcagaggttgagcgtgagcaagatcctcatcgtggactgggacgtgcaccatggaaacgggacccagcaggctttctacagcgaccccagcgtcctgtacatgtccctccaccgctacgacgatgggaacttcttcccaggcagcggggctcctgatgaggtgggcacagggcccggcgtgggtttcaacgtcaacatggctttcaccggcggcctggacccccccatgggagacgctgagtacttggcggccttcagaacggtggtcatgccgatcgccagcgagtttgccccggatgtggtgctggtgtcatcaggcttcgatgccgtggagggccaccccacccctcttgggggctacaacctctccgccagatgcttcgggtacctgacgaagcagctgatgggcctggctggcggccggattgtcctggccctcgagggaggccacgacctgaccgccatttgcgacgcctcggaagcatgtgtttctgccttgctgggaaacgagcttgatcctctcccagaaaaggttttacagcaaagacccaatgcaaacgctgtccgttccatggagaaagtcatggagatccacagcaagtactggcgctgcctgcagcgcacaacctccacagcggggcgttctctgatcgaggctcagacttgcgagaacgaagaagccgagacggtcaccgccatggcctcgctgtccgtgggcgtgaagcccgccgaaaagagaccagatgaggagcccatggaagaggagccgcccctgtagcactccctcgaagctgctgttctcttgtctgtctgtctctgtcttgaagctcagccaagaaactttcccgtgtcacgcctgcgtcccaccgtggggctctcttggagcacccagggacacccagcgtgcaacagccacgggaagcctttctgccgcccaggcccacaggtctcgagacgcacatgcacgcctgggcgtggcagcctcacagggaacacgggacagacgccggcgacgcgcagacacacggacacgcggaagccaagcacactctggcgggtcccgcaagggacgccgtggaagaaaggagcctgtggcaacaggcggccgagctgccgaattcagttgacacgaggcacagaaaacaaatatcaaagatctaataatacaaaacaaacttgattaaaactggtgcttaaagtttattacccacaactccacagtctctgtgtaaaccactcgactcatcttgtagcttatttttttttaaagaggacgttttctacggctgtggcccgcctctgtgaaccatagcggtgtgcggcggggggtctgcacccgggtgggggacagagggacctttaaagaaaacaaaactggacagaaacaggaatgtgagctgggggagctggcttgagtttctcaaaagccatcggaagatgcgagtttgtgcctttttttttattgctctggtggatttttgtggctgggttttctgaagtctgaggaacaatgccttaagaaaaaacaaacagcaggaatcggtgggacagtttcctgtggccagccgagcctggcagtgctggcaccgcgagctggcctgacgcctcaagcacgggcaccagccgtcatctccggggccaggggctgcagcccggcggtccctgttttgctttattgctgtttaagaaaaatggaggtagttccaaaaaagtggcaaatcccgttggaggttttgaagtccaacaaattttaaacgaatccaaagtgttctcacacgtcacatacgattgagcatctccatctggtcgtgaagcatgtggtaggcacacttgcagtgttacgatcggaatgctttttattaaaagcaagtagcatgaagtattgcttaaattttaggtataaataaatatatatatgtataatatatattccaatgtattccaagctaagaaacttacttgattcttatgaaatcttgataaaatatttataatgcatttatagaaaaagtatatatatatatataaaatgaatgcagattgcgaaggtccctgcaaatggatggcttgtgaatttgctctcaaggtgcttatggaaagggatcctgattgattgaaattcatgttttctcaagctccagattggctagatttcagatcgccaacacattcgccactgggcaactaccctacaagtttgtactttcattttaattattttctaacagaaccgctcccgtctccaagccttcatgcacatatgtacctaatgagtttttatagcaaagaatataaatttgctgttgatttttgtatgaattttttcacaaaaagatcctgaataagcattgttttatgaattttacatttttcctcaccatttagcaattttctgaatggtaataatgtctaaatctttttcctttctgaattcttgcttgtacatttttttttacctttcaaaggtttttaattatttttgtttttatttttgtacgatgagttttctgcagcgtacagaattgttgctgtcagattctattttcagaaagtgagaggagggaccgtaggtcttttcggagtgacaccaacgattgtgtctttcctggtctgtcctaggagctgtataaagaagcccaggggctctttttaactttcaacactagtagtattacgaggggtggtgtgtttttcccctccgtggcaagggcagggagggttgcttaggatgcccggccaccctgggaggcttgccagatgccgggggcagtcagcattaatgaaactcatgtttaaacttctctgaccacatcgtcaggatagaattctaacttgagttttccaaagaccttttgagcatgtcagcaatgcatggggcacacgtggggctctttacccacttgggtttttccactgcagccacgtggccagccctggattttggagcctgtggctgcaaggaacccagggacccttgttgcctggtgaacctgcagggagggtatgattgcctgaccaggacagccagtctttactctttttctcttcaacagtaactgacagtcacgttttactggtaacttattttccagcacatgaagccaccagtttcattccaaagtgtatattgggttcagacttgggggcagaagttcagacacaccgtgctcaggagggacccagagccgagtttcggagtttggtaaagtttacagggtagcttctgaaattaactcaaacttttgaccaaatgagtgcagattcttggattcacttggtcactgggctgctgatggtcagctctgagacagtggtttgagagcaggcagaacggtcttgggacttgtttgactttcccctccctggtggccactctttgctctgaagcccagattggcaagaggagctggtccattccccattcatggcacagagcagtggcagggcccagctagcaggctcttctggcctccttggcctcattctctgcatagccctctggggatcctgccacctgccctcttaccccgccgtggcttatggggaggaatgcatcatctcactttttttttttaagcagatgatgggataacatggactgctcagtggccaggttatcagtggggggacttaattctaatctcattcaaatggagacgccctctgcaaaggcctggcagggggaggcacgtttcatctgtcagctcactccagcttcacaaatgtgctgagagcattactgtgtagccttttctttgaagacacactcggctcttctccacagcaagcgtccagggcagatggcagaggatctgcctcggcgtctgcaggcgggaccacgtcagggagggttccttcatgtgttctccctgtgggtccttggacctttagcctttttcttcctttgcaaaggccttgggggcactggctgggagtcagcaagcgagcactttatatccctttgagggaaaccctgatgacgccactgggcctcttggcgtctgccctgccctcgcggcttcccgccgtgccgcagcgtgcccacgtgcccacgccccaccagcaggcggctgtcccggaggccgtggcccgctgggactggccgcccctccccagcgtcccagggctctggttctggagggccactttgtcaaggtgtttcagtttttctttacttcttttgaaaatctgtttgcaaggggaaggaccatttcgtaatggtctgacacaaaagcaagtttgatttttgcagcactagcaatggactttgttgtttttctttttgatcagaacattccttctttactggtcacagccacgtgctcattccattcttctttttgtagactttgggcccacgtgttttatgggcattgatacatatataaatatatagatataaatatatatgaatatatttttttaagtttcctacacctggaggttgcatggactgtacgaccggcatgactttatattgtatacagattttgcacgccaaactcggcagctttggggaagaagaaaaatgcctttctgttcccctctcatgacatttgcagatacaaaagatggaaatttttctgtaaaacaaaaccttgaaggagaggagggcggggaagtttgcgtcttattgaacttattcttaagaaattgtactttttattgtaagaaaaataaaaaggactacttaaacatttgtcatattaagaaaaaaagtttatctagcacttgtgacataccaataatagagtttattgtatttatgtggaaacagtgttttagggaaactactcagaattcacagtgaactgcctgtctctctcgagttgatttggaggaattttgttttgttttgttttgtttgtttccttttatctccttccacgggccaggcgagcgccgcccgccctcactggccttgtgacggtttattctgattgagaactgggcggactcgaaagagtccccttttccgcacagctgtgttgactttttaattacttttaggtgatgtatggctaagatttcactttaagcagtcgtgaactgtgcgagcactgtggtttacaattatactttgcatcgaaaggaaaccatttcttcattgtaacgaagctgagcgtgttcttagctcggcctcactttgtctctggcattgattaaaagtctgctattgaaagaaaaagaaagcgaacagtttttgtttgttttttttgccgtgtgtgctccatagtggaggcgctattttccaattgatgagaatgacaaacatatataatctatctatctatctatctatctatctatctatacagggggcttgaaccttactcacccaagagcttcttacggaatgtggtagaaaaccaagttgtaacgacactgtaacctacctgatgcctgttcgcgcccgccgtgagctgcgcactggccgtggccaccattcacctctgtaatttaatccgtttctcttggattgtctggacgtgcccgatggttctttcttttgctcagtggagttggaggttttgtgtttggttttctcattcttgtcttgttttgtgtgggtggattttcaccgaccaatgatatcctcttctgacggtcaccttctttccacttcactggagtccagtattctgtaccacatcacgcaacgtgttatcttgtggtgtaaataaagactgcgttacttgccctcccaaaaa

SEQ ID NO: 161263 - DNA, 3255 bp, Artificial Sequence
  derived and/or modified sequence
atgagcagccagagccaccccgacggcctgagcggcagagaccagcccgtggagctgctgaaccccgccagagtgaaccacatgcccagcaccgtggacgtggccaccgccctgcccctgcaggtggcccccagcgccgtgcccatggacctgagactggaccaccagttcagcctgcccgtggccgagcccgccctgagagagcagcagctgcagcaggagctgctggccctgaagcagaagcagcagatccagagacagatcctgatcgccgagttccagagacagcacgagcagctgagcagacagcacgaggcccagctgcacgagcacatcaagcagcagcaggagatgctggccatgaagcaccagcaggagctgctggagcaccagagaaagctggagagacacagacaggagcaggagctggagaagcagcacagagagcagaagctgcagcagctgaagaacaaggagaagggcaaggagagcgccgtggccagcaccgaggtgaagatgaagctgcaggagttcgtgctgaacaagaagaaggccctggcccacagaaacctgaaccactgcatcagcagcgaccccagatactggtacggcaagacccagcacagcagcctggaccagagcagccccccccagagcggcgtgagcaccagctacaaccaccccgtgctgggcatgtacgacgccaaggacgacttccccctgagaaagaccgccagcgagcccaacctgaagctgagaagcagactgaagcagaaggtggccgagagaagaagcagccccctgctgagaagaaaggacggccccgtggtgaccgccctgaagaagagacccctggacgtgaccgacagcgcctgcagcagcgcccccggcagcggccccagcagccccaacaacagcagcggcagcgtgagcgccgagaacggcatcgcccccgccgtgcccagcatccccgccgagaccagcctggcccacagactggtggccagagagggcagcgccgcccccctgcccctgtacaccagccccagcctgcccaacatcaccctgggcctgcccgccaccggccccagcgccggcaccgccggccagcaggacgccgagagactgaccctgcccgccctgcagcagagactgagcctgttccccggcacccacctgaccccctacctgagcaccagccccctggagagagacggcggcgccgcccacagccccctgctgcagcacatggtgctgctggagcagccccccgcccaggcccccctggtgaccggcctgggcgccctgcccctgcacgcccagagcctggtgggcgccgacagagtgagccccagcatccacaagctgagacagcacagacccctgggcagaacccagagcgcccccctgccccagaacgcccaggccctgcagcacctggtgatccagcagcagcaccagcagttcctggagaagcacaagcagcagttccagcagcagcagctgcagatgaacaagatcatccccaagcccagcgagcccgccagacagcccgagagccaccccgaggagaccgaggaggagctgagagagcaccaggccctgctggacgagccctacctggacagactgcccggccagaaggaggcccacgcccaggccggcgtgcaggtgaagcaggagcccatcgagagcgacgaggaggaggccgagccccccagagaggtggagcccggccagagacagcccagcgagcaggagctgctgttcagacagcaggccctgctgctggagcagcagagaatccaccagctgagaaactaccaggccagcatggaggccgccggcatccccgtgagcttcggcggccacagacccctgagcagagcccagagcagccccgccagcgccaccttccccgtgagcgtgcaggagccccccaccaagcccagattcaccaccggcctggtgtacgacaccctgatgctgaagcaccagtgcacctgcggcagcagcagcagccaccccgagcacgccggcagaatccagagcatctggagcagactgcaggagaccggcctgagaggcaagtgcgagtgcatcagaggcagaaaggccaccctggaggagctgcagaccgtgcacagcgaggcccacaccctgctgtacggcaccaaccccctgaacagacagaagctggacagcaagaagctgctgggcagcctggccagcgtgttcgtgagactgccctgcggcggcgtgggcgtggacagcgacaccatctggaacgaggtgcacagcgccggcgccgccagactggccgtgggctgcgtggtggagctggtgttcaaggtggccaccggcgagctgaagaacggcttcgccgtggtgagaccccccggccaccacgccgaggagagcacccccatgggcttctgctacttcaacagcgtggccgtggccgccaagctgctgcagcagagactgagcgtgagcaagatcctgatcgtggactgggacgtgcaccacggcaacggcacccagcaggccttctacagcgaccccagcgtgctgtacatgagcctgcacagatacgacgacggcaacttcttccccggcagcggcgcccccgacgaggtgggcaccggccccggcgtgggcttcaacgtgaacatggccttcaccggcggcctggacccccccatgggcgacgccgagtacctggccgccttcagaaccgtggtgatgcccatcgccagcgagttcgcccccgacgtggtgctggtgagcagcggcttcgacgccgtggagggccaccccacccccctgggcggctacaacctgagcgccagatgcttcggctacctgaccaagcagctgatgggcctggccggcggcagaatcgtgctggccctggagggcggccacgacctgaccgccatctgcgacgccagcgaggcctgcgtgagcgccctgctgggcaacgagctggaccccctgcccgagaaggtgctgcagcagagacccaacgccaacgccgtgagaagcatggagaaggtgatggagatccacagcaagtactggagatgcctgcagagaaccaccagcaccgccggcagaagcctgatcgaggcccagacctgcgagaacgaggaggccgagaccgtgaccgccatggccagcctgagcgtgggcgtgaagcccgccgagaagagacccgacgaggagcccatggaggaggagccccccctgtag

SEQ ID NO: 161264 - DNA, 1941 bp, Artificial Sequence
  derived and/or modified sequence
atgctggccatgaagcaccagcaggagctgctggagcaccagagaaagctggagagacacagacaggagcaggagctggagaagcagcacagagagcagaagctgcagcagctgaagaacaaggagaagggcaaggagagcgccgtggccagcaccgaggtgaagatgaagctgcaggagttcgtgctgaacaagaagaaggccctggcccacagaaacctgaaccactgcatcagcagcgaccccagatactggtacggcaagacccagcacagcagcctggaccagagcagccccccccagagcggcgtgagcaccagctacaaccaccccgtgctgggcatgtacgacgccaaggacgacttccccctgagaaagaccgccagcgagcccaacctgaagctgagaagcagactgaagcagaaggtggccgagagaagaagcagccccctgctgagaagaaaggacggccccgtggtgaccgccctgaagaagagacccctggacgtgaccgacagcgcctgcagcagcgcccccggcagcggccccagcagccccaacaacagcagcggcagcgtgagcgccgagaacggcatcgcccccgccgtgcccagcatccccgccgagaccagcctggcccacagactggtggccagagagggcagcgccgcccccctgcccctgtacaccagccccagcctgcccaacatcaccctgggcctgcccgccaccggccccagcgccggcaccgccggccagcaggacgccgagagactgaccctgcccgccctgcagcagagactgagcctgttccccggcacccacctgaccccctacctgagcaccagccccctggagagagacggcggcgccgcccacagccccctgctgcagcacatggtgctgctggagcagccccccgcccaggcccccctggtgaccggcctgggcgccctgcccctgcacgcccagagcctggtgggcgccgacagagtgagccccagcatccacaagctgagacagcacagacccctgggcagaacccagagcgcccccctgccccagaacgcccaggccctgcagcacctggtgatccagcagcagcaccagcagttcctggagaagcacaagcagcagttccagcagcagcagctgcagatgaacaagatcatccccaagcccagcgagcccgccagacagcccgagagccaccccgaggagaccgaggaggagctgagagagcaccaggccctgctggacgagccctacctggacagactgcccggccagaaggaggcccacgcccaggccggcgtgcaggtgaagcaggagcccatcgagagcgacgaggaggaggccgagccccccagagaggtggagcccggccagagacagcccagcgagcaggagctgctgttcagacagcaggccctgctgctggagcagcagagaatccaccagctgagaaactaccaggccagcatggaggccgccggcatccccgtgagcttcggcggccacagacccctgagcagagcccagagcagccccgccagcgccaccttccccgtgagcgtgcaggagccccccaccaagcccagattcaccaccggcctggtgtacgacaccctgatgctgaagcaccagtgcacctgcggcagcagcagcagccaccccgagcacgccggcagaatccagagcatctggagcagactgcaggagaccggcctgagaggcaagtgcgagtgcatcagaggcagaaaggccaccctggaggagctgcagaccgtgcacagcgaggcccacaccctgctgtacggcaccaaccccctgaacagacagaagctggacagcaagaagctgctgggcagcctggccagcgtgttcgtgagactgccctgcggcggcgtgggcgtgagcgtgcccctgatgtgcaagtag

SEQ ID NO: 161265 - DNA, 2007 bp, Artificial Sequence
  derived and/or modified sequence
atggtgctgctggagcagccccccgcccaggcccccctggtgaccggcctgggcgccctgcccctgcacgcccagagcctggtgggcgccgacagagtgagccccagcatccacaagctgagacagcacagacccctgggcagaacccagagcgcccccctgccccagaacgcccaggccctgcagcacctggtgatccagcagcagcaccagcagttcctggagaagcacaagcagcagttccagcagcagcagctgcagatgaacaagatcatccccaagcccagcgagcccgccagacagcccgagagccaccccgaggagaccgaggaggagctgagagagcaccaggccctgctggacgagccctacctggacagactgcccggccagaaggaggcccacgcccaggccggcgtgcaggtgaagcaggagcccatcgagagcgacgaggaggaggccgagccccccagagaggtggagcccggccagagacagcccagcgagcaggagctgctgttcagacagcaggccctgctgctggagcagcagagaatccaccagctgagaaactaccaggccagcatggaggccgccggcatccccgtgagcttcggcggccacagacccctgagcagagcccagagcagccccgccagcgccaccttccccgtgagcgtgcaggagccccccaccaagcccagattcaccaccggcctggtgtacgacaccctgatgctgaagcaccagtgcacctgcggcagcagcagcagccaccccgagcacgccggcagaatccagagcatctggagcagactgcaggagaccggcctgagaggcaagtgcgagtgcatcagaggcagaaaggccaccctggaggagctgcagaccgtgcacagcgaggcccacaccctgctgtacggcaccaaccccctgaacagacagaagctggacagcaagaagctgctgggcagcctggccagcgtgttcgtgagactgccctgcggcggcgtgggcgtggacagcgacaccatctggaacgaggtgcacagcgccggcgccgccagactggccgtgggctgcgtggtggagctggtgttcaaggtggccaccggcgagctgaagaacggcttcgccgtggtgagaccccccggccaccacgccgaggagagcacccccatgggcttctgctacttcaacagcgtggccgtggccgccaagctgctgcagcagagactgagcgtgagcaagatcctgatcgtggactgggacgtgcaccacggcaacggcacccagcaggccttctacagcgaccccagcgtgctgtacatgagcctgcacagatacgacgacggcaacttcttccccggcagcggcgcccccgacgaggtgggcaccggccccggcgtgggcttcaacgtgaacatggccttcaccggcggcctggacccccccatgggcgacgccgagtacctggccgccttcagaaccgtggtgatgcccatcgccagcgagttcgcccccgacgtggtgctggtgagcagcggcttcgacgccgtggagggccaccccacccccctgggcggctacaacctgagcgccagatgcttcggctacctgaccaagcagctgatgggcctggccggcggcagaatcgtgctggccctggagggcggccacgacctgaccgccatctgcgacgccagcgaggcctgcgtgagcgccctgctgggcaacgagctggaccccctgcccgagaaggtgctgcagcagagacccaacgccaacgccgtgagaagcatggagaaggtgatggagatccacagcaagtactggagatgcctgcagagaaccaccagcaccgccggcagaagcctgatcgaggcccagacctgcgagaacgaggaggccgagaccgtgaccgccatggccagcctgagcgtgggcgtgaagcccgccgagaagagacccgacgaggagcccatggaggaggagccccccctgtag

SEQ ID NO: 161266 - DNA, 3255 bp, Artificial Sequence
  derived and/or modified sequence
atgtccagccaatcacacccagatggcttgtctgggcgtgatcagcccgttgagctgctcaacccagcgagagtgaaccacatgccttcgaccgtagacgtggccacagccctcccactgcaagtggcgcccagcgctgtgcctatggacctccgcctggatcaccaattttcactgccagtggccgaaccagctctgagagaacagcaactgcagcaggaacttttggcattgaagcaaaagcagcagatccagcgacagattctgatcgccgagtttcagaggcaacatgagcagctgtcccgccagcacgaagcacaactgcacgagcacataaagcagcagcaggagatgctcgcaatgaaacaccagcaggaactacttgagcatcaaaggaagctcgagagacatcggcaggagcaggagctcgaaaagcagcacagagagcagaaactgcagcagttgaaaaacaaggagaagggaaaagagagcgcagtggcctcgacagaggtgaaaatgaaactccaagagttcgtgcttaataaaaaaaaagcactggcccaccggaaccttaatcattgcattagctccgatcctaggtattggtatgggaaaacccaacattccagtctggatcaatcttcacccccacagagcggcgtcagtaccagctataatcaccccgtcttgggcatgtacgatgccaaggatgatttccccctccgaaagacagccagcgaaccaaatcttaagctgcggtcaaggttgaagcagaaggtcgcagaacgccgatccagccccttgttgaggagaaaggacggtccagtggtgaccgctctgaaaaaaaggccactggacgtcacagacagtgcatgtagctccgcccctggctcgggaccttcttcccctaacaactccagtggctcagtcagcgccgaaaatgggatcgcgccagccgtgccgtccatccctgctgaaaccagtctggcccaccggcttgtggccagggagggctcggctgcgccactgcctctgtatacctcacccagccttcctaacatcacattgggcttgcctgcaactgggccttcggccggcaccgctgggcagcaagacgctgagcgcctgacgttgccagccctccagcagcggctttcactttttcccggaacccacctcacaccgtacctcagcacttccccactagagagggacggtggagcggcacactcacctctgctccagcacatggttctcttggagcaacctcccgctcaggccccactggtaacaggtctgggcgccttacctctccacgcacagtcactcgtcggggccgaccgagtgtccccatccattcacaaacttagacagcatcgaccccttggccggacacagagcgccccactgccccaaaacgcccaggcccttcagcacttggttatccaacagcaacaccaacagtttctcgaaaagcacaagcagcagttccagcagcaacagctacaaatgaacaaaatcatccctaaacctagtgaacccgccaggcagcccgagtctcaccctgaagagacagaggaggaactgcgtgagcatcaagcactgttggacgagccgtacctcgaccgcctccccggccagaaggaggcccatgcccaggccggcgtgcaggtgaagcaggagcctatagagagcgatgaggaagaggctgagccacctcgcgaggtggaacctggacagagacaaccaagtgagcaggagctgttattcaggcagcaagccctgctgctcgagcaacagcgcatccatcaactccggaattaccaagccagtatggaggcagctggaatcccggtgagtttcggcggccacagaccgctctctagagctcagtctagtcccgcttccgccactttcccagtgagcgtacaggaaccacctacaaagccacgctttaccactggattggtgtatgacaccttgatgctgaaacatcaatgcacttgcggcagttcttcttcccatcccgaacacgcaggtcggattcagtctatttggagcaggctgcaggagaccggacttagagggaaatgcgaatgtatcagagggcgtaaagccaccctggaagagctgcaaacagtccatagcgaggcacatacgctcttatacggcacaaacccactgaaccggcagaagctggactcaaagaagctcttagggtccctcgcatctgtattcgtcaggctaccctgcggcggagtcggagtggactctgacacaatctggaatgaagtgcacagtgcaggtgcggcgcgtcttgctgtgggatgtgtcgtcgagttagtgttcaaagtggccacaggggagctgaaaaatggatttgcagtggtacggccccctggacatcacgccgaggagagcactcccatgggattctgctactttaattctgtagccgttgctgcgaagctactgcagcagcgcctctcagtgtccaagatactaatagtagactgggacgtgcaccatggcaacggcacgcagcaggcattctactcggacccgtccgtgctgtacatgagtctgcaccgctatgacgacgggaacttctttccaggatccggtgcccctgacgaagtaggcacgggcccaggggttgggttcaatgtgaatatggcgttcacagggggcttggatcccccaatgggagacgcagagtacctcgcggctttccgcaccgtagttatgcccattgcatcagagttcgctcctgacgtagtgctcgtttcctcgggctttgacgcggtggaagggcaccctactccacttgggggttataatctgtcagccagatgttttggataccttactaaacagctcatgggacttgctggtggcagaatcgtgctagccctcgagggagggcacgacttgacggccatctgcgatgcatccgaagcatgcgtaagcgcactcctgggtaacgagctcgatcctctccctgagaaggtgttacagcagcgacccaatgctaacgccgtgcgcagcatggagaaggttatggaaattcattcaaaatactggcgatgcctgcagaggactacatccaccgcaggccgttctctcattgaagcgcagacatgtgagaacgaagaagccgaaacagtgaccgccatggcttctctgagcgttggggtgaagccagccgaaaagagacccgacgaggagcccatggaggaggagccacccttatag

SEQ ID NO: 161267 - DNA, 1941 bp, Artificial Sequence
  derived and/or modified sequence
atgctcgctatgaaacatcagcaggaactgctggagcatcaaaggaagctggaacgccaccggcaggagcaggagctcgagaaacagcatagagagcagaaactgcaacagctcaagaataaggaaaagggcaaggaaagtgcagtggcttccacagaggtcaagatgaaacttcaagaattcgtcttgaacaaaaaaaaagctttggctcatcgcaacttaaatcactgtatctcttcagatcccagatactggtatggtaaaacccaacacagcagtcttgatcagtcaagcccaccccagtctggcgtgagcacgtcctataaccaccctgtgctcggtatgtacgacgctaaggacgacttcccattgcgcaaaacggcttccgagcccaacctgaaactgagatctcgtctcaagcagaaagtagcagaaaggcgtagttctcccctgctgagacggaaagacggacctgtggtcactgcgttaaagaagcgcccacttgatgtgacagactccgcttgttcatccgcccctggtagtggacctagctcccctaataattcatctggttctgtatccgccgagaacggtatagcacctgcagtcccttccatccccgctgagacctccctcgcccacaggctggtggcaagagagggctcagccgccccactccccctctatacctcccctagcttacccaacatcactctaggcctgcccgctactggaccatcagccggaacagcagggcagcaggacgccgagagattaactcttccagccttacagcaacggctctcgctgtttcctggaactcatctcaccccctatcttagcaccagccctctggaacgcgacgggggagctgcccattctcctctgttgcagcatatggtgcttttagaacagcctcctgcacaggctcccctcgtcaccggcctcggcgccctgccactgcacgctcagtccctcgtcggcgccgaccgggttagcccttccatccacaagctacggcaacataggcctttaggccggacccagagtgcccccctgccccagaatgcccaggccttacaacatttagtcatccagcagcagcaccagcaatttctggaaaagcacaagcagcagtttcaacagcagcagctacagatgaacaagatcattccaaaaccatcggagcccgcgagacagccagagtcacatcctgaggagacggaagaggaactgagagagcaccaagcactgctggacgaaccctatcttgatcggctgcccgggcagaaagaggcccatgcccaagccggagtacaggtgaagcaagagcccatcgagagcgatgaagaggaagccgagccacctagggaagtggagcctggccagaggcaacctagcgaacaagaactgctcttccgtcagcaggccctcctgctggagcagcaacgcatacaccagctgaggaattaccaagcgagtatggaggctgcaggtatcccagtctcctttggcgggcatcggccactgagccgcgcacagtcgagcccagcgtcggcgacctttccagtaagcgtgcaggaaccccctacgaagccccggttcaccacaggcctcgtctatgacacgctgatgctgaaacaccaatgtacctgtggttcatcttcatctcaccccgagcatgccgggcggatccagagcatttggtctagactccaggaaacgggcctccgcggtaagtgcgagtgtattcgcggccggaaggcaacccttgaagaactccagacagttcacagcgaggcccacactcttctctatggaaccaatcccctaaacaggcagaaacttgactctaaaaagcttctggggtccctcgcctcggtgtttgtgcgcttaccttgcggcggggtgggtgtgtctgtgccattaatgtgtaaatag

SEQ ID NO: 161268 - DNA, 2007 bp, Artificial Sequence
  derived and/or modified sequence
atggtcttgctggagcagcctcccgcccaggccccacttgtcactggtctgggcgctctgcctctgcatgcccagagtcttgtcggcgccgaccgggtctccccttcgattcataaactcagacagcacagacccctaggacgcacccaaagcgcaccactgccacaaaacgctcaggctctgcagcatttagtgatccagcagcagcatcagcaatttctggagaaacacaaacagcagtttcagcagcagcaactgcagatgaacaagatcatccccaaacctagtgagcccgcccgccaaccggagtcacatcctgaggaaacagaagaggagctcagagagcaccaggccttactagacgagccttacttagacaggctgcccgggcagaaagaggcccatgcccaggcgggcgtgcaggttaagcaggagccgatagaatctgatgaggaagaagcagagcctcctcgcgaggttgaacctggtcagcgccaaccatcagagcaggagctcttgttcagacaacaagcactgcttctggagcaacagagaattcaccaacttcgtaactatcaggcgtccatggaggctgccggtatccctgtgagcttcggggggcaccgtcccctgtccagagcacagtcgtcgcccgccagtgccactttccctgttagcgtccaggaacccccaactaagccccgctttactactggcttggtctatgatacattaatgctgaaacatcagtgcacgtgtgggagttcaagttcccaccccgagcacgctgggagaatacagtccatttggtcacggctgcaagagacgggactaagagggaaatgcgagtgtattcgcggcagaaaggcaaccctcgaagagcttcagaccgtgcactccgaagctcacacactcctctatggcacgaacccactcaacagacagaagttagacagcaagaaactgctcggatcactggctagcgtttttgtcaggctgccttgtgggggagtgggcgtcgatagcgacacaatttggaacgaggtacactccgcaggggcagcgcgattagccgtggggtgcgtggttgaactggtgtttaaggtcgccaccggcgagcttaaaaacggctttgcagtggtgcgacctcccggccaccacgctgaggaatcaactcccatgggattttgctacttcaattctgtggcagtggccgctaagttgctgcaacagcgcctttctgtgagcaagattctgattgtggactgggatgtgcaccacgggaacggcacacagcaggccttctactcagacccctctgtattgtacatgagcctgcatcgttatgatgatggaaactttttcccaggtagcggtgctcccgatgaagtaggcactggacccggtgttggctttaacgtcaacatggcctttacaggcggcctggaccctcccatgggcgatgccgaatatcttgcggctttccggactgtggtgatgccaatcgctagtgaattcgcaccagatgtggttttggtctcgtccggatttgacgcagtggagggacatcccacaccactaggcgggtacaacctctccgcgaggtgtttcgggtacttaactaaacagctcatgggactagctggcgggaggatcgtgttggccctggagggggggcacgatttgactgccatatgcgacgcctcagaagcttgtgtgagcgctttactgggcaacgagctggatccactgccagagaaagtgctccaacagcggccaaacgcaaacgccgtgcggtcgatggagaaggtgatggaaattcattccaaatattggcgctgcctccagaggaccaccagcaccgctggccgcagccttatcgaggcacaaacctgtgagaatgaggaagcggaaactgttaccgctatggcatctctctccgtaggtgtgaagcccgccgagaagcgcccagatgaggagccgatggaggaagaaccccccttgtag

SEQ ID NO: 161269 - DNA, 8976 bp, Artificial Sequence
  derived and/or modified sequence
ggaggttgtggggccgccgccgcggagcaccgtccccgccgccgcccgagcccgagcccgagcccgcgcacccgcccgcgccgccgccgccgccgcccgaacagcctcccagcctgggcccccggcggcgccgtggccgcgtcccggctgtcgccgcccgagcccgagcccgcgcgccggcgggtggcggcgcaggctgaggagatgcggcgcggagcgccggagcagggctagagccggccgccgccgcccgccgcggtaagcgcagccccggcccggcgcccgcgggccattgtccgccgcccgccccgcgccccgcgcagcctgcaggccttggagcccgcggcaggtggacgccgccggtccacacccgccccgcgcgcggccgtgggaggcgggggccagcgctggccgcgcgccgtgggacccgccggtccccagggccgcccggccccttctggacctttccacccgcgccgcgaggcggcttcgcccgccggggcgggggcgcgggggtgggcacggcaggcagcggcgccgtctcccggtgcggggcccgcgccccccgagcaggttcatctgcagaagccagcggacgcctctgttcaacttgtgggttacctggctcatgagaccttgccggcgaggctcggcgcttgaacgtctgtgacccagccctcaccgtcccggtacttgtatgtgttggtgggagtttggagctcgttggagctatcgtttccgtggaaattttgagccatttcgaatcacttaaaggagtggacattgctagcaatgagctcccaaagccatccagatggactttctggccgagaccagccagtggagctgctgaatcctgcccgcgtgaaccacatgcccagcacggtggatgtggccacggcgctgcctctgcaagtggccccctcggcagtgcccatggacctgcgcctggaccaccagttctcactgcctgtggcagagccggccctgcgggagcagcagctgcagcaggagctcctggcgctcaagcagaagcagcagatccagaggcagatcctcatcgctgagttccagaggcagcacgagcagctctcccggcagcacgaggcgcagctccacgagcacatcaagcaacaacaggagatgctggccatgaagcaccagcaggagctgctggaacaccagcggaagctggagaggcaccgccaggagcaggagctggagaagcagcaccgggagcagaagctgcagcagctcaagaacaaggagaagggcaaagagagtgccgtggccagcacagaagtgaagatgaagttacaagaatttgtcctcaataaaaagaaggcgctggcccaccggaatctgaaccactgcatttccagcgaccctcgctactggtacgggaaaacgcagcacagttcccttgaccagagttctccaccccagagcggagtgtcgacctcctataaccacccggtcctgggaatgtacgacgccaaagatgacttccctcttaggaaaacagcttctgaaccgaatctgaaattacggtccaggctaaagcagaaagtggccgaaagacggagcagccccctgttacgcaggaaagacgggccagtggtcactgctctaaaaaagcgtccgttggatgtcacagactccgcgtgcagcagcgccccaggctccggacccagctcacccaacaacagctccgggagcgtcagcgcggagaacggtatcgcgcccgccgtccccagcatcccggcggagacgagtttggcgcacagacttgtggcacgagaaggctcggccgctccacttcccctctacacatcgccatccttgcccaacatcacgctgggcctgcctgccaccggcccctctgcgggcacggcgggccagcaggacgccgagagactcacccttcccgccctccagcagaggctctcccttttccccggcacccacctcactccctacctgagcacctcgcccttggagcgggacggaggggcagcgcacagccctcttctgcagcacatggtcttactggagcagccgccggcacaagcacccctcgtcacaggcctgggagcactgcccctccacgcacagtccttggttggtgcagaccgggtgtccccctccatccacaagctgcggcagcaccgcccactggggcggacccagtcggccccgctgccccagaacgcccaggctctgcagcacctggtcatccagcagcagcatcagcagtttctggagaaacacaagcagcagttccagcagcagcaactgcagatgaacaagatcatccccaagccaagcgagccagcccggcagccggagagccacccggaggagacggaggaggagctccgtgagcaccaggctctgctggacgagccctacctggaccggctgccggggcagaaggaggcgcacgcacaggccggcgtgcaggtgaagcaggagcccattgagagcgatgaggaagaggcagagcccccacgggaggtggagccgggccagcgccagcccagtgagcaggagctgctcttcagacagcaagccctcctgctggagcagcagcggatccaccagctgaggaactaccaggcgtccatggaggccgccggcatccccgtgtccttcggcggccacaggcctctgtcccgggcgcagtcctcacccgcgtctgccaccttccccgtgtctgtgcaggagccccccaccaagccgaggttcacgacaggcctcgtgtatgacacgctgatgctgaagcaccagtgcacctgcgggagtagcagcagccaccccgagcacgccgggaggatccagagcatctggtcccgcctgcaggagacgggcctccggggcaaatgcgagtgcatccgcggacgcaaggccaccctggaggagctacagacggtgcactcggaagcccacaccctcctgtatggcacgaaccccctcaaccggcagaaactggacagtaagaaacttctaggctcgctcgcctccgtgttcgtccggctcccttgcggtggtgttggggtggacagtgacaccatatggaacgaggtgcactcggcgggggcagcccgcctggctgtgggctgcgtggtagagctggtcttcaaggtggccacaggggagctgaagaatggctttgctgtggtccgcccccctggacaccatgcggaggagagcacgcccatgggcttttgctacttcaactccgtggccgtggcagccaagcttctgcagcagaggttgagcgtgagcaagatcctcatcgtggactgggacgtgcaccatggaaacgggacccagcaggctttctacagcgaccccagcgtcctgtacatgtccctccaccgctacgacgatgggaacttcttcccaggcagcggggctcctgatgaggtgggcacagggcccggcgtgggtttcaacgtcaacatggctttcaccggcggcctggacccccccatgggagacgctgagtacttggcggccttcagaacggtggtcatgccgatcgccagcgagtttgccccggatgtggtgctggtgtcatcaggcttcgatgccgtggagggccaccccacccctcttgggggctacaacctctccgccagatgcttcgggtacctgacgaagcagctgatgggcctggctggcggccggattgtcctggccctcgagggaggccacgacctgaccgccatttgcgacgcctcggaagcatgtgtttctgccttgctgggaaacgagcttgatcctctcccagaaaaggttttacagcaaagacccaatgcaaacgctgtccgttccatggagaaagtcatggagatccacagcaagtactggcgctgcctgcagcgcacaacctccacagcggggcgttctctgatcgaggctcagacttgcgagaacgaagaagccgagacggtcaccgccatggcctcgctgtccgtgggcgtgaagcccgccgaaaagagaccagatgaggagcccatggaagaggagccgcccctgtagcactccctcgaagctgctgttctcttgtctgtctgtctctgtcttgaagctcagccaagaaactttcccgtgtcacgcctgcgtcccaccgtggggctctcttggagcacccagggacacccagcgtgcaacagccacgggaagcctttctgccgcccaggcccacaggtctcgagacgcacatgcacgcctgggcgtggcagcctcacagggaacacgggacagacgccggcgacgcgcagacacacggacacgcggaagccaagcacactctggcgggtcccgcaagggacgccgtggaagaaaggagcctgtggcaacaggcggccgagctgccgaattcagttgacacgaggcacagaaaacaaatatcaaagatctaataatacaaaacaaacttgattaaaactggtgcttaaagtttattacccacaactccacagtctctgtgtaaaccactcgactcatcttgtagcttatttttttttaaagaggacgttttctacggctgtggcccgcctctgtgaaccatagcggtgtgcggcggggggtctgcacccgggtgggggacagagggacctttaaagaaaacaaaactggacagaaacaggaatgtgagctgggggagctggcttgagtttctcaaaagccatcggaagatgcgagtttgtgcctttttttttattgctctggtggatttttgtggctgggttttctgaagtctgaggaacaatgccttaagaaaaaacaaacagcaggaatcggtgggacagtttcctgtggccagccgagcctggcagtgctggcaccgcgagctggcctgacgcctcaagcacgggcaccagccgtcatctccggggccaggggctgcagcccggcggtccctgttttgctttattgctgtttaagaaaaatggaggtagttccaaaaaagtggcaaatcccgttggaggttttgaagtccaacaaattttaaacgaatccaaagtgttctcacacgtcacatacgattgagcatctccatctggtcgtgaagcatgtggtaggcacacttgcagtgttacgatcggaatgctttttattaaaagcaagtagcatgaagtattgcttaaattttaggtataaataaatatatatatgtataatatatattccaatgtattccaagctaagaaacttacttgattcttatgaaatcttgataaaatatttataatgcatttatagaaaaagtatatatatatatataaaatgaatgcagattgcgaaggtccctgcaaatggatggcttgtgaatttgctctcaaggtgcttatggaaagggatcctgattgattgaaattcatgttttctcaagctccagattggctagatttcagatcgccaacacattcgccactgggcaactaccctacaagtttgtactttcattttaattattttctaacagaaccgctcccgtctccaagccttcatgcacatatgtacctaatgagtttttatagcaaagaatataaatttgctgttgatttttgtatgaattttttcacaaaaagatcctgaataagcattgttttatgaattttacatttttcctcaccatttagcaattttctgaatggtaataatgtctaaatctttttcctttctgaattcttgcttgtacatttttttttacctttcaaaggtttttaattatttttgtttttatttttgtacgatgagttttctgcagcgtacagaattgttgctgtcagattctattttcagaaagtgagaggagggaccgtaggtcttttcggagtgacaccaacgattgtgtctttcctggtctgtcctaggagctgtataaagaagcccaggggctctttttaactttcaacactagtagtattacgaggggtggtgtgtttttcccctccgtggcaagggcagggagggttgcttaggatgcccggccaccctgggaggcttgccagatgccgggggcagtcagcattaatgaaactcatgtttaaacttctctgaccacatcgtcaggatagaattctaacttgagttttccaaagaccttttgagcatgtcagcaatgcatggggcacacgtggggctctttacccacttgggtttttccactgcagccacgtggccagccctggattttggagcctgtggctgcaaggaacccagggacccttgttgcctggtgaacctgcagggagggtatgattgcctgaccaggacagccagtctttactctttttctcttcaacagtaactgacagtcacgttttactggtaacttattttccagcacatgaagccaccagtttcattccaaagtgtatattgggttcagacttgggggcagaagttcagacacaccgtgctcaggagggacccagagccgagtttcggagtttggtaaagtttacagggtagcttctgaaattaactcaaacttttgaccaaatgagtgcagattcttggattcacttggtcactgggctgctgatggtcagctctgagacagtggtttgagagcaggcagaacggtcttgggacttgtttgactttcccctccctggtggccactctttgctctgaagcccagattggcaagaggagctggtccattccccattcatggcacagagcagtggcagggcccagctagcaggctcttctggcctccttggcctcattctctgcatagccctctggggatcctgccacctgccctcttaccccgccgtggcttatggggaggaatgcatcatctcactttttttttttaagcagatgatgggataacatggactgctcagtggccaggttatcagtggggggacttaattctaatctcattcaaatggagacgccctctgcaaaggcctggcagggggaggcacgtttcatctgtcagctcactccagcttcacaaatgtgctgagagcattactgtgtagccttttctttgaagacacactcggctcttctccacagcaagcgtccagggcagatggcagaggatctgcctcggcgtctgcaggcgggaccacgtcagggagggttccttcatgtgttctccctgtgggtccttggacctttagcctttttcttcctttgcaaaggccttgggggcactggctgggagtcagcaagcgagcactttatatccctttgagggaaaccctgatgacgccactgggcctcttggcgtctgccctgccctcgcggcttcccgccgtgccgcagcgtgcccacgtgcccacgccccaccagcaggcggctgtcccggaggccgtggcccgctgggactggccgcccctccccagcgtcccagggctctggttctggagggccactttgtcaaggtgtttcagtttttctttacttcttttgaaaatctgtttgcaaggggaaggaccatttcgtaatggtctgacacaaaagcaagtttgatttttgcagcactagcaatggactttgttgtttttctttttgatcagaacattccttctttactggtcacagccacgtgctcattccattcttctttttgtagactttgggcccacgtgttttatgggcattgatacatatataaatatatagatataaatatatatgaatatatttttttaagtttcctacacctggaggttgcatggactgtacgaccggcatgactttatattgtatacagattttgcacgccaaactcggcagctttggggaagaagaaaaatgcctttctgttcccctctcatgacatttgcagatacaaaagatggaaatttttctgtaaaacaaaaccttgaaggagaggagggcggggaagtttgcgtcttattgaacttattcttaagaaattgtactttttattgtaagaaaaataaaaaggactacttaaacatttgtcatattaagaaaaaaagtttatctagcacttgtgacataccaataatagagtttattgtatttatgtggaaacagtgttttagggaaactactcagaattcacagtgaactgcctgtctctctcgagttgatttggaggaattttgttttgttttgttttgtttgtttccttttatctccttccacgggccaggcgagcgccgcccgccctcactggccttgtgacggtttattctgattgagaactgggcggactcgaaagagtccccttttccgcacagctgtgttgactttttaattacttttaggtgatgtatggctaagatttcactttaagcagtcgtgaactgtgcgagcactgtggtttacaattatactttgcatcgaaaggaaaccatttcttcattgtaacgaagctgagcgtgttcttagctcggcctcactttgtctctggcattgattaaaagtctgctattgaaagaaaaagaaagcgaacagtttttgtttgttttttttgccgtgtgtgctccatagtggaggcgctattttccaattgatgagaatgacaaacatatataatctatctatctatctatctatctatctatctatacagggggcttgaaccttactcacccaagagcttcttacggaatgtggtagaaaaccaagttgtaacgacactgtaacctacctgatgcctgttcgcgcccgccgtgagctgcgcactggccgtggccaccattcacctctgtaatttaatccgtttctcttggattgtctggacgtgcccgatggttctttcttttgctcagtggagttggaggttttgtgtttggttttctcattcttgtcttgttttgtgtgggtggattttcaccgaccaatgatatcctcttctgacggtcaccttctttccacttcactggagtccagtattctgtaccacatcacgcaacgtgttatcttgtggtgtaaataaagactgcgttacttgccctccca

SEQ ID NO: 161270 - DNA, 2631 bp, Artificial Sequence
  derived and/or modified sequence
aaagtcctgtttttcgaagcctgaatttggtattccagtgacgcacctgccctccagaagccaactgagggttcccatggagaataagtacctattcacgatgctaggatgtggggcaggagtgaagaagagtgaaatggccatcttcccttgtggttccagcattttccgagcatgccgagggcagagggtccctgtgtcttctttgaagatcaagaaacaggcctgacgtctcagcttgtgctatgaacagggagtgttgaaatccagtttgtcctgatggctttcactttgcaggctttgctctacagcaacaacaggagatgctggccatgaagcaccagcaggagctgctggaacaccagcggaagctggagaggcaccgccaggagcaggagctggagaagcagcaccgggagcagaagctgcagcagctcaagaacaaggagaagggcaaagagagtgccgtggccagcacagaagtgaagatgaagttacaagaatttgtcctcaataaaaagaaggcgctggcccaccggaatctgaaccactgcatttccagcgaccctcgctactggtacgggaaaacgcagcacagttcccttgaccagagttctccaccccagagcggagtgtcgacctcctataaccacccggtcctgggaatgtacgacgccaaagatgacttccctcttaggaaaacagcttctgaaccgaatctgaaattacggtccaggctaaagcagaaagtggccgaaagacggagcagccccctgttacgcaggaaagacgggccagtggtcactgctctaaaaaagcgtccgttggatgtcacagactccgcgtgcagcagcgccccaggctccggacccagctcacccaacaacagctccgggagcgtcagcgcggagaacggtatcgcgcccgccgtccccagcatcccggcggagacgagtttggcgcacagacttgtggcacgagaaggctcggccgctccacttcccctctacacatcgccatccttgcccaacatcacgctgggcctgcctgccaccggcccctctgcgggcacggcgggccagcaggacgccgagagactcacccttcccgccctccagcagaggctctcccttttccccggcacccacctcactccctacctgagcacctcgcccttggagcgggacggaggggcagcgcacagccctcttctgcagcacatggtcttactggagcagccgccggcacaagcacccctcgtcacaggcctgggagcactgcccctccacgcacagtccttggttggtgcagaccgggtgtccccctccatccacaagctgcggcagcaccgcccactggggcggacccagtcggccccgctgccccagaacgcccaggctctgcagcacctggtcatccagcagcagcatcagcagtttctggagaaacacaagcagcagttccagcagcagcaactgcagatgaacaagatcatccccaagccaagcgagccagcccggcagccggagagccacccggaggagacggaggaggagctccgtgagcaccaggctctgctggacgagccctacctggaccggctgccggggcagaaggaggcgcacgcacaggccggcgtgcaggtgaagcaggagcccattgagagcgatgaggaagaggcagagcccccacgggaggtggagccgggccagcgccagcccagtgagcaggagctgctcttcagacagcaagccctcctgctggagcagcagcggatccaccagctgaggaactaccaggcgtccatggaggccgccggcatccccgtgtccttcggcggccacaggcctctgtcccgggcgcagtcctcacccgcgtctgccaccttccccgtgtctgtgcaggagccccccaccaagccgaggttcacgacaggcctcgtgtatgacacgctgatgctgaagcaccagtgcacctgcgggagtagcagcagccaccccgagcacgccgggaggatccagagcatctggtcccgcctgcaggagacgggcctccggggcaaatgcgagtgcatccgcggacgcaaggccaccctggaggagctacagacggtgcactcggaagcccacaccctcctgtatggcacgaaccccctcaaccggcagaaactggacagtaagaaacttctaggctcgctcgcctccgtgttcgtccggctcccttgcggtggtgttggggtaagtgttcctttaatgtgtaaataatgtcctgtttcttctcgagtcccagtggtcacagaaatcgcagccttgcttccctcaaagtgaataattgctgccaggtgttttccatacgcaggggctgcccatgtgcggcttcaaaggccgtgtgagccgagagcgttttgatcgccgactcgggcacctttctctggggaaggttgtctggcgcaggtggctggggctctggggtgcagtggctctcgctttaagaaacaggatcctgtatgcagccagcatctcatccccttcgaagtctgtggcagtaatctgctcacatcaggccacgagtatggtgcgggtaggatgcgtgcttctgtattctgtacctagtttccacccgaagctacag

SEQ ID NO: 161271 - DNA, 2707 bp, Artificial Sequence
  derived and/or modified sequence
atatcaggccagctgtgaccctagaggagtaggccatatcagccagccacatccctggagccgtgggctgtattggtccagctgtgaccctagagcttctgaaccgaatctgaaattacggtccaggctaaagcagaaagtggccgaaagacggagcagccccctgttacgcaggaaagacgggccagtggtcactgctctaaaaaagcgtccgttggatgtcacagactccgcgtgcagcagcgccccaggctccggacccagctcacccaacaacagctccgggagcgtcagcgcggagaacggtatcgcgcccgccgtccccagcatcccggcggagacgagtttggcgcacagacttgtggcacgagaaggctcggccgctccacttcccctctacacatcgccatccttgcccaacatcacgctgggcctgcctgccaccggcccctctgcgggcacggcgggccagcaggacgccgagagactcacccttcccgccctccagcagaggctctcccttttccccggcacccacctcactccctacctgagcacctcgcccttggagcgggacggaggggcagcgcacagccctcttctgcagcacatggtcttactggagcagccgccggcacaagcacccctcgtcacaggcctgggagcactgcccctccacgcacagtccttggttggtgcagaccgggtgtccccctccatccacaagctgcggcagcaccgcccactggggcggacccagtcggccccgctgccccagaacgcccaggctctgcagcacctggtcatccagcagcagcatcagcagtttctggagaaacacaagcagcagttccagcagcagcaactgcagatgaacaagatcatccccaagccaagcgagccagcccggcagccggagagccacccggaggagacggaggaggagctccgtgagcaccaggctctgctggacgagccctacctggaccggctgccggggcagaaggaggcgcacgcacaggccggcgtgcaggtgaagcaggagcccattgagagcgatgaggaagaggcagagcccccacgggaggtggagccgggccagcgccagcccagtgagcaggagctgctcttcagacagcaagccctcctgctggagcagcagcggatccaccagctgaggaactaccaggcgtccatggaggccgccggcatccccgtgtccttcggcggccacaggcctctgtcccgggcgcagtcctcacccgcgtctgccaccttccccgtgtctgtgcaggagccccccaccaagccgaggttcacgacaggcctcgtgtatgacacgctgatgctgaagcaccagtgcacctgcgggagtagcagcagccaccccgagcacgccgggaggatccagagcatctggtcccgcctgcaggagacgggcctccggggcaaatgcgagtgcatccgcggacgcaaggccaccctggaggagctacagacggtgcactcggaagcccacaccctcctgtatggcacgaaccccctcaaccggcagaaactggacagtaagaaacttctaggctcgctcgcctccgtgttcgtccggctcccttgcggtggtgttggggtggacagtgacaccatatggaacgaggtgcactcggcgggggcagcccgcctggctgtgggctgcgtggtagagctggtcttcaaggtggccacaggggagctgaagaatggctttgctgtggtccgcccccctggacaccatgcggaggagagcacgcccatgggcttttgctacttcaactccgtggccgtggcagccaagcttctgcagcagaggttgagcgtgagcaagatcctcatcgtggactgggacgtgcaccatggaaacgggacccagcaggctttctacagcgaccccagcgtcctgtacatgtccctccaccgctacgacgatgggaacttcttcccaggcagcggggctcctgatgaggtgggcacagggcccggcgtgggtttcaacgtcaacatggctttcaccggcggcctggacccccccatgggagacgctgagtacttggcggccttcagaacggtggtcatgccgatcgccagcgagtttgccccggatgtggtgctggtgtcatcaggcttcgatgccgtggagggccaccccacccctcttgggggctacaacctctccgccagatgcttcgggtacctgacgaagcagctgatgggcctggctggcggccggattgtcctggccctcgagggaggccacgacctgaccgccatttgcgacgcctcggaagcatgtgtttctgccttgctgggaaacgagcttgatcctctcccagaaaaggttttacagcaaagacccaatgcaaacgctgtccgttccatggagaaagtcatggagatccacagcaagtactggcgctgcctgcagcgcacaacctccacagcggggcgttctctgatcgaggctcagacttgcgagaacgaagaagccgagacggtcaccgccatggcctcgctgtccgtgggcgtgaagcccgccgaaaagagaccagatgaggagcccatggaagaggagccgcccctgtagcactccctcgaagctgctgttctcttgtctgtctgtctctgtcttgaagctcagccaagaaactttcccgtgtcacgcctgcgtcccacc

SEQ ID NO: 161272 - DNA, 342 bp, Artificial Sequence
  derived and/or modified sequence
gacgctggagtggggagaagcatcatggttcaacgttcatctgcagaagccagcggacgcctctgttcaacttgtgggttacctggctcatgagaccttgccggcgaggctcggcgcttgaacgtctgtgacccagccctcaccgtcccggtacttgtatgtgttggtgggagtttggagctcgttggagctatcgtttccgtggaaattttgagccatttcgaatcacttaaaggagtggacattgctagcaatgagctcccaaagccatccagatggactttctggccgagaccagccagtggagctgctgaatcctgcccgcgtgaaccacatgcccag

SEQ ID NO: 161273 - DNA, 3255 bp, Artificial Sequence
  derived and/or modified sequence
atgagcagccagagccacccagatggcctgagcggccgggaccagcctgtggagctgctgaacccagcccgggtgaaccacatgcccagcacagtggatgtggccacagccctgcccctgcaggtggcccccagcgctgtgcccatggacctgcggctggaccaccagttcagcctgcctgtggccgagcccgccctgcgggagcagcagctgcagcaggagctgctggccctgaagcagaagcagcagatccagaggcagatcctgattgctgagttccagaggcagcacgagcagctgagccggcagcacgaggcccagctgcacgagcacatcaagcagcagcaggagatgctggccatgaagcaccagcaggagctgctggagcaccagaggaagctggagcggcaccggcaggagcaggagctggagaagcagcaccgggagcagaagctgcagcagctgaagaacaaggagaagggcaaggagagcgctgtggccagcacagaggtgaagatgaagctgcaggagtttgtgctgaacaagaagaaggccctggcccacaggaacctgaaccactgcatcagcagtgacccccgctactggtacggcaagacccagcacagcagcctggaccagagcagccccccccagagcggcgtgtccaccagctacaaccaccctgtgctgggcatgtatgatgccaaggatgacttccccctgaggaagacagccagcgagcccaacctgaagctgcggagccggctgaagcagaaggtggccgagaggaggagcagccccctgctgcggaggaaggatggccctgtggtgacagccctgaagaagaggcccctggatgtgacagacagcgcctgcagcagcgcccctggcagcggccccagcagccccaacaacagcagcggctctgtgtctgcagaaaatggcatcgccccagctgtgcccagcatcccagctgagaccagcctggcccaccggctggtggcccgggagggcagcgctgcccccctgcccctgtacaccagccccagcctgcccaacatcaccctgggcctgcctgccaccggccccagcgctggaacagctggccagcaggatgctgagcggctgaccctgcctgccctgcagcagaggctgagcctcttccctggcacccacctgaccccctacctgagcaccagccccctggagagagatggaggagctgcccacagccccctgctgcagcacatggtgctgctggagcagcccccagcccaggcccccctggtgacaggcctgggcgccctgcccctgcacgcccagagcctggtgggcgctgacagagtgagccccagcatccacaagctgcggcagcaccggcccctgggccgcacccagagcgcccccctgccccagaatgcccaggccctgcagcacctggtgatccagcagcagcaccagcagttcctggagaagcacaagcagcagttccagcagcagcagctgcagatgaacaagatcatccccaagcccagcgagcccgcccggcagcctgagagccaccctgaggagacagaggaggagctgcgggagcaccaggccctgctggatgagccctacctggaccggctgcccggccagaaggaggcccacgcccaggccggcgtgcaggtgaagcaggagcccattgaaagtgatgaggaggaggccgagcccccccgggaggtggagcccggccagaggcagcccagcgagcaggagctgctcttccggcagcaggccctgctgctggagcagcagaggatccaccagctgaggaactaccaggcctccatggaggccgccggcatccctgtgtcctttggaggccaccggcccctgagccgggcccagagcagccctgccagcgccaccttccctgtgtctgtgcaggagccccccaccaagccccgcttcaccaccggcctggtgtatgacaccctgatgctgaagcaccagtgcacctgtggcagcagcagcagccaccctgagcacgccggccgcatccagagcatctggagccggctgcaggagaccggcctgcggggcaaatgtgagtgcatccggggcaggaaggccaccctggaggagctgcagacagtgcacagcgaggcccacaccctgctgtatggcaccaaccccctgaaccggcagaagctggacagcaagaagctgctgggcagcctggcctctgtgtttgtgcggctgccctgtggcggcgtgggcgtggacagcgacaccatctggaatgaggtgcacagcgctggggccgcccggctggccgtgggctgtgtggtggagctggtgttcaaggtggccactggagagctgaagaatggatttgctgtggtgcggcccccaggccaccacgccgaggagagcacccccatgggcttctgctacttcaacagcgtggccgtggccgccaagctgctgcagcagaggctgtctgtgtccaagatcctgattgtggactgggatgtgcaccacggcaatggcacccagcaggccttctacagcgaccccagcgtgctgtacatgagcctgcacagatatgatgatggcaacttcttccctggcagcggggccccagatgaggtgggcaccggccctggggtgggcttcaacgtgaacatggccttcaccggcggcctggacccccccatgggagatgctgagtacctggccgccttcagaacagtggtgatgcccatcgccagcgagtttgccccagatgtggtgctggtgagcagcggctttgatgctgtggagggccaccccacccccctgggcggctacaacctgagcgcccgctgcttcggctacctgaccaagcagctgatgggcctggccggcggccgcatcgtgctggccctggagggcggccatgacctgacagccatctgtgatgccagcgaggcctgtgtgtctgccctgctgggcaatgagctggaccccctgcctgagaaggtgctgcagcagaggcccaatgccaatgctgtgcgctccatggagaaggtgatggagatccacagcaagtactggcgctgcctgcagaggaccaccagcacagctggccgcagcctgattgaggcccagacctgtgaaaatgaggaggccgagaccgtgacagccatggccagcctgtctgtgggcgtgaagccagctgagaagaggccagatgaggagcccatggaggaggagccccccctgtag

SEQ ID NO: 161274 - DNA, 1941 bp, Artificial Sequence
  derived and/or modified sequence
atgctggccatgaagcaccagcaggagctgctggagcaccagaggaagctggagcggcaccggcaggagcaggagctggagaagcagcaccgggagcagaagctgcagcagctgaagaacaaggagaagggcaaggagagcgctgtggccagcacagaggtgaagatgaagctgcaggagtttgtgctgaacaagaagaaggccctggcccacaggaacctgaaccactgcatcagcagtgacccccgctactggtacggcaagacccagcacagcagcctggaccagagcagccccccccagagcggcgtgtccaccagctacaaccaccctgtgctgggcatgtatgatgccaaggatgacttccccctgaggaagacagccagcgagcccaacctgaagctgcggagccggctgaagcagaaggtggccgagcggcgcagcagccccctgctgcggaggaaggatggccctgtggtgacagccctgaagaagaggcccctggatgtgacagattctgcctgcagcagcgcccctggcagcggccccagcagccccaacaacagcagcggctctgtgtctgcagaaaatggaattgccccagctgtgcccagcatcccagctgagaccagcctggcccaccggctggtggcccgggagggcagcgctgcccccctgcccctgtacaccagccccagcctgcccaacatcaccctgggcctgcctgccaccggccccagcgctggaacagctggccagcaggatgctgagcggctgaccctgcctgccctgcagcagaggctgagcctcttccctggcacccacctgaccccctacctgagcaccagccccctggagagagatggaggagctgcccacagccccctgctgcagcacatggtgctgctggagcagcccccagcccaggcccccctggtgacaggcctgggcgccctgcccctgcacgcccagagcctggtgggcgctgacagagtgagccccagcatccacaagctgcggcagcaccggcccctgggccgcacccagagcgcccccctgccccagaatgcccaggccctgcagcacctggtgatccagcagcagcaccagcagttcctggagaagcacaagcagcagttccagcagcagcagctgcagatgaacaagatcatccccaagcccagcgagcccgcccggcagcctgagagccaccctgaggagacagaggaggagctgcgggagcaccaggccctgctggatgagccctacctggaccggctgcccggccagaaggaggcccacgcccaggccggcgtgcaggtgaagcaggagcccatcgagagtgatgaggaggaggccgagcccccccgggaggtggagcccggccagaggcagcccagcgagcaggagctgctcttccggcagcaggccctgctgctggagcagcagaggatccaccagctgaggaactaccaggcctccatggaggccgccggcatccctgtgtcctttggaggccaccggcccctgagccgggcccagagcagccctgccagcgccaccttccctgtgtctgtgcaggagccccccaccaagccccgcttcaccaccggcctggtgtatgacaccctgatgctgaagcaccagtgcacctgtggcagcagcagcagccaccctgagcacgccggccgcatccagagcatctggagccggctgcaggagaccggcctgcggggcaaatgtgagtgcatccggggcaggaaggccaccctggaggagctgcagacagtgcacagcgaggcccacaccctgctgtatggcaccaaccccctgaaccggcagaagctggacagcaagaagctgctgggcagcctggcctctgtgtttgtgcggctgccctgtggcggcgtgggcgtgtctgtgcccctgatgtgcaagtag

SEQ ID NO: 161275 - DNA, 2007 bp, Artificial Sequence
  derived and/or modified sequence
atggtgctgctggagcagcccccagcccaggcccccctggtgacaggcctgggcgccctgcccctgcacgcccagagcctggtgggcgctgacagagtgagccccagcatccacaagctgcggcagcaccggcccctgggccgcacccagagcgcccccctgccccagaatgcccaggccctgcagcacctggtgatccagcagcagcaccagcagttcctggagaagcacaagcagcagttccagcagcagcagctgcagatgaacaagatcatccccaagcccagcgagcccgcccggcagcctgagagccaccctgaggagacagaggaggagctgcgggagcaccaggccctgctggatgagccctacctggaccggctgcccggccagaaggaggcccacgcccaggccggcgtgcaggtgaagcaggagcccattgaaagtgatgaggaggaggccgagcccccccgggaggtggagcccggccagaggcagcccagcgagcaggagctgctcttccggcagcaggccctgctgctggagcagcagaggatccaccagctgaggaactaccaggcctccatggaggccgccggcatccctgtgtcctttggaggccaccggcccctgagccgggcccagagcagccctgccagcgccaccttccctgtgtctgtgcaggagccccccaccaagccccgcttcaccaccggcctggtgtatgacaccctgatgctgaagcaccagtgcacctgtggcagcagcagcagccaccctgagcacgccggccgcatccagagcatctggagccggctgcaggagaccggcctgcggggcaaatgtgagtgcatccggggcaggaaggccaccctggaggagctgcagacagtgcacagcgaggcccacaccctgctgtatggcaccaaccccctgaaccggcagaagctggacagcaagaagctgctgggcagcctggcctctgtgtttgtgcggctgccctgtggcggcgtgggcgtggacagcgacaccatctggaatgaggtgcacagcgctggggccgcccggctggccgtgggctgtgtggtggagctggtgttcaaggtggccactggagagctgaagaatggatttgctgtggtgcggcccccaggccaccacgccgaggagagcacccccatgggcttctgctacttcaacagcgtggccgtggccgccaagctgctgcagcagaggctgtctgtgtccaagatcctgattgtggactgggatgtgcaccacggcaatggcacccagcaggccttctacagcgaccccagcgtgctgtacatgagcctgcacagatatgatgatggcaacttcttccctggcagcggggccccagatgaggtgggcaccggccctggggtgggcttcaacgtgaacatggccttcaccggcggcctggacccccccatgggagatgctgagtacctggccgccttcagaacagtggtgatgcccatcgccagcgagtttgccccagatgtggtgctggtgagcagcggctttgatgctgtggagggccaccccacccccctgggcggctacaacctgagcgcccgctgcttcggctacctgaccaagcagctgatgggcctggccggcggccgcatcgtgctggccctggagggcggccatgacctgacagccatctgtgatgccagcgaggcctgtgtgtctgccctgctgggcaatgagctggaccccctgcctgagaaggtgctgcagcagaggcccaatgccaatgctgtgcgctccatggagaaggtgatggagatccacagcaagtactggcgctgcctgcagaggaccaccagcacagctggccgcagcctgattgaggcccagacctgtgaaaatgaggaggccgagaccgtgacagccatggccagcctgtctgtgggcgtgaagccagctgagaagaggccagatgaggagcccatggaggaggagccccccctgtag

SEQ ID NO: 161276 - DNA, 3255 bp, Artificial Sequence
  derived and/or modified sequence
atgagcagccagagccaccccgacggcctgagcggccgggaccagcctgtggaacttctcaaccctgcccgcgttaatcatatgcctagcaccgtggatgtcgcgacagccctccctctccaagtggctccatccgcagttcccatggatttgcgtctggatcatcaattttccctgccagtggctgagcctgccttgcgggaacagcagctgcaacaggagctcctggctctaaagcagaaacagcagattcagaggcagatactgatcgcagagtttcagagacagcacgaacaactgagccgtcagcacgaggctcagcttcatgaacatattaagcaacagcaggagatgttggccatgaaacaccagcaagaactgctggaacatcagcggaagctggagagacaccggcaggaacaggaactggaaaagcagcacagagaacagaagctgcagcaactgaaaaacaaggagaaaggaaaggagtcggccgtcgcttcgactgaggtgaagatgaaactgcaggagttcgtcctcaacaagaagaaagcgctcgcccaccgcaatctcaatcattgtatctcctctgatccgcggtattggtacgggaaaacccaacattcctctctggaccaatcctcaccgccacagtcgggagtctcgactagttacaaccaccctgtcttgggaatgtatgacgctaaggacgattttcccctgcggaaaacagccagcgaacctaacctgaagctgcgatcgcgcctgaaacaaaaggttgctgaaagacggagctctcccctactgcggagaaaggatggacccgtggtgacagcactgaaaaagcgtcctctggacgtgaccgattctgcctgctcctctgctcccgggagcggtcccagctctcccaacaattcatcggggtcggtatctgccgaaaatggtattgccccagcagtgccatctatccctgccgaaacctccctggcacacagactcgtcgcaagggagggttcagccgcccccctgcccctgtacacttctccaagcctgcctaacattacccttgggctgcctgcaaccgggccatccgccgggacagctggacagcaggacgcagagcgcctgacactgccggctctccagcagcgcctgagcctgtttcccggcacacatctgaccccctatttatccaccagccccctggagagggatgggggcgctgcccattccccactactgcagcatatggttttgctcgagcagcccccggcacaggctccactggtcacagggctgggcgctctgccactacacgcacagagccttgtcggagcagaccgggtgtccccctcgatccacaaactgcgacagcatcgccccctgggccgtacccagtcagcccctctgccacagaatgcacaagcattgcagcatctggttatacagcaacaacatcaacagtttttggagaagcataagcagcagtttcagcaacagcaactgcagatgaacaaaattataccaaaacccagcgagcccgccagacagccagagtcccaccccgaagaaaccgaggaagagctcagagaacaccaagctttactggatgaaccctaccttgaccgattgcccggccagaaagaggcgcacgctcaagccggggtccaggtcaagcaggagccaattgaaagcgacgaagaagaagccgagccccccagggaagtggaaccaggtcaacgacagccatcggagcaggaactcctgtttcgccaacaggccctcctcctcgagcagcagaggatacatcagctgcgtaattaccaggcaagcatggaagccgccggtatcccagtctcattcggaggtcaccgacccctcagccgcgcccagagcagccctgccagtgcgacattccctgtctccgtgcaggagcctcccacgaaaccccggtttaccacgggactggtgtatgacactcttatgctcaaacaccagtgcacttgcggaagttcttcctcccatcctgaacatgccgggcgcatccagagcatctggtcaaggctgcaggaaactggactccgagggaagtgcgagtgtataaggggcagaaaggcgacactggaggaactacaaactgtgcatagtgaagcacatacactgctgtacggcacgaacccccttaatcgccagaagctcgacagcaagaaattgctgggatcccttgcttctgttttcgtgcggctgccctgtggaggcgtgggcgtagactccgacactatttggaatgaagtgcacagcgctggtgccgccagactcgcggtagggtgtgtcgttgagctggtgtttaaagtggctaccggcgaactgaagaacgggttcgcagtggtgagaccccccggtcatcacgccgaggaaagcacgccaatgggattttgctactttaattctgtggcggtggctgccaagctcctccagcagcgactgtctgtgagcaagattttaatcgtggactgggatgtccaccatgggaacgggacccagcaggccttttattccgatccctcagtactctacatgagcttacacaggtacgatgacgggaatttcttcccaggatcaggcgcaccagacgaggtgggcacgggccctggcgttggcttcaacgttaacatggccttcacgggtggactggaccctcctatgggggatgctgagtacctcgccgcttttagaaccgtggtgatgccaattgcatcggaattcgctccggacgtggtccttgtgagctcaggctttgacgctgtggaagggcacccaactcctttgggcgggtacaacttgagtgcccggtgttttgggtacctgaccaaacagctgatgggtctggccggcggccggatcgttttggcactagagggggggcacgatctgaccgcgatctgcgatgcctccgaggcctgcgtatctgccctgctaggtaacgagctggatcctctcccagagaaggtgctgcagcagcgacccaatgctaacgccgtgcgcagcatggaaaaggtcatggagatccactcaaaatattggaggtgcctgcagcggacaacctcaactgctggtcgttcgttgattgaggcccagacctgtgaaaacgaagaggctgaaacagtaacggcaatggcaagcctgtccgtgggtgttaaacccgctgaaaaacggcccgacgaagagcctatggaagaagagcctcccctgtag

SEQ ID NO: 161277 - DNA, 1941 bp, Artificial Sequence
  derived and/or modified sequence
atgctggccatgaagcaccagcaggagctgctggagcaccagcggaagctcgagaggcaccgacaagagcaagagcttgagaagcagcatcgggagcagaaattacaacaactgaagaacaaagagaaggggaaggaatccgctgtggcttctaccgaagtcaagatgaagctgcaggagtttgtgcttaacaagaagaaggcactggcacacagaaacctaaatcattgcatatctagcgatcccagatattggtacggtaaaacgcagcattcttccttagaccagagtagccccccccagagtggggtgtccacatcatataatcaccctgtgctgggaatgtacgacgccaaagatgattttcctctgagaaaaactgctagcgagcccaatctaaaattgagatcacgcctaaaacaaaaggtggccgagagacgcagcagtcccctgctgagacggaaggacggccccgtcgtgactgcgcttaagaaaagaccactcgatgtgacagacagcgcatgtagttctgcccccgggagcggcccctcttcacccaataactccagtggtagtgtctcggcggagaatggaatcgctcctgccgtgccctctattcccgctgagaccagtctggcacacaggcttgtggctagggaaggttctgcggccccattgccgttgtacacctcgccatccctccccaacatcacactcggacttccagcaactggcccttcagctggtactgctggtcaacaggatgcagaaagactcaccctgccggcacttcagcagaggctttctctgttccctggcacccaccttacaccttacttgtcaactagtccactggagcgcgatggcggtgctgcccactccccccttctgcagcatatggtgctcctggagcagccacctgcgcaagcccccctcgttaccggactcggcgcgctgcccctgcatgcacagagtcttgtcggggcggaccgggtgtcaccttcaattcacaagcttaggcagcacaggcctctgggccgcacccagtcagctcctctcccccagaacgctcaggccttacaacacctggttatccagcagcagcaccagcagttcctggaaaagcacaaacaacagttccagcagcagcagctgcaaatgaacaagattatacccaagccttcagaaccagcgaggcaaccggaaagccatcccgaagaaacagaggaggagctgcgggaacaccaggccctcctagatgagccatatctggaccggctgccagggcagaaggaggcacacgctcaggcaggggtgcaagtgaagcaggagccgattgagagcgacgaggaggaagcagagcccccccgcgaagttgagccgggccaaagacaaccatctgagcaggaactcctgttccgccaacaggccctgctgctcgaacaacaacgtatccatcagctgagaaactaccaggcgagcatggaagccgcaggaatccccgtctcttttgggggacatcgcccacttagtagggctcagagctccccagcttcagccacattccccgtcagtgtgcaggagcctcctaccaagcctcgcttcactactgggctcgtctacgacaccctgatgcttaagcatcagtgcacctgtggatcttcatctagccatcctgaacatgctggaaggatccagtctatctggagcaggctgcaggagaccggactgaggggcaagtgtgagtgcatcagaggacgtaaagccactttagaagagttgcaaacagtgcattctgaggctcatactctcctatacggaacaaatccactgaatcggcagaaacttgacagcaagaaactgctggggagcctcgcaagcgtgttcgtgcggctgccatgcggcggagtaggcgtctctgttccgctgatgtgcaagtag

SEQ ID NO: 161278 - DNA, 2007 bp, Artificial Sequence
  derived and/or modified sequence
atggtgctgctggagcagccccccgcccaggcccccctggtgaccggactaggcgccctcccactgcatgcccaatctctggttggcgctgacagggtttccccatctatccataagttaagacagcaccggcccctcggccggacccagtctgccccactgcctcaaaacgcccaagccctgcagcacttggtgatccagcagcagcaccagcagtttttggaaaagcataagcaacagtttcagcagcagcagctacagatgaacaaaatcattcccaagcctagtgagcctgctcgacagcctgagtctcatccggaggaaacagaagaggaactgcgtgagcatcaggcgctgttagacgagccatatcttgataggctgcccggccagaaagaagcccacgcacaagccggtgttcaggtaaagcaggagcctattgaatcagacgaagaagaggccgaacctcctagggaggtggagccgggtcagagacagccgagtgaacaagaactcctttttaggcagcaagccctccttctagaacaacagagaattcatcaactccggaattaccaggcgtcaatggaggctgctggcattccagtgtcatttggaggccacaggccgctctcccgggcacagtcaagccccgcctcagcaacctttccagtgagcgtgcaggagccaccaactaaacctaggttcacgaccggcctcgtgtacgacacgcttatgctgaaacaccagtgtacatgtgggtctagttcctcccaccctgagcacgccgggcgcatccagagcatctggagccgtctgcaagaaactggcctgcggggaaaatgtgaatgtatccgcgggcggaaggctactcttgaagaactgcagaccgtacattcggaggcccacaccctgttatatggcaccaaccctctgaatcggcaaaaactggattcgaagaagctcctaggctctctggcatccgtgtttgtgaggctcccatgcggcggggtaggcgtggattccgacaccatatggaacgaggtccactctgccggggctgctcggctggcagtggggtgtgtggtggaactagttttcaaagtggccactggagagttaaagaacggcttcgcagtggtccggcctcccggtcaccatgccgaggagagcactccaatggggttttgctattttaactctgttgcggtggctgctaagttattgcaacagaggctgtccgtatccaagatcttaattgtggactgggatgtgcaccatggcaatggcacccagcaggctttttactccgaccctagcgtcttgtatatgtcattacataggtacgatgacggaaactttttcccaggctccggggccccagacgaagtgggcactgggcctggcgtgggtttcaatgtcaacatggcattcaccggaggactggatccccctatgggtgatgctgaatacttagcagccttccggacagtagttatgccgattgcaagtgagtttgctcccgacgtggtgctcgtgtcaagtggatttgacgctgtggagggacaccccacacctttaggaggatataacctctccgcgcggtgtttcggctatctgacaaaacagctcatgggactcgccggcggacgaattgttctcgccctcgaaggtggtcacgatctgacggctatctgtgatgcgagcgaggcctgcgtttctgctttgctcggcaacgagctggacccattgccagaaaaggtgctacagcagcgaccaaacgcgaacgctgttaggagcatggagaaggtgatggaaatccacagtaaatactggcgctgcctgcaaagaactacatcaaccgccggacgaagcctcattgaggctcaaacatgtgaaaacgaagaagcagagacagtgactgcaatggcttcactcagtgtgggggtcaaaccagcggagaaaagaccagacgaagagcccatggaggaggagccacctctgtag

SEQ ID NO: 161279 - DNA, 3255 bp, Artificial Sequence
  derived and/or modified sequence
atgtcttcccagtcgcaccctgatgggctgtccggaagagatcaacctgtggagctcctgaatcctgctagggtcaaccacatgccctccacagtggacgtcgcaaccgctctgccgctccaggtggctccgtctgcggttccaatggatctcaggttggaccaccagtttagccttcccgttgccgaaccagctctcagagaacagcagttgcagcaagagctgttagccctaaaacagaaacagcagattcagagacaaatcctgatcgccgaatttcagcgtcagcatgagcagctctcccgccaacacgaggcccaactccatgaacatattaaacagcagcaggaaatgctggcgatgaagcatcagcaggaactgctggagcaccaacgcaaactggagaggcatcgacaggagcaagagttagagaaacagcaccgagagcagaaactccagcagctcaagaataaggagaaggggaaggagtcagctgtagcctcaacggaagtcaaaatgaaattgcaggagtttgtgctcaataaaaagaaggctctggcgcacagaaatctcaaccactgtatatccagcgacccaaggtattggtacggtaaaacacagcactcctcgctagaccagtcaagtccccctcaaagcggcgtaagtacctcctacaaccaccccgtgctaggcatgtacgatgcaaaggacgattttccactccggaaaacagcaagcgaaccaaatctgaaactgcgcagtagacttaaacagaaagtggctgagaggagaagttccccgctgctccgcaggaaagacggtccagtggtgacagctctcaaaaaaagaccgttggacgttaccgactctgcatgctcatctgccccagggagcggcccaagctctcctaacaactcaagcggctccgtgtccgccgagaacggaattgctccagccgtcccgtctatcccagccgagacgagcttggcccaccgtttggtggcccgagagggaagtgcggcacccctgcctttatataccagcccttctcttcctaacatcacgcttggtctgccagccaccggaccctccgctggtacagccggtcagcaagatgcagaaaggctgacgttacctgcactacagcagcggctgagcctgttccccggaacccacctcaccccctatttaagcacaagccctcttgagagagacggtggcgctgcgcactcccctctgctacagcatatggttctcctggagcagcctcctgctcaggcaccacttgttaccgggctgggcgcactccccctgcatgctcagagccttgttggggcagaccgtgtaagcccgagcatccacaaactaagacagcacaggccactgggtcggactcagtctgccccactgccacagaatgcacaagctctgcagcacttggttattcagcaacagcatcagcagtttctggagaagcataaacagcagtttcaacagcaacaactgcagatgaataaaattatccccaagccctctgaacccgctaggcagcctgagagccatcctgaggaaacagaagaagagctgagagagcaccaggccctgctggatgaaccttatcttgacagactcccgggacagaaggaagcgcatgctcaggccggtgttcaggtgaagcaggaacccatcgaatccgacgaggaggaagcggaaccccctagagaggtggagccaggccagcggcagccctctgagcaagagctgctcttccgacagcaggcactgctgttggaacagcaacggatacaccagttaaggaactatcaggcatccatggaggccgctggcatccctgtaagtttcggcggacacagaccactcagtcgtgcacagagttcgccagcgagcgcaacatttccagtcagtgttcaggagcctccaacaaagcctcgtttcactaccggcctggtctatgacactctcatgctgaaacaccagtgtacatgcggctcaagcagctctcatccggaacatgcaggaagaattcagagcatttggtctcgcttgcaggagaccgggctgagagggaagtgcgagtgtattaggggacgcaaggctacattagaggaacttcaaactgtccacagtgaggcccataccttgctgtacggcactaatcccttgaaccggcagaagctggactcaaaaaagctgctgggtagtctggcgagcgtatttgttcgtcttccatgcgggggagtgggagtagattctgacaccatctggaacgaagtacacagtgcaggcgctgcccgactggccgtggggtgtgtcgtcgagttagtgttcaaggtggcaaccggtgagctgaaaaatggcttcgctgtggtcaggcccccaggccatcatgccgaggagtccactcctatggggttctgttacttcaatagcgtggccgttgccgctaaactcctgcagcagcgtctgtccgtgtccaaaatcctgatcgtggattgggacgttcaccacgggaacgggacccagcaggctttctattccgatccaagcgtgctttacatgagccttcaccggtatgacgatgggaatttcttccccggaagcggcgcaccagatgaggtcggcacgggccctggggttggatttaatgtaaacatggccttcaccgggggtttagaccccccaatgggggatgccgagtatttagccgcattccgcacagtagtgatgcctattgcttccgagttcgccccagatgtcgtgctagtgtcttccggctttgatgcagtagaggggcacccgacccctctggggggttataatctcagtgcccgttgttttggctacctgaccaagcagctgatggggctggctggcggtcgcatcgtgctcgctttggagggaggtcacgacctgactgctatctgtgacgcgagcgaggcctgcgtgtccgcattgctgggcaacgagctggatcctttaccagagaaggttttacaacagcggcctaacgccaatgccgtccgatctatggagaaggtgatggagatccatagtaagtactggagatgtcttcagcgcaccacaagcacagctggcagaagtctgattgaggctcaaacatgtgaaaacgaggaagccgaaacggtgacagccatggcctcactctccgtcggcgtcaagcccgcagagaaacgccctgacgaagagcctatggaggaggagcctccgctttag

SEQ ID NO: 161280 - DNA, 1941 bp, Artificial Sequence
  derived and/or modified sequence
atgcttgctatgaagcaccagcaggagctgcttgaacaccagagaaagctggagcgccatagacaggagcaagaactggagaaacagcacagagagcagaagctgcagcagcttaagaataaggaaaagggaaaggaaagcgcggtggcatcaaccgaggtgaagatgaaactgcaggagttcgtattaaacaagaaaaaggccctagcccacagaaatctgaatcattgcatttcttctgatcccaggtactggtacggcaaaacccagcactcttcactggaccagagttctccaccccaatctggcgttagcacctcctacaaccaccccgtcttgggaatgtacgatgctaaggatgacttcccattgcgcaagacagcttccgagcctaatctgaaactgcggagccgacttaagcagaaggtggcggaacgcagaagttcccccctgttgaggcgcaaagacggccctgtggtgaccgccctgaagaagaggcccctggatgtgacggactctgcttgctcttctgcaccagggtctggtccatcttctcctaacaatagtagtggctccgtgagcgccgagaacggcattgcacctgctgtcccctccattcccgctgagacaagcttagctcaccgcctggtcgcccgagaaggtagtgccgctcccctccctctgtatacctccccatcccttcctaacattacgctgggcctgcctgctacaggtccctccgccggtacagccggtcagcaagacgctgagcggctgacgttgcccgcactgcaacaacgcctttctctgttccccggaactcatctgactccgtatctgtcaacctccccccttgagcgtgacgggggtgctgcccattcaccactcctccagcacatggtgctgctcgagcagccaccggcacaggccccactcgtgaccggactcggtgcactgccactccatgcacagtccctggtcggagccgatagggtttctccatcgattcacaagctgcgccagcaccggccacttgggaggacacagtccgctccgctgcctcagaacgcacaggccctgcaacacctggtgatacagcaacagcaccagcagttcctggaaaaacataaacagcagtttcagcagcagcagctgcagatgaacaagatcataccgaagccctctgaaccggcaagacaaccggagtcacacccagaagaaactgaagaggaactacgtgaacaccaggcgctgcttgatgagccttacctggatcggctgcctggtcagaaggaggcacatgcacaggccggagtgcaggtaaagcaggagcccatcgagtctgacgaagaggaagccgagccccctcgggaagtggagcctggacagcggcaaccctccgaacaggagctgctcttcaggcagcaggccttgctgctggagcagcagcgcatccaccagttgcgaaactatcaggccagcatggaggccgcaggaattccagtgtctttcggcggacaccgccctctctcgagggcccagtcctcacccgcatcggctactttcccagtgtcagttcaggagcccccaacgaagcccaggtttaccacaggtctcgtctacgataccctaatgctcaaacaccaatgcacatgcggctcatcaagcagtcatccagaacacgctggtaggatacagagcatatggtcccgactgcaagagacaggactccggggtaagtgtgaatgtatccgaggacgcaaggcaacattggaagagctccagacagtgcactcggaagcacacaccctcctatacggtacaaaccccttgaatagacagaaactggatagtaagaagctgttgggctccctggcttccgtcttcgtgcgcctgccttgtggaggggttggggttagtgtccctttgatgtgtaaatag

SEQ ID NO: 161281 - DNA, 2007 bp, Artificial Sequence
  derived and/or modified sequence
atggtgctccttgaacagcctccagcccaggcaccactggtcactggcttaggggctctgccgttacacgcccagagtctcgtcggtgctgatagagtgtctcctagtattcacaagcttaggcagcaccgacctctcggtagaacacagtctgccccactcccccagaacgcccaagcgctgcagcaccttgttatccagcaacaacaccaacagttcctcgagaagcataagcaacaattccagcaacagcaactccagatgaacaagatcattccaaagccgagcgaacccgcacgacagcccgaatcccacccagaagaaactgaggaagagctccgcgaacatcaggcattgttggacgagccctatctagacaggctccccggtcagaaggaagcacacgcacaagcaggggttcaggtgaagcaggaacccatcgagagcgacgaagaagaggccgagcccccacgtgaggtggagcctgggcagcgccagccctcagagcaggagctcctgttcagacagcaagccctacttctggagcagcaacgcatccatcagctgaggaactatcaggcatccatggaagcagctggtatccccgtttcattcggcggacataggcccctgtctcgcgctcagtcctcacccgctagcgcgactttcccagtctcagttcaggagccaccgaccaagccgcgatttacgactggcctcgtttacgacactctgatgctgaagcatcagtgcacctgcggtagctcaagctctcaccccgagcatgctggacgcatacagagtatttggtcccgtctccaggagaccggactgcgcggaaaatgcgaatgtattcgcggaagaaaggccaccctggaagaattacaaacagtgcactctgaagcccatacactcttgtacgggacaaacccactgaacagacaaaagcttgatagtaagaaactgttgggaagtcttgcaagcgtgttcgtgcgtctgccctgtggtggtgtcggggtggattccgacaccatatggaatgaggtgcatagcgcgggagccgcaaggctcgccgtgggctgtgtggtggaattagtattcaaagtcgccactggcgagctaaagaacggattcgccgtggttcgtccacctggacatcacgcagaagagtcaaccccaatgggcttctgctactttaactctgtcgccgtcgccgctaaactgctgcagcaaaggctgagtgtgagcaaaattcttatcgtcgactgggacgtgcaccacggaaatggcactcaacaagctttttactctgatccttccgtcctgtatatgagcctgcaccggtacgatgacggcaacttcttccccggttcaggggctcccgatgaggttggcacagggcctggggtggggtttaatgtgaacatggctttcacaggcggattggatccaccgatgggtgatgcagaatacctggcagcatttaggaccgtggtgatgccaattgcaagcgaattcgctcctgacgtcgtgctagtctcctctggttttgatgctgtggaggggcatcctacacccctggggggttataatctgagcgctaggtgtttcggctacctcacaaagcaacttatgggactggctggaggaagaattgtgttggcactggaggggggtcacgacctcactgcaatctgcgacgcatcagaggcttgcgtgagcgccctgctggggaatgaactcgatcctctgcccgaaaaggtactgcagcagcgaccaaatgcaaatgctgtcagaagcatggaaaaggtcatggaaattcatagtaaatattggaggtgtctccagagaaccacatccacagcgggaagatctctgattgaggcacaaacgtgtgaaaatgaggaggccgaaactgtaaccgccatggcaagtctaagtgttggggtgaaacccgctgagaagaggcctgatgaggagcctatggaggaggaacctccactgtag

SEQ ID NO: 161282 - protein, 142 aa, Artificial Sequence
  derived and/or modified sequence
AVLGLCEGACPEGWVEHKNRCYLHVAEKKTWLDAELNCLHHGGNLASEHSEDEHQFLKDLHKGSDDPFWIGLSAVHEGRSWLWSDGTSASAEGDFSMWNPGEPNDAGGKEDCVHDNYGGQKHWNDIKCDLLFPSICVLRMVE

SEQ ID NO: 161283 - protein, 1479 aa, Artificial Sequence
  derived and/or modified sequence
MGPGRPAPAPWPRHLLRCVLLLGCLHLGRPGAPGDAALPEPNVFLIFSHGLQGCLEAQGGQVRVTPACNTSLPAQRWKWVSRNRLFNLGTMQCLGTGWPGTNTTASLGMYECDREALNLRWHCRTLGDQLSLLLGARTSNISKPGTLERGDQTRSGQWRIYGSEEDLCALPYHEVYTIQGNSHGKPCTIPFKYDNQWFHGCTSTGREDGHLWCATTQDYGKDERWGFCPIKSNDCETFWDKDQLTDSCYQFNFQSTLSWREAWASCEQQGADLLSITEIHEQTYINGLLTGYSSTLWIGLNDLDTSGGWQWSDNSPLKYLNWESDQPDNPSEENCGVIRTESSGGWQNRDCSIALPYVCKKKPNATAEPTPPDRWANVKVECEPSWQPFQGHCYRLQAEKRSWQESKKACLRGGGDLVSIHSMAELEFITKQIKQEVEELWIGLNDLKLQMNFEWSDGSLVSFTHWHPFEPNNFRDSLEDCVTIWGPEGRWNDSPCNQSLPSICKKAGQLSQGAAEEDHGCRKGWTWHSPSCYWLGEDQVTYSEARRLCTDHGSQLVTITNRFEQAFVSSLIYNWEGEYFWTALQDLNSTGSFFWLSGDEVMYTHWNRDQPGYSRGGCVALATGSAMGLWEVKNCTSFRARYICRQSLGTPVTPELPGPDPTPSLTGSCPQGWASDTKLRYCYKVFSSERLQDKKSWVQAQGACQELGAQLLSLASYEEEHFVANMLNKIFGESEPEIHEQHWFWIGLNRRDPRGGQSWRWSDGVGFSYHNFDRSRHDDDDIRGCAVLDLASLQWVAMQCDTQLDWICKIPRGTDVREPDDSPQGRREWLRFQEAEYKFFEHHSTWAQAQRICTWFQAELTSVHSQAELDFLSHNLQKFSRAQEQHWWIGLHTSESDGRFRWTDGSIINFISWAPGKPRPVGKDKKCVYMTASREDWGDQRCLTALPYICKRSNVTKETQPPDLPTTALGGCPSDWIQFLNKCFQVQGQEPQSRVKWSEAQFSCEQQEAQLVTITNPLEQAFITASLPNVTFDLWIGLHASQRDFQWVEQEPLMYANWAPGEPSGPSPAPSGNKPTSCAVVLHSPSAHFTGRWDDRSCTEETHGFICQKGTDPSLSPSPAALPPAPGTELSYLNGTFRLLQKPLRWHDALLLCESRNASLAYVPDPYTQAFLTQAARGLRTPLWIGLAGEEGSRRYSWVSEEPLNYVGWQDGEPQQPGGCTYVDVDGAWRTTSCDTKLQGAVCGVSSGPPPPRRISYHGSCPQGLADSAWIPFREHCYSFHMELLLGHKEARQRCQRAGGAVLSILDEMENVFVWEHLQSYEGQSRGAWLGMNFNPKGGTLVWQDNTAVNYSNWGPPGLGPSMLSHNSCYWIQSNSGLWRPGACTNITMGVVCKLPRAEQSSFSPSALPENPAALVVVLMAVLLLLALLTAALILYRRRQSIERGAFEGARYSRSSSSPTEATEKNILVSDMEMNEQQE

SEQ ID NO: 161284 - protein, 345 aa, Artificial Sequence
  derived and/or modified sequence
MPTGHLGSPLALALLPVATNRPAVQWSCTAPQPTSLAAGTIGAARRRPMASSARRARGSRRYSWVSEEPLNYVGWQDGEPQQPGGCTYVDVDGAWRTTSCDTKLQGAVCGVSSGPPPPRRISYHGSCPQGLADSAWIPFREHCYSFHMELLLGHKEARQRCQRAGGAVLSILDEMENVFVWEHLQSYEGQSRGAWLGMNFNPKGGTLVWQDNTAVNYSNWGPPGLGPSMLSHNSCYWIQSNSGLWRPGACTNITMGVVCKLPRAEQSSFSPSALPENPAALVVVLMAVLLLLALLTAALILYRRRQSIERGAFEGARYSRSSSSPTEATEKNILVSDMEMNEQQE

SEQ ID NO: 161285 - DNA, 4440 bp, Artificial Sequence
  derived and/or modified sequence
atgggacccggccgaccagcgccagcgccttggccacggcacctgctgcgctgtgtgctgttgctgggctgcctacacctggggcgccccggcgcacctggcgacgcagctctgccagagcccaatgtgtttctgatattttcccatgggcttcaggggtgtctggaggcccagggtgggcaggtgagagtgaccccagcctgtaacacgagcctgccagctcagcgatggaaatgggttagccgcaacagactcttcaatctgggcacgatgcagtgtctgggcaccggctggcccggaacaaacacaactgcctccctgggaatgtatgagtgcgaccgggaagccttgaacctgcgttggcactgtaggacactgggggatcagctgtcgctgctgcttggcgccaggacctcaaacatctccaaaccaggaacactcgagcggggggaccagaccagatccgggcagtggcgcatctacggttctgaggaggacctgtgtgccctcccataccacgaggtgtatacaatccagggaaacagccacggaaaaccttgtaccatccctttcaaatatgacaatcagtggttccacgggtgcacaagcacaggacgcgaggatggacacctttggtgcgcgaccacacaggattacgggaaggacgagcgttggggattctgcccaataaagtccaacgattgcgaaactttctgggacaaggaccagctcaccgattcctgctaccaatttaatttccaatcaacattgtcatggcgagaggcctgggcaagctgcgaacagcagggcgcggacttactttccattacggagattcacgagcagacttacatcaacggactgctaacaggttactcttcgactttatggatcgggctgaacgacctggacacctctggcggttggcaatggtctgataactcccccctaaagtacctcaactgggagtctgaccaaccagacaaccccagtgaggagaattgcggcgtcatccggaccgagagcagcggcggatggcaaaacagagattgtagtatagcgttgccatatgtttgcaagaagaagcctaacgcaactgccgaacccaccccacccgacagatgggcaaatgtgaaggtggaatgtgagccttcttggcaacccttccagggacactgctatcgcttacaggctgagaaacggtcgtggcaggagagcaagaaagcgtgcctgcgcggagggggcgacctcgtgagtatccacagcatggcagagcttgagttcatcaccaaacagatcaaacaggaggtcgaagagctctggattggactgaatgacctcaaactgcaaatgaatttcgagtggtccgacgggagcctggtgtcctttactcattggcaccctttcgagcccaacaattttagggactcactggaagattgtgtgacgatctggggcccagagggacgctggaacgacagtccttgcaatcagtcactcccctccatttgcaagaaagccggccagctgagccagggcgccgccgaggaagaccatgggtgcaggaaagggtggacatggcactcgccctcgtgctattggctcggcgaagatcaggtgacttactccgaggcccggaggttgtgtacggaccacggtagccaactggtaactataaccaaccggttcgagcaggcttttgtgtcctctttaatttacaactgggagggcgagtatttttggacagccctccaggacctaaattccaccggaagttttttctggctgtcaggtgatgaggtcatgtacacacattggaaccgggaccagccaggttatagcagaggcgggtgcgtcgccctggctacgggttccgcaatgggcttgtgggaggttaaaaattgtacatctttccgcgcaaggtacatttgtcggcagagcctgggtacgccagtgacccctgaattaccgggacctgacccaaccccatcacttacagggagctgtccgcagggatgggcgagcgataccaaactgcgctactgctacaaagtgtttagctctgaacgcttgcaggacaagaagagctgggtgcaggcccagggcgcctgtcaggagctcggtgcacaactgctgagtctcgcaagctacgaagaggaacattttgtagccaatatgcttaacaaaatcttcggtgagagcgaacctgagatccacgagcagcattggttttggatcggcctgaacagaagggatccacgaggtgggcaaagctggagatggagcgacggcgttgggttctcttaccataatttcgacaggagccgtcacgacgacgatgatattagaggctgcgcagtgctcgatttggctagcctgcagtgggtggcaatgcaatgtgatactcagttggactggatttgcaagattccaagagggacagacgtgcgtgagcccgacgattccccacaagggcgtagagaatggctgcgatttcaagaagccgagtataagttctttgagcatcactccacctgggcccaggctcagcgtatctgtacgtggttccaggctgagctgacttcagtgcactcccaggccgagctagatttcttatctcacaacctccagaaattcagccgggcccaggaacagcactggtggattggcctgcacacttctgagtccgatggccgctttcggtggaccgatggcagcattatcaacttcatctcctgggctccaggcaagccgcggcctgtaggaaaagataaaaagtgtgtgtatatgactgcatcacgcgaggactggggtgatcagaggtgtttgaccgctctcccatacatttgcaagcggtcgaacgtcaccaaagaaacacagccaccagacctgccgaccacagcgcttggagggtgccctagcgattggattcagttcctgaataagtgctttcaggtccagggccaggaaccacagtcccgtgttaagtggagcgaggcacagttttcttgcgagcaacaggaggctcaactcgtaaccatcacaaaccccctggagcaagcattcatcaccgcttctctgcctaacgtcacattcgacttgtggataggacttcacgcaagccagagagactttcagtgggtagagcaggaacctctgatgtacgccaattgggcaccaggagagccctccgggccatcacctgcaccatccggaaacaagcccacaagctgcgcagtggtgctacactctccctctgctcatttcacaggccgatgggacgataggtcttgtaccgaggagacccacggttttatatgccagaaagggacagatccgtctctgtccccatcccccgccgctttgccacccgccccaggtacggagctttcctacctcaacgggaccttcagacttttacagaagccgctgcggtggcatgacgctctcttgctctgcgaatcccgaaatgccagtctagcttacgttcctgatccatatacacaggccttcctgacccaggccgcaagaggccttagaactcccctgtggatcggactcgcaggtgaggaggggagtagaaggtacagctgggtgtcagaggagcccctgaattatgttggctggcaggatggggagccacagcagccaggcggttgcacatatgtggatgtcgatggtgcatggaggacaactagctgcgataccaaattgcagggcgctgtttgcggagtgagctcaggtcctcctcccccaagacgtatctcctaccacggcagctgccctcagggcttggctgattctgcttggatcccctttcgggagcactgctacagctttcatatggaactgctcctgggacacaaggaggcaagacagaggtgtcagcgcgcaggcggcgcggttctttccattctggatgagatggagaacgttttcgtgtgggagcaccttcaatcctacgaaggtcagagccgaggcgcttggctgggcatgaatttcaacccaaagggtgggaccctagtctggcaagacaacactgccgtgaattactctaactggggaccgccaggactgggcccttctatgttgtcccataacagttgctactggattcagtcgaacagtggcctgtggcgcccgggggcgtgcactaacattaccatgggagtggtttgtaagctcccccgggcagagcaatcatccttctccccatcagcccttcccgagaatccagctgctctagtggtagttctaatggcggtcctgctgctgttagctctgctcacggctgccctgattctctacagacggagacaatcgattgagcgcggcgccttcgaaggggcacgctattctcgtagttcaagttctcccaccgaagccacagaaaagaatattcttgtgagcgacatggaaatgaacgaacagcaggagtag

SEQ ID NO: 161286 - DNA, 1038 bp, Artificial Sequence
  derived and/or modified sequence
atgcccactgggcatctgggctcaccactcgctctggccctgctccctgtggccacaaaccggccggccgtacaatggtcgtgcactgctcctcagccaactagcctagccgctggcaccattggcgcagcccggcggcgacccatggcctcctccgcaaggagagctaggggctctcggcggtactcctgggtgagtgaggagcctcttaattatgtcgggtggcaagatggtgagccccagcagcctggaggctgcacatatgttgacgtggatggagcctggaggaccacctcatgcgacacaaagttgcagggcgcagtatgcggagtgtcatcaggcccccctcctcccagacgaatttcctaccatggatcttgtccccaagggctcgccgacagcgcctggattcccttccgggaacactgctacagtttccatatggaactcctgcttggccacaaagaagcaagacagaggtgccagagagctggtggtgccgtcctgtcaatcttggacgaaatggagaacgtgttcgtgtgggagcacctacaaagctacgagggtcagtcgagaggggcgtggctggggatgaacttcaatcccaaaggcggaactctggtgtggcaggacaacacggctgtgaactattctaactggggtccacctggtctgggaccaagcatgctgtcccataatagctgttactggatacagtcaaatagcgggctttggcggcctggggcctgtaccaacatcaccatgggagtggtctgtaagctgccacgggctgagcaatcatcatttagcccctccgctcttcccgaaaacccagccgctctggtcgtcgttcttatggctgtgcttctcttgttggccttgctcactgccgctctgattctatacaggaggcggcagtcaatagagagaggggcttttgagggggcacgatattcaaggagctcgtcaagtcccacagaggccaccgagaaaaacatattagttagcgatatggaaatgaacgaacaacaagagtag

SEQ ID NO: 161287 - DNA, 4440 bp, Artificial Sequence
  derived and/or modified sequence
atgggccctggccggcctgccccagccccctggcccaggcacctgctgcgctgtgtgctgctgctgggctgcctgcacctgggccggcctggggcccctggagatgctgccctgcctgagcccaacgtgttcctgatcttcagccacggcctgcagggctgcctggaggcccagggcggccaggtgcgggtgaccccagcctgcaacaccagcctgcctgcccagcgctggaagtgggtgtccaggaacagactcttcaacctgggcaccatgcagtgcctgggcaccggctggccaggcaccaacaccacagccagcctgggcatgtatgaatgtgaccgggaggccctgaacctgcgctggcactgcaggaccctgggggaccagctgagcctgctgctgggcgcccggaccagcaacatcagcaagccaggcaccctggagcggggggaccagaccaggagcggccagtggaggatctacggcagcgaggaggacctgtgtgccctgccctaccacgaggtgtacaccatccagggcaacagccacggcaagccctgcaccatccccttcaagtatgacaaccagtggttccacggctgcaccagcactggaagagaagatggccacctgtggtgtgccaccacccaggactatggcaaggatgagcgctggggcttctgccccatcaagagcaatgactgtgagaccttctgggacaaggaccagctgacagacagctgctaccagttcaacttccagagcaccctgtcctggagggaggcctgggccagctgtgagcagcagggcgctgacctgctgagcatcacagagatccacgagcagacctacatcaatggcctgctgaccggctacagcagcaccctgtggattggcctgaatgacctggacaccagcggcggctggcagtggagcgacaacagccccctgaagtacctgaactgggagagtgaccagcctgacaaccccagcgaggagaactgtggggtcatcagaacagagagcagcggcggctggcagaacagagactgcagcatcgccctgccctacgtgtgcaagaagaagcccaatgccacagctgagcccaccccaccagaccgctgggccaacgtgaaggtggagtgtgagcccagctggcagcccttccagggccactgctaccgcctgcaggccgagaagaggtcctggcaggagagcaagaaggcctgcctgcggggcggcggggacctggtgtccatccacagcatggccgagctggagttcatcaccaagcagatcaagcaggaggtggaggagctgtggattggcctgaatgacctgaagctgcagatgaactttgagtggagcgatggcagcctggtgtccttcacccactggcacccctttgagcccaacaacttccgggacagcctggaggactgtgtgaccatctggggccctgagggccgctggaatgacagcccctgcaaccagagcctgcccagcatctgcaagaaggccggccagctgagccagggcgctgctgaagaagatcatggctgcaggaagggctggacctggcacagccccagctgctactggctgggggaggaccaggtgacctacagcgaggcccggcggctgtgcacagaccacggcagccagctggtgaccatcaccaacagatttgagcaggcctttgtgagcagcctcatctacaactgggagggggagtacttctggacagccctgcaggacctgaacagcacaggcagcttcttctggctgtctggagatgaggtgatgtacacccactggaacagagaccagcccggctacagccggggcggctgtgtggccctggccactggaagtgccatgggcctgtgggaggtgaagaactgcaccagcttccgggcccgctacatctgccggcagagcctgggcacccctgtgaccccagagctgcccggccctgaccccacccccagcctgaccggcagctgcccccagggctgggccagtgacaccaagctgcgctactgctacaaggtgttcagcagcgagcggctgcaggacaagaagtcctgggtgcaggcccagggcgcctgccaggagctgggcgcccagctgctgagcctggccagctatgaggaggagcactttgtggccaacatgctgaacaagatctttggagagagcgagcctgagatccacgagcagcactggttctggattggcctgaacagaagagacccccggggcggccagagctggcgctggagcgatggagtgggcttctcctaccacaactttgacaggagcagacatgatgatgatgacatccggggctgtgctgtgctggacctggccagcctgcagtgggtggccatgcagtgtgacacccagctggactggatctgcaagatcccccggggcacagatgtgcgggagccagatgacagcccccagggccggcgggagtggctgcgcttccaggaggccgagtacaagttctttgagcaccacagcacctgggcccaggcccagaggatctgcacctggttccaggccgagctgacctctgtgcacagccaggccgagctggacttcctgagccacaacctgcagaagttcagccgggcccaggagcagcactggtggattggcctgcacaccagcgagagtgatggccgcttccgctggacagatggcagcatcatcaacttcatctcctgggcccctgggaagcccaggcctgtgggcaaggacaagaagtgtgtgtacatgacagccagccgggaggactggggagaccagcgctgcctgacagccctgccctacatctgcaagaggagcaatgtgaccaaggagacccagcccccagacctgcccaccacagccctgggcggctgccccagcgactggatccagttcctgaacaagtgcttccaggtgcagggccaggagccccagagccgggtgaagtggagcgaggcccagttcagctgtgagcagcaggaggcccagctggtgaccatcaccaaccccctggagcaggccttcatcacagccagcctgcccaacgtgacctttgacctgtggattggcctgcacgccagccagagggacttccagtgggtggagcaggagcccctgatgtatgccaactgggcccctggagagcccagcggccccagccctgcccccagcggcaacaagcccaccagctgtgctgtggtgctgcacagccccagcgcccacttcaccggccgctgggatgacaggagctgcacagaggagacccacggcttcatctgccagaagggcacagaccccagcctgagccccagccctgctgccctgcccccagcccctggaacagagctgagctacctgaatggcaccttccggctgctgcagaagcccctgcgctggcatgatgccctgctgctgtgtgagagcagaaatgccagcctggcctacgtgcctgacccctacacccaggccttcctgacccaggccgcccggggcctgcggacccccctgtggattggcctggccggggaggagggcagccgccgctacagctgggtgtctgaggagcccctgaactacgtgggctggcaggatggagagccccagcagcccggcggctgcacctacgtggatgtggatggagcctggaggaccaccagctgtgacaccaagctgcagggcgctgtgtgtggggtgagcagcggccccccaccaccccggcgcatctcctaccacggcagctgcccccagggcctggccgacagcgcctggatccccttccgggagcactgctacagcttccacatggagctgctgctgggccacaaggaggcccggcagcgctgccagagagctgggggcgctgtgctgagcatcctggatgagatggagaatgtgtttgtgtgggagcacctgcagagctatgagggccagagcagaggagcctggctgggcatgaacttcaaccccaagggcggcaccctggtgtggcaggacaacacagctgtgaactacagcaactggggccccccaggcctgggccccagcatgctgagccacaacagctgctactggatccagagcaacagcggcctgtggaggcctggggcctgcaccaacatcaccatgggcgtggtgtgcaagctgcccagggctgagcagagcagcttcagccccagcgccctgcctgagaacccagctgccctggtggtggtgctgatggctgtgctgctgctgctggccctgctgacagctgccctgatcctgtacagaagacggcagagcattgaaagaggagcctttgaaggagcccgctacagccgcagcagcagcagccccacagaggccacagagaagaacatcctggtgtctgacatggagatgaatgagcagcaggagtag

SEQ ID NO: 161288 - DNA, 1038 bp, Artificial Sequence
  derived and/or modified sequence
atgcccaccggccacctgggcagccccctggccctggccctgctgcctgtggccaccaacagacctgctgtgcagtggagctgcacagccccccagcccaccagcctggccgccggcaccatcggggccgcccggcggcggcccatggccagcagcgcccggcgggcccggggcagccgccgctacagctgggtgtctgaggagcccctgaactacgtgggctggcaggatggagagccccagcagcccggcggctgcacctacgtggatgtggatggagcctggaggaccaccagctgtgacaccaagctgcagggcgctgtgtgtggggtgagcagcggccccccaccaccccggcgcatctcctaccacggcagctgcccccagggcctggccgacagcgcctggatccccttccgggagcactgctacagcttccacatggagctgctgctgggccacaaggaggcccggcagcgctgccagagagctgggggcgctgtgctgagcatcctggatgagatggagaatgtgtttgtgtgggagcacctgcagagctatgagggccagagcagaggagcctggctgggcatgaacttcaaccccaagggcggcaccctggtgtggcaggacaacacagctgtgaactacagcaactggggccccccaggcctgggccccagcatgctgagccacaacagctgctactggatccagagcaacagcggcctgtggaggcctggggcctgcaccaacatcaccatgggcgtggtgtgcaagctgcccagggctgagcagagcagcttcagccccagcgccctgcctgagaacccagctgccctggtggtggtgctgatggctgtgctgctgctgctggccctgctgacagctgccctgatcctgtacagaagacggcagagcattgaaagaggagcctttgaaggagcccgctacagccgcagcagcagcagccccacagaggccacagagaagaacatcctggtgtctgacatggagatgaatgagcagcaggagtag

SEQ ID NO: 161289 - DNA, 5983 bp, Artificial Sequence
  derived and/or modified sequence
gaaggcgaggcggggagagactgggaaacagagcagcaagagaaagggcgcacgctggggtcctcctggacccggcgtgtcctcctctccgccacccctttctctccctcccgacgctctagccccagacccgcgcctcctccccttcccctcccacgctgcccacttcccttcccctctacccctcgaaccctcctccccggttctgcgctcctccctccgccctccctccgcccgggctgcctcctccctcctcctccccgggaggcatcacttcgtcccgacccggaggaggacgcgagccccttgcgggcggtcatcacagcccagcctcggggctgccacagcgcgttgcgcctgtgcgccctcggtccccgcgtccactgagcgccgcgctcggggatggggcccggccggccggcccccgcgccctggcctcgtcacctgctgcgctgcgtcctgctcctcgggtgcctgcacctcggccgtcccggcgcccctggggacgccgccctcccggaacccaacgtcttcctcatcttcagccatggactgcagggctgcctggaggcccagggcgggcaggtcagagtcaccccggcttgcaataccagcctccctgcccagcgctggaagtgggtctcccgaaaccggctattcaacctgggtaccatgcagtgcctgggcacaggctggccaggcaccaacaccacggcctccctgggcatgtatgagtgtgaccgggaagcactgaatcttcgctggcattgtcgtacactgggtgaccagctgtccttgctcctgggggcccgcaccagcaacatatccaagcctggcacccttgagcgtggtgaccagacccgcagtggccagtggcgcatctacggcagcgaggaggacctatgtgctctgccctaccacgaggtctacaccatccagggaaactcccacggaaagccgtgcaccatccccttcaaatatgacaaccagtggttccacggctgcaccagcacgggccgcgaggatggtcacctgtggtgtgccaccacccaggactacggcaaagacgagcgctggggcttctgccccatcaagagtaacgactgcgagaccttctgggacaaggaccagctgactgacagctgctaccagtttaacttccagtccacgctgtcgtggagggaggcctgggccagctgcgagcagcagggtgcggatctgctgagcatcacggagatccacgagcagacctacatcaacggcctcctcactgggtacagctccaccctgtggatcggcttgaatgacttggacacgagcggaggctggcagtggtcggacaactcgcccctcaagtacctcaactgggagagtgaccagccggacaaccccagtgaggagaactgtggagtgatccgcactgagtcctcgggcggctggcagaaccgtgactgcagcatcgcgctgccctatgtgtgcaagaagaagcccaacgccacggccgagcccacccctccagacaggtgggccaatgtgaaggtggagtgcgagccgagctggcagcccttccagggccactgctaccgcctgcaggccgagaagcgcagctggcaggagtccaagaaggcatgtctacggggcggtggcgacctggtcagcatccacagcatggcggagctggaattcatcaccaagcagatcaagcaagaggtggaggagctgtggatcggcctcaacgatttgaaactgcagatgaattttgagtggtctgacgggagccttgtgagcttcacccactggcacccctttgagcccaacaacttccgggacagtctggaggactgtgtcaccatctggggcccggaaggccgctggaacgacagtccctgtaaccagtccttgccatccatctgcaagaaggcaggccagctgagccagggggccgccgaggaggaccatggctgccggaagggttggacgtggcacagcccatcctgctactggctgggagaagaccaagtgacctacagtgaggcccggcgcctgtgcactgaccatggctctcagctggtcaccatcaccaacaggttcgagcaggccttcgtcagcagcctcatctacaactgggagggcgagtacttctggacggccctgcaggacctcaacagcaccggctccttcttctggctcagtggggatgaagtcatgtacacccactggaaccgggaccagcccgggtacagccgtgggggctgcgtggcgctggccactggcagcgccatggggctgtgggaggtgaagaactgtacctcgttccgggcccgctacatctgccggcagagcctgggcactccagtgacgccggagctgccggggccagatcccacgcccagcctcactggctcctgtccccagggctgggcctcggacaccaaactccggtattgctataaggtgttcagctcagagcggctgcaggacaagaagagctgggtccaggcccagggggcctgccaggagctgggggcccagctgctgagcctggccagctacgaggaggagcactttgtggccaacatgctcaacaagatcttcggtgaatcagaacccgagatccacgagcagcactggttctggatcggcctgaaccgtcgggatcccagagggggtcagagttggcgctggagcgacggcgtagggttctcttaccacaatttcgaccggagccggcacgacgacgacgacatccgaggctgtgcggtgctggacctggcctccctgcagtgggtggccatgcagtgcgacacacagctggactggatctgcaagatccccagaggtacggacgtgcgggagcccgacgacagccctcaaggccgacgggaatggctgcgcttccaggaggccgagtacaagttctttgagcaccactccacgtgggcgcaggcgcagcgcatctgcacgtggttccaggccgagctgacctcggtgcacagccaggcggagctagacttcctgagccacaacttgcagaagttctcccgggcccaggagcagcactggtggatcggcctgcacacctctgagagcgatgggcgcttcagatggacagatggttccattataaacttcatctcctgggcaccaggcaaacctcggcctgtcggcaaggacaagaagtgcgtgtacatgacagccagccgagaggactggggggaccagaggtgcctgacagccttgccctacatctgcaagcgcagcaacgtcaccaaagaaacgcagcccccagacctgccaactacagccctggggggctgcccctctgactggatccagttcctcaacaagtgttttcaggtccagggccaggaaccccagagccgggtgaagtggtcagaggcacagttctcctgtgaacagcaagaggcccagctggtcaccatcacaaaccccttagagcaagcattcatcacagccagcctgcccaatgtgacctttgacctttggattggcctccatgcctcgcagagggacttccagtgggtggagcaggagcctttgatgtatgccaactgggcacctggggagccctctggccctagccctgctcccagtggcaacaaaccgaccagctgtgcagtggtcctgcacagcccctcagcccacttcactggccgctgggacgatcggagctgcacggaggagacccatggcttcatctgccagaagggcacggacccctccctgagcccgtccccagcagcgctgccccccgccccgggcactgagctctcctacctcaacggcaccttccggctgcttcagaagccgctgcgctggcacgatgccctcctgctgtgtgagagccgcaatgccagcctggcctacgtgcccgacccctacacccaggccttcctcacgcaggctgcccgagggctgcgcacgccgctctggattgggctggctggcgaggagggctctcggcggtactcctgggtctcagaggagccgctgaactacgtgggctggcaggacggggagccgcagcagccggggggctgtacctacgtagatgtggacggggcctggcgcaccaccagctgtgacaccaagctgcagggggctgtgtgtggggttagcagtgggccccctcctccccgaagaataagctaccatggcagctgtccccagggactggcagactccgcgtggattcccttccgggagcactgctattctttccacatggagctgctgctgggccacaaggaggcgcgacagcgctgccagagagcgggtggggccgtcctgtctatcctggatgagatggagaatgtgtttgtctgggagcacctgcagagctatgagggccagagtcggggcgcctggctgggcatgaacttcaaccccaaaggaggcactctggtctggcaggacaacacagctgtgaactactccaactgggggcccccgggcttgggccccagcatgctgagccacaacagctgctactggattcagagcaacagcgggctatggcgccccggcgcttgcaccaacatcaccatgggtgtcgtctgcaagcttcctcgtgctgagcagagcagcttctccccatcagcgcttccagagaacccagcggccctggtggtggtgctgatggcggtgctgctgctcctggccttgctgaccgcagccctcatcctttaccggaggcgccagagcatcgagcgcggggcctttgagggtgcccgctacagccgcagcagctccagccccaccgaggccactgagaagaacatcctggtgtcagacatggaaatgaatgagcaacaagaatagagccaggcgcgtgggcagggccagggcgggaggagctggggagctggggccctgggtcagtctggccccccaccagctgcctgtccagttggcctatggaagggtgcccttgggagtcgctgttgggagccggagctgggcagagcctgggctggtggggtgccaccctcccacaagggctgggctgagacccagctgagtgcagcgtggcgtttccctttctgggggggcctgaggtcttgtcacctggtcctgtgcccccacaggaaccagaggtaggatgggagggggaacgagagcctctttctccccagagcccccggcccaggcctgttgatccgcgccccaggacccccttctttgcagagcccgaggagcctcccctgtcccctcgggcagatctgttgtgtctctcttcccacctggcagcctcagctctgtgcccctcaccctgctccctctcgccccttctctcccaccccttccttctgagccgggccctggggattggggagccctcttgttcctgatgagggtcagctgagggggctgagcatccatcactcctgtgcctgctggggtggctgtggggcgtggcaggaggggcctaggtgggttgggcctgagaaccagggcacgggtgtggtgtctgctgggctggagataagactggggagagacaccccaacctcccagggtgggagctgggccgggctgggatgtcatctcctgccgggcgggggagggctctgcccctggaagagtcccctgtggggaccaaaataagttccctaacatctccagctcctggctctggtttggagcaaggggaagggttgccagagtcctgggggccccagaggagcaggagtctgggagggcccagagttcaccctctagtggatccaggaggagcagcacccgagccctggagtggcccagtacccttccaagaggccacagtcccagccaggacaaagtatgcggcccatcctggtgcgacagcgtgggacaatgtgaacatggactcgaagacatggccctttctctgtagttgattttttaaatgtgccattattgtttttaaaaaaaaaggaaaaaagaaaagcaaacaaataaaacacctttaagaggcttgaaa

SEQ ID NO: 161290 - DNA, 3201 bp, Artificial Sequence
  derived and/or modified sequence
atatgatgatccgggggcctctttgtatttggtgcctacttaccatgtactggggggcttgaggcaggaaggaccaggagcacctgggactcagaatttgagcttgtctttttgcccttgggcttcctgccctggagtcctcaggcttcttttctggagcagcaagtgtccagggacagctggggccttatctagaggcaccaggtccttgggtctttgactgccctgagctcagtagctccacccctcagcctacagccactaaaccccagaacctgggcccttccctgcccccattcctgcggccttcattgctgcatccggtggaggcccagctgggggccggtgctggagttacctctgctccatgccattgcagatggacagatggttccattataaacttcatctcctgggcaccaggcaaacctcggcctgtcggcaaggacaagaagtgcgtgtacatgacagccagccgaggctagactcagcgaggggtggacctgtctccatggtccagaagacttgaattcggagctggacacaggccctgagcctctgcccagactcctctcagggcatgaggctgagtgtgctgccagccatgccctgccctgctctgccctgggggtgactgccctcccctcccctttccgcagaggactggggggaccagaggtgcctgacagccttgccctacatctgcaagcgcagcaacgtcaccaaagaaacgcagcccccagacctgccaactacagccctggggggctgcccctctgactggatccagttcctcaacaagtgttttcaggtccagggccaggaaccccagagccgggtgaagtggtcagaggcacagttctcctgtgaacagcaagaggcccagctggtcaccatcacaaaccccttagagcaagcattcatcacagccagcctgcccaatgtgacctttgacctttggattggcctccatgcctcgcagagggacttccagtgggtggagcaggagcctttgatgtatgccaactgggcacctggggagccctctggccctagccctgctcccagtggcaacaaaccgaccagctgtgcagtggtcctgcacagcccctcagcccacttcactggccgctgggacgatcggagctgcacggaggagacccatggcttcatctgccagaagggcacggggctctcggcggtactcctgggtctcagaggagccgctgaactacgtgggctggcaggacggggagccgcagcagccggggggctgtacctacgtagatgtggacggggcctggcgcaccaccagctgtgacaccaagctgcagggggctgtgtgtggggttagcagtgggccccctcctccccgaagaataagctaccatggcagctgtccccagggactggcagactccgcgtggattcccttccgggagcactgctattctttccacatggagctgctgctgggccacaaggaggcgcgacagcgctgccagagagcgggtggggccgtcctgtctatcctggatgagatggagaatgtgtttgtctgggagcacctgcagagctatgagggccagagtcggggcgcctggctgggcatgaacttcaaccccaaaggaggcactctggtctggcaggacaacacagctgtgaactactccaactgggggcccccgggcttgggccccagcatgctgagccacaacagctgctactggattcagagcaacagcgggctatggcgccccggcgcttgcaccaacatcaccatgggtgtcgtctgcaagcttcctcgtgctgagcagagcagcttctccccatcagcgcttccagagaacccagcggccctggtggtggtgctgatggcggtgctgctgctcctggccttgctgaccgcagccctcatcctttaccggaggcgccagagcatcgagcgcggggcctttgagggtgcccgctacagccgcagcagctccagccccaccgaggccactgagaagaacatcctggtgtcagacatggaaatgaatgagcaacaagaatagagccaggcgcgtgggcagggccagggcgggaggagctggggagctggggccctgggtcagtctggccccccaccagctgcctgtccagttggcctatggaagggtgcccttgggagtcgctgttgggagccggagctgggcagagcctgggctggtggggtgccaccctcccacaagggctgggctgagacccagctgagtgcagcgtggcgtttccctttctgggggggcctgaggtcttgtcacctggtcctgtgcccccacaggaaccagaggtaggatgggagggggaacgagagcctctttctccccagagcccccggcccaggcctgttgatccgcgccccaggacccccttctttgcagagcccgaggagcctcccctgtcccctcgggcagatctgttgtgtctctcttcccacctggcagcctcagctctgtgcccctcaccctgctccctctcgccccttctctcccaccccttccttctgagccgggccctggggattggggagccctcttgttcctgatgagggtcagctgagggggctgagcatccatcactcctgtgcctgctggggtggctgtggggcgtggcaggaggggcctaggtgggttgggcctgagaaccagggcacgggtgtggtgtctgctgggctggagataagactggggagagacaccccaacctcccagggtgggagctgggccgggctgggatgtcatctcctgccgggcgggggagggctctgcccctggaagagtcccctgtggggaccaaaataagttccctaacatctccagctcctggctctggtttggagcaaggggaagggttgccagagtcctgggggccccagaggagcaggagtctgggagggcccagagttcaccctctagtggatccaggaggagcagcacccgagccctggagtggcccagtacccttccaagaggccacagtcccagccaggacaaagtatgcggcccatcctggtgcgacagcgtgggacaatgtgaacatggactcgaagacatggccctttctctgtagttgattttttaaatgtgccattattgtttttaaaaaaaaaggaaaaaagaaaagcaaacaaataaaacacctttaagaggcttgaaagag

SEQ ID NO: 161291 - DNA, 4440 bp, Artificial Sequence
  derived and/or modified sequence
atgggccccggccggcccgcccccgccccctggccccggcacctgctgcgctgcgttttgctcctgggctgtctccatctggggagacctggagctcctggggatgccgcactgcccgaaccaaacgtgttcctaatattctcccacgggctgcagggctgcctcgaggcccaaggaggccaggtacgggtgacaccagcctgcaatacaagcctccccgcccagagatggaaatgggtctcacggaaccggcttttcaacctaggaacgatgcagtgcttagggactggctggccaggaaccaatacgacagcctcattgggcatgtatgagtgcgatcgcgaagcactcaacctacggtggcactgtagaactctgggcgaccaattaagcctcctgctgggcgccagaacttcgaatatttcaaagcccggaaccttggagagaggagatcaaacacgaagtggccaatggagaatttacggatccgaggaggacctctgcgccttaccataccacgaagtctatacgatccagggtaattcgcacgggaaaccatgtacgatacccttcaaatacgataaccaatggttccacgggtgcacatctaccgggagagaggatggccacctttggtgtgcaaccacccaggattacggcaaggatgagagatggggattctgtcccataaagtccaatgactgcgagacgttttgggacaaggaccagctgaccgattcctgttatcagtttaacttccaatccactctgtcatggagagaggcgtgggctagttgcgagcagcagggcgccgatctgctttcaatcacagagatacacgagcagacctatataaatggtctgcttactggttatagttcgacactgtggatcgggctgaacgacctcgatactagcggcgggtggcagtggtctgacaattcccccttgaagtacctaaactgggagtctgatcagccagacaacccatcggaggaaaattgcggagttatccgcacggaatccagtggcgggtggcaaaatcgggactgctctatcgcgcttccatacgtctgtaaaaagaagcccaatgccactgccgagccaacaccgcctgataggtgggccaacgtcaaggttgagtgcgaacccagctggcagcctttccagggccactgttatcgccttcaagcagagaagagaagctggcaggagagtaaaaaggcctgtcttagaggcgggggcgacttggtttctattcacagcatggcggaacttgagtttattaccaagcagatcaagcaggaggtcgaggaactgtggatcgggctgaatgacctcaaactgcagatgaactttgagtggtccgacggttctctggtgagttttactcattggcatcccttcgaaccgaataattttcgcgacagtctggaagactgcgtgactatctggggcccagaggggagatggaatgactccccctgtaaccaaagcctgcccagtatctgtaagaaggctggccagcttagccaaggcgcggcagaagaggatcacgggtgtaggaagggttggacctggcattccccctcctgctactggctgggagaggaccaagtcacgtacagtgaggcgcgccggctctgcaccgaccatggaagtcaactggtgaccatcacaaatcgtttcgaacaggccttcgtcagctcactcatctacaattgggaaggcgaatacttctggaccgctctgcaggatttgaacagcacaggatcctttttctggctctcaggtgacgaagtcatgtacacacactggaatcgcgaccaacccggatactctcggggcggatgcgtagctttggctaccggaagcgccatggggctctgggaggtgaagaattgtacctcctttagggctcgatatatctgtaggcagtctctaggtactccggtcaccccagagctgcccgggccagatccgacaccttctctgacgggatcttgcccacagggctgggcctccgacacaaagctgagatattgctacaaagtctttagttctgagaggctgcaggataagaaatcttgggtgcaggcccagggagcatgccaggagctcggggcgcagctgctgagcctcgctagttacgaagaggagcactttgttgccaatatgcttaataaaatcttcggagaatctgaaccagaaattcatgaacagcactggttctggatcggactgaatcggcgggaccctcggggcggtcaatcttggcgctggtcagatggggtcggatttagttatcataattttgaccggtcacggcatgacgacgatgacataaggggatgcgccgtgctggaccttgcctctctccagtgggtcgctatgcaatgtgacacccagctggattggatttgtaaaatcccacggggaaccgacgtgagagaacccgacgattctccacaggggcgccgggagtggctgcgcttccaagaggctgagtacaaattcttcgaacaccattctacctgggcgcaagcccagagaatctgtacatggttccaggccgaactgaccagtgtgcactcacaggcggagctggacttcctcagtcacaacctacagaagttctcgagagcccaagaacaacactggtggatcggcttacacacctccgagtctgacggcagattccgctggaccgacgggtcaatcattaactttatctcctgggctcccgggaaaccaagacccgtgggtaaagacaaaaagtgtgtgtatatgacagcatccagagaagactggggagatcaacgctgtttaactgcactcccatatatctgcaagaggagcaacgttacaaaggaaacacaacctcctgatttgcctactaccgccttgggcggctgcccctctgattggatccagtttttgaacaaatgcttccaggtccaaggtcaggagccccagagtcgggtgaagtggtccgaagcacagtttagttgtgagcagcaagaagctcagttggtgactattaccaatcctcttgaacaggcatttatcactgccagcctgcccaacgtcacatttgacctctggattggcctgcacgcctctcaaagggactttcagtgggtggaacaggagcccttaatgtacgctaactgggcacctggcgagcctagcggcccgtctcccgcccctagcggcaacaaacccacaagttgcgccgtagtgctgcacagcccaagtgctcattttactgggaggtgggacgacagaagttgtacagaagaaacccacggcttcatctgccagaagggtacagacccctcactgagtccgtctccggcagcactgcctcctgcccctggtaccgagctctcttacctgaacgggacctttcggttgttacagaaaccacttcggtggcatgatgccctgctcctgtgtgagtctcggaatgcttctctggcatacgtgccagatccctatacgcaagcttttctaacacaggccgcccgaggcctgcgcacacccctctggatcggtctggcaggcgaggaaggcagccgccgttacagttgggtgagcgaggaacccctgaactacgttggttggcaggatggtgagccacagcagcctggtggatgcacttatgtcgacgtagatggtgcttggcggaccaccagctgtgatacaaaactgcagggcgcggtctgcggcgtctctagtggaccccctccgcctcgccggatttcataccacgggagctgtcctcagggcctcgccgattcggcatggatcccgtttagagagcattgctattcgtttcacatggagctgctgctgggtcacaaggaggccaggcagcggtgccagcgcgccgggggcgcagtgctgtcaattctggatgagatggaaaatgtgtttgtgtgggaacaccttcagtcatacgaagggcagagtaggggagcctggctgggcatgaatttcaaccccaagggggggactctcgtctggcaggacaatactgccgttaattatagtaactggggtccccccgggctgggaccatctatgctgagccataacagctgctactggatccagagcaactcgggcttgtggcgccccggtgcatgcaccaatatcaccatgggagtagtatgtaaattgcctagggcagagcagtcatcattttctccgtccgcccttccggagaatcctgcggcacttgtggtggtccttatggccgtgctcctcctactagccctgttaaccgctgcactcatactgtatagacggcggcagagcattgagcgcggcgcttttgaaggcgccaggtacagccggagttcctcctcccctacagaggctacggagaagaatattctagtgtccgatatggaaatgaacgagcagcaggaatag

SEQ ID NO: 161292 - DNA, 1038 bp, Artificial Sequence
  derived and/or modified sequence
atgcccaccggccacctgggcagccccctggccctggccctgctgcctgttgccaccaaccggcccgcagttcaatggtcatgtactgccccccagcctacatccctcgccgccggcaccatcggcgccgcacgaaggaggcctatggcctccagcgcccgccgggcaagaggcagccgtaggtattcctgggtctcagaggagcccctaaactatgtgggatggcaggacggcgagccccagcagccaggcggctgtacctatgtcgatgtcgacggagcctggaggacgaccagctgcgacaccaaacttcagggagccgtttgcggagtatcaagcggtcccccacctccgagaagaatctcatatcacggctcctgtccccaaggtttagccgactctgcctggatcccctttagggagcactgctactcttttcacatggagctgctgctgggtcacaaggaagctcggcaaagatgtcagagagctggaggggctgtgttgtcaatcctcgatgagatggagaacgtatttgtgtgggaacatctgcaatcctacgagggccagagccgtggtgcgtggctcggtatgaactttaaccccaagggcggaaccctcgtgtggcaggacaacacagcagttaattactcaaactgggggccacccggattaggtcccagcatgcttagccacaacagttgctactggatacagagcaacagcggtctctggcggcccggcgcttgcaccaatattacgatgggcgttgtgtgcaagcttcctagggccgaacaaagcagtttcagccctagcgcactacccgagaaccctgccgcgctggtggtagtgttaatggccgtcttgttactactggctctccttaccgcagctctcattttatatcggagaaggcagtcaatagagagaggggccttcgaaggagcccgctattcccgctcaagctcttctcccactgaggcaaccgagaaaaacatcttggtgtctgacatggaaatgaacgaacaacaggagtag

SEQ ID NO: 161293 - DNA, 4440 bp, Artificial Sequence
  derived and/or modified sequence
atgggtccaggtcggcctgctcctgcgccatggccacgccacctgctcagatgcgtcttgctcctgggctgcctgcatctgggtagaccaggcgcacccggagacgcagcattgcctgaacctaacgtttttctaattttttctcacggattgcaggggtgcctcgaagctcaaggcggacaagtgagggtaaccccagcctgcaacactagtttgcctgctcagcggtggaaatgggtctcaaggaatagattatttaacctgggcaccatgcagtgtctaggtaccggctggcccggaaccaatactaccgcgtccctcggcatgtacgaatgtgacagagaagcgctgaacttgaggtggcactgccggactcttggggaccagctgtcattactgctgggggctaggacttctaatatctccaagcctggtacattagagcgaggcgatcagacaaggagcggacagtggagaatttatgggagcgaagaagatctctgcgcactcccttaccatgaggtgtacaccattcagggcaactctcacggaaagccgtgcacaatcccctttaagtatgataatcaatggttccacggctgcacgagtaccgggagggaagatgggcacctctggtgcgcaaccacccaggactatggcaaggacgagaggtggggattctgtcctataaagagtaacgactgtgagaccttttgggacaaagaccaacttaccgatagctgctaccagttcaactttcagtctaccctcagttggagggaagcatgggccagttgtgaacagcagggagctgaccttctgagtatcaccgaaatacacgaacagacctacataaatggcttgttaactggctactccagtacgctgtggataggattaaacgacctggatacatccggtggctggcagtggtcggacaattctcctttgaaatacctgaattgggaatcggatcagcccgataatccatcagaggaaaactgtggcgtgattcgcactgagtcttctgggggatggcagaatagggattgttccattgctttgccctacgtttgcaagaagaagccaaacgcgacagccgagcctacgccacccgaccgatgggcaaatgtcaaggtggagtgcgaaccatcttggcagccttttcagggccactgctaccggctccaggcagagaagaggagctggcaagagagcaagaaagcctgtttgaggggtggcggagacctcgtttcgatccacagcatggcagagctggagttcattacaaaacaaattaagcaggaggtggaggagctttggatcggcctgaacgacctcaagctccaaatgaacttcgagtggtcagatggttctctcgtatcctttacacactggcatcctttcgaacctaataacttcagagattcgcttgaggactgtgtaacaatctggggacccgaagggcgatggaacgattccccctgtaaccagtcgctccccagcatctgcaagaaagcgggacaactgtctcagggagcagctgaagaagaccatgggtgccggaagggctggacgtggcacagccccagttgctattggctgggggaagatcaggtgacatattccgaagctcgcagactctgtaccgaccacggatcgcagctggtgaccattaccaatcgatttgagcaagcattcgtaagctcactgatctataattgggagggcgagtatttctggactgccctgcaggacttaaatagcaccggctcattcttctggctttctggtgatgaggttatgtacactcactggaacagggatcagccagggtattcacggggaggctgcgtagccctcgctacaggatccgcgatggggctttgggaggtaaaaaactgtacttcattccgcgctcggtacatctgtaggcagtctctcgggacccctgtgacccccgagcttcctggacctgaccctactccatcgcttaccggaagctgccctcagggctgggccagtgatacgaagctacgttactgttacaaggttttctctagtgaacgtctccaggacaaaaagtcttgggtgcaggcacaaggtgcttgtcaagaattgggagcgcaactgctgtctctcgcttcgtacgaggaggagcactttgtggctaatatgctgaataaaatcttcggagaatccgagcctgaaatccatgaacaacattggttctggattggcttgaatagacgagaccctcgcggaggccaaagttggcgctggtcggacggcgtgggcttctcctatcataacttcgatagatcacgacatgacgacgatgatatccgcggatgcgccgtgttggacttagccagcctccagtgggtggccatgcagtgcgatacgcagctggactggatctgcaagatcccaaggggaactgatgtacgagagcctgatgattcacctcagggtaggagggaatggttacgttttcaggaggccgagtacaagttctttgaacaccacagtacctgggctcaggcccagcgcatctgcacttggtttcaggcggaattgactagcgtgcattcccaagctgagttggattttctctctcacaacctacagaaattctcccgggctcaggaacagcattggtggattggtcttcacaccagcgagagcgacgggcgttttagatggaccgacggctcaataataaattttattagctgggctcccggaaagccacgtccggttgggaaagataaaaaatgtgtgtacatgacagcatccagagaagactggggagatcagaggtgcctgaccgccctgccatacatctgcaagcgttctaatgttacaaaagagacgcaaccaccggatcttcctaccacagccttgggcggatgcccatctgactggatccagttcctcaataagtgttttcaagtgcaaggccaagaaccccagtctcgagtgaagtggtccgaggcacagtttagttgcgagcagcaggaggcgcagcttgtcacgattactaatccacttgagcaagccttcattacggcctcactgcccaatgttacatttgacctgtggattggtctccatgcaagccaacgggatttccagtgggtcgaacaagagcctctgatgtacgcaaattgggcaccgggagagccctcagggcctagtcctgcaccgagcggcaacaaaccaacgagctgcgccgtcgttttgcactccccttccgcacattttacgggccgttgggacgacaggtcctgcactgaagaaacccacggcttcatttgccagaaagggacagatccctctcttagcccatcaccagccgcactgccaccagcccctggaactgagttatcatacctgaatggtacattccgcttactccaaaaacccctaaggtggcacgatgctctgttgctttgcgagagtaggaacgcgtcgcttgcatacgttcctgacccatacacacaagcttttctcacccaagctgcacggggacttcgaacccctctgtggatcgggctggccggtgaagagggatcacggaggtacagctgggtgagcgaagaacctcttaattatgtcggctggcaagatggagagcctcagcagccagggggatgtacctacgtggacgtagatggagcctggcgaactacctcctgcgataccaagctgcagggggctgtgtgtggagtatccagtggtcctccacctccaagacgtatttcctatcatggaagttgtccgcaggggcttgctgactcagcctggatcccttttagggagcactgttactcattccatatggagctgttgcttgggcacaaggaagcacgccagcggtgtcaacgggcaggaggtgccgttctgtccatacttgacgaaatggaaaacgtgtttgtgtgggagcatttacagtcctacgagggccaaagcagaggagcgtggcttggaatgaactttaatccaaaaggtggtactctggtgtggcaggacaatacagcagtaaattactctaactggggcccacccggtctcgggccaagcatgctgagtcacaactcatgttactggattcaaagcaactctggtctgtggagacctggagcctgcactaacattacaatgggtgtggtgtgtaagctcccacgagctgagcaaagttccttctcccctagcgcactgcctgagaatccagccgctttggtagtggtactcatggccgtgctattgttgcttgctttgcttacagctgccctgatactctaccgacggcgtcagtccattgaacgcggtgctttcgagggggctagatacagtcgtagcagttcctctcctaccgaggcaacggaaaagaacatactggtgagcgacatggagatgaatgagcagcaggagtag

SEQ ID NO: 161294 - DNA, 1038 bp, Artificial Sequence
  derived and/or modified sequence
atgcccacaggccacctggggtctcccctggctctggcccttctccctgtggctacaaaccggccagcggtccagtggagctgcacagccccacagcctaccagcttagccgcagggacaatcggcgcagcaagaagacggcctatggccagcagtgccaggcgggctcgcggtagccgtagatactcatgggtttctgaagagccgctaaactacgtcggatggcaagacggagagcctcaacaacccggaggttgcacctacgttgacgtcgacggtgcatggcggaccacatcgtgtgataccaagctgcaaggggcagtgtgcggggtgagctccggccctcctccccctagaaggatcagctatcatggcagctgtccccaaggtcttgcagactcggcttggattcctttcagagagcactgctatagctttcacatggagctacttttgggccataaggaggccaggcagagatgtcagagagctggaggtgccgtcctgagtattttggacgagatggagaatgtattcgtttgggagcatctgcagagctacgaggggcaaagccgtggggcttggctgggaatgaatttcaatcctaagggcggtaccttagtgtggcaagataatacggcagtgaattattctaattgggggccacccggtttgggtccctctatgctgagccacaattcttgttattggatccagagcaattctggtctgtggaggccaggggcatgtaccaacatcaccatgggcgtggtgtgcaaattaccaagggcagaacagtcctccttcagccctagcgcattgccagagaaccctgccgctcttgtggttgtgctgatggctgttcttctgttgctcgcacttctgacagccgctctaatcttatacagacgcaggcagagtattgagaggggggctttcgaaggagcgcgatattctagatctagctcttcgcctacagaggccaccgagaagaacattttagtctccgatatggagatgaacgagcagcaggagtag

SEQ ID NO: 161295 - DNA, 4440 bp, Artificial Sequence
  derived and/or modified sequence
atgggccccggcagacccgcccccgccccctggcccagacacctgctgagatgcgtgctgctgctgggctgcctgcacctgggcagacccggcgcccccggcgacgccgccctgcccgagcccaacgtgttcctgatcttcagccacggcctgcagggctgcctggaggcccagggcggccaggtgagagtgacccccgcctgcaacaccagcctgcccgcccagagatggaagtgggtgagcagaaacagactgttcaacctgggcaccatgcagtgcctgggcaccggctggcccggcaccaacaccaccgccagcctgggcatgtacgagtgcgacagagaggccctgaacctgagatggcactgcagaaccctgggcgaccagctgagcctgctgctgggcgccagaaccagcaacatcagcaagcccggcaccctggagagaggcgaccagaccagaagcggccagtggagaatctacggcagcgaggaggacctgtgcgccctgccctaccacgaggtgtacaccatccagggcaacagccacggcaagccctgcaccatccccttcaagtacgacaaccagtggttccacggctgcaccagcaccggcagagaggacggccacctgtggtgcgccaccacccaggactacggcaaggacgagagatggggcttctgccccatcaagagcaacgactgcgagaccttctgggacaaggaccagctgaccgacagctgctaccagttcaacttccagagcaccctgagctggagagaggcctgggccagctgcgagcagcagggcgccgacctgctgagcatcaccgagatccacgagcagacctacatcaacggcctgctgaccggctacagcagcaccctgtggatcggcctgaacgacctggacaccagcggcggctggcagtggagcgacaacagccccctgaagtacctgaactgggagagcgaccagcccgacaaccccagcgaggagaactgcggcgtgatcagaaccgagagcagcggcggctggcagaacagagactgcagcatcgccctgccctacgtgtgcaagaagaagcccaacgccaccgccgagcccaccccccccgacagatgggccaacgtgaaggtggagtgcgagcccagctggcagcccttccagggccactgctacagactgcaggccgagaagagaagctggcaggagagcaagaaggcctgcctgagaggcggcggcgacctggtgagcatccacagcatggccgagctggagttcatcaccaagcagatcaagcaggaggtggaggagctgtggatcggcctgaacgacctgaagctgcagatgaacttcgagtggagcgacggcagcctggtgagcttcacccactggcaccccttcgagcccaacaacttcagagacagcctggaggactgcgtgaccatctggggccccgagggcagatggaacgacagcccctgcaaccagagcctgcccagcatctgcaagaaggccggccagctgagccagggcgccgccgaggaggaccacggctgcagaaagggctggacctggcacagccccagctgctactggctgggcgaggaccaggtgacctacagcgaggccagaagactgtgcaccgaccacggcagccagctggtgaccatcaccaacagattcgagcaggccttcgtgagcagcctgatctacaactgggagggcgagtacttctggaccgccctgcaggacctgaacagcaccggcagcttcttctggctgagcggcgacgaggtgatgtacacccactggaacagagaccagcccggctacagcagaggcggctgcgtggccctggccaccggcagcgccatgggcctgtgggaggtgaagaactgcaccagcttcagagccagatacatctgcagacagagcctgggcacccccgtgacccccgagctgcccggccccgaccccacccccagcctgaccggcagctgcccccagggctgggccagcgacaccaagctgagatactgctacaaggtgttcagcagcgagagactgcaggacaagaagagctgggtgcaggcccagggcgcctgccaggagctgggcgcccagctgctgagcctggccagctacgaggaggagcacttcgtggccaacatgctgaacaagatcttcggcgagagcgagcccgagatccacgagcagcactggttctggatcggcctgaacagaagagaccccagaggcggccagagctggagatggagcgacggcgtgggcttcagctaccacaacttcgacagaagcagacacgacgacgacgacatcagaggctgcgccgtgctggacctggccagcctgcagtgggtggccatgcagtgcgacacccagctggactggatctgcaagatccccagaggcaccgacgtgagagagcccgacgacagcccccagggcagaagagagtggctgagattccaggaggccgagtacaagttcttcgagcaccacagcacctgggcccaggcccagagaatctgcacctggttccaggccgagctgaccagcgtgcacagccaggccgagctggacttcctgagccacaacctgcagaagttcagcagagcccaggagcagcactggtggatcggcctgcacaccagcgagagcgacggcagattcagatggaccgacggcagcatcatcaacttcatcagctgggcccccggcaagcccagacccgtgggcaaggacaagaagtgcgtgtacatgaccgccagcagagaggactggggcgaccagagatgcctgaccgccctgccctacatctgcaagagaagcaacgtgaccaaggagacccagccccccgacctgcccaccaccgccctgggcggctgccccagcgactggatccagttcctgaacaagtgcttccaggtgcagggccaggagccccagagcagagtgaagtggagcgaggcccagttcagctgcgagcagcaggaggcccagctggtgaccatcaccaaccccctggagcaggccttcatcaccgccagcctgcccaacgtgaccttcgacctgtggatcggcctgcacgccagccagagagacttccagtgggtggagcaggagcccctgatgtacgccaactgggcccccggcgagcccagcggccccagccccgcccccagcggcaacaagcccaccagctgcgccgtggtgctgcacagccccagcgcccacttcaccggcagatgggacgacagaagctgcaccgaggagacccacggcttcatctgccagaagggcaccgaccccagcctgagccccagccccgccgccctgccccccgcccccggcaccgagctgagctacctgaacggcaccttcagactgctgcagaagcccctgagatggcacgacgccctgctgctgtgcgagagcagaaacgccagcctggcctacgtgcccgacccctacacccaggccttcctgacccaggccgccagaggcctgagaacccccctgtggatcggcctggccggcgaggagggcagcagaagatacagctgggtgagcgaggagcccctgaactacgtgggctggcaggacggcgagccccagcagcccggcggctgcacctacgtggacgtggacggcgcctggagaaccaccagctgcgacaccaagctgcagggcgccgtgtgcggcgtgagcagcggcccccccccccccagaagaatcagctaccacggcagctgcccccagggcctggccgacagcgcctggatccccttcagagagcactgctacagcttccacatggagctgctgctgggccacaaggaggccagacagagatgccagagagccggcggcgccgtgctgagcatcctggacgagatggagaacgtgttcgtgtgggagcacctgcagagctacgagggccagagcagaggcgcctggctgggcatgaacttcaaccccaagggcggcaccctggtgtggcaggacaacaccgccgtgaactacagcaactggggcccccccggcctgggccccagcatgctgagccacaacagctgctactggatccagagcaacagcggcctgtggagacccggcgcctgcaccaacatcaccatgggcgtggtgtgcaagctgcccagagccgagcagagcagcttcagccccagcgccctgcccgagaaccccgccgccctggtggtggtgctgatggccgtgctgctgctgctggccctgctgaccgccgccctgatcctgtacagaagaagacagagcatcgagagaggcgccttcgagggcgccagatacagcagaagcagcagcagccccaccgaggccaccgagaagaacatcctggtgagcgacatggagatgaacgagcagcaggagtag

SEQ ID NO: 161296 - DNA, 1038 bp, Artificial Sequence
  derived and/or modified sequence
atgcccaccggccacctgggcagccccctggccctggccctgctgcccgtggccaccaacagacccgccgtgcagtggagctgcaccgccccccagcccaccagcctggccgccggcaccatcggcgccgccagaagaagacccatggccagcagcgccagaagagccagaggcagcagaagatacagctgggtgagcgaggagcccctgaactacgtgggctggcaggacggcgagccccagcagcccggcggctgcacctacgtggacgtggacggcgcctggagaaccaccagctgcgacaccaagctgcagggcgccgtgtgcggcgtgagcagcggcccccccccccccagaagaatcagctaccacggcagctgcccccagggcctggccgacagcgcctggatccccttcagagagcactgctacagcttccacatggagctgctgctgggccacaaggaggccagacagagatgccagagagccggcggcgccgtgctgagcatcctggacgagatggagaacgtgttcgtgtgggagcacctgcagagctacgagggccagagcagaggcgcctggctgggcatgaacttcaaccccaagggcggcaccctggtgtggcaggacaacaccgccgtgaactacagcaactggggcccccccggcctgggccccagcatgctgagccacaacagctgctactggatccagagcaacagcggcctgtggagacccggcgcctgcaccaacatcaccatgggcgtggtgtgcaagctgcccagagccgagcagagcagcttcagccccagcgccctgcccgagaaccccgccgccctggtggtggtgctgatggccgtgctgctgctgctggccctgctgaccgccgccctgatcctgtacagaagaagacagagcatcgagagaggcgccttcgagggcgccagatacagcagaagcagcagcagccccaccgaggccaccgagaagaacatcctggtgagcgacatggagatgaacgagcagcaggagtag
